United States Patent Application Publication US 2025/0311734 A1 - sequence listing, part 6

SEQ ID NO: 24004 - protein, 478 aa, Bacillus sp. TS-23
APINETMMQYFEWDLPNDGTLWTKVKNEAANLSSLGITALWLPPAYKGTSQSDVGYGVYDLYDLGEFNQKGTIRTKYGTKTQYIRAIQAAKAAGMQVYADVVFNHKAGADGTEFVDAVEVDPSNRNQETSGTYQIQAWTKFDFPGRGNTYSSFKWRWYHFDGTDWDESRKLNRIYKFRSTGKAWDWEVDTENGNYDYLMFADLDMDHPEVVTELKNWGTWYVETTNIDGFRLDAVKHIKYSFFPDWLTYVRNQTGKNLFAVGEFWSYDVNKLHNYITKTRGSMSLFDAPLHNNFYTASKSSGYFDMRYLLNNTLMKDQPSLAVTLVDNHDTQPGQSLQSWVEPWFKPLAYAFILTRQEGYPCVFYGDYYGIPKYNIPGLKSKIDPLLIARRDYAYGTQRDYIDHQDIIGWTREGIDTKPNSGLAALITDGPGGSKWMYVGKKHAGKVFYDLTGNRSDTVTINADGWGEFKVNGGSVSI

SEQ ID NO: 24005 - protein, 478 aa, Bacillus sp. TS-23
APINETMMQYFEWDLPNDGTLWTKVKNEAANLSSLGITALWLPPAYKGTSQSDVGYGVYDLYDLGEFNQKGTIRTKYGTKTQYIEAIQAAKAAGMQVYADVVFNHKAGADGTEFVDAVEVDPSNRNQETSGTYQIQAWTKFDFPGRGNTYSSFKWRWYHFDGTDWDESRKLNRIYKFRSTGKAWDWEVDTENGNYDYLMFADLDMDHPEVVTELKNWGTWYVNTTNIDGFRLDAVKHIKYSFFPDWLTYVRNQTGKNLFAVGEFWSYDVRKLHNYITKTRGSMSLFDAPLHNNFYTASKSSGYFDMRYLLNNTLMKDQPSLAVTLVDNHDTQPGQSLQSWVEPWFKPLAYAFILTRQEGYPCVFYGDYYGIPKYNIPGLKSKIDPLLIARRDYAYGTQRDYIDHQDIIGWTREGIDTKPNSGLAALITDGPGGSKWMYVGKKHAGKVFYDLTGNRSDTVTINADGWGEFKVNGGSVSI

SEQ ID NO: 24006 - protein, 478 aa, Bacillus sp. TS-23
APINETMMQYFEWDLPNDGTLWTKVKNEAANLSSLGITALWLPPAYKGTSQSDVGYGVYDLYDLGEFNQKGTIRTKYGTKTQYIRAIQAAKAAGMQVYADVVFNHKAGADGTEFVDAVEVDPSNRNQETSGTYQIQAWTKFDFPGRGNTYSSFKWRWYHFDGTDWDESRKLNRIYKFRSTGKAWDWEVDTENGNYDYLMFADLDMDHPEVVTELKNWGTWYVNTTNIDGFRLDAVKHIKYSFFPDWLTYVRNQTGKNLFAVGEFWSYDVRKLHNYITKTNGSMSLFDAPLHNNFYTASKSSGYFDMRYLLNNTLMKDQPSLAVTLVDNHDTQPGQSLQSWVEPWFKPLAYAFILTRQEGYPCVFYGDYYGIPKYNIPGLKSKIDPLLIARRDYAYGTQRDYIDHQDIIGWTREGIDTKPNSGLAALITDGPGGSKWMYVGKKHAGKVFYDLTGNRSDTVTINADGWGEFKVNGGSVSI

SEQ ID NO: 24007 - protein, 478 aa, Bacillus sp. TS-23
APINETMMQYFEWDLPNDGTLWTKVKNEAANLSSLGITALWLPPAYKGTSQSDVGYGVYDLYDLGEFNQKGTIRTKYGTKTQYIQAIQAAKAAGMQVYADVVFNHKAGADGTEFVDAVEVDPSNRNQETSGTYQIQAWTKFDFPGRGNTYSSFKWRWYHFDGTDWDESRKLNRIYKFRSTGKAWDWEVDTENGNYDYLMFADLDMDHPEVVTELKNWGTWYVRTTNIDGFRLDAVKHIKYSFFPDWLTYVRNQTGKNLFAVGEFWSYDVEKLHNYITKTRGSMSLFDAPLHNNFYTASKSSGYFDMRYLLNNTLMKDQPSLAVTLVDNHDTQPGQSLQSWVEPWFKPLAYAFILTRQEGYPCVFYGDYYGIPKYNIPGLKSKIDPLLIARRDYAYGTQRDYIDHQDIIGWTREGIDTKPNSGLAALITDGPGGSKWMYVGKKHAGKVFYDLTGNRSDTVTINADGWGEFKVNGGSVSI

SEQ ID NO: 24008 - protein, 478 aa, Bacillus sp. TS-23
APINETMMQYFEWDLPNDGTLWTKVKNEAANLSSLGITALWLPPAYKGTSQSDVGYGVYDLYDLGEFNQKGTIRTKYGTKTQYIEAIQAAKAAGMQVYADVVFNHKAGADGTEFVDAVEVDPSNRNQETSGTYQIQAWTKFDFPGRGNTYSSFKWRWYHFDGTDWDESRKLNRIYKFRSTGKAWDWEVDTENGNYDYLMFADLDMDHPEVVTELKNWGTWYVNTTNIDGFRLDAVKHIKYSFFPDWLTYVRNQTGKNLFAVGEFWSYDVEKLHNYITKTRGSMSLFDAPLHNNFYTASKSSGYFDMRYLLNNTLMKDQPSLAVTLVDNHDTQPGQSLQSWVEPWFKPLAYAFILTRQEGYPCVFYGDYYGIPKYNIPGLKSKIDPLLIARRDYAYGTQRDYIDHQDIIGWTREGIDTKPNSGLAALITDGPGGSKWMYVGKKHAGKVFYDLTGNRSDTVTINADGWGEFKVNGGSVSI

SEQ ID NO: 24009 - protein, 478 aa, Bacillus sp. TS-23
APINETMMQYFEWDLPNDGTLWTKVKNEAANLSSLGITALWLPPAYKGTSQSDVGYGVYDLYDLGEFNQKGTIRTKYGTKTQYIEAIQAAKAAGMQVYADVVFNHKAGADGTEFVDAVEVDPSNRNQETSGTYQIQAWTKFDFPGRGNTYSSFKWRWYHFDGTDWDESRKLNRIYKFRSTGKAWDWEVDTENGNYDYLMFADLDMDHPEVVTELKNWGTWYVETTNIDGFRLDAVKHIKYSFFPDWLTYVRNQTGKNLFAVGEFWSYDVNKLHNYITKTEGSMSLFDAPLHNNFYTASKSSGYFDMRYLLNNTLMKDQPSLAVTLVDNHDTQPGQSLQSWVEPWFKPLAYAFILTRQEGYPCVFYGDYYGIPKYNIPGLKSKIDPLLIARRDYAYGTQRDYIDHQDIIGWTREGIDTKPNSGLAALITDGPGGSKWMYVGKKHAGKVFYDLTGNRSDTVTINADGWGEFKVNGGSVSI

SEQ ID NO: 24010 - protein, 478 aa, Bacillus sp. TS-23
APINETMMQYFEWDLPNDGTLWTKVKNEAANLSSLGITALWLPPAYKGTSQSDVGYGVYDLYDLGEFNQKGTIRTKYGTKTQYIEAIQAAKAAGMQVYADVVFNHKAGADGTEFVDAVEVDPSNRNQETSGTYQIQAWTKFDFPGRGNTYSSFKWRWYHFDGTDWDESRKLNRIYKFRSTGKAWDWEVDTENGNYDYLMFADLDMDHPEVVTELKNWGTWYVETTNIDGFRLDAVKHIKYSFFPDWLTYVRNQTGKNLFAVGEFWSYDVNKLHNYITKTRGSMSLFDAPLHNNFYTASKSSGYFDMRYLLNNTLMKDQPSLAVTLVDNHDTQPGQSLQSWVEPWFKPLAYAFILTRQEGYPCVFYGDYYGIPKYNIPGLKSKIDPLLIARRDYAYGTQRDYIDHQDIIGWTREGIDTKPNSGLAALITDGPGGSKWMYVGKKHAGKVFYDLTGNRSDTVTINADGWGEFKVNGGSVSI

SEQ ID NO: 24011 - protein, 478 aa, Bacillus sp. TS-23
APINETMMQYFEWDLPNDGTLWTKVKNEAANLSSLGITALWLPPAYKGTSQSDVGYGVYDLYDLGEFNQKGTIRTKYGTKTQYIQAIQAAKAAGMQVYADVVFNHKAGADGTEFVDAVEVDPSNRNQETSGTYQIQAWTKFDFPGRGNTYSSFKWRWYHFDGTDWDESRKLNRIYKFRSTGKAWDWEVDTENGNYDYLMFADLDMDHPEVVTELKNWGTWYVRTTNIDGFRLDAVKHIKYSFFPDWLTYVRNQTGKNLFAVGEFWSYDVRKLHNYITKTEGSMSLFDAPLHNNFYTASKSSGYFDMRYLLNNTLMKDQPSLAVTLVDNHDTQPGQSLQSWVEPWFKPLAYAFILTRQEGYPCVFYGDYYGIPKYNIPGLKSKIDPLLIARRDYAYGTQRDYIDHQDIIGWTREGIDTKPNSGLAALITDGPGGSKWMYVGKKHAGKVFYDLTGNRSDTVTINADGWGEFKVNGGSVSI

SEQ ID NO: 24012 - protein, 478 aa, Bacillus sp. TS-23
APINETMMQYFEWDLPNDGTLWTKVKNEAANLSSLGITALWLPPAYKGTSQSDVGYGVYDLYDLGEFNQKGTIRTKYGTKTQYIRAIQAAKAAGMQVYADVVFNHKAGADGTEFVDAVEVDPSNRNQETSGTYQIQAWTKFDFPGRGNTYSSFKWRWYHFDGTDWDESRKLNRIYKFRSTGKAWDWEVDTENGNYDYLMFADLDMDHPEVVTELKNWGTWYVRTTNIDGFRLDAVKHIKYSFFPDWLTYVRNQTGKNLFAVGEFWSYDVNKLHNYITKTRGSMSLFDAPLHNNFYTASKSSGYFDMRYLLNNTLMKDQPSLAVTLVDNHDTQPGQSLQSWVEPWFKPLAYAFILTRQEGYPCVFYGDYYGIPKYNIPGLKSKIDPLLIARRDYAYGTQRDYIDHQDIIGWTREGIDTKPNSGLAALITDGPGGSKWMYVGKKHAGKVFYDLTGNRSDTVTINADGWGEFKVNGGSVSI

SEQ ID NO: 24013 - protein, 478 aa, Bacillus sp. TS-23
APINETMMQYFEWDLPNDGTLWTKVKNEAANLSSLGITALWLPPAYKGTSQSDVGYGVYDLYDLGEFNQKGTIRTKYGTKTQYIRAIQAAKAAGMQVYADVVFNHKAGADGTEFVDAVEVDPSNRNQETSGTYQIQAWTKFDFPGRGNTYSSFKWRWYHFDGTDWDESRKLNRIYKFRSTGKAWDWEVDTENGNYDYLMFADLDMDHPEVVTELKNWGTWYVRTTNIDGFRLDAVKHIKYSFFPDWLTYVRNQTGKNLFAVGEFWSYDVNKLHNYITKTNGSMSLFDAPLHNNFYTASKSSGYFDMRYLLNNTLMKDQPSLAVTLVDNHDTQPGQSLQSWVEPWFKPLAYAFILTRQEGYPCVFYGDYYGIPKYNIPGLKSKIDPLLIARRDYAYGTQRDYIDHQDIIGWTREGIDTKPNSGLAALITDGPGGSKWMYVGKKHAGKVFYDLTGNRSDTVTINADGWGEFKVNGGSVSI

SEQ ID NO: 24014 - protein, 478 aa, Bacillus sp. TS-23
APINETMMQYFEWDLPNDGTLWTKVKNEAANLSSLGITALWLPPAYKGTSQSDVGYGVYDLYDLGEFNQKGTIRTKYGTKTQYIRAIQAAKAAGMQVYADVVFNHKAGADGTEFVDAVEVDPSNRNQETSGTYQIQAWTKFDFPGRGNTYSSFKWRWYHFDGTDWDESRKLNRIYKFRSTGKAWDWEVDTENGNYDYLMFADLDMDHPEVVTELKNWGTWYVNTTNIDGFRLDAVKHIKYSFFPDWLTYVRNQTGKNLFAVGEFWSYDVEKLHNYITKTEGSMSLFDAPLHNNFYTASKSSGYFDMRYLLNNTLMKDQPSLAVTLVDNHDTQPGQSLQSWVEPWFKPLAYAFILTRQEGYPCVFYGDYYGIPKYNIPGLKSKIDPLLIARRDYAYGTQRDYIDHQDIIGWTREGIDTKPNSGLAALITDGPGGSKWMYVGKKHAGKVFYDLTGNRSDTVTINADGWGEFKVNGGSVSI

SEQ ID NO: 24015 - protein, 478 aa, Bacillus sp. TS-23
APINETMMQYFEWDLPNDGTLWTKVKNEAANLSSLGITALWLPPAYKGTSQSDVGYGVYDLYDLGEFNQKGTIRTKYGTKTQYIEAIQAAKAAGMQVYADVVFNHKAGADGTEFVDAVEVDPSNRNQETSGTYQIQAWTKFDFPGRGNTYSSFKWRWYHFDGTDWDESRKLNRIYKFRSTGKAWDWEVDTENGNYDYLMFADLDMDHPEVVTELKNWGTWYVNTTNIDGFRLDAVKHIKYSFFPDWLTYVRNQTGKNLFAVGEFWSYDVEKLHNYITKTNGSMSLFDAPLHNNFYTASKSSGYFDMRYLLNNTLMKDQPSLAVTLVDNHDTQPGQSLQSWVEPWFKPLAYAFILTRQEGYPCVFYGDYYGIPKYNIPGLKSKIDPLLIARRDYAYGTQRDYIDHQDIIGWTREGIDTKPNSGLAALITDGPGGSKWMYVGKKHAGKVFYDLTGNRSDTVTINADGWGEFKVNGGSVSI

SEQ ID NO: 24016 - protein, 478 aa, Bacillus sp. TS-23
APINETMMQYFEWDLPNDGTLWTKVKNEAANLSSLGITALWLPPAYKGTSQSDVGYGVYDLYDLGEFNQKGTIRTKYGTKTQYIRAIQAAKAAGMQVYADVVFNHKAGADGTEFVDAVEVDPSNRNQETSGTYQIQAWTKFDFPGRGNTYSSFKWRWYHFDGTDWDESRKLNRIYKFRSTGKAWDWEVDTENGNYDYLMFADLDMDHPEVVTELKNWGTWYVNTTNIDGFRLDAVKHIKYSFFPDWLTYVRNQTGKNLFAVGEFWSYDVEKLHNYITKTNGSMSLFDAPLHNNFYTASKSSGYFDMRYLLNNTLMKDQPSLAVTLVDNHDTQPGQSLQSWVEPWFKPLAYAFILTRQEGYPCVFYGDYYGIPKYNIPGLKSKIDPLLIARRDYAYGTQRDYIDHQDIIGWTREGIDTKPNSGLAALITDGPGGSKWMYVGKKHAGKVFYDLTGNRSDTVTINADGWGEFKVNGGSVSI

SEQ ID NO: 24017 - protein, 478 aa, Bacillus sp. TS-23
APINETMMQYFEWDLPNDGTLWTKVKNEAANLSSLGITALWLPPAYKGTSQSDVGYGVYDLYDLGEFNQKGTIRTKYGTKTQYIEAIQAAKAAGMQVYADVVFNHKAGADGTEFVDAVEVDPSNRNQETSGTYQIQAWTKFDFPGRGNTYSSFKWRWYHFDGTDWDESRKLNRIYKFRSTGKAWDWEVDTENGNYDYLMFADLDMDHPEVVTELKNWGTWYVNTTNIDGFRLDAVKHIKYSFFPDWLTYVRNQTGKNLFAVGEFWSYDVRKLHNYITKTEGSMSLFDAPLHNNFYTASKSSGYFDMRYLLNNTLMKDQPSLAVTLVDNHDTQPGQSLQSWVEPWFKPLAYAFILTRQEGYPCVFYGDYYGIPKYNIPGLKSKIDPLLIARRDYAYGTQRDYIDHQDIIGWTREGIDTKPNSGLAALITDGPGGSKWMYVGKKHAGKVFYDLTGNRSDTVTINADGWGEFKVNGGSVSI

SEQ ID NO: 24018 - protein, 478 aa, Bacillus sp. TS-23
APINETMMQYFEWDLPNDGTLWTKVKNEAANLSSLGITALWLPPAYKGTSQSDVGYGVYDLYDLGEFNQKGTIRTKYGTKTQYIRAIQAAKAAGMQVYADVVFNHKAGADGTEFVDAVEVDPSNRNQETSGTYQIQAWTKFDFPGRGNTYSSFKWRWYHFDGTDWDESRKLNRIYKFRSTGKAWDWEVDTENGNYDYLMFADLDMDHPEVVTELKNWGTWYVETTNIDGFRLDAVKHIKYSFFPDWLTYVRNQTGKNLFAVGEFWSYDVNKLHNYITKTEGSMSLFDAPLHNNFYTASKSSGYFDMRYLLNNTLMKDQPSLAVTLVDNHDTQPGQSLQSWVEPWFKPLAYAFILTRQEGYPCVFYGDYYGIPKYNIPGLKSKIDPLLIARRDYAYGTQRDYIDHQDIIGWTREGIDTKPNSGLAALITDGPGGSKWMYVGKKHAGKVFYDLTGNRSDTVTINADGWGEFKVNGGSVSI

SEQ ID NO: 24019 - protein, 478 aa, Bacillus sp. TS-23
APINETMMQYFEWDLPNDGTLWTKVKNEAANLSSLGITALWLPPAYKGTSQSDVGYGVYDLYDLGEFNQKGTIRTKYGTKTQYIQAIQAAKAAGMQVYADVVFNHKAGADGTEFVDAVEVDPSNRNQETSGTYQIQAWTKFDFPGRGNTYSSFKWRWYHFDGTDWDESRKLNRIYKFRSTGKAWDWEVDTENGNYDYLMFADLDMDHPEVVTELKNWGTWYVETTNIDGFRLDAVKHIKYSFFPDWLTYVRNQTGKNLFAVGEFWSYDVEKLHNYITKTRGSMSLFDAPLHNNFYTASKSSGYFDMRYLLNNTLMKDQPSLAVTLVDNHDTQPGQSLQSWVEPWFKPLAYAFILTRQEGYPCVFYGDYYGIPKYNIPGLKSKIDPLLIARRDYAYGTQRDYIDHQDIIGWTREGIDTKPNSGLAALITDGPGGSKWMYVGKKHAGKVFYDLTGNRSDTVTINADGWGEFKVNGGSVSI

SEQ ID NO: 24020 - protein, 478 aa, Bacillus sp. TS-23
APINETMMQYFEWDLPNDGTLWTKVKNEAANLSSLGITALWLPPAYKGTSQSDVGYGVYDLYDLGEFNQKGTIRTKYGTKTQYIQAIQAAKAAGMQVYADVVFNHKAGADGTEFVDAVEVDPSNRNQETSGTYQIQAWTKFDFPGRGNTYSSFKWRWYHFDGTDWDESRKLNRIYKFRSTGKAWDWEVDTENGNYDYLMFADLDMDHPEVVTELKNWGTWYVETTNIDGFRLDAVKHIKYSFFPDWLTYVRNQTGKNLFAVGEFWSYDVRKLHNYITKTRGSMSLFDAPLHNNFYTASKSSGYFDMRYLLNNTLMKDQPSLAVTLVDNHDTQPGQSLQSWVEPWFKPLAYAFILTRQEGYPCVFYGDYYGIPKYNIPGLKSKIDPLLIARRDYAYGTQRDYIDHQDIIGWTREGIDTKPNSGLAALITDGPGGSKWMYVGKKHAGKVFYDLTGNRSDTVTINADGWGEFKVNGGSVSI

SEQ ID NO: 24021 - protein, 478 aa, Bacillus sp. TS-23
APINETMMQYFEWDLPNDGTLWTKVKNEAANLSSLGITALWLPPAYKGTSQSDVGYGVYDLYDLGEFNQKGTIRTKYGTKTQYIQAIQAAKAAGMQVYADVVFNHKAGADGTEFVDAVEVDPSNRNQETSGTYQIQAWTKFDFPGRGNTYSSFKWRWYHFDGTDWDESRKLNRIYKFRSTGKAWDWEVDTENGNYDYLMFADLDMDHPEVVTELKNWGTWYVETTNIDGFRLDAVKHIKYSFFPDWLTYVRNQTGKNLFAVGEFWSYDVRKLHNYITKTEGSMSLFDAPLHNNFYTASKSSGYFDMRYLLNNTLMKDQPSLAVTLVDNHDTQPGQSLQSWVEPWFKPLAYAFILTRQEGYPCVFYGDYYGIPKYNIPGLKSKIDPLLIARRDYAYGTQRDYIDHQDIIGWTREGIDTKPNSGLAALITDGPGGSKWMYVGKKHAGKVFYDLTGNRSDTVTINADGWGEFKVNGGSVSI

SEQ ID NO: 24022 - protein, 478 aa, Bacillus sp. TS-23
APINETMMQYFEWDLPNDGTLWTKVKNEAANLSSLGITALWLPPAYKGTSQSDVGYGVYDLYDLGEFNQKGTIRTKYGTKTQYIRAIQAAKAAGMQVYADVVFNHKAGADGTEFVDAVEVDPSNRNQETSGTYQIQAWTKFDFPGRGNTYSSFKWRWYHFDGTDWDESRKLNRIYKFRSTGKAWDWEVDTENGNYDYLMFADLDMDHPEVVTELKNWGTWYVRTTNIDGFRLDAVKHIKYSFFPDWLTYVRNQTGKNLFAVGEFWSYDVNKLHNYITKTEGSMSLFDAPLHNNFYTASKSSGYFDMRYLLNNTLMKDQPSLAVTLVDNHDTQPGQSLQSWVEPWFKPLAYAFILTRQEGYPCVFYGDYYGIPKYNIPGLKSKIDPLLIARRDYAYGTQRDYIDHQDIIGWTREGIDTKPNSGLAALITDGPGGSKWMYVGKKHAGKVFYDLTGNRSDTVTINADGWGEFKVNGGSVSI

SEQ ID NO: 24023 - protein, 478 aa, Bacillus sp. TS-23
APINETMMQYFEWDLPNDGTLWTKVKNEAANLSSLGITALWLPPAYKGTSQSDVGYGVYDLYDLGEFNQKGTIRTKYGTKTQYIEAIQAAKAAGMQVYADVVFNHKAGADGTEFVDAVEVDPSNRNQETSGTYQIQAWTKFDFPGRGNTYSSFKWRWYHFDGTDWDESRKLNRIYKFRSTGKAWDWEVDTENGNYDYLMFADLDMDHPEVVTELKNWGTWYVNTTNIDGFRLDAVKHIKYSFFPDWLTYVRNQTGKNLFAVGEFWSYDVRKLHNYITKTNGSMSLFDAPLHNNFYTASKSSGYFDMRYLLNNTLMKDQPSLAVTLVDNHDTQPGQSLQSWVEPWFKPLAYAFILTRQEGYPCVFYGDYYGIPKYNIPGLKSKIDPLLIARRDYAYGTQRDYIDHQDIIGWTREGIDTKPNSGLAALITDGPGGSKWMYVGKKHAGKVFYDLTGNRSDTVTINADGWGEFKVNGGSVSI

SEQ ID NO: 24024 - protein, 478 aa, Bacillus sp. TS-23
APINETMMQYFEWDLPNDGTLWTKVKNEAANLSSLGITALWLPPAYKGTSQSDVGYGVYDLYDLGEFNQKGTIRTKYGTKTQYIRAIQAAKAAGMQVYADVVFNHKAGADGTEFVDAVEVDPSNRNQETSGTYQIQAWTKFDFPGRGNTYSSFKWRWYHFDGTDWDESRKLNRIYKFRSTGKAWDWEVDTENGNYDYLMFADLDMDHPEVVTELKNWGTWYVNTTNIDGFRLDAVKHIKYSFFPDWLTYVRNQTGKNLFAVGEFWSYDVRKLHNYITKTRGSMSLFDAPLHNNFYTASKSSGYFDMRYLLNNTLMKDQPSLAVTLVDNHDTQPGQSLQSWVEPWFKPLAYAFILTRQEGYPCVFYGDYYGIPKYNIPGLKSKIDPLLIARRDYAYGTQRDYIDHQDIIGWTREGIDTKPNSGLAALITDGPGGSKWMYVGKKHAGKVFYDLTGNRSDTVTINADGWGEFKVNGGSVSI

SEQ ID NO: 24025 - protein, 478 aa, Bacillus sp. TS-23
APINETMMQYFEWDLPNDGTLWTKVKNEAANLSSLGITALWLPPAYKGTSQSDVGYGVYDLYDLGEFNQKGTIRTKYGTKTQYIQAIQAAKAAGMQVYADVVFNHKAGADGTEFVDAVEVDPSNRNQETSGTYQIQAWTKFDFPGRGNTYSSFKWRWYHFDGTDWDESRKLNRIYKFRSTGKAWDWEVDTENGNYDYLMFADLDMDHPEVVTELKNWGTWYVRTTNIDGFRLDAVKHIKYSFFPDWLTYVRNQTGKNLFAVGEFWSYDVEKLHNYITKTNGSMSLFDAPLHNNFYTASKSSGYFDMRYLLNNTLMKDQPSLAVTLVDNHDTQPGQSLQSWVEPWFKPLAYAFILTRQEGYPCVFYGDYYGIPKYNIPGLKSKIDPLLIARRDYAYGTQRDYIDHQDIIGWTREGIDTKPNSGLAALITDGPGGSKWMYVGKKHAGKVFYDLTGNRSDTVTINADGWGEFKVNGGSVSI

SEQ ID NO: 24026 - protein, 478 aa, Bacillus sp. TS-23
APINETMMQYFEWDLPNDGTLWTKVKNEAANLSSLGITALWLPPAYKGTSQSDVGYGVYDLYDLGEFNQKGTIRTKYGTKTQYIQAIQAAKAAGMQVYADVVFNHKAGADGTEFVDAVEVDPSNRNQETSGTYQIQAWTKFDFPGRGNTYSSFKWRWYHFDGTDWDESRKLNRIYKFRSTGKAWDWEVDTENGNYDYLMFADLDMDHPEVVTELKNWGTWYVRTTNIDGFRLDAVKHIKYSFFPDWLTYVRNQTGKNLFAVGEFWSYDVRKLHNYITKTNGSMSLFDAPLHNNFYTASKSSGYFDMRYLLNNTLMKDQPSLAVTLVDNHDTQPGQSLQSWVEPWFKPLAYAFILTRQEGYPCVFYGDYYGIPKYNIPGLKSKIDPLLIARRDYAYGTQRDYIDHQDIIGWTREGIDTKPNSGLAALITDGPGGSKWMYVGKKHAGKVFYDLTGNRSDTVTINADGWGEFKVNGGSVSI

SEQ ID NO: 24027 - protein, 478 aa, Bacillus sp. TS-23
APINETMMQYFEWDLPNDGTLWTKVKNEAANLSSLGITALWLPPAYKGTSQSDVGYGVYDLYDLGEFNQKGTIRTKYGTKTQYIQAIQAAKAAGMQVYADVVFNHKAGADGTEFVDAVEVDPSNRNQETSGTYQIQAWTKFDFPGRGNTYSSFKWRWYHFDGTDWDESRKLNRIYKFRSTGKAWDWEVDTENGNYDYLMFADLDMDHPEVVTELKNWGTWYVRTTNIDGFRLDAVKHIKYSFFPDWLTYVRNQTGKNLFAVGEFWSYDVRKLHNYITKTRGSMSLFDAPLHNNFYTASKSSGYFDMRYLLNNTLMKDQPSLAVTLVDNHDTQPGQSLQSWVEPWFKPLAYAFILTRQEGYPCVFYGDYYGIPKYNIPGLKSKIDPLLIARRDYAYGTQRDYIDHQDIIGWTREGIDTKPNSGLAALITDGPGGSKWMYVGKKHAGKVFYDLTGNRSDTVTINADGWGEFKVNGGSVSI

SEQ ID NO: 24028 - protein, 478 aa, Bacillus sp. TS-23
APINETMMQYFEWDLPNDGTLWTKVKNEAANLSSLGITALWLPPAYKGTSQSDVGYGVYDLYDLGEFNQKGTIRTKYGTKTQYIEAIQAAKAAGMQVYADVVFNHKAGADGTEFVDAVEVDPSNRNQETSGTYQIQAWTKFDFPGRGNTYSSFKWRWYHFDGTDWDESRKLNRIYKFRSTGKAWDWEVDTENGNYDYLMFADLDMDHPEVVTELKNWGTWYVRTTNIDGFRLDAVKHIKYSFFPDWLTYVRNQTGKNLFAVGEFWSYDVNKLHNYITKTNGSMSLFDAPLHNNFYTASKSSGYFDMRYLLNNTLMKDQPSLAVTLVDNHDTQPGQSLQSWVEPWFKPLAYAFILTRQEGYPCVFYGDYYGIPKYNIPGLKSKIDPLLIARRDYAYGTQRDYIDHQDIIGWTREGIDTKPNSGLAALITDGPGGSKWMYVGKKHAGKVFYDLTGNRSDTVTINADGWGEFKVNGGSVSI

SEQ ID NO: 24029 - protein, 478 aa, Bacillus sp. TS-23
APINETMMQYFEWDLPNDGTLWTKVKNEAANLSSLGITALWLPPAYKGTSQSDVGYGVYDLYDLGEFNQKGTIRTKYGTKTQYIQAIQAAKAAGMQVYADVVFNHKAGADGTEFVDAVEVDPSNRNQETSGTYQIQAWTKFDFPGRGNTYSSFKWRWYHFDGTDWDESRKLNRIYKFRSTGKAWDWEVDTENGNYDYLMFADLDMDHPEVVTELKNWGTWYVETTNIDGFRLDAVKHIKYSFFPDWLTYVRNQTGKNLFAVGEFWSYDVRKLHNYITKTNGSMSLFDAPLHNNFYTASKSSGYFDMRYLLNNTLMKDQPSLAVTLVDNHDTQPGQSLQSWVEPWFKPLAYAFILTRQEGYPCVFYGDYYGIPKYNIPGLKSKIDPLLIARRDYAYGTQRDYIDHQDIIGWTREGIDTKPNSGLAALITDGPGGSKWMYVGKKHAGKVFYDLTGNRSDTVTINADGWGEFKVNGGSVSI

SEQ ID NO: 24030 - protein, 478 aa, Bacillus sp. TS-23
APINETMMQYFEWDLPNDGTLWTKVKNEAANLSSLGITALWLPPAYKGTSQSDVGYGVYDLYDLGEFNQKGTIRTKYGTKTQYIEAIQAAKAAGMQVYADVVFNHKAGADGTEFVDAVEVDPSNRNQETSGTYQIQAWTKFDFPGRGNTYSSFKWRWYHFDGTDWDESRKLNRIYKFRSTGKAWDWEVDTENGNYDYLMFADLDMDHPEVVTELKNWGTWYVRTTNIDGFRLDAVKHIKYSFFPDWLTYVRNQTGKNLFAVGEFWSYDVNKLHNYITKTRGSMSLFDAPLHNNFYTASKSSGYFDMRYLLNNTLMKDQPSLAVTLVDNHDTQPGQSLQSWVEPWFKPLAYAFILTRQEGYPCVFYGDYYGIPKYNIPGLKSKIDPLLIARRDYAYGTQRDYIDHQDIIGWTREGIDTKPNSGLAALITDGPGGSKWMYVGKKHAGKVFYDLTGNRSDTVTINADGWGEFKVNGGSVSI

SEQ ID NO: 24031 - protein, 479 aa, Archaea
GVIMQAFYWDVPSGGIWWDTIRQKIPEWYDAGISAIWIPPASKGMGGAYSMGYDPYDFFDLGEYDQKGTVETRFGSKQELVNMINTAHAYGMKVIADVVFDHKGGADGTEWVDAVEVNPSDRNQEISGTYQIQAWTKFDFPGRGNTYSSFKWRWYHFDGVDWDESRKLSRIYKFRGIGKAWDWEVDTENGNYDYLMYADLDMDHPEVVTELKNWGKWYVNTTNIDGFRLDAVKHIKFSFFPDWLSYVRSQTGKPLFTVGEYWSYDINKLHNYITKTNGTMSLFDAPLHNKFYTASKSGGAFDMRTLMTNTLMKDQPTLAVTFVDNHDTEPGQALQSWVDPWFKPLAYAFILTRQEGYPCVFYGDYYGIPQYNIPSLKSKIDPLLIARRDYAYGTQHDYLDHSDIIGWTREGVTEKPGSGLAALITDGPGGSKWMYVGKQHAGKVFYDLTGNRSDTVTINSDGWGEFKVNGGSVSVWVPR

SEQ ID NO: 24032 - protein, 483 aa, Synthetic construct
HHNGTNGTMMQYFEWYLPNDGNHWNRLNSDASNLKSKGITAVWIPPAWKGASQNDVGYGAYDLYDLGEFNQKGTVRTKYGTRSQLQAAVTSLKNNGIQVYGDVVMNHKAGADGTEFVDAVEVDPSNRNQETSGTYQIQAWTKFDFPGRGNTYSSFKWRWYHFDGTDWDESRKLNRIYKFSTGKAWDWEVDTENGNYDYLMFADLDMDHPEVVNELRNWGVWYTNTLGLDGFRIDAVKHIKYSFTRDWINHVRSATGKNMFAVAEFWKNDLGAIENYLQKTNWNHSVFDVPLHYNLYNASKSGGNYDMRNIFNGTVVQRHPSHAVTFVDNHDSQPEEALESFVEEWFKPLAYALTLTREQGYPSVFYGDYYGIPTHGVPAMRSKIDPILEARQKYAYGKQNDYLDHHNIIGWTREGNTAHPNSGLATIMSDGAGGSKWMFVGRNKAGQVWSDITGNRTGTVTINADGWGNFSVNGGSVSIWVNK

SEQ ID NO: 24033 - protein, 484 aa, Synthetic construct
HHNGTNGTMMQYFEWYLPNDGNHWNRLNSDASNLKSKGITAVWIPPAWKGASQNDVGYGAYDLYDLGEFNQKGTVRTKYGTRSQLQAAVTSLKNNGIQVYGDVVMNHKAGADATEDVTAVEVNPANRNQETSEEYQIKAWTDFRFPGRGNTYSDFKWHWYHFDGADWDESRKISRIFKFRGEGKAWDWEVSSENGNYDYLMYADVDMDHPEVVNELRNWGVWYTNTLGLDGFRIDAVKHIKYSFTRDWINHVRSATGKNMFAVAEFWKNDLGAIENYLQKTNWNHSVFDVPLHYNLYNASKSGGNYDMRNIFNGTVVQRHPSHAVTFVDNHDSQPEEALESFVEEWFKPLAYALTLTREQGYPSVFYGDYYGIPTHGVPAMRSKIDPILEARQKYAYGKQNDYLDHHNIIGWTREGNTAHPNSGLATIMSDGAGGSKWMFVGRNKAGQVWSDITGNRTGTVTINADGWGNFSVNGGSVSIWVNK

SEQ ID NO: 24034 - protein, 482 aa, unidentified
APVNGTMMQYFEWDLPNDGTLWTKVKNEASSLSSLGITALWLPPAYKGTSQGDVGYGVYDLYDLGEFNQKGTIRTKYGTKTQYLQAIQAAKSAGMQVYADVVFNHKAGADSTEWVDAVEVNPSNRNQETSGTYQIQAWTKFDFPGRGNTYSSFKWRWYHFDGTDWDESRKLNRIYKFRGTGKAWDWEVDTENGNYDYLMFADLDMDHPEVVTELKNWGTWYVNTTNVDGFRLDAVKHIKYSFFPDWLTHVRSQTRKNLFAVGEFWSYDVNKLHNYITKTSGTMSLFDAPLHNNFYTASKSSGYFDMRYLLNNTLMKDQPSLAVTLVDNHDTQPGQSLQSWVEPWFKPLAYAFILTRQEGYPCVFYGDYYGIPKYNIPGLKSKIDPLLIARRDYAYGTQRDYIDHQDIIGWTREGIDSKPNSGLAALITDGPGGSKWMYVGKKHAGKVFYDLTGNRSDTVTINADGWGEFKVNGGSVSIWVAK

SEQ ID NO: 24035 - protein, 482 aa, unidentified
APVNGTMMQYFEWDLPNDGTLWTKVKNEATNLSSLGITALWLPPAYKGTSQSDVGYGVYDLYDLGEFNQKGTIRTKYGTKTQYIQAIQTAQAAGMQVYADVVFNHKAGADSTEFVDAVEVNPSNRNQETSGTYQIQAWTKFDFPGRGNTYSSFKWRWYHFDGTDWDESRKLNRIYKFRGTGKAWDWEVDTENGNYDYLMFADLDMDHPEVVTELKNWGTWYVNTTNIDGFRLDAVKHIKYSFFPDWLTYVRNQTGKNLFAVGEFWSYDVNKLHNYITKTNGSMSLFDAPLHNNFYTASKSSGYFDMRYLLNNTLMKDQPSLAVTLVDNHDTQPGQSLQSWVEPWFKQLAYAFILTRQEGYPCVFYGDYYGIPKYNIPGLKSKIDPLLIARRDYAYGTQRDYIDHQDIIGWTREGIDAKPNSGLAALITDGPGGSKWMYVGKKHAGKVFYDLTGNRSDTVTINADGWGEFKVNGGSVSIWVAK

SEQ ID NO: 24036 - protein, 480 aa, Bacillus sp. TS-23
APINETMMQYFEWDLPNDGTLWTKVKNEAANLSSLGITALWLPPAWKGTSQSDVGYGAYDLYDLGEFNQKGTIRTKYGTKTQYIQAIQAAKAAGMQVYADVVMNHKAGADGTEFVDAVEVDPSNRNQETSGTYQIQAWTKFDFPGRGNTYSSFKWRWYHFDGTDWDESRKLNRIYKFTGKAWDWEVDTENGNYDYLMFADLDMDHPEVVTELKNWGTWYVNTTNIDGFRLDAVKHIKYSFFPDWLTYVRNQTGKNLFAVGEFWSYDVNKLHNYITKTNGSMSLFDAPLHNNFYTASKSSGYFDMRYLLNNTLMKDQPSLAVTLVDNHDTQPGQSLQSWVEPWFKPLAYAFILTRQEGYPCVFYGDYYGIPKYNIPGLKSKIDPLLIARRDYAYGTQRDYIDHQDIIGWTREGIDTKPNSGLAALITDGPGGSKWMYVGKKHAGKVFYDLTGNRSDTVTINADGWGEFKVNGGSVSIWVAK

SEQ ID NO: 24037 - protein, 480 aa, unidentified
APINETMMQYFEWDLPNDGTLWTKVKNEAANLSSLGITALWLPPAYKGTSQSDVGYGVYDLYDLGEFNQKGTIRTKYGTKTQYIQAIQAAKAAGMQVYADVVFNHKAGADGTEFVDAVEVDPSNRNQETSGTYQIQAWTKFDFPGRGNTYSSFKWRWYHFDGTDWDESRKLNRIYKFRGKAWDWEVDTENGNYDYLLFADLDMDHPEVVTELKNWGTWYVNTTNIDGFRLDAVKHIKYSFFPDWLTYVRNQTGKNLFAVGEFWSYDVNKLHNYITKTNGSMSLFDAPLHNNFYTASKSSGYFDMRYLLNNTLMKDQPSLAVTLVDNHDTQPGQSLQSWVEPWFKPLAYAFILTRQEGYPCVFYGDYYGIPKYNIPGLKSKIDPLLIARRDYAYGTQRDYIDHQDIIGWTREGIDTKPNSGLAALITDGPGGSKWMYVGKKHAGKVFYDLTGNRSDTVTINADGWGEFKVNGGSVSIWVAK

SEQ ID NO: 24038 - protein, 480 aa, Bacillus sp.
APINETMMQYFEWDLPNDGTLWTKVKNEAANLSSLGITALWLPPAYKGTSQSDVGYGVYDLYDLGEFNQKGTIRTKYGTKTQYIQAIQAAKAAGMQVYADVVFNHKAGADGTEFVDAVEVDPSNRNQETSGEYQIQAWTKFDFPGRGNTYSSFKWRWYHFDGTDWDESRKLNRIYKFHGKAWDWPVDTENGNYDYLMFADLDMDHPEVVTELKNWGTWYVNTTNIDGFRLDAVKHIKYSFFPDWLTYVRNQTGKNLFAVGEFWSYDVNKLHNYITKTNGSMSLFDAPLHNNFYTASKSSGYFDMRYLLNNTLMKDQPSLAVTLVDNHDTQPGQSLQSWVEPWFKPLAYAFILTRQEGYPCVFYGDYYGIPKYNIPGLKSKIDPLLIARRDYAYGTQRDYIDHQDIIGWTREGIDTKPNSGLAALITDGPGGSKWMYVGKKHAGKVFYDLTGNRSDTVTINADGWGEFKVNRGSVSIWVAK

SEQ ID NO: 24039 - protein, 480 aa, Bacillus sp. TS-23
APINETMMQYFEWDLPNDGTLWTKVKNEAANLSSLGITALWLPPAYKGTSQSDVGYGVYDLYDLGEFNQKGTIRTKYGTKTQYIQAIQAAKAAGMQVYADVVFNHKAGADGTEFVDAVEVDPSNRNQETSGTYQIQAWTKFDFPGRGNTYSSFKWRWYHFDGTDWDESRKLNRIYKFTGKAWDWEVDTENGNYDYLMFADLDMDHPEVVTELKNWGTWYVNTTNIDGFRLDAVKHIKYSFFPDWLTYVRNQTGKNLFAVGEFWSYDVNKLHNYITKTNGSMSLFDAPLHNNFYTASKSSGYFDMRYLLNNTLLKDQPSLAVTLVDNHDTQPGQSLQSWVEPWFKPLAYAFILTRQEGYPCVFYGDYYGIPKYNIPGLKSKIDPLLIARRDYAYGTQRDYIDHQDIIGWTREGIDTKPNSGLAALITDGPGGSKWMYVGKKHAGKVFYDLTGNRSDTVTINADGWGEFKVNGGSVSIWVAK

SEQ ID NO: 24040 - protein, 480 aa, Bacillus sp. TS-23
APINETMMQYFEWDLPNDGTLWTKVKNEAANLSSLGITALWLPPAYKGTSQSDVGYGVYDLYDLGEFNQKGTIRTKYGTKTQYIQAIQAAKAAGMQVYADVVFNHKAGADGTEFVDAVEVDPSNRNQETSGTYQIQAWTKFDFPGRGNTYSSFKWRWYHFDGTDWDESRKLNRIYKFTGKAWDWEVDTENGNYDYLMFADLDMDHPEVVTELKNWGTWYVNTTNIDGFRLDAVKHIKYQFFPDWLTYVRNQTGKNLFAVGEFWSYDVNKLHNYITKTNGSMSLFDAPLHNNFYTASKSSGYFDMRYLLNNTLMKDQPSLAVTLVDNHDTQPGQSLQSWVEPWFKPLAYAFILTRQEGYPCVFYGDYYGIPKYNIPGLKSKIDPLLIARRDYAYGTQRDYIDHQDIIGWTREGIDTKPNSGLAALITDGPGGSKWMYVGKKHAGKVFYDLTGNRSDTVTINADGWGEFKVNKGSVSIWVAK

SEQ ID NO: 24041 - protein, 480 aa, Bacillus sp.
APINETMMQYFEWDLPNDGTLWTKVKNEAANLSSLGITALWLPPAYKGTSQSDVGYGVYDLYDLGEFNQKGTIRTKYGTKTQYIQAIQAAKAAGMQVYADVVFNHKAGADGTEFVDAVEVDPSNRNQEVSGTYQIEAWTKFDFPGRGNTYSSFKWRWYHFDGTDWDESRKLNRIYKFRGKAWDWEVDTENGNYDYLMFADLDMDHPEVVTELKNWGTWYVNTTNIDGFRLDAVKHIKYSFFPDWLTYVRNQTGKNLFAVGEFWSYDVNKLHNYITKTNGSMSLFDAPLHNNFYTASKSSGYFDMRYLLNNTLMKDQPSLAVTLVDNHDTQPGQSLQSWVEPWFKPLAYAFILTRQEGYPCVFYGDYYGIPKYNIPGLKSKIDPLLIARRDYAYGTQRDYIDHQDIIGWTREGIDTKPNSGLAALITDGPGGSKWMYVGKKHAGKVFYDLTGNRSDTVTINADGWGEFKVNGGSVSIWVAK

SEQ ID NO: 24042 - protein, 482 aa, unidentified
APVNGTMMQYFEWDLPNDGTLWTKVKNEASSLSSLGITALWLPPAYKGTSQGDVGYGVYDLYDLGEFNQKGTIRTKYGTKTQYLQAIQAAKSAGMQVYADVVFNHKAGADSTEWVDAVEVNPSNRNQETSGTYQIQAWTKFDFPDRGNTYSSFKWRWYHFDGTDWDESRKLNRIYKFRGTGKAWDWEVDTENGNYDYLMFADLDMDHPEVVTELKNWGTWYVNTTNVDGFRLDAVKHIKYSFFPDWLTYVRSQTQKNLFAVGEFWSYDVNKLHNYITKTSGTMSLFDAPLHNNFYTASKSSGYFDMRYLLNNTLMKDQPSLAVTLVDNHDTQPGQSLQSWVEPWFKPLAYAFILTRQEGYPCVFYGDYYGIPKYNIPGLKSKIDPLLIARRDYAYGTQRDYIDHQDIIGWTREGIDSKPNSGLAALITDGPGGSKWMYVGKKHAGKVFYDLTGNRSDTVTINADGWGEFKVNGGSVSIWVAK

SEQ ID NO: 24043 - protein, 480 aa, Bacillus sp. TS-23
APINETMMQYFEWDLPNDGTLWTKVKNEAANLSSLGITALWLPPAWKGTSQSDVGYGAYDLYDLGEFNQKGTIRTKYGTKTQYIQAIQAAKAAGMQVYADVVFNHKAGADGTEFVDAVEVDPSNRNQETSGTYQIQAWTKFDFPGRGNTYSSFKWRWYHFDGTDWDESRKLNRIYKFTGKAWDWEVDTENGNYDYLMFADYDMDHPEVVTELKNWGTWYVNTTNIDGFRLDAVKHIKYSFFPDWLTYVRNQTGKNLFAVGEFWSYDVNKLHNYITKTNGSMSLFDAPLHNNFYTASKSSGYFDMRYLLNNTLMKDQPSLAVTLVDNHDTQPGQSLQSWVEPWFKPLAYAFILTRQEGYPCVFYGDYYGIPKYNIPGLKSKIDPLLIARRDYAYGTQRDYIDHQDIIGWTREGIDTKPNSGLAALITDGPGGSKWMYVGKKHAGKVFYDLTGNRSDTVTINADGWGEFKVNGGSVSIWVAK

SEQ ID NO: 24044 - protein, 480 aa, Bacillus sp. TS-23
APINETMMQYFEWDLPNDGTLWTKVKNEAANLSSLGITALWLPPAYKGTSQSDVGYGVYDLYDLGEFNQKGTIRTKYGTKTQYIQAIQAAKAAGMQVYADVVFNHKAGADGTEFVDAVEVDPSNRNQETSGTYQIQAWTKFDFPGRGNTYSSFKWRWYHFDGTDWDESRKLNRIYKFTGKAWDWEVDTENGNYDYLMFADLDMDHPEVVTELKNWGTWYVNTTNIDGFRLDAVKHIKYSFFPDWLTYVRNQTGKNLFAVGEFWSYDVNKLHNYITKTNGSMSLFDAPLHNNFYTASKSSGYFDMRYLLNNTLMKDQPSLAVTLVDNHDTQPGQSLQSWVEPWFKPLAYAFILTRQEGYPCVFYGDYYGIPKYNIPGLKSKIDPLLEARRDYAYGTQRDYIDHQDIIGWTREGIDTKPNSGLAALITDGPGGSKWMYVGKKHAGKVFYDLTGNRSDTVTINADGWGEFKVNGGSVSIWVAK

SEQ ID NO: 24045 - protein, 480 aa, Bacillus sp. TS-23
APINETMMQYFEWDLPNDGTLWTKVKNEAANLSSLGITALWLPPAYKGTSQSDVGYGAYDLYDLGEFNQKGTIRTKYGTKTQYIQAIQAAKAAGMQVYADVVMNHKAGADGTEFVDAVEVDPSNRNQETSGTYQIQAWTKFDFPGRGNTYSSFKWRWYHFDGTDWDESRKLNRIYKFTGKAWDWEVDTENGNYDYLMFADMDMDHPEVVTELKNWGTWYVNTTNIDGFRLDAVKHIKYSFFPDWLTYVRNQTGKNLFAVGEFWSYDVNKLHNYITKTNGSMSLFDAPLHNNFYTASKSSGYFDMRYLLNNTLMKDQPSLAVTLVDNHDTQPGQSLQSWVEPWFKPLAYAFILTRQEGYPCVFYGDYYGIPKYNIPGLKSKIDPLLIARRDYAYGTQRDYIDHQDIIGWTREGIDTKPNSGLAALITDGPGGSKWMYVGKKHAGKVFYDLTGNRSDTVTINADGWGEFKVNGGSVSIWVAK

SEQ ID NO: 24046 - protein, 480 aa, Bacillus sp. TS-23
APINETMMQYFEWDLPNDGTLWTKVKNEAANLSSLGITALWLPPAYKGTSQSDVGYGVYDLYDLGEFNQKGTIRTKYGTKTQYIQAIQAAKAAGMQVYADVVFNHKAGADGTEFVDAVEVDPSNRYQETSGTYQIQAWTKFDFPGRGNTYSSFKWRWYHFDGTDWDESRKLNRIYKFTGKAWDWPVDTENGNYDYLMFADLDMDHPEVVTELKNWGTWYVNTTNIDGFRLDAVKHIKYSFFPDWLTYVRNQTGKNLFAVGEFWSYDVNKLHNYITKTNGSMSLFDAPLHNNFYTASKSSGYFDMRYLLNNTLMKDQPSLAVTLVDNHDTQPGQSLQSWVEPWFKPLAYAFILTRQEGYPCVFYGDYYGIPKYNIPGLKSKIDPLLIARRDYAYGTQRDYIDHQDIIGWTREGIDTKPNSGLAALITDGPGGSKWMYVGKKHAGKVFYDLTGNRSDTVTINADGWGEFKVNRGSVSIWVAK

SEQ ID NO: 24047 - protein, 480 aa, Bacillus sp.
APINETMMQYFEWDLPNDGTLWTKVKNEAANLSSLGITALWLPPAYKGTSQSDVGYGVYDLYDLGEFNQKGTIRTKYGTKTQYIQAIQAAKAAGMQVYADVVFNHKAGADGTEFVDAVEVDPSNRNQETSGTYQIQAWTKFDFPGRGNTYSSWKWRWYHFDGTDWDESRKLNRIYKFTGKAWDWPVDTENGNYDYLMFADLDMDHPEVVTELKNWGTWYVNTTNIDGFRLDAVKHIKYSFFPDWLTYVRNQTGKNLFAVGEFWSYDVNKLHNYITKTNGSMSLFDAPLHNNFYTASKSSGYFDMRYLLNNTLMKDQPSLAVTLVDNHDTQPGQSLQSWVEPWFKPLAYAFILTRQEGYPCVFYGDYYGIPKYNIPGLKSKIDPLLIARRDYAYGTQRDYIDHQDIIGWTREGIDTKPNSGLAALITDGPGGSKWMYVGKKHAGKVFYDLTGNRSDTVTINADGWGEFKVNRGSVSIWVAK

SEQ ID NO: 24048 - protein, 480 aa, Bacillus sp. TS-23
APINETMMQYFEWDLPNDGTLWTKVKNEAANLSSLGITALWLPPAYKGTSQSDVGYGVYDLYDLGEFNQKGTIRTKYGTKTQYIQAIQAAKAAGMQVYADVVFNHKAGADGTEFVDAVEVDPSNRNQETSGTYQIQAWTKFDFPGRGNTYSSFKWRWYHFDGTDWDESRKLNRIYKFTGKAWDWEVDTENGNYDYLMFADFDMDHPEVVTELKNWGTWYVNTTNIDGFRLDAVKHIKYSFFPDWLTYVRNQTGKNLFAVGEFWSYDVNKLHNYITKTNGSMSLFDAPLHNNFYTASKSSGYFDMRYLLNNTLMKDQPSLAVTLVDNHDTQPGQSLQSWVEPWFKPLAYAFILTRQEGYPCVFYGDYYGIPKYNIPGLKSKIDPLLIARRDYAYGTQRDYIDHQDIIGWTREGIDTKPNSGLAALITDGPGGSKWMYVGKKHAGKVFYDLTGNRSDTVTINADGWGEFKVNGGSVSIWVAK

SEQ ID NO: 24049 - protein, 480 aa, Bacillus sp. TS-23
APINETMMQYFEWDLPNDGTLWTKVKNEAANLSSLGITALWLPPAYKGTSQSDVGYGAYDLYDLGEFNQKGTIRTKYGTKTQYIQAIQAAKAAGMQVYADVVMNHKAGADGTEFVDAVEVDPSNRNQETSGTYQIQAWTKFDFPGRGNTYSSFKWRWYHFDGTDWDESRKLNRIYKFTGKAWDWEVDTENGNYDYLMFADYDMDHPEVVTELKNWGTWYVNTTNIDGFRLDAVKHIKYSFFPDWLTYVRNQTGKNLFAVGEFWSYDVNKLHNYITKTNGSMSLFDAPLHNNFYTASKSSGYFDMRYLLNNTLMKDQPSLAVTLVDNHDTQPGQSLQSWVEPWFKPLAYAFILTRQEGYPCVFYGDYYGIPKYNIPGLKSKIDPLLIARRDYAYGTQRDYIDHQDIIGWTREGIDTKPNSGLAALITDGPGGSKWMYVGKKHAGKVFYDLTGNRSDTVTINADGWGEFKVNGGSVSIWVAK

SEQ ID NO: 24050 - protein, 480 aa, Bacillus sp.
APINETMMQYFEWDLPNDGTLWTKVKNEAANLSSLGITALWLPPAYKGTSQSDVGYGVYDLYDLGEFNQKGTIRTKYGTKTQYIQAIQAAKAAGMQVYADVVFNHKAGADGTEFVDAVEVDPSNRNQETSGTYQIQAWTKFDFPGRGNTYSSFKWRWYHFDGTDWDESRKLNRIYKFXXKAWDWEVDTENGNYDYLMFADLDMDHPEVVTELKNWGTWYVNTTNIDGFRLDAVKHIKYTFFPDWLTYVRNQTGKNLFAVGEFWSYDVNKLHNYITKTNGSMSLFDAPLHNNFYTASKSSGYFDMRYLLNNTLMKDQPSLAVTLVDNHDTQPGQSLQSWVEPWFKPLAYAFILTRQEGYPCVFYGDYYGIPKYNIPGLKSKIDPLLIARRDYAYGTQRDYIDHQDIIGWTREGIDTKPNSGLAALITDGPGGSKWMYVGKKHAGKVFYDLTGNRSDTVTINADGWGEFKVNGGSVSIWVAK

SEQ ID NO: 24051 - protein, 480 aa, Bacillus sp. TS-23
APINETMMQYFEWDLPNDGTLWTKVKNEAANLSSLGITALWLPPAWKGTSQSDVGYGAYDLYDLGEFNQKGTIRTKYGTKTQYIQAIQAAKAAGMQVYADVVFNHKAGADGTEFVDAVEVDPSNRNQETSGTYQIQAWTKFDFPGRGNTYSSFKWRWYHFDGTDWDESRKLNRIYKFTGKAWDWEVDTENGNYDYLMFADFDMDHPEVVTELKNWGTWYVNTTNIDGFRLDAVKHIKYSFFPDWLTYVRNQTGKNLFAVGEFWSYDVNKLHNYITKTNGSMSLFDAPLHNNFYTASKSSGYFDMRYLLNNTLMKDQPSLAVTLVDNHDTQPGQSLQSWVEPWFKPLAYAFILTRQEGYPCVFYGDYYGIPKYNIPGLKSKIDPLLIARRDYAYGTQRDYIDHQDIIGWTREGIDTKPNSGLAALITDGPGGSKWMYVGKKHAGKVFYDLTGNRSDTVTINADGWGEFKVNGGSVSIWVAK

SEQ ID NO: 24052 - protein, 480 aa, Bacillus sp. TS-23
APINETMMQYFEWDLPNDGTLWTKVKNEAANLSSLGITALWLPPAWKGTSQSDVGYGVYDLYDLGEFNQKGTIRTKYGTKTQYIQAIQAAKAAGMQVYADVVFNHKAGADGTEFVDAVEVDPSNRNQETSGTYQIQAWTKFDFPGRGNTYSSFKWRWYHFDGTDWDESRKLNRIYKFTGKAWDWEVDTENGNYDYLMFADLDMDHPEVVTELKNWGTWYVNTTNIDGFRLDAVKHIKYSFFPDWLTYVRNQTGKNLFAVGEFWSYDVNKLHNYITKTNGSMSLFDAPLHNNFYTASKSSGYFDMRYLLNNTLMKDQPSLAVTLVDNHDTQPGQSLQSWVEPWFKPLAYAFILTRQEGYPCVFYGDYYGIPKYNIPGLKSKIDPLLIARRDYAYGTQRDYIDHQDIIGWTREGIDTKPNSGLAALITDGPGGSKWMYVGKKHAGKVFYDLTGNRSDTVTINADGWGEFKVNGGSVSIWVAK

SEQ ID NO: 24053 - protein, 480 aa, Bacillus sp. TS-23
APINETMMQYFEWDLPNDGTLWTKVKNEAANLSSLGITALWLPPAYKGTSQSDVGYGVYDLYDLGEFNQKGTIRTKYGTKTQYIQAIQAAKAAGMQVYADVVFNHKAGADGTEFVDAVEVDPSNRNQETSGTYQIQAWTKFDFPGRGNTYSSFKWRWYHFDGTDWDESRKLNRIYKFTGKAWDWEVDTENGNYDYLMFADLDMDHPEVVTELKNWGTWYVNTTNIDGFRLDAVKHIKYSFFPDWLTYVRNQTGKNLFAVGEFWSYDVNKLHNYITKTNGSMSLFDAPLHNNFYTASKSSGYFDMQYLLNNTLMKDQPSLAVTLVDNHDTQPGQSLQSWVEPWFKPLAYAFILTRQEGYPCVFYGDYYGIPKYNIPGLKSKIDPLLIARRDYAYGTQRDYIDHQDIIGWTREGIDTKPNSGLAALITDGPGGSKWMYVGKKHAGKVFYDLTGNRSDTVTINADGWGEFKVNGGSVSIWVAK

SEQ ID NO: 24054 - protein, 480 aa, Synthetic construct
APVNGTMMQYFEWDLPNDGTLWTKVKNEASSLSSLGITALWLPPAYKGTSQGDVGYGVYDLYDLGEFNQKGTIRTKYGTKTQYLQAIQAAKSAGMQVYADVVFNHKAGADSTEWVDAVEVNPSNRNQETSGTYQIQAWTKFDFPGRGNTYSSFKWRWYHFDGTDWDESRKLNRIYKFRGKAWDWEVDTENGNYDYLMFADLDMDHPEVVTELKNWGTWYVNTTNVDGFRLDAVKHIKYSFFPDWLTHVRSQTRKNLFAVGEFWSYDVNKLHNYITKTSGTMSLFDAPLHNNFYTASKSSGYFDMRYLLNNTLMKDQPSLAVTLVDNHDTQPGQSLQSWVEPWFKPLAYAFILTRQEGYPCVFYGDYYGIPKYNIPGLKSKIDPLLIARRDYAYGTQRDYIDHQDIIGWTREGIDSKPNSGLAALITDGPGGSKWMYVGKKHAGKVFYDLTGNRSDTVTINADGWGEFKVNGGSVSIWVAK

SEQ ID NO: 24055 - protein, 482 aa, Bacillus sp. TS-23
APINETMMQYFEWDLPNDGTLWTKVKNEAANLSSLGITALWLPPAYKGTSQSDVGYGVYDLYDLGEFNQKGTIRTKYGTKTQYIQAIQAAKAAGMQVYADVVFNHKAGADGTEFVDAVEVDPSNRCQETSGTYQIQAWTKFDFPGRGNTYSSFKWRWYHFDGTDWDESRKLNRIYLFRSGGKAWDWEVDTENGNYDYLMFADLDMDHPEVVTELKNWGTWYVNTTNIDGFRLDAVKHIKYSFFPDWLTYVRNQTGKNLFAVGEFWSYDVNKLHNYITKTNGSMSLFDAPLHNNFYTASKSSGRFDMRYLLNNTLMKDQPSLAVTLVDNHDTQPGQSLQSWVEPWFKPLAYAFILTRQEGYPCVFYGDYYGIPKYNIPGLKSKIDPLLIARRDYAYGTQRDYIDHQDIIGWTREGIDTKPNSGLAALITDGPGGSKWMYVGKKHAGKVFYDLTGNRSDTVTINADGWGEFKVNKGSVSIWVAK

SEQ ID NO: 24056 - protein, 482 aa, Bacillus sp. TS-23
APINETMMQYFEWDLPNDGTLWTKVKNEAANLSSLGITALWLPPAYKGTSQSDVGYGVYDLYDLGEFNQKGTIRTKYGTKTQYIQAIQAAKAAGMQVYADVVFNHKAGADGTEFVDAVEVDPSNRCQETSGTYQIQAWTKFDFPGRGNTYSSFKWRWYHFDGTDWDESRKLNRIYLFRSGGKAWDWEVDTENGNYDYLMYADLDMDHPEVVTELKNWGTWYVNTTNIDGFRLDAVKHIKYSFFPDWLTYVRNQTGKNLFAVGEFWSYDVNKLHNYITKTNGSMSLFDAPLHNNFYTASKSSGRFDMRYLLNNTLMKTQPSLAVTLVDNHDTQPGQSLQSWVEPWFKPLAYAFILTRQEGYPCVFYGDYYGIPKYNIPGLKSKIDPLLIARRDYAYGTQRDYIDHQDIIGWTREGIDTKPNSGLAALITDGPGGSKWMYVGKKHAGKVFYDLTGNRSDTVTINADGWGEFKVNKGSVSIWVAK

SEQ ID NO: 24057 - protein, 482 aa, Bacillus sp. TS-23
APINETMMQYFEWDLPNDGTLWTKVKNEAANLSSLGITALWLPPAYKGTSQSDVGYGVYDLYDLGEFNQKGTIRTKYGTKTQYIQAIQAAKAAGMQVYADVVFNHKAGADGTEFVDAVEVDPANRCQEISGTYQIQAWTKFDFPGRGNTYSSFKWRWYHFDGIDWDESRKLNRIYLFRSGGKAWDWEVDTENGNYDYLMFADLDMDHPEVVTELKNWGTWYVNTTNIDGFRLDAVKHIKYSFFPDWLTYVRNQTGKNLFAVGEFWSYDVNKLHNYITKTNGSMSLFDAPLHNNFYTASKSSGRFDMRYLLNNTLMKDQPSLAVTLVDNHDTQPGQSLQSWVEPWFKPLAYAFILTRQEGYPCVFYGDYYGIPKYNIPGLKSKIDPLLIARRDYAYGTQRDYIDHQDIIGWTREGIDTKPNSGLAALITDGPGGSKWMYVGKKHAGKVFYDLTGNRSDTVTINADGWGEFKVNKGSVSIWVAK

SEQ ID NO: 24058 - protein, 531 aa, Unidentified
KKIFPWILSLLLLFSFIAPFSIQTEKVRAGSVPVNGTMMQYFEWYLPDDGTLWTKVANNAQSLANLGITALWLPPAYKGTSSSDVGYGVYDLYDLGEFNQKGTVRTKYGTKTQYIQAIQAAHTAGMQVYADVVFNHKAGADGTELVDAVEVNPSDRNQEISGTYQIQAWTKFDFPGRGNTYSSFKWRWYHFDGTDWDESRKLNRIYKFRGTGKAWDWEVDTENGNYDYLMYADLDMDHPEVVSELKNWGKWYVITTNIDGFRLDAVKHIKYSFFPDWLSYLRTQTQKPLFAVGEFWSYDINKLHNYITKTNGSMSLFDAPLHNNFYIASKSGGYFDMRTLLNNTLMKEQPTLSVTLVDNHDTEPGQSLQSWVEPWFKPLAYAFILTRQEGYPCVFYGDYYGIPKYNIPALKSKLDPLLIARRDYAYGTQHDYIDNADIIGWTREGVAEKANSGLAALITDGPGGSKWMYVGKQHAGKTFYDLTGNRSDTVTINADGWGEFKVNGGSVSIWVPKTSTTSQITFTVNNATTVW

SEQ ID NO: 24059 - protein, 531 aa, unidentified
KKIFPWIVSLLLLFSFIAPFSIQTEKVRAGSVPVNGTMMQYFEWYLPDDGTLWTKVANNAQSLANLGITALWLPPAYKGTSSSDVGYGVYDLYDLGEFNQKGTVRTKYGTKTQYIQAIQAAHTAGMQVYADVVFNHKAGADGTELVDAVEVNPSDRNQEISGTYQIQAWTKFDFPGRGNTYSSFKWRWYHFDGTDWDESRKLNRIYKFRGTGKAWDWEVDTENGNYDYLMYADLDMDHPEVVSELKNWGKWYVTTTNIDGFRLDAVKHIKYSFFPDWLSYVRTQTQKPLFAVGEFWSYDINKLHNYITKTNGSMSLFDAPLHNNFYIASKSGGYFDMRTLLNNTLMKDQPTLSVTLVDNHDTEPGQSLQSWVEPWFKPLAYAFILTRQEGYPCIFYGDYYGIPKYNIPALKSKLDPLLIARRDYAYGTQHDYIDNADIIGWTREGVAEKANSGLAALITDGPGGSKWMYVGKQHAGKTFYDLTGNRSDTVTINADGWGEFKVNGGSVSIWVPKTSTTSQITFTVNNATTVW

SEQ ID NO: 24060 - protein, 531 aa, unidentified
KKSFPWILSLLLLFSFIAPFSIQTEKVRAGSVPVNGTMMQYFEWYLPDDGTLWTKVANNAQSLANLGITALWLPPAYKGTSSSDVGYGVYDLYDLGEFNQKGTVRTKYGTKTQYIQAIQAAHTAGMRVYADVVFNHKAGADGTELVDAVEVNPSDRNQEISGTYQIQAWTKFDFPGRGNTYSSFKWRWYHFDGTDWDESRKLNRIYKFRGTGKAWDWEVDTENGNYDYLMYADLDMDHPEVVSELKNWGKWYVTTTNIDGFRLDAVKHIKYSFFPDWLSYVRTQTQKPLFAVGEFWSYDISKLHNYITKTNGSMSLFDAPLHNNFYIASKSSGYFDMRTLLNNTLMKDQPTLAVTLVDNHDTEPGQSLQSWVEPWFKPLAYAFILTRQEGYPCVFYGDYYGIPKYNIPALKSKLDPLLIARRDYAYGTQHDYIDSADIIGWTREGVAEKANSGLAALITDGPGGSKWMYVGKQHAGKTFYDLTGNRSDTVTINADGWGEFKVNGGSVSIWVPKISTTSQITFTVNNATTVW

SEQ ID NO: 24061 - protein, 485 aa, Bacillus sp.
HHNGTNGTLMQYFEWYLPNDGNHWNRLRSDASNLKDKGISAVWIPPAWKGASQNDVGYGAYDLYDLGEFNQKGTIRTKYGTRNQLQAAVNALKSNGIQVYGDVVMNHKGGADATEMVKAVEVNPNNRNQEVSGEYTIEAWTKFDFPGRANTHSNFKWRWYHFDGVDYDQSRKLNNRIYKFRGDTKNWDWEVDTEFGNYDYLLYADIDMDNPEVVNELRNWGVWYTNTLGLDGFRIDAVKHIKYSFTRDWINHVRSAIGKNMFAVAEFWKNDLGAIENYLNKTNWNHSVFDVPLHFNLYYASKSGGNYDMRQIFNGTVVQKHPTHAVTFVDNHDSQPEEALESFVREWFKPLAYALTLTREQGYPSIFYGDYYGIPTHGVPAMKSKIDPILEARQKYAYGRQNDYLDHHNIIGWTREGNTAHPNSGLATIMSDGAGGNKWMFVGRNKAGQVWTDITGNKAGTVTINADGWGNFSVNGGSVSIWVNK

SEQ ID NO: 24062 - protein, 485 aa, Bacillus sp.
HHNGTNGTMMQYFEWYLPNDGNHWNRLRSDASNLKDKGISAVWIPPAWKGASQNDVGYGAYDLYDLGEFNQKGTIRTKYGTRNQLQAAVNALKSNGIQVYGDVVMNHKGGADATEMVRAVEVNPNNRNQEVSGEYTIEAWTKFDFPGRGNTHSNFKWRWYHFNGVDWDQSRKLNNRIYKFANDGTGWNWEVDTENGNYNYLMYANINFSHPEVVNELRNWGVWYTNTLGLDGFRIDAVKHIKYSFTRDWINHVRSATGKNMFAVAEFWKNDLGAIENYLNKTNWNHSVFDVPLHYNLYNASKSGGNYDMRQIFNGTVVQRHPMHAVTFVDNHDSQPEEALESFVEEWFKPLAYALTLTREQGYPSVFYGDYYGIPTHGVPAMKSKIDPILEARQKYAYGRQNDYLDHHNIIGWTREGNTAHPNSGLATIMSDGAGGNKWMFVGRNKAGQVWTDITGNRAGTVTINADGWGNFSVNGGSVSIWVNK

SEQ ID NO: 24063 - protein, 485 aa, Bacillus sp.
HHNGTNGTMMQYFEWYLPNDGNHWNRLRSDASNLKDKGISAVWIPPAWKGASQNDVGYGAYDLYDLGEFNQKGTIRTKYGTRNQLQAAVNALKSNGIQVYGDVVMNHKGGADATEMVRAVEVNPNNRNQEVSGEYTIEAWTKFDFPGRGNTHSNFKWRWYHFNGVDWDQSRKLNNRIYKFANDGTNWNWEVDTENGNYNYLMYANINFSHPEVVNELRNWGVWYTNTLGLDGFRIDAVKHIKYSFTRDWINHVRSATGKNMFAVAEFWKNDLGAIENYLNKTNWNHSVFDVPLHYNLYNASKSGGNYDMRQIFNGTVVQRHPMHAVTFVDNHDSQPEEALESFVEEWFKPLAYALTLTREQGYPSVFYGDYYGIPTHGVPAMKSKIDPILEARQKYAYGRQNDYLDHHNIIGWTREGNTAHPNSGLATIMSDGAGGNKWMFVGRNKAGQVWTDITGNRAGTVTINADGWGNFSVNGGSVSIWVNK

SEQ ID NO: 24064 - protein, 485 aa, Bacillus sp.
HHNGTNGTMMQYFEWYLPNDGNHWNRLRSDASNLKDKGISAVWIPPAWKGASQNDVGYGAYDLYDLGEFNQKGTIRTKYGTRNQLQAAVNALKSNGIQVYGDVVMNHKGGADATEMVRAVEVNPNNRNQEVSGEYTIEAWTKFDFPGRGNTHSNFKWRWYHFNGVDWDQSRKLNNRIYKFANDGTNWNWEVDTENGNYDYLMYANIDFSHPEVVNELRNWGVWYTNTLGLDGFRIDAVKHIPYWFTRDWINHVRSATGKNMFAVAEFWKNDLGAIENYLNKTNWNHSVFDVPLHYNLYNASKSGGNYDMRQIFNGTVVQRHPMHAVTFVDNHDSQPEEALESFVEEWFKPLAYALTLTREQGYPSVFYGDYYGIPTHGVPAMKSKIDPILEARQKYAYGRQNDYLDHHNIIGWTREGNTAHPNSGLATIMSDGAGGNKWMFVGRNKAGQVWTDITGNRAGTVTINADGWGNFSVNGGSVSIWVNK

SEQ ID NO: 24065 - protein, 483 aa, Bacillus subtilis
HHNGTNGTMMQYFEWYLPNDGNHWNRLRSDASNLKDKGITAVWIPPAWKGASQNDVGYGAYDLYDLGEFNQKGTVRTKYGTRNQLQAAVTALKSNGIQVYGDVVMNHKGGADATEWVRAVEVNPSNRNQEVSGDYTIEAWTKFDFPGRGNTHSNFKWRWYHFDGVDWDQSRQLQNRIYKFRGKGWDWEVDTENGNYDYLMYADIDMDHPEVVNELRNWGVWYTNTLGLDGFRIDAVKHIKYSFTRDWLTHVRNTTGKNMFAVAEFWKNDIGAIENYLSKTNWNHSVFDVPLHYNLYNASRSGGNYDMRQIFNGTVVQRHPTHAVTFVDNHDSQPEEALESFVEEWFKPLAYALTLTRDQGYPSVFYGDYYGIPTHGVPAMKSKIDPILEARQKYAYGTQHDYLDHPDVIGWTREGDSVHANSGLATLMSDGPGGSKWMDVGKNNAGEVWYDITGNQTNTVTINKDGWGQFQVSGGSVSIYVQR

SEQ ID NO: 24066 - protein, 483 aa, Bacillus sp.
HHNGTNGTLMQYFEWYLPNDGNHWNRLRSDASNLKDKGISAVWIPPAWKGASQNDVGYGAYDLYDLGEFNQKGTIRTKYGTRNQLQAAVNALKSNGIQVYGDVVMNHKGGADATEMVKAVEVNPNNRNQEVSGEYTIEAWTKFDFPGRANTHSNFKWRWYHFDGVDYDQSRKLNNRIYKFRTKAWDWEVDTEFGNYDYLLYADIDMDNPEVVNELRNWGVWYTNTLGLDGFRIDAVKHIKYSFTRDWINHVRSAIGKNMFAVAEFWKNDLGAIENYLNKTNWNHSVFDVPLHFNLYYASKSGGNYDMRQIFNGTVVQKHPTHAVTFVDNHDSQPEEALESFVREWFKPLAYALTLTREQGYPCVFYGDYYGIPTHGVPAMKSKIDPILEARQKYAYGRQNDYLDHHNIIGWTREGNTAHPNSGLATIMSDGAGGNKWMFVGRNKAGQVWTDITGNKAGTVTINADGWGNFSVNGGSVSIWVNK

SEQ ID NO: 24067 - protein, 483 aa, Bacillus sp.
HHNGTNGTLMQYFEWYLPNDGNHWNRLRSDASNLKDKGISAVWIPPAWKGASQNDVGYGAYDLYDLGEFNQKGTIRTKYGTRNQLQAAVNALKSNGIQVYGDVVMNHKGGADATEMVKAVEVNPNNRNQEVSGEYTIEAWTKFDFPGRANTHSNFKWRWYHFDGVDYDQSRKLNNRIYKFRTKAWDWEVDTEFGNYDYLLYADIDMDNPEVVNELRNWGVWYTNTLGLDGFRIDAVKHIKYSFTRDWINHVRSAIGKNMFAVAEFWKNDLGAIENYLNKTNWNHSVFDVPLHFNLYFASKSGGNYDMRQIFNGTVVQKHPTHAVTFVDNHDSQPEEALESFVREWFKPLAYALTLTREQGYPSIFYGDYYGIPTHGVPAMKSKIDPILEARQKYAYGRQNDYLDHHNIIGWTREGNTAHPNSGLATIMSDGAGGNKWMFVGRNKAGQVWTDITGNKAGTVTINADGWGNFSVNGGSVSIWVNK

SEQ ID NO: 24068 - protein, 483 aa, Bacillus sp.
HHNGTNGTLMQYFEWYLPNDGNHWNRLRSNASDLKDVGISAVWIPPAFKGASQNDVGYGAYDLYDLGEFNQKGTIRTKYGTRNQLQAAVNALKSNGIQVYGDVVMNHKGGADATEMVKAVEVNPNNRNQEVSGEYTIEAWTKFDFPGRANTHSNFKWRWYHFDGVDWDQSRKLNNRIYKFRTKAWDWEVDTEFGNYDYLLYADIDMDHPEVVNELRNWGVWYTNTLGLDGFRIDAVKHIKYSFTRDWINHVRSAIGKNMFAVAEFWKNDLGAIENYLNKTNWNHSVFDVPLHFNLYYASKSGGNYDMRQIFNGTVVQKHPTHAVTFVDNHDSQPEESLESFVREWFKPLAYALTLTREQGYPSVFYGDYYGIPTHGVPAMRSKIDPILEARQKYAYGRQNDYLDHHNIIGWTREGNTAHPNSGLATIMSDGAGGNKWMFVGRNKAGQVWTDITGNKAGTVTINADGWGNFSVNGGSVSIWVNK

SEQ ID NO: 24069 - protein, 483 aa, Bacillus sp.
HHNGTNGTLMQYFEWYLPNDGNHWNRLRSDASNLKDKGISAVWIPPAWKGASQNDVGYGAYDLYDLGEFNQKGTIRTKYGTRNQLQAAVNALKSNGIQVYGDVVMNHKGGADATEMVKAVEVNPNNRNQEVSGEYTIEAWTKFDFPGRANTHSNFKWRWYHFDGVDYDQSRKLNNRIYKFRTKAWDWEVDTEFGNYDYLLYADIDMDNPEVVNELRNWGVWYTNTLGLDGFRIDAVKHIKYSFTRDWINHVRSAIGKNMFAVAEFWKNDLGAIENYLNKTNWNHSVFDVPLHFNLYYASKSGGNYDMRQIFNGTVVQKHPTHAVTFVDNHDSQPEEALESFVREWFKPLAYALTLTREQGYPSVFYGDYYGIPTHGVPAMKSKIDPILEARQKYAYGRQNDYLDHHNIIGWTREGNTAHPNSGLATIMSDGAGGNKWMFVGRNKAGQVWTDITGNKAGTVTINADGWGNFSVNGGSVSIYVNK

SEQ ID NO: 24070 - protein, 483 aa, Bacillus sp. SP70
HHNGTNGTMMQYFEWYLPNDGNHWNRLNSDASNLKSKGITAVWIPPAWKGASQNDVGYGAYDLYDLGEFNQKGTVRTKYGTRSQLQAAVTSLKNNGIQVYGDVVMNHKGGADATEMVRAVEVNPNNRNQEVTGEYTIEAWTRFDFPGRGNTHSSFKWRYYHFDGVDFDQSRRLNNRIYKFRGKAWDWEVDTENGNYDYLMYADIDMDHPEVVNELRNWGVWYTNTLGLDGFRIDAVKHIKYSFTRDWINHVRSATGKNMPAVAEFWKNDLGAIENYLQKTNWNHSVFDVPLHYNLYNASKSGGNYDMRNIFNGTVVQRHPSHAVTFVDNHDSQPEEALESFVEEWFKPLAYALTLTREQGYPSVFYGDYYGIPTHGVPAMRSKIDPILEARQKYAYGKQNDYLDHHNIIGWTREGNTAHPNSGLATIMSDGAGGSKVMFVGRNKAGQVWSDITGNRTGTVTINADGYGNFSVNKQSVSIWVNK

SEQ ID NO: 24071 - protein, 483 aa, Bacillus sp.
HHNGTNGTLMQYFEWYLPNDGNHWNRLRSDASNLKDKGISAVWIPPAWKGASQNDVGYGAYDLYDLGEFNQKGTIRTKYGTRNQLQAAVNALKSNGIQVYGDVVMNHKGGADATEFVKAVEVNPNNRNQEVSGEYTIEAWTKFDFPGRANTHSNFKWRWYHFDGVDYDQSRKLNNRIYKFRTKAWDWEVDTEFGNYDYLLYADIDMDNPEVVNELRNWGVWYTNTLGLDGFRIDAVKHIKYSFTRDWINHVRSAIGKNMFAVAEFWKNDLGAIENYLNKTNWNHSVFDVPLHFNLYYASKSGGNYDMRQIFNGTVVQKHPTHAVTFVDNHDSQPEEALESFVREWFKPLAYALTLTREQGYPSIFYGDYYGIPTHGVPAMKSKIDPILEARQKYAYGRQNDYLDHHNIIGWTREGNTAHPNSGLATIMSDGAGGNKWMFVGRNKAGQVWTDITGNKAGTVTINADGWGNFSVNGGSVSIWVNK

SEQ ID NO: 24072 - protein, 483 aa, Bacillus sp.
HHNGTNGTLMQYFEWYLPNDGNHWNRLRSDASNLKDKGISAVWIPPAWKGASQNDVGYGAYDLYDLGEFNQKGTIRTKYGTRNQLQAAVNALKSNGIQVYGDVVMNHKGGADATEMVKAVEVNPNNRNQEVSGEYTIEAWTKFDFPGRANTHSNFKWRWYHFDGVDYDQSRKLNNRIYKFRTKAWDWEVDTEFGNYDYLLYADIDMDNPEVVNELRNWGVWYTNTLGLDGFRIDAVKHIKYSFTRDWINHVRSAIGKNMFAVAEFWKNDLGAIENYLNKTNWNHSVFDVPLHFNLYYASKSGGNYDMRQIFNGTVVQKHPTHAVTFVDNHDSQPEEALESFVREWFKPLAYALTLTREQGYPSIFYGDYYGIPTHGVPAMKSKIDPILEARQKYAYGRQNDYLDHHNIIGWTREGNTAHPNSGLATIMSDGAGGNKWMFVGRNKAGQVWTDITGNKAGTVTINADGWGNFSVNGGSVSIWVNK

SEQ ID NO: 24073 - protein, 483 aa, Bacillus sp.
HHNGTNGTLMQYFEWYLPNDGNHWNRLRSDASNLKDKGISAVWIPPAFKGASQNDVGYGAYDLYDLGEFNQKGTIRTKYGTRNQLQAAVNALKSNGIQVYGDVVMNHKGGADATEMVKAVEVNPNNRNQEVSGEYTIEAWTKFDFPGRANTHSNFKWRWYHFDGVDYDQSRKLNNRIYKFRTKAWDWEVDTEFGNYDYLLYADIDMDNPEVVNELRNWGVWYTNTLGLDGFRIDAVKHIKYSFTRDWINHVRSAIGKNMFAVAEFWKNDLGAIENYLNKTNWNHSVFDVPLHFNLYYASKSGGNYDMRQIFNGTVVQKHPTHAVTFVDNHDSQPEEALESFVREWFKPLAYALTLTREQGYPSVFYGDYYGIPTHGVPAMKSKIDPILEARQKYAYGRQNDYLDHHNIIGWTREGNTAHPNSGLATIMSDGAGGNKWMFVGRNKAGQVWTDITGNKAGTVTINADGWGNFSVNGGSVSIWVNK

SEQ ID NO: 24074 - protein, 483 aa, Bacillus sp.
HHNGTNGTLMQYFEWYLPNDGNHWNRLRSNASDLKDVGISAVWIPPAWKGASQNDVGYGAYDLYDLGEFNQKGTIRTKYGTRNQLQAAVNALKSNGIQVYGDVVMNHKGGADATEMVKAVEVNPNNRNQEVSGEYTIEAWTKFDFPGRANTHSNFKWRWYHFDGVDWDQSRKLNNRIYKFRTKAWDWEVDTEFGNYDYLLYADIDMDHPEVVNELRNWGVWYTNTLGLDGFRIDAVKHIKYSFTRDWINHVRSAIGKNMFAVAEFWKNDLGAIENYLNKTNWNHSVFDVPLHFNLYYASKSGGNYDMRQIFNGTVVQKHPTHAVTFVDNHDSQPEESLESFVREWFKPLAYALTLTREQGYPSVFYGDYYGIPTHGVPAMRSKIDPILEARQKYAYGRQNDYLDHHNIIGWTREGNTAHPNSGLATIMSDGAGGNKWMFVGRNKAGQVWTDITGNKAGTVTINADGWGNFSVNGGSVSIYVNK

SEQ ID NO: 24075 - protein, 483 aa, Bacillus sp.
HHNGTNGTLMQYFEWYLPNDGNHWNRLRSDASNLKDKGISAVWIPPAFKGASQNDVGYGAYDLYDLGEFNQKGTIRTKYGTRNQLQAAVNALKSNGIQVYGDVVMNHKGGADATEMVHAVEVNPNNRNQEVSGEYTIEAWTKFDFPGRANTHSNFKWRWYHFDGVDYDQSRKLNNRIYKFRTKAWDWEVDTEFGNYDYLLYADIDMDNPEVVNELRNWGVWYTNTLGLDGFRIDAVKHIKYSFTRDWINHVRSAIGKNMFAVAEFWKNDLGAIENYLNKTNWNHSVFDVPLHFNLYYASKSGGNYDMRQIFNGTVVQKHPTHAVTFVDNHDSQPEEALESFVREWFKPLAYALTLTREQGYPSVFYGDYYGIPTHGVPAMKSKIDPILEARQKYAYGRQNDYLDHHNIIGWTREGNTAHPNSGLATIMSDGAGGNKWMFVGRNKAGQVWTDITGNKAGTVTINADGWGNFSVNGGSVSIWVNK

SEQ ID NO: 24076 - protein, 485 aa, Bacillus sp.
HHNGTNGTLMQYFEWYLPNDGNHWNRLRSDASNLKDKGISAVWIPPAWKGASQNDVGYGAYDLYDLGEFNQKGTIRTKYGTRNQLQAAVNALKSNGIQVYGDVVMNHKGGADATEMVKAVEVNPNNRNQEVSGEYTIEAWTKFDFPGRANTHSNFKWRWYHFDGVDYDQSRKLNNRIYKFRGDTKNWDWEVDTEFGNYDYLLYADIDMDNPEVVNELRNWGVWYTNTLGLDGFRIDAVKHIKYSFTRDWINHVRSAIGKNMFAVAEFWKNDLGAIENYLNKTNWNHSVFDVPLHFNLYFASKSGGNYDMRQIFNGTVVQKHPTHAVTFVDNHDSQPEEALESFVREWFKPLAYALTLTREQGYPSIFYGDYYGIPTHGVPAMKSKIDPILEARQKYAYGRQNDYLDHHNIIGWTREGNTAHPNSGLATIMSDGAGGNKWMFVGRNKAGQVWTDITGNKAGTVTINADGWGNFSVNGGSVSIWVNK

SEQ ID NO: 24077 - protein, 483 aa, Bacillus sp. SP70
HHNGTNGTMMQYFEWYLPNDGNHWNRLNSDASNLKSKGITAVWIPPAWKGASQNDVGYGAYDLYDLGEFNQKGTVRTKYGTRSQLQAAVTSLKNNGIQVYGDVVMNHKGGADATEMVRAVEVNPNNRNQEVTGEYTIEAWTRFDFPGRGNTHSSFKWRYYHFDGVDFDQSRRLNNRIYKFRGKAWDWEVDTENGNYDYLMYADIDMDHPEVVNELRNWGVWYTNTLGLDGFRIDAVKHIKYSFTRDWINHVRSATGKPMPAVAEFWKNDLGAIENYLQKTNWNHSVFDVPLHYNLYNASKSGGNYDMRNIFNGTVVQRHPSHAVTFVDNHDSQPEEALESFVEEWFKPLAYALTLTREQGYPSVFYGDYYGIPTHGVPAMRSKIDPILEARQKYAYGKQNDYLDHHNIIGWTREGNTAHPNSGLATIMSDGAGGSKRMFVGRNKAGQVWSDITGNRTGTVTINADGYGNFSVNKESVSIWVNK

SEQ ID NO: 24078 - protein, 485 aa, Bacillus sp.
HHNGTNGTLMQYFEWYLPNDGNHWNRLRSDASNLKDKGISAVWIPPAFKGASQNDVGYGAYDLYDLGEFNQKGTIRTKYGTRNQLQAAVNALKSNGIQVYGDVVMNHKGGADATEMVKAVEVNPNNRNQEVSGEYTIEAWTKFDFPGRANTHSNFKWRWYHFDGVDYDQSRKLNNRIYKFRGDTKNWDWEVDTEFGNYDYLLYADIDMDNPEVVNELRNWGVWYTNTLGLDGFRIDAVKHIKYSFTRDWINHVRSAIGKNMFAVAEFWKNDLGAIENYLNKTNWNHSVFDVPLHFNLYYASKSGGNYDMRQIFNGTVVQKHPTHAVTFVDNHDSQPEEALESFVREWFKPLAYALTLTREQGYPSVFYGDYYGIPTHGVPAMKSKIDPILEARQKYAYGRQNDYLDHHNIIGWTREGNTAHPNSGLATIMSDGAGGNKWMFVGRNKAGQVWTDITGNKAGTVTINADGWGNFSVNGGSVSIWVNK

SEQ ID NO: 24079 - protein, 485 aa, Bacillus sp.
ANTAPINETMMQYFEWDLPNDGTLWTKVKNEAANLSSLGITALWLPPAYKGTSQSDVGYGVYDLYDLGEFNQKGTIRTKYGTKTQYIQAIQAAKAAGMQVYADVVFNHKAGADGTEFVDAVEVDPSNRNQETSGTYQIQAWTKFDFPGRGNTYSSFKWRWYHFDGTDWDESRKLNRIYKFRSTGKAWDWEVDTENGNYDYLMFADLDMDHPEVVTELKNWGTWYVNTTNIDGFRLDAVKHIKYSFFPDWLTYVRNQTGKNLFAVGEFWSYDVNKLHNYITKTNGSMSLFDAPLHNNFYTASKSSGYFDMRYLLNNTLMKDQPSLAVTLVDNHDTQPGQSLQSWVEPWFKPLAYAFILTRQEGYPCVFYGDYYGIPKYNIPGLKSKIDPLLIARRDYAYGTQRDYIDHQDIIGWTREGIDTKPNSGLAALITDGPGGSKWMYVGKKHAGKVFYDLTGNRSDTVTINADGWGEFKVNGGSVSIWVAK

SEQ ID NO: 24080 - protein, 478 aa, Bacillus sp. TS-23
APINETMMQYFEWDLPNDGTLWTKVKNEAANLSSLGITALWLPPAYKGTSQSDVGYGVYDLYDLGEFNQKGTIRTKYGTKTQYIRAIQAAKAAGMQVYADVVFNHKAGADGTEFVDAVEVDPSNRNQETSGTYQIQAWTKFDFPGRGNTYSSFKWRWYHFDGTDWDESRKLNRIYKFRSTGKAWDWEVDTENGNYDYLMFADLDMDHPEVVTELKNWGTWYVETTNIDGFRLDAVKHIKYSFFPDWLTYVRNQTGKNLFAVGEFWSYDVEKLHNYITKTEGSMSLFDAPLHNNFYTASKSSGYFDMRYLLNNTLMKDQPSLAVTLVDNHDTQPGQSLQSWVEPWFKPLAYAFILTRQEGYPCVFYGDYYGIPKYNIPGLKSKIDPLLIARRDYAYGTQRDYIDHQDIIGWTREGIDTKPNSGLAALITDGPGGSKWMYVGKKHAGKVFYDLTGNRSDTVTINADGWGEFKVNGGSVSI

SEQ ID NO: 24081 - protein, 478 aa, Bacillus sp. TS-23
APINETMMQYFEWDLPNDGTLWTKVKNEAANLSSLGITALWLPPAYKGTSQSDVGYGVYDLYDLGEFNQKGTIRTKYGTKTQYIEAIQAAKAAGMQVYADVVFNHKAGADGTEFVDAVEVDPSNRNQETSGTYQIQAWTKFDFPGRGNTYSSFKWRWYHFDGTDWDESRKLNRIYKFRSTGKAWDWEVDTENGNYDYLMFADLDMDHPEVVTELKNWGTWYVRTTNIDGFRLDAVKHIKYSFFPDWLTYVRNQTGKNLFAVGEFWSYDVRKLHNYITKTNGSMSLFDAPLHNNFYTASKSSGYFDMRYLLNNTLMKDQPSLAVTLVDNHDTQPGQSLQSWVEPWFKPLAYAFILTRQEGYPCVFYGDYYGIPKYNIPGLKSKIDPLLIARRDYAYGTQRDYIDHQDIIGWTREGIDTKPNSGLAALITDGPGGSKWMYVGKKHAGKVFYDLTGNRSDTVTINADGWGEFKVNGGSVSI

SEQ ID NO: 24082 - protein, 478 aa, Bacillus sp. TS-23
APINETMMQYFEWDLPNDGTLWTKVKNEAANLSSLGITALWLPPAYKGTSQSDVGYGVYDLYDLGEFNQKGTIRTKYGTKTQYIEAIQAAKAAGMQVYADVVFNHKAGADGTEFVDAVEVDPSNRNQETSGTYQIQAWTKFDFPGRGNTYSSFKWRWYHFDGTDWDESRKLNRIYKFRSTGKAWDWEVDTENGNYDYLMFADLDMDHPEVVTELKNWGTWYVRTTNIDGFRLDAVKHIKYSFFPDWLTYVRNQTGKNLFAVGEFWSYDVEKLHNYITKTRGSMSLFDAPLHNNFYTASKSSGYFDMRYLLNNTLMKDQPSLAVTLVDNHDTQPGQSLQSWVEPWFKPLAYAFILTRQEGYPCVFYGDYYGIPKYNIPGLKSKIDPLLIARRDYAYGTQRDYIDHQDIIGWTREGIDTKPNSGLAALITDGPGGSKWMYVGKKHAGKVFYDLTGNRSDTVTINADGWGEFKVNGGSVSI

SEQ ID NO: 24083 - protein, 478 aa, Bacillus sp. TS-23
APINETMMQYFEWDLPNDGTLWTKVKNEAANLSSLGITALWLPPAYKGTSQSDVGYGVYDLYDLGEFNQKGTIRTKYGTKTQYIRAIQAAKAAGMQVYADVVFNHKAGADGTEFVDAVEVDPSNRNQETSGTYQIQAWTKFDFPGRGNTYSSFKWRWYHFDGTDWDESRKLNRIYKFRSTGKAWDWEVDTENGNYDYLMFADLDMDHPEVVTELKNWGTWYVRTTNIDGFRLDAVKHIKYSFFPDWLTYVRNQTGKNLFAVGEFWSYDVRKLHNYITKTNGSMSLFDAPLHNNFYTASKSSGYFDMRYLLNNTLMKDQPSLAVTLVDNHDTQPGQSLQSWVEPWFKPLAYAFILTRQEGYPCVFYGDYYGIPKYNIPGLKSKIDPLLIARRDYAYGTQRDYIDHQDIIGWTREGIDTKPNSGLAALITDGPGGSKWMYVGKKHAGKVFYDLTGNRSDTVTINADGWGEFKVNGGSVSI

SEQ ID NO: 24084 - protein, 478 aa, Bacillus sp. TS-23
APINETMMQYFEWDLPNDGTLWTKVKNEAANLSSLGITALWLPPAYKGTSQSDVGYGVYDLYDLGEFNQKGTIRTKYGTKTQYIEAIQAAKAAGMQVYADVVFNHKAGADGTEFVDAVEVDPSNRNQETSGTYQIQAWTKFDFPGRGNTYSSFKWRWYHFDGTDWDESRKLNRIYKFRSTGKAWDWEVDTENGNYDYLMFADLDMDHPEVVTELKNWGTWYVRTTNIDGFRLDAVKHIKYSFFPDWLTYVRNQTGKNLFAVGEFWSYDVRKLHNYITKTRGSMSLFDAPLHNNFYTASKSSGYFDMRYLLNNTLMKDQPSLAVTLVDNHDTQPGQSLQSWVEPWFKPLAYAFILTRQEGYPCVFYGDYYGIPKYNIPGLKSKIDPLLIARRDYAYGTQRDYIDHQDIIGWTREGIDTKPNSGLAALITDGPGGSKWMYVGKKHAGKVFYDLTGNRSDTVTINADGWGEFKVNGGSVSI

SEQ ID NO: 24085 - protein, 478 aa, Bacillus sp. TS-23
APINETMMQYFEWDLPNDGTLWTKVKNEAANLSSLGITALWLPPAYKGTSQSDVGYGVYDLYDLGEFNQKGTIRTKYGTKTQYIRAIQAAKAAGMQVYADVVFNHKAGADGTEFVDAVEVDPSNRNQETSGTYQIQAWTKFDFPGRGNTYSSFKWRWYHFDGTDWDESRKLNRIYKFRSTGKAWDWEVDTENGNYDYLMFADLDMDHPEVVTELKNWGTWYVRTTNIDGFRLDAVKHIKYSFFPDWLTYVRNQTGKNLFAVGEFWSYDVEKLHNYITKTNGSMSLFDAPLHNNFYTASKSSGYFDMRYLLNNTLMKDQPSLAVTLVDNHDTQPGQSLQSWVEPWFKPLAYAFILTRQEGYPCVFYGDYYGIPKYNIPGLKSKIDPLLIARRDYAYGTQRDYIDHQDIIGWTREGIDTKPNSGLAALITDGPGGSKWMYVGKKHAGKVFYDLTGNRSDTVTINADGWGEFKVNGGSVSI

SEQ ID NO: 24086 - protein, 478 aa, Bacillus sp. TS-23
APINETMMQYFEWDLPNDGTLWTKVKNEAANLSSLGITALWLPPAYKGTSQSDVGYGVYDLYDLGEFNQKGTIRTKYGTKTQYIRAIQAAKAAGMQVYADVVFNHKAGADGTEFVDAVEVDPSNRNQETSGTYQIQAWTKFDFPGRGNTYSSFKWRWYHFDGTDWDESRKLNRIYKFRSTGKAWDWEVDTENGNYDYLMFADLDMDHPEVVTELKNWGTWYVRTTNIDGFRLDAVKHIKYSFFPDWLTYVRNQTGKNLFAVGEFWSYDVEKLHNYITKTRGSMSLFDAPLHNNFYTASKSSGYFDMRYLLNNTLMKDQPSLAVTLVDNHDTQPGQSLQSWVEPWFKPLAYAFILTRQEGYPCVFYGDYYGIPKYNIPGLKSKIDPLLIARRDYAYGTQRDYIDHQDIIGWTREGIDTKPNSGLAALITDGPGGSKWMYVGKKHAGKVFYDLTGNRSDTVTINADGWGEFKVNGGSVSI

SEQ ID NO: 24087 - protein, 478 aa, Bacillus sp. TS-23
APINETMMQYFEWDLPNDGTLWTKVKNEAANLSSLGITALWLPPAYKGTSQSDVGYGVYDLYDLGEFNQKGTIRTKYGTKTQYIRAIQAAKAAGMQVYADVVFNHKAGADGTEFVDAVEVDPSNRNQETSGTYQIQAWTKFDFPGRGNTYSSFKWRWYHFDGTDWDESRKLNRIYKFRSTGKAWDWEVDTENGNYDYLMFADLDMDHPEVVTELKNWGTWYVETTNIDGFRLDAVKHIKYSFFPDWLTYVRNQTGKNLFAVGEFWSYDVRKLHNYITKTRGSMSLFDAPLHNNFYTASKSSGYFDMRYLLNNTLMKDQPSLAVTLVDNHDTQPGQSLQSWVEPWFKPLAYAFILTRQEGYPCVFYGDYYGIPKYNIPGLKSKIDPLLIARRDYAYGTQRDYIDHQDIIGWTREGIDTKPNSGLAALITDGPGGSKWMYVGKKHAGKVFYDLTGNRSDTVTINADGWGEFKVNGGSVSI

SEQ ID NO: 24088 - protein, 478 aa, Bacillus sp. TS-23
APINETMMQYFEWDLPNDGTLWTKVKNEAANLSSLGITALWLPPAYKGTSQSDVGYGVYDLYDLGEFNQKGTIRTKYGTKTQYIEAIQAAKAAGMQVYADVVFNHKAGADGTEFVDAVEVDPSNRNQETSGTYQIQAWTKFDFPGRGNTYSSFKWRWYHFDGTDWDESRKLNRIYKFRSTGKAWDWEVDTENGNYDYLMFADLDMDHPEVVTELKNWGTWYVRTTNIDGFRLDAVKHIKYSFFPDWLTYVRNQTGKNLFAVGEFWSYDVRKLHNYITKTEGSMSLFDAPLHNNFYTASKSSGYFDMRYLLNNTLMKDQPSLAVTLVDNHDTQPGQSLQSWVEPWFKPLAYAFILTRQEGYPCVFYGDYYGIPKYNIPGLKSKIDPLLIARRDYAYGTQRDYIDHQDIIGWTREGIDTKPNSGLAALITDGPGGSKWMYVGKKHAGKVFYDLTGNRSDTVTINADGWGEFKVNGGSVSI

SEQ ID NO: 24089 - protein, 478 aa, Bacillus sp. TS-23
APINETMMQYFEWDLPNDGTLWTKVKNEAANLSSLGITALWLPPAYKGTSQSDVGYGVYDLYDLGEFNQKGTIRTKYGTKTQYIEAIQAAKAAGMQVYADVVFNHKAGADGTEFVDAVEVDPSNRNQETSGTYQIQAWTKFDFPGRGNTYSSFKWRWYHFDGTDWDESRKLNRIYKFRSTGKAWDWEVDTENGNYDYLMFADLDMDHPEVVTELKNWGTWYVRTTNIDGFRLDAVKHIKYSFFPDWLTYVRNQTGKNLFAVGEFWSYDVEKLHNYITKTEGSMSLFDAPLHNNFYTASKSSGYFDMRYLLNNTLMKDQPSLAVTLVDNHDTQPGQSLQSWVEPWFKPLAYAFILTRQEGYPCVFYGDYYGIPKYNIPGLKSKIDPLLIARRDYAYGTQRDYIDHQDIIGWTREGIDTKPNSGLAALITDGPGGSKWMYVGKKHAGKVFYDLTGNRSDTVTINADGWGEFKVNGGSVSI

SEQ ID NO: 24090 - protein, 478 aa, Bacillus sp. TS-23
APINETMMQYFEWDLPNDGTLWTKVKNEAANLSSLGITALWLPPAYKGTSQSDVGYGVYDLYDLGEFNQKGTIRTKYGTKTQYIEAIQAAKAAGMQVYADVVFNHKAGADGTEFVDAVEVDPSNRNQETSGTYQIQAWTKFDFPGRGNTYSSFKWRWYHFDGTDWDESRKLNRIYKFRSTGKAWDWEVDTENGNYDYLMFADLDMDHPEVVTELKNWGTWYVRTTNIDGFRLDAVKHIKYSFFPDWLTYVRNQTGKNLFAVGEFWSYDVEKLHNYITKTNGSMSLFDAPLHNNFYTASKSSGYFDMRYLLNNTLMKDQPSLAVTLVDNHDTQPGQSLQSWVEPWFKPLAYAFILTRQEGYPCVFYGDYYGIPKYNIPGLKSKIDPLLIARRDYAYGTQRDYIDHQDIIGWTREGIDTKPNSGLAALITDGPGGSKWMYVGKKHAGKVFYDLTGNRSDTVTINADGWGEFKVNGGSVSI

SEQ ID NO: 24091 - protein, 478 aa, Bacillus sp. TS-23
APINETMMQYFEWDLPNDGTLWTKVKNEAANLSSLGITALWLPPAYKGTSQSDVGYGVYDLYDLGEFNQKGTIRTKYGTKTQYIEAIQAAKAAGMQVYADVVFNHKAGADGTEFVDAVEVDPSNRNQETSGTYQIQAWTKFDFPGRGNTYSSFKWRWYHFDGTDWDESRKLNRIYKFRSTGKAWDWEVDTENGNYDYLMFADLDMDHPEVVTELKNWGTWYVETTNIDGFRLDAVKHIKYSFFPDWLTYVRNQTGKNLFAVGEFWSYDVEKLHNYITKTRGSMSLFDAPLHNNFYTASKSSGYFDMRYLLNNTLMKDQPSLAVTLVDNHDTQPGQSLQSWVEPWFKPLAYAFILTRQEGYPCVFYGDYYGIPKYNIPGLKSKIDPLLIARRDYAYGTQRDYIDHQDIIGWTREGIDTKPNSGLAALITDGPGGSKWMYVGKKHAGKVFYDLTGNRSDTVTINADGWGEFKVNGGSVSI

SEQ ID NO: 24092 - protein, 478 aa, Bacillus sp. TS-23
APINETMMQYFEWDLPNDGTLWTKVKNEAANLSSLGITALWLPPAYKGTSQSDVGYGVYDLYDLGEFNQKGTIRTKYGTKTQYIEAIQAAKAAGMQVYADVVFNHKAGADGTEFVDAVEVDPSNRNQETSGTYQIQAWTKFDFPGRGNTYSSFKWRWYHFDGTDWDESRKLNRIYKFRSTGKAWDWEVDTENGNYDYLMFADLDMDHPEVVTELKNWGTWYVETTNIDGFRLDAVKHIKYSFFPDWLTYVRNQTGKNLFAVGEFWSYDVEKLHNYITKTNGSMSLFDAPLHNNFYTASKSSGYFDMRYLLNNTLMKDQPSLAVTLVDNHDTQPGQSLQSWVEPWFKPLAYAFILTRQEGYPCVFYGDYYGIPKYNIPGLKSKIDPLLIARRDYAYGTQRDYIDHQDIIGWTREGIDTKPNSGLAALITDGPGGSKWMYVGKKHAGKVFYDLTGNRSDTVTINADGWGEFKVNGGSVSI

SEQ ID NO: 24093 - protein, 478 aa, Bacillus sp. TS-23
APINETMMQYFEWDLPNDGTLWTKVKNEAANLSSLGITALWLPPAYKGTSQSDVGYGVYDLYDLGEFNQKGTIRTKYGTKTQYIRAIQAAKAAGMQVYADVVFNHKAGADGTEFVDAVEVDPSNRNQETSGTYQIQAWTKFDFPGRGNTYSSFKWRWYHFDGTDWDESRKLNRIYKFRSTGKAWDWEVDTENGNYDYLMFADLDMDHPEVVTELKNWGTWYVRTTNIDGFRLDAVKHIKYSFFPDWLTYVRNQTGKNLFAVGEFWSYDVRKLHNYITKTRGSMSLFDAPLHNNFYTASKSSGYFDMRYLLNNTLMKDQPSLAVTLVDNHDTQPGQSLQSWVEPWFKPLAYAFILTRQEGYPCVFYGDYYGIPKYNIPGLKSKIDPLLIARRDYAYGTQRDYIDHQDIIGWTREGIDTKPNSGLAALITDGPGGSKWMYVGKKHAGKVFYDLTGNRSDTVTINADGWGEFKVNGGSVSI

SEQ ID NO: 24094 - protein, 478 aa, Bacillus sp. TS-23
APINETMMQYFEWDLPNDGTLWTKVKNEAANLSSLGITALWLPPAYKGTSQSDVGYGVYDLYDLGEFNQKGTIRTKYGTKTQYIEAIQAAKAAGMQVYADVVFNHKAGADGTEFVDAVEVDPSNRNQETSGTYQIQAWTKFDFPGRGNTYSSFKWRWYHFDGTDWDESRKLNRIYKFRSTGKAWDWEVDTENGNYDYLMFADLDMDHPEVVTELKNWGTWYVETTNIDGFRLDAVKHIKYSFFPDWLTYVRNQTGKNLFAVGEFWSYDVEKLHNYITKTEGSMSLFDAPLHNNFYTASKSSGYFDMRYLLNNTLMKDQPSLAVTLVDNHDTQPGQSLQSWVEPWFKPLAYAFILTRQEGYPCVFYGDYYGIPKYNIPGLKSKIDPLLIARRDYAYGTQRDYIDHQDIIGWTREGIDTKPNSGLAALITDGPGGSKWMYVGKKHAGKVFYDLTGNRSDTVTINADGWGEFKVNGGSVSI

SEQ ID NO: 24095 - protein, 478 aa, Bacillus sp. TS-23
APINETMMQYFEWDLPNDGTLWTKVKNEAANLSSLGITALWLPPAYKGTSQSDVGYGVYDLYDLGEFNQKGTIRTKYGTKTQYIEAIQAAKAAGMQVYADVVFNHKAGADGTEFVDAVEVDPSNRNQETSGTYQIQAWTKFDFPGRGNTYSSFKWRWYHFDGTDWDESRKLNRIYKFRSTGKAWDWEVDTENGNYDYLMFADLDMDHPEVVTELKNWGTWYVETTNIDGFRLDAVKHIKYSFFPDWLTYVRNQTGKNLFAVGEFWSYDVRKLHNYITKTEGSMSLFDAPLHNNFYTASKSSGYFDMRYLLNNTLMKDQPSLAVTLVDNHDTQPGQSLQSWVEPWFKPLAYAFILTRQEGYPCVFYGDYYGIPKYNIPGLKSKIDPLLIARRDYAYGTQRDYIDHQDIIGWTREGIDTKPNSGLAALITDGPGGSKWMYVGKKHAGKVFYDLTGNRSDTVTINADGWGEFKVNGGSVSI

SEQ ID NO: 24096 - protein, 478 aa, Bacillus sp. TS-23
APINETMMQYFEWDLPNDGTLWTKVKNEAANLSSLGITALWLPPAYKGTSQSDVGYGVYDLYDLGEFNQKGTIRTKYGTKTQYIRAIQAAKAAGMQVYADVVFNHKAGADGTEFVDAVEVDPSNRNQETSGTYQIQAWTKFDFPGRGNTYSSFKWRWYHFDGTDWDESRKLNRIYKFRSTGKAWDWEVDTENGNYDYLMFADLDMDHPEVVTELKNWGTWYVETTNIDGFRLDAVKHIKYSFFPDWLTYVRNQTGKNLFAVGEFWSYDVEKLHNYITKTRGSMSLFDAPLHNNFYTASKSSGYFDMRYLLNNTLMKDQPSLAVTLVDNHDTQPGQSLQSWVEPWFKPLAYAFILTRQEGYPCVFYGDYYGIPKYNIPGLKSKIDPLLIARRDYAYGTQRDYIDHQDIIGWTREGIDTKPNSGLAALITDGPGGSKWMYVGKKHAGKVFYDLTGNRSDTVTINADGWGEFKVNGGSVSI

SEQ ID NO: 24097 - protein, 478 aa, Bacillus sp. TS-23
APINETMMQYFEWDLPNDGTLWTKVKNEAANLSSLGITALWLPPAYKGTSQSDVGYGVYDLYDLGEFNQKGTIRTKYGTKTQYIRAIQAAKAAGMQVYADVVFNHKAGADGTEFVDAVEVDPSNRNQETSGTYQIQAWTKFDFPGRGNTYSSFKWRWYHFDGTDWDESRKLNRIYKFRSTGKAWDWEVDTENGNYDYLMFADLDMDHPEVVTELKNWGTWYVETTNIDGFRLDAVKHIKYSFFPDWLTYVRNQTGKNLFAVGEFWSYDVRKLHNYITKTEGSMSLFDAPLHNNFYTASKSSGYFDMRYLLNNTLMKDQPSLAVTLVDNHDTQPGQSLQSWVEPWFKPLAYAFILTRQEGYPCVFYGDYYGIPKYNIPGLKSKIDPLLIARRDYAYGTQRDYIDHQDIIGWTREGIDTKPNSGLAALITDGPGGSKWMYVGKKHAGKVFYDLTGNRSDTVTINADGWGEFKVNGGSVSI

SEQ ID NO: 24098 - protein, 478 aa, Bacillus sp. TS-23
APINETMMQYFEWDLPNDGTLWTKVKNEAANLSSLGITALWLPPAYKGTSQSDVGYGVYDLYDLGEFNQKGTIRTKYGTKTQYIRAIQAAKAAGMQVYADVVFNHKAGADGTEFVDAVEVDPSNRNQETSGTYQIQAWTKFDFPGRGNTYSSFKWRWYHFDGTDWDESRKLNRIYKFRSTGKAWDWEVDTENGNYDYLMFADLDMDHPEVVTELKNWGTWYVETTNIDGFRLDAVKHIKYSFFPDWLTYVRNQTGKNLFAVGEFWSYDVRKLHNYITKTNGSMSLFDAPLHNNFYTASKSSGYFDMRYLLNNTLMKDQPSLAVTLVDNHDTQPGQSLQSWVEPWFKPLAYAFILTRQEGYPCVFYGDYYGIPKYNIPGLKSKIDPLLIARRDYAYGTQRDYIDHQDIIGWTREGIDTKPNSGLAALITDGPGGSKWMYVGKKHAGKVFYDLTGNRSDTVTINADGWGEFKVNGGSVSI

SEQ ID NO: 24099 - protein, 478 aa, Bacillus sp. TS-23
APINETMMQYFEWDLPNDGTLWTKVKNEAANLSSLGITALWLPPAYKGTSQSDVGYGVYDLYDLGEFNQKGTIRTKYGTKTQYIRAIQAAKAAGMQVYADVVFNHKAGADGTEFVDAVEVDPSNRNQETSGTYQIQAWTKFDFPGRGNTYSSFKWRWYHFDGTDWDESRKLNRIYKFRSTGKAWDWEVDTENGNYDYLMFADLDMDHPEVVTELKNWGTWYVRTTNIDGFRLDAVKHIKYSFFPDWLTYVRNQTGKNLFAVGEFWSYDVRKLHNYITKTEGSMSLFDAPLHNNFYTASKSSGYFDMRYLLNNTLMKDQPSLAVTLVDNHDTQPGQSLQSWVEPWFKPLAYAFILTRQEGYPCVFYGDYYGIPKYNIPGLKSKIDPLLIARRDYAYGTQRDYIDHQDIIGWTREGIDTKPNSGLAALITDGPGGSKWMYVGKKHAGKVFYDLTGNRSDTVTINADGWGEFKVNGGSVSI

SEQ ID NO: 24100 - protein, 478 aa, Bacillus sp. TS-23
APINETMMQYFEWDLPNDGTLWTKVKNEAANLSSLGITALWLPPAYKGTSQSDVGYGVYDLYDLGEFNQKGTIRTKYGTKTQYIRAIQAAKAAGMQVYADVVFNHKAGADGTEFVDAVEVDPSNRNQETSGTYQIQAWTKFDFPGRGNTYSSFKWRWYHFDGTDWDESRKLNRIYKFRSTGKAWDWEVDTENGNYDYLMFADLDMDHPEVVTELKNWGTWYVRTTNIDGFRLDAVKHIKYSFFPDWLTYVRNQTGKNLFAVGEFWSYDVEKLHNYITKTEGSMSLFDAPLHNNFYTASKSSGYFDMRYLLNNTLMKDQPSLAVTLVDNHDTQPGQSLQSWVEPWFKPLAYAFILTRQEGYPCVFYGDYYGIPKYNIPGLKSKIDPLLIARRDYAYGTQRDYIDHQDIIGWTREGIDTKPNSGLAALITDGPGGSKWMYVGKKHAGKVFYDLTGNRSDTVTINADGWGEFKVNGGSVSI

SEQ ID NO: 24101 - protein, 478 aa, Bacillus sp. TS-23
APINETMMQYFEWDLPNDGTLWTKVKNEAANLSSLGITALWLPPAYKGTSQSDVGYGVYDLYDLGEFNQKGTIRTKYGTKTQYIEAIQAAKAAGMQVYADVVFNHKAGADGTEFVDAVEVDPSNRNQETSGTYQIQAWTKFDFPGRGNTYSSFKWRWYHFDGTDWDESRKLNRIYKFRSTGKAWDWEVDTENGNYDYLMFADLDMDHPEVVTELKNWGTWYVETTNIDGFRLDAVKHIKYSFFPDWLTYVRNQTGKNLFAVGEFWSYDVRKLHNYITKTRGSMSLFDAPLHNNFYTASKSSGYFDMRYLLNNTLMKDQPSLAVTLVDNHDTQPGQSLQSWVEPWFKPLAYAFILTRQEGYPCVFYGDYYGIPKYNIPGLKSKIDPLLIARRDYAYGTQRDYIDHQDIIGWTREGIDTKPNSGLAALITDGPGGSKWMYVGKKHAGKVFYDLTGNRSDTVTINADGWGEFKVNGGSVSI

SEQ ID NO: 24102 - protein, 478 aa, Bacillus sp. TS-23
APINETMMQYFEWDLPNDGTLWTKVKNEAANLSSLGITALWLPPAYKGTSQSDVGYGVYDLYDLGEFNQKGTIRTKYGTKTQYIEAIQAAKAAGMQVYADVVFNHKAGADGTEFVDAVEVDPSNRNQETSGTYQIQAWTKFDFPGRGNTYSSFKWRWYHFDGTDWDESRKLNRIYKFRSTGKAWDWEVDTENGNYDYLMFADLDMDHPEVVTELKNWGTWYVETTNIDGFRLDAVKHIKYSFFPDWLTYVRNQTGKNLFAVGEFWSYDVRKLHNYITKTNGSMSLFDAPLHNNFYTASKSSGYFDMRYLLNNTLMKDQPSLAVTLVDNHDTQPGQSLQSWVEPWFKPLAYAFILTRQEGYPCVFYGDYYGIPKYNIPGLKSKIDPLLIARRDYAYGTQRDYIDHQDIIGWTREGIDTKPNSGLAALITDGPGGSKWMYVGKKHAGKVFYDLTGNRSDTVTINADGWGEFKVNGGSVSI

SEQ ID NO: 24103 - protein, 478 aa, Bacillus sp. TS-23
APINETMMQYFEWDLPNDGTLWTKVKNEAANLSSLGITALWLPPAYKGTSQSDVGYGVYDLYDLGEFNQKGTIRTKYGTKTQYIRAIQAAKAAGMQVYADVVFNHKAGADGTEFVDAVEVDPSNRNQETSGTYQIQAWTKFDFPGRGNTYSSFKWRWYHFDGTDWDESRKLNRIYKFRSTGKAWDWEVDTENGNYDYLMFADLDMDHPEVVTELKNWGTWYVETTNIDGFRLDAVKHIKYSFFPDWLTYVRNQTGKNLFAVGEFWSYDVEKLHNYITKTNGSMSLFDAPLHNNFYTASKSSGYFDMRYLLNNTLMKDQPSLAVTLVDNHDTQPGQSLQSWVEPWFKPLAYAFILTRQEGYPCVFYGDYYGIPKYNIPGLKSKIDPLLIARRDYAYGTQRDYIDHQDIIGWTREGIDTKPNSGLAALITDGPGGSKWMYVGKKHAGKVFYDLTGNRSDTVTINADGWGEFKVNGGSVSI

SEQ ID NO: 24104 - protein, 285 aa, Synthetic construct
NGTMMQYFEWYLPNDGQHWRLNDANLSSGITALWIPPAYKGTSQSDVGYGAYDLYDLGEFNQKGTVRTKYGTKAQLAIALHAGIQVYGDVVMNHKGGADGTEVAVEVNPSDRNQEISGYIAWTKFDFPGRGNTYSFKWRWYHFDGVDWDESRKLNRIYKFRGGKAWDWEVDTENGNYDYLMYADIDMDHPEVVELKNWGWYNTLNLDGFRLDAVKHIKFSFDWLSHVRSTGKLFTVGEYWDIGALENYLKTNWMSLFDVPLHYNFYASKSGGAYDMRLLGTLVHP

SEQ ID NO: 24105 - protein, 484 aa, Synthetic construct
HHNGTNGTMMQYFEWYLPNDGNHWNRLRSDASNLKDKGISAVWIPPAWKGASQNDVGYGAYDLYDLGEFNQKGTIRTKYGTRNQLQAAVNALKSNGIQVYGDVVMNHKAGADYTENVTAVEVNPSNRNQETSGEYNIQAWTGFNFPGRGTTYSNFKWQWFHFDGTDWDQSRSLSRIFKFRGTGKAWDWEVSSENGNYDYLMYADIDMDHPEVVNELRNWGVWYTNTLGLDGFRIDAVKHIKYSFTRDWINHVRSATGKNMFAVAEFWKNDLGAIENYLNKTNWNHSVFDVPLHYNLYNASKSGGNYDMRQIFNGTVVQRHPMHAVTFVDNHDSQPEEALESFVEEWFKPLAYALTLTREQGYPSVFYGDYYGIPTHGVPAMKSKIDPILEARQKYAYGRQNDYLDHHNIIGWTREGNTAHPNSGLATIMSDGAGGNKWMFVGRNKAGQVWTDITGNRAGTVTINADGWGNFSVNGGSVSIWVNK

SEQ ID NO: 24106 - protein, 480 aa, Bacillus sp. TS-23
APINETMMQYFEWDLPNDGTLWTKVKNEAANLSSLGITALWLPPAYKGTSQSDVGYGVYDLYDLGEFNQKGTIRTKYGTKTQYIQAIQAAKAAGMQVYADVVFNHKAGADGTEFVDAVEVDPSNRNQETSGEYQIQAWTKFDFPGRGNTYSSWKWRWYHFDGTDWDESRKLNRIYKFHGKAWDWPVDTENGNYDYLMFADLDMDHPEVVTELKNWGTWYVNTTNIDGFRLDAVKHIKYSFFPDWLTYVRNQTGKNLFAVGEFWSYDVNKLHNYITKTNGSMSLFDAPLHNNFYTASKSSGYFDMRYLLNNTLMKDQPSLAVTLVDNHDTQPGQSLQSWVEPWFKPLAYAFILTRQEGYPCVFYGDYYGIPKYNIPGLKSKIDPLLIARRDYAYGTQRDYIDHQDIIGWTREGIDTKPNSGLAALITDGPGGSKWMYVGKKHAGKVFYDLTGNRSDTVTINADGWGEFKVNRGSVSIWVAK

SEQ ID NO: 24107 - protein, 480 aa, Bacillus sp. TS-23
APINETMMQYFEWDLPNDGTLWTKVKNEAANLSSLGITALWLPPAYKGTSQSDVGYGVYDLYDLGEFNQKGTIRTKYGTKTQYIQAIQAAKAAGMQVYADVVFNHKAGADGTEFVDAVEVDPSNRYQETSGTYQIQAWTKFDFPGRGNTYSSWKWRWYHFDGTDWDESRKLNRIYKFTGKAWDWPVDTENGNYDYLMFADLDMDHPEVVTELKNWGTWYVNTTNIDGFRLDAVKHIKYSFFPDWLTYVRNQTGKNLFAVGEFWSYDVNKLHNYITKTNGSMSLFDAPLHNNFYTASKSSGYFDMRYLLNNTLMKDQPSLAVTLVDNHDTQPGQSLQSWVEPWFKPLAYAFILTRQEGYPCVFYGDYYGIPKYNIPGLKSKIDPLLIARRDYAYGTQRDYIDHQDIIGWTREGIDTKPNSGLAALITDGPGGSKWMYVGKKHAGKVFYDLTGNRSDTVTINADGWGEFKVNRGSVSIWVAK

SEQ ID NO: 24108 - protein, 480 aa, Bacillus sp. TS-23
APINETMMQYFEWDLPNDGTLWTKVKNEAANLSSLGITALWLPPAWKGTSQSDVGYGVYDLYDLGEFNQKGTIRTKYGTKTQYIQAIQAAKAAGMQVYADVVFNHKAGADGTEFVDAVEVDPSNRNQETSGTYQIQAWTKFDFPGRGNTYSSFKWRWYHFDGTDWDESRKLNRIYKFTGKAWDWEVDTENGNYDYLMFADYDMDHPEVVTELKNWGTWYVNTTNIDGFRLDAVKHIKYSFFPDWLTYVRNQTGKNLFAVGEFWSYDVNKLHNYITKTNGSMSLFDAPLHNNFYTASKSSGYFDMRYLLNNTLMKDQPSLAVTLVDNHDTQPGQSLQSWVEPWFKPLAYAFILTRQEGYPCVFYGDYYGIPKYNIPGLKSKIDPLLIARRDYAYGTQRDYIDHQDIIGWTREGIDTKPNSGLAALITDGPGGSKWMYVGKKHAGKVFYDLTGNRSDTVTINADGWGEFKVNGGSVSIWVAK

SEQ ID NO: 24109 - protein, 480 aa, Bacillus sp. TS-23
APINETMMQYFEWDLPNDGTLWTKVKNEAANLSSLGITALWLPPAYKGTSQSDVGYGVYDLYDLGEFNQKGTIRTKYGTKTQYIQAIQAAKAAGMQVYADVVFNHKAGADGTEFVDAVEVDPSNRYQETSGEYQIQAWTKFDFPGRGNTYSSFKWRWYHFDGTDWDESRKLNRIYKFHGKAWDWPVDTENGNYDYLMFADLDMDHPEVVTELKNWGTWYVNTTNIDGFRLDAVKHIKYSFFPDWLTYVRNQTGKNLFAVGEFWSYDVNKLHNYITKTNGSMSLFDAPLHNNFYTASKSSGYFDMRYLLNNTLMKDQPSLAVTLVDNHDTQPGQSLQSWVEPWFKPLAYAFILTRQEGYPCVFYGDYYGIPKYNIPGLKSKIDPLLIARRDYAYGTQRDYIDHQDIIGWTREGIDTKPNSGLAALITDGPGGSKWMYVGKKHAGKVFYDLTGNRSDTVTINADGWGEFKVNRGSVSIWVAK

SEQ ID NO: 24110 - protein, 480 aa, Bacillus sp.
APINETMMQYFEWDLPNDGTLWTKVKNEAANLSSLGITALWLPPAYKGTSQSDVGYGVYDLYDLGEFNQKGTIRTKYGTKTQYIQAIQAAKAAGMQVYADVVFNHKAGADGTEFVDAVEVDPSNRNQEVSGTYQIEAWTKFDFPGRGNTYSSFKWRWYHFDGTDWDESRKLNRIYKFRGKAWDWEVDTENGNYDYLMFADLDMDHPEVVTELKNWGTWYVNTTNIDGFRLDAVKHIKFSFMRDWLTYVRNQTGKNLFAVGEFWSYDVNKLHNYITKTNGSMSLFDAPLHNNFYTASKSSGYFDMRYLLNNTLMKDQPSLAVTLVDNHDTQPGQSLQSWVEPWFKPLAYAFILTRQEGYPCVFYGDYYGIPKYNIPGLKSKIDPLLIARRDYAYGTQRDYIDHQDIIGWTREGIDTKPNSGLAALITDGPGGSKWMYVGKKHAGKVFYDLTGNRSDTVTINADGWGEFKVNGGSVSIWVAK

SEQ ID NO: 24111 - protein, 480 aa, Bacillus sp. TS-23
APINETMMQYFEWDLPNDGTLWTKVKNEAANLSSLGITALWLPPAWKGTSQSDVGYGVYDLYDLGEFNQKGTIRTKYGTKTQYIQAIQAAKAAGMQVYADVVMNHKAGADGTEFVDAVEVDPSNRNQETSGTYQIQAWTKFDFPGRGNTYSSFKWRWYHFDGTDWDESRKLNRIYKFTGKAWDWEVDTENGNYDYLMFADLDMDHPEVVTELKNWGTWYVNTTNIDGFRLDAVKHIKYSFFPDWLTYVRNQTGKNLFAVGEFWSYDVNKLHNYITKTNGSMSLFDAPLHNNFYTASKSSGYFDMRYLLNNTLMKDQPSLAVTLVDNHDTQPGQSLQSWVEPWFKPLAYAFILTRQEGYPCVFYGDYYGIPKYNIPGLKSKIDPLLIARRDYAYGTQRDYIDHQDIIGWTREGIDTKPNSGLAALITDGPGGSKWMYVGKKHAGKVFYDLTGNRSDTVTINADGWGEFKVNGGSVSIWVAK

SEQ ID NO: 24112 - protein, 481 aa, Synthetic construct
APVNGTMMQYFEWDLPNDGTLWTKVKNEASSLSALGITALWLPPAYKGTSQADVGYGVYDLYDLGEFNQKGTIRTKYGTKTQYLQAIQAAKSAGMQVYADVVFNHKAGADGTEFVDAVEVDPSNRNQETSGTYQIQAWTKFDFPGRGNTYSSFKWRWYHFDGTDWDESRKLNRIYKFSTGKAWDWEVDTENGNYDYLMFADLDMDHPEVVAELKNWGKWYVNTTNVDGFRLDAVKHIKYSFFPDWLSYVRNQTGKNLFAVGEFWGYDVNKLHNYITKTNGAMSLFDAPLHNNFYIASKSSGYFDMRYLLNNTLMKDQPALAVTLVDNHDTQPGQSLQSWVEPWFKPLAYAFILTRQEGYPCVFYGDYYGIPKYNIPGLKSKIDPLLIARRDYAYGTQRDYIDHQDIIGWTREGIDAKPNSGLAALITDGPGGSKWMYVGKRHAGKVFYDLTGNRSDTVTINADGWGEFKVNGGSVSIWVAK

SEQ ID NO: 24113 - protein, 480 aa, unidentified
APVNGTMMQYFEWDLPNDGTLWTKVKNEASSLSSLGITALWLPPAYKGTSQGDVGYGVYDLYDLGEFNQKGTIRTKYGTKTQYLQAIQAAKSAGMQVYADVVFNHKAGADSTEWVDAVEVNPSNRNQETSGTYQIQAWTKFDFPGRGNTYSSFKWRWYHFDGTDWDESRKLNRIYKFRGKAWDWEVDTENGNYDYLLFADLDMDHPEVVTELKNWGTWYVNTTNVDGFRLDAVKHIKYSFFPDWLTHVRSQTRKNLFAVGEFWSYDVNKLHNYITKTSGTMSLFDAPLHNNFYTASKSSGYFDMRYLLNNTLMKDQPSLAVTLVDNHDTQPGQSLQSWVEPWFKPLAYAFILTRQEGYPCVFYGDYYGIPKYNIPGLKSKIDPLLIARRDYAYGTQRDYIDHQDIIGWTREGIDSKPNSGLAALITDGPGGSKWMYVGKKHAGKVFYDLTGNRSDTVTINADGWGEFKVNGGSVSIWVAK

SEQ ID NO: 24114 - protein, 482 aa, Bacillus sp. TS-23
APINETMMQYFEWDLPNDGTLWTKVKNEAANLSSLGITALWLPPAYKGTSQSDVGYGVYDLYDLGEFNQKGTIRTKYGTKTQYIQAIQAAKAAGMQVYADVVFNHKAGADGTEFVDAVEVDPANRCQETSGTYQIQAWTKFDFPGRGNTYSSFKWRWYHFDGTDWDESRKLNRIYLFRSGGKAWDWEVDTENGNYDYLMFADLDMDHPEVVTELKNWGTWYVNTTNIDGFRLDAVKHIKYSFFPDWLTYVRNQTGKNLFAVGEFWSYDVNKLHNYITKTNGSMSLFDAPLHNNFYTASKSSGRFDMRYLLNNTLMKDQPSLAVTLVDNHDTQPGQSLQSWVEPWFKPLAYAFILTRQEGYPCVFYGDYYGIPKYNIPGLKSKIDPLLIARRDYAYGTQRDYIDHQDIIGWTREGIDTKPNSGLAALITDGPGGSKWMYVGKKHAGKVFYDLTGNRSDTVTINADGWGEFKVNKGSVSIWVAK

SEQ ID NO: 24115 - protein, 482 aa, Bacillus sp. TS-23
APVNGTMMQYFEWDLPNDGTLWTKVKNEASSLSALGITALWLPPAYKGTSQADVGYGVYDLYDLGEFNQKGTIRTKYGTKTQYLQAIQAAKSAGMQVYADVVFNHKAGADSTEWVDAVEVNPSNRNQETSGTYQIQAWTKFDFPGRGNTYSSFKWRWYHFDGTDWDESRKLNRIYKFRGTGKAWDWEVDTENGNYDYLMFADLDMDHPEVVAELKNWGKWYVNTTNVDGFRLDAVKHIKYSFFPDWLSYVRNQTGKNLFAVGEFWGYDVNKLHNYITKTNGAMSLFDAPLHNNFYIASKSSGYFDMRYLLNNTLMKDQPALAVTLVDNHDTQPGQSLQSWVEPWFKPLAYAFILTRQEGYPCVFYGDYYGIPKYNIPGLKSKIDPLLIARRDYAYGTQRDYIDHQDIIGWTREGIDAKPNSGLAALITDGPGGSKWMYVGKRHAGKVFYDLTGNRSDTVTINADGWGEFKVNGGSVSIWVAK

SEQ ID NO: 24116 - protein, 482 aa, Synthetic construct
APINETMMQYFEWDLPNDGTLWTKVKNEAANLSSLGITALWLPPAYKGTSQSDVGYGVYDLYDLGEFNQKGTIRTKYGTKTQYIQAIQAAKAAGMQVYADVVFNHKAGADATEWVDAVEVNPSNRNQEVSGTYKIQAWTKFDFPGRGNTYSSFKWRWYHFDGTDWDQSRQLNRIYKFRGTGKAWDWEVDTENGNYDYLMFADLDMDHPEVVTELKNWGTWYVNTTNIDGFRLDAVKHIKYSFFPDWLTYVRNQTGKNLFAVGEFWSYDVNKLHNYITKTNGSMSLFDAPLHNNFYTASKSSGYFDMRYLLNNTLMKDQPSLAVTLVDNHDTQPGQSLQSWVEPWFKPLAYAFILTRQEGYPCVFYGDYYGIPKYNIPGLKSKIDPLLIARRDYAYGTQRDYIDHQDIIGWTREGIDTKPNSGLAALITDGPGGSKWMYVGKKHAGKVFYDLTGNRSDTVTINADGWGEFKVNGGSVSIWVAK

SEQ ID NO: 24117 - protein, 482 aa, Synthetic construct
APVNGTMMQYFEWDLPNDGTLWTKVKNEATNLFSLGITALWLPPAYKGTSQSDVGYGVYDLYDLGEFNQKGTIRTKYGTKTQYIQAIQAAKAAGMQVYADVVFNHKAGADATEWVDAVEVNPSNRNQEVSGTYKIQAWTKFDFPGRGNTYSSFKWRWYHFDGTDWDQSRQLNRIYKFRGTGKAWDWEVDTENGNYDYLMFADLDMDHPEVVTELKNWGTWYVNTTNIDGFRLDAVKHIKYSFFPDWLTYVRNQTGKNLFAVGEFWSYDVNKLHNYITKTNGSMSLFDAPLHNNFYTASKSSGYFDMRYLLNNTLMKDQPSLAVTLVDNHDTQPGQSLQSWVEPWFKPLAYAFILTRQEGYPCVFYGDYYGIPKYNIPGLKSKIDPLLIARRDYAYGTQRDYIDHQDIIGWTREGIDTKPNSGLAALITDGPGGSKWMYVGKKHAGKVFYDLTGNRSDTVTINADGWGEFKVNGGSVSIWVAK

SEQ ID NO: 24118 - protein, 482 aa, Synthetic construct
APVNGTMMQYFEWDLPNDGTLWTKVKNEASSLSALGITALWLPPAYKGTSQADVGYGVYDLYDLGEFNQKGTIRTKYGTKTQYLQAIQAAKSAGMQVYADVVFNHKAGADGTEFVDAVEVNPSNRNQETSGTYQIQAWTKFDFPGRGNTYSSFKWRWYHFDGTDWDESRKLNRIYKFRGTGKAWDWEVDTENGNYDYLMFADLDMDHPEVVAELKNWGKWYVNTTNVDGFRLDAVKHIKYSFFPDWLSYVRNQTGKNLFAVGEFWGYDVNKLHNYITKTNGAMSLFDAPLHNNFYIASKSSGYFDMRYLLNNTLMKDQPALAVTLVDNHDTQPGQSLQSWVEPWFKPLAYAFILTRQEGYPCVFYGDYYGIPKYNIPGLKSKIDPLLIARRDYAYGTQRDYIDHQDIIGWTREGIDAKPNSGLAALITDGPGGSKWMYVGKRHAGKVFYDLTGNRSDTVTINADGWGEFKVNGGSVSIWVAK

SEQ ID NO: 24119 - protein, 486 aa, Bacillus sp. TS-23
APINETMMQYFEWDLPNDGTLWTKVKNEAANLSSLGITALWLPPAYKGTSQSDVGYGVYDLYDLGEFNQKGTIRTKYGTKTQYIQAIQAAKAAGMQVYADVVFNHKAGADGTEFVDAVEVDPSNRNQETSGTYQIQAWTKFDFPGRGNTYSSFKWRWYHFDGTDWDESRKLNARIYKFSGKAWDWEVDTENGNYDYLMFADLDMDHPEVVTELKNWGTWYVNTTNIDGFRLDAVKHIKYSFFPDWLTYVRNQTGKNLFAVGEFWSYDVNKLHNYITKTNGSMSLFDAPLHNNFYTASKSSGYFDMRYLLNNTLMKDQPSLAVTLVDNHDTQPGQSLQSWVEPWFKPLAYAFILTRQEGYPCVFYGDYYGIPKYNIPGLKSKIDPLLIARRDYAYGTQRDYIDHQDIIGWTREGIDTKPNSGLAALITDGPGGSKWMYVGKKHAGKVFYDLTGNRSDTVTINADGWGEFKVNGGSVSIWVAKTSNVT

SEQ ID NO: 24120 - protein, 485 aa, Bacillus sp.
APINETMMQYFEWDLPNDGTLWTKVKNEAANLSSLGITALWLPPAYKGTSQSDVGYGVYDLYDLGEFNQKGTIRTKYGTKTQYIQAIQAAKAAGMQVYADVVFNHKAGADGTEFVDAVEVDPSNRNQETSGTYQIQAWTKFDFPGRGNTYSSFKWRWYHFDGTDWDESRKLNRIYKFTGKAWDWEVDTENGNYDYLMFADLDMDHPEVVTELKNWGTWYVNTTNIDGFRLDAVKHIKFQFFPDWLTYVRNQTGKNLFAVGEYWSYDVNKLHNYITKTNGSMSLFDAPLHNNFYTASKSSGYFDMRYLLNNTLMKDQPSLAVTLVDNHDTQPGQSLQSWVEPWFKPLAYAFILTRQEGYPCVFYGDYYGIPKYNIPGLKSKIDPLLIARRDYAYGTQRDYIDHQDIIGWTREGIDTKPNSGLAALITDGPGGSKWMYVGKKHAGKVFYDLTGNRSDTVTINADGWGEFKVNKGSVSIWVAKTSNVT

SEQ ID NO: 24121 - protein, 486 aa, Bacillus sp. TS-23
APINETMMQYFEWDLPNDGTLWTKVKNEAANLSSLGITALWLPPAYKGTSQSDVGYGVYDLYDLGEFNQKGTIRTKYGTKTQYIQAIQAAKAAGMQVYADVVFNHKAGADGTEFVDAVEVDPSNRNQETSGTYQIQAWTKFDFPGRGNTYSSFKWRWYHFDGTDWDESRKLNNRIYKFSGKAWDWEVDTENGNYDYLMFADLDMDHPEVVTELKNWGTWYVNTTNIDGFRLDAVKHIKYSFFPDWLTYVRNQTGKNLFAVGEFWSYDVNKLHNYITKTNGSMSLFDAPLHNNFYTASKSSGYFDMRYLLNNTLMKDQPSLAVTLVDNHDTQPGQSLQSWVEPWFKPLAYAFILTRQEGYPCVFYGDYYGIPKYNIPGLKSKIDPLLIARRDYAYGTQRDYIDHQDIIGWTREGIDTKPNSGLAALITDGPGGSKWMYVGKKHAGKVFYDLTGNRSDTVTINADGWGEFKVNGGSVSIWVAKTSNVT

SEQ ID NO: 24122 - protein, 485 aa, Bacillus sp.
APINETMMQYFEWDLPNDGTLWTKVKNEAANLSSLGITALWLPPAYKGTSQSDVGYGVYDLYDLGEFNQKGTIRTKYGTKTQYIQAIQAAKAAGMQVYADVVFNHKAGADGTEFVDAVEVDPSNRNQETSGTYQIQAWTKFDFPGRGNTYSSFKWRWYHFDGTDWDESRKLNRIYKFTGKAWDWEVDTENGNYDYLMFADLDMDHPEVVTELKNWGTWYVNTTNIDGFRLDAVKHIKFSFFPDWLTYVRNQTGKNLFAVGEYWSYDVNKLHNYITKTNGSMSLFDAPLHNNFYTASKSSGYFDMRYLLNNTLMKDQPSLAVTLVDNHDTQPGQSLQSWVEPWFKPLAYAFILTRQEGYPCVFYGDYYGIPKYNIPGLKSKIDPLLIARRDYAYGTQRDYIDHQDIIGWTREGIDTKPNSGLAALITDGPGGSKWMYVGKKHAGKVFYDLTGNRSDTVTINADGWGEFKVNKGSVSIWVAKTSNVT

SEQ ID NO: 24123 - protein, 485 aa, Bacillus sp. TS-23
APINETMMQYFEWDLPNDGTLWTKVKNEAANLSSLGITALWLPPAYKGTSQSDVGYGVYDLYDLGEFNQKGTIRTKYGTKTQYIQAIQAAKAAGMQVYADVVFNHKAGADGTEFVDAVEVDPSNRNQETSGTYQIQAWTKFDFPGRGNTYSSFKWRWYHFDGTDWDESRKLNRIYKFSGKAWDWEVDTENGNYDYLMFADLDMDHPEVVTELKNWGTWYVNTTNIDGFRLDAVKHIKYSFFPDWLTYVRNQTGKNLFAVGEFWSYDVNKLHNYITKTNGSMSLFDAPLHNNFYTASKSSGYFDMRYLLNNTLMKDQPSLAVTLVDNHDTQPGQSLQSWVEPWFKPLAYAFILTRQEGYPCVFYGDYYGIPKYNIPGLKSKIDPLLIARRDYAYGTQRDYIDHQDIIGWTREGIDTKPNSGLAALITDGPGGSKWMYVGKKHAGKVFYDLTGNRSDTVTINADGWGEFKVNGGSVSIWVAKTSNVT

SEQ ID NO: 24124 - protein, 486 aa, Bacillus sp. TS-23
APINETMMQYFEWDLPNDGTLWTKVKNEAANLSSLGITALWLPPAYKGTSQSDVGYGVYDLYDLGEFNQKGTIRTKYGTKTQYIQAIQAAKAAGMQVYADVVFNHKAGADGTEFVDAVEVDPSNRNQETSGTYQIQAWTKFDFPGRGNTYSSFKWRWYHFDGTDWDESRKLNLRIYKFSGKAWDWEVDTENGNYDYLMFADLDMDHPEVVTELKNWGTWYVNTTNIDGFRLDAVKHIKYSFFPDWLTYVRNQTGKNLFAVGEFWSYDVNKLHNYITKTNGSMSLFDAPLHNNFYTASKSSGYFDMRYLLNNTLMKDQPSLAVTLVDNHDTQPGQSLQSWVEPWFKPLAYAFILTRQEGYPCVFYGDYYGIPKYNIPGLKSKIDPLLIARRDYAYGTQRDYIDHQDIIGWTREGIDTKPNSGLAALITDGPGGSKWMYVGKKHAGKVFYDLTGNRSDTVTINADGWGEFKVNGGSVSIWVAKTSNVT

SEQ ID NO: 24125 - protein, 485 aa, Bacillus sp. TS-23
APINETMMQYFEWDLPNDGTLWTKVKNEAANLSSLGITALWLPPAYKGTSQSDVGYGAYDLYDLGEFNQKGTIRTKYGTKTQYIQAIQAAKAAGMQVYADVVFNHKAGADGTEFVDAVEVDPSNRNQETSGTYQIQAWTKFDFPGRGNTYSSFKWRWYHFDGTDWDESRKLNRIYKFSGKAWDWEVDTENGNYDYLMFADYDMDHPEVVTELKNWGTWYVNTTNIDGFRLDAVKHIKYSFFPDWLTYVRNQTGKNLFAVGEFWSYDVNKLHNYITKTNGSMSLFDAPLHNNFYTASKSSGYFDMRYLLNNTLMKDQPSLAVTLVDNHDTQPGQSLQSWVEPWFKPLAYAFILTRQEGYPCVFYGDYYGIPKYNIPGLKSKIDPLLIARRDYAYGTQRDYIDHQDIIGWTREGIDTKPNSGLAALITDGPGGSKWMYVGKKHAGKVFYDLTGNRSDTVTINADGWGEFKVNGGSVSIWVAKTSNVT

SEQ ID NO: 24126 - protein, 486 aa, Bacillus sp. TS-23
APINETMMQYFEWDLPNDGTLWTKVKNEAANLSSLGITALWLPPAYKGTSQSDVGYGVYDLYDLGEFNQKGTIRTKYGTKTQYIQAIQAAKAAGMQVYADVVFNHKAGADGTEFVDAVEVDPSNRNQETSGTYQIQAWTKFDFPGRGNTYSSFKWRWYHFDGTDWDEQSRKLNRIYKFSGKAWDWEVDTENGNYDYLMFADLDMDHPEVVTELKNWGTWYVNTTNIDGFRLDAVKHIKYSFFPDWLTYVRNQTGKNLFAVGEFWSYDVNKLHNYITKTNGSMSLFDAPLHNNFYTASKSSGYFDMRYLLNNTLMKDQPSLAVTLVDNHDTQPGQSLQSWVEPWFKPLAYAFILTRQEGYPCVFYGDYYGIPKYNIPGLKSKIDPLLIARRDYAYGTQRDYIDHQDIIGWTREGIDTKPNSGLAALITDGPGGSKWMYVGKKHAGKVFYDLTGNRSDTVTINADGWGEFKVNGGSVSIWVAKTSNVT

SEQ ID NO: 24127 - protein, 486 aa, Bacillus sp. TS-23
APINETMMQYFEWDLPNDGTLWTKVKNEAANLSSLGITALWLPPAYKGTSQSDVGYGVYDLYDLGEFNQKGTIRTKYGTKTQYIQAIQAAKAAGMQVYADVVFNHKAGADGTEFVDAVEVDPSNRNQETSGTYQIQAWTKFDFPGRGNTYSSFKWRWYHFDGTDWDESRKLNQRIYKFSGKAWDWEVDTENGNYDYLMFADLDMDHPEVVTELKNWGTWYVNTTNIDGFRLDAVKHIKYSFFPDWLTYVRNQTGKNLFAVGEFWSYDVNKLHNYITKTNGSMSLFDAPLHNNFYTASKSSGYFDMRYLLNNTLMKDQPSLAVTLVDNHDTQPGQSLQSWVEPWFKPLAYAFILTRQEGYPCVFYGDYYGIPKYNIPGLKSKIDPLLIARRDYAYGTQRDYIDHQDIIGWTREGIDTKPNSGLAALITDGPGGSKWMYVGKKHAGKVFYDLTGNRSDTVTINADGWGEFKVNGGSVSIWVAKTSNVT

SEQ ID NO: 24128 - protein, 483 aa, Bacillus sp.
HHNGTNGTLMQYFEWYLPNDGNHWNRLRSDASNLKDKGISAVWIPPAFKGASQNDVGYGAYDLYDLGEFNQKGTIRTKYGTRNQLQAAVNALKSNGIQVYGDVVMNHKGGADATEMVKAVEVNPNNRNQEVSGEYTIEAWTKFDFPGRANTHSNFKWRWYHFDGVDYDQSRKLNNRIYKFRTKAWDWEVDTEFGNYDYLLYADIDMDNPEVVNELRNWGVWYTNTLGLDGFRIDAVKHIKYSFTRDWINHVRSAIGKNMFAVAEFWKNDLGAIENYLNKTNWNHSVFDVPLHFNLYYASKSGGNYDMRQIFNGTVVQKHPTHAVTFVDNHDSQPEEALESFVREWFKPLAYALTLTREQGYPCVFYGDYYGIPTHGVPAMKSKIDPILEARQKYAYGRQNDYLDHHNIIGWTREGNTAHPNSGLATIMSDGAGGNKWMFVGRNKAGQVWTDITGNKAGTVTINADGWGNFSVNGGSVSIWVNK

SEQ ID NO: 24129 - protein, 483 aa, Bacillus subtilis
HHNGTNGTMMQYFEWYLPNDGNHWNRLRSDASNLKDKGITAVWIPPAWKGASQNDVGYGAYDLYDLGEFNQKGTVRTKYGTRNQLQAAVTALKSNGIQVYGDVVMNHKGGADATEWVRAVEVNPSNRNQEVSGDYTIEAWTKFDFPGRGNTHSNFKWRWYHFDGVDWDQSRQLQNRIYKFRGKGWDWEVDTENGNYDYLMYADIDMDHPEVVNELRNWGVWYTNTLGLDGFRIDAVKHIKYSFTRDWLTHVRNTTGKNMFAVAEFWKNDIGAIENYLSKTNWNHSVFDVPLHYNLYNASRSGGNYDMRQIFNGTVVQRHPTHAVTFVDNHDSQPEEALESFVEEWFKPLAYALTLTRDQGYPSVFYGDYYGIPTHGVPAMKSKIDPILEARQKYAYGTQRDYLDHPDVIGWTREGDGVHVNSGLATLMSDGPGGSKWMDVGKNNAGEVWHDITGNQTNTVTINRDGWGQFHVSGGSVSIYVQQ

SEQ ID NO: 24130 - protein, 485 aa, Bacillus sp.
HHNGTNGTMMQYFEWYLPNDGNHWNRLRSDASNLKDKGISAVWIPPAWKGASQNDVGYGAYDLYDLGEFNQKGTIRTKYGTRNQLQAAVNALKSNGIQVYGDVVMNHKGGADATEMVRAVEVNPNNRNQEVSGEYTIEAWTKFDFPGRGNTHSNFKWRWYHFNGVDWDQSRKLNNRIYKFAADGTNWNWEVDTENGNYDYLMYANIDFSHPEVVNELRNWGVWYTNTLGLDGFRIDAIKHIPYWFTRDWINHVRSATGKNMFAVAEFWKNDLGAIENYLNKTNWNHSVFDVPLHYNLYNASKSGGNYDMRQIFNGTVVQRHPMHAVTFVDNHDSQPEEALESFVEEWFKPLAYALTLTREQGYPSVFYGDYYGIPTHGVPAMKSKIDPILEARQKYAYGRQNDYLDHHNIIGWTREGNTAHPNSGLATIMSDGAGGNKWMFVGRNKAGQVWTDITGNRAGTVTINADGWGNFSVNGGSVSIWVNK

SEQ ID NO: 24131 - protein, 485 aa, Bacillus sp.
HHNGTNGTMMQYFEWYLPNDGNHWNRLRSDASNLKDKGISAVWIPPAWKGASQNDVGYGAYDLYDLGEFNQKGTIRTKYGTRNQLQAAVNALKSNGIQVYGDVVMNHKGGADATEMVRAVEVNPNNRWQEVSGEYTIEAWTKFDFPGRGNTHSNFKWRWYHFNGVDWDQSRKLNNRIYKFANDGTNWNWEVDTENGNYDYLMYANIDFSHPEVVNELRNWGVWYTNTLGLDGFRIDAVKHIPYWFTRDWINHVRSATGKNMFAVAEFWKNDLGAIENYLNKTNWNHSVFDVPLHYNLYNASKSGGNYDMRQIFNGTVVQRHPMHAVTFVDNHDSQPEEALESFVEEWFKPLAYALTLTREQGYPSVFYGDYYGIPTHGVPAMKSKIDPILEARQKYAYGRQNDYLDHHNIIGWTREGNTAHPNSGLATIMSDGAGGNKWMFVGRNKAGQVWTDITGNRAGTVTINADGWGNFSVNGGSVSIWVNK

SEQ ID NO: 24132 - protein, 483 aa, Bacillus subtilis
HHNGTNGTMMQYFEWYLPNDGNHWNRLRSDASNLKDKGITAVWIPPAWKGASQNDVGYGAYDLYDLGEFNQKGTVRTKYGTRNQLQAAVTALKSNGIQVYGDVVMNHKGGADATEWVRAVEVNPSNRNQEVSGDYTIEAWTKFDFPGRGNTHSNFKWRWYHFDGVDWDQSRQLQNRIYKFRGKGWDWEVDTENGNYDYLMYADIDMDHPEVVNELRNWGVWYTNTLGLDGFRIDAVKHIKYSFTRDWLTHVRNTTGKNMFAVAEFWKNDIGAIENYLSKTNWNHSVFDVPLHYNLYNASRSGGNYDMRQIFNGTVVQRHPTHAVTFVDNHDSQPEEALESFVEEWFKPLAYALTLTRDQGYPSVFYGDYYGIPTHGVPAMKSKIDPILEARQKYAYGTQRDYLDHPDVIGWTREGDSVHANSGLATLMSDGPGGSKWMDVGKNNAGEVWYDITGNQTNTVTINKDGWGQFQVSGGSVSIYVQR

SEQ ID NO: 24133 - protein, 483 aa, Bacillus sp.
HHNGTNGTLMQYFEWYLPNDGNHWNRLRSDASNLKDKGISAVWIPPAFKGASQNDVGYGAYDLYDLGEFNQKGTIRTKYGTRNQLQAAVNALKSNGIQVYGDVVMNHKGGADATEMVKAVEVNPNNRNQEVSGEYTIEAWTKFDFPGRANTHSNFKWRWYHFDGVDYDQSRKLNNRIYKFRTKAWDWEVDTEFGNYDYLLYADIDMDNPEVVNELRNWGVWYTNTLGLDGFRIDAVKHIKYSFTRDWINHVRSAIGKNMFAVAEFWKNDLGAIENYLNKTNWNHSVFDVPLHFNLYYASKSGGNYDMRQIFNGTVVQKHPTHAVTFVDNHDSQPEEALESFVREWFKPLAYALTLTREQGYPSIFYGDYYGIPTHGVPAMKSKIDPILEARQKYAYGRQNDYLDHHNIIGWTREGNTAHPNSGLATIMSDGAGGNKWMFVGRNKAGQVWTDITGNKAGTVTINADGWGNFSVNGGSVSIWVNK

SEQ ID NO: 24134 - protein, 483 aa, Bacillus sp.
HHNGTNGTLMQYFEWYLPNDGNHWNRLRSDASNLKDKGISAVWIPPAWKGASQNDVGYGAYDLYDLGEFNQKGTIRTKYGTRNQLQAAVNALKSNGIQVYGDVVMNHKGGADATEMVKAVEVNPNNRNQEVSGEYTIEAWTKFDFPGRANTHSNFKWRWYHFDGVDYDQSRKLNNRIYKFRTKAWDWEVDTEFGNYDYLLYADIDMDNPEVVNELRNWGVWYTNTLGLDGFRIDAVKHIKFSFTRDWINHVRSAIGKNMFAVAEFWKNDLGAIENYLNKTNWNHSVFDVPLHFNLYYASKSGGNYDMRQIFNGTVVQKHPTHAVTFVDNHDSQPEEALESFVREWFKPLAYALTLTREQGYPSIFYGDYYGIPTHGVPAMKSKIDPILEARQKYAYGRQNDYLDHHNIIGWTREGNTAHPNSGLATIMSDGAGGNKWMFVGRNKAGQVWTDITGNKAGTVTINADGWGNFSVNGGSVSIWVNK

SEQ ID NO: 24135 - protein, 483 aa, Bacillus sp.
HHNGTNGTLMQYFEWYLPNDGNHWNRLRSDASNLKDKGISAVWIPPAWKGASQNDVGYGAYDLYDLGEFNQKGTIRTKYGTRNQLQAAVNALKSNGIQVYGDVVMNHKGGADATEMVKAVEVNPNNRNQEVSGEYTIEAWTKFDFPGRANTHSNFKWRWYHFDGVDYDQSRKLNNRIYKFRTKAWDWEVDTEFGNYDYLLYADIDMDNPEVVNELRNWGVWYTNTLGLDGFRIDAVKHIKYSFTRDWINHVRSAIGKNMFAVAEFWKNDLGAIENYLNKTNWNHSVFDVPLHFNLYFASKSGGNYDMRQIFNGTVVQKHPTHAVTFVDNHDSQPEEALESFVREWFKPLAYALTLTREQGYPCIFYGDYYGIPTHGVPAMKSKIDPILEARQKYAYGRQNDYLDHHNIIGWTREGNTAHPNSGLATIMSDGAGGNKWMFVGRNKAGQVWTDITGNKAGTVTINADGWGNFSVNGGSVSIWVNK

SEQ ID NO: 24136 - protein, 485 aa, Bacillus subtilis
HHNGTNGTMMQYFEWYLPNDGNHWNRLRSDASNLKDKGITAVWIPPAWKGASQNDVGYGAYDLYDLGEFNQKGTVRTKYGTRNQLQAAVTALKSNGIQVYGDVVMNHKGGADATEWVRAVEVNPSNRNQEVSGDYTIEAWTKFDFPGRGNTHSNFKWRWYHFDGVDWDQSRQLQNRIYKFRGDGKGWDWEVDTENGNYDYLMYADIDMDHPEVVNELRNWGVWYTNTLGLDGFRIDAVKHIKYSFTRDWLTHVRNTTGKNMFAVAEFWKNDIGAIENYLSKTNWNHSVFDVPLHYNLYNASRSGGNYDMRQIFNGTVVQRHPTHAVTFVDNHDSQPEEALESFVEEWFKPLAYALTLTRDQGYPSVFYGDYYGIPTHGVPAMKSKIDPILEARQKYAYGTQRDYFDHPDVIGWTREGDSVHANSGLATLISDGPGGSKWMDVGKNNAGEVWYDITGNQTNTVTINKDGWGQFQVSGGSVSIYVQR

SEQ ID NO: 24137 - protein, 483 aa, Bacillus sp.
HHNGTNGTLMQYFEWYLPNDGNHWNRLRSDASNLKDKGISAVWIPPAFKGASQNDVGYGAYDLYDLGEFNQKGTIRTKYGTRNQLQAAVNALKSNGIQVYGDVVMNHKGGADATEMVKAVEVNPNNRNQEVSGEYTIEAWTKFDFPGRANTHSNFKWRWYHFDGVDYDQSRKLNNRIYKFRTKAWDWEVDTEFGNYDYLLYADIDMDNPEVVNELRNWGVWYTNTLGLDGFRIDAVKHIKYSFTRDWINHVRSAIGKNMFAVAEFWKNDLGAIENYLNKTNWNHSVFDVPLHFNLYFASKSGGNYDMRQIFNGTVVQKHPTHAVTFVDNHDSQPEEALESFVREWFKPLAYALTLTREQGYPSIFYGDYYGIPTHGVPAMKSKIDPILEARQKYAYGRQNDYLDHHNIIGWTREGNTAHPNSGLATIMSDGAGGNKWMFVGRNKAGQVWTDITGNKAGTVTINADGWGNFSVNGGSVSIWVNK

SEQ ID NO: 24138 - protein, 485 aa, Bacillus sp.
HHNGTNGTMMQYFEWYLPNDGNHWNRLRSDASNLKDKGISAVWIPPAWKGASQNDVGYGAYDLYDLGEFNQKGTIRTKYGTRNQLQAAVNALKSNGIQVYGDVVMNHKGGADATEMVRAVEVNPNNRNQEVSGEYTIEAWTKFDFPGRGNTHSNFKWRWYHFNGVDWDQSRKLNNRIYKFANDGTNWNWEVDTENGNYDYLMYANIDFSHPEVVNELRNWGVWYTNTLGLDGFRIDAIKHIPYWFTRDWINHVRSATGKNMFAVAEFWKNDLGAIENYLNKTNWNHSVFDVPLHYNLYNASKSGGNYDMRQIFNGTVVQRHPMHAVTFVDNHDSQPEEALESFVEEWFKPLAYALTLTREQGYPSVFYGDYYGIPTHGVPAMKSKIDPILEARQKYAYGRQNDYLDHHNIIGWTREGNTAHPNSGLATIMSDGAGGNKWMFVGRNKAGQVWTDITGNRAGTVTINADGWGNFSVNGGSVSIWVNK

SEQ ID NO: 24139 - protein, 483 aa, Bacillus sp.
HHNGTNGTLMQYFEWYLPNDGNHWNRLRSDASNLKDKGISAVWIPPAWKGASQNDVGYGAYDLYDLGEFNQKGTIRTKYGTRNQLQAAVNALKSNGIQVYGDVVMNHKGGADATEMVKAVEVNPNNRNQEVSGEYTIEAWTKFDFPGRANTHSNFKWRWYHFDGVDYDQSRKLNNRIYKFRTKAWDWEVDTEFGNYDYLLYADIDMDNPEVVNELRNWGVWYTNTLGLDGFRIDAVKHIKYSFTRDWINHVRSAIGKNMFAVAEFWKNDLGAIENYLNKTNWNHSVFDVPLHFNLYYASKSGGNYDMRQIFNGTVVQKHPTHAVTFVDNHDSQPEEALESFVREWFKPLAYALTLTREQGYPCIFYGDYYGIPTHGVPAMKSKIDPILEARQKYAYGRQNDYLDHHNIIGWTREGNTAHPNSGLATIMSDGAGGNKWMFVGRNKAGQVWTDITGNKAGTVTINADGWGNFSVNGGSVSIWVNK

SEQ ID NO: 24140 - protein, 483 aa, Bacillus sp.
HHNGTNGTLMQYFEWYLPNDGNHWNRLRSDASNLKDKGISAVWIPPAFKGASQNDVGYGAYDLYDLGEFNQKGTIRTKYGTRNQLQAAVNALKSNGIQVYGDVVMNHKGGADATEMVKAVEVNPNNRNQEVSGEYTIEAWTKFDFPGRANTHSNFKWRWYHFDGVDYDQSRKLNNRIYKFRTKAWDWEVDTEFGNYDYLLYADIDMDNPEVVNELRNWGVWYTNTLGLDGFRIDAVKHIKYSFTRDWINHVRSAIGKNMFAVAEFWKNDLGAIENYLNKTNWNHSVFDVPLHFNLYYASKSGGNYDMRQIFNGTVVQKHPTHAVTFVDNHDSQIEEALESFVREWFKPLAYALTLTREQGYPSVFYGDYYGIPTHGVPAMKSKIDPILEARQKYAYGRQNDYLDHHNIIGWTREGNTAHPNSGLATIMSDGAGGNKWMFVGRNKAGQVWTDITGNKAGTVTINADGWGNFSVNGGSVSIWVNK

SEQ ID NO: 24141 - protein, 483 aa, Bacillus sp. 707
HHNGTNGTMMQYFEWYLPNDGNHWNRLNSDASNLKSKGITAVWIPPAWKGASQNDVGYGAYDLYDLGEFNQKGTVRTKYGTRSQLQAAVTSLKNNGIQVYGDVVMNHKGGADYTETVTAVEVNPNNRNQETSGEYNIQAWTRFDFPGRGNTHSSFKWRWYHFDGVDWDQSRRLNNRIYKFDGKAWDWPVSSENGNYDYLMYADVDFEHPEVVNEMKKWGVWYTNTLGLDGFRIDAVKHIKYSFTRDWINHVRSATGKNMFAVAEFWKNDLGAIENYLQKTNWNHSVFDVPLHYNLYNASKSGGNYDMRNIFNGTVVQRHPSHAVTFVDNHDSQPEEALESFVEEWFKPLAYALTLTREQGYPSVFYGDYYGIPTHGVPAMRSKIDPILEARQKYAYGKQNDYLDHHNIIGWTREGNTAHPNSGLATLISDGPGGSKWMFVGRNKAGQVWSDITGNRTGTVTINADGWGNFSVNGGSVSIWVNK

SEQ ID NO: 24142 - protein, 485 aa, Bacillus sp.
HHNGTNGTMMQYFEWYLPNDGNHWNRLRSDASNLKDKGISAVWIPPAWKGASQNDVGYGAYDLYDLGEFNQKGTIRTKYGTRNQLQAAVNALKSNGIQVYGDVVMNHKGGADATEMVRAVEVNPNNRNQEVSGEYTIEAWTKFDFPGRGNTHSNFKWRWYHFNGVDWDQSRKLNNRIYKFANDGTNWNWEVDTENGNYDYLMYANIDFSHPEVVNELRNWGVWYTNTLGLDGFRIDAVKHIPYWFTRDWINHVRSATGKNMFAVAEFWKNDLGAIENYLNKTNWNHSVFDVPLHYNLYNASKSGGNYDMRQIFNGTVVQRHPMHAVTFVDNHDSQPEEALESFVEEWFKPLAYALTLTREQGYPSVFYGDYYGIPTHGVPAMKSKIDPILEARQKYAYGRQNDYLDHHDIIGWTREGNTAHPNSGLATIMSNGPGGNKWMFVGRNKAGQVWTDITGNRAGTVTINADGWGNFSVNGGSVSIWVNK

SEQ ID NO: 24143 - protein, 483 aa, Bacillus sp.
HHNGTNGTLMQYFEWYLPNDGNHWNRLRSDASNLKDKGISAVWIPPAWKGASQNDVGYGAYDLYDLGEFNQKGTIRTKYGTRNQLQAAVNALKSNGIQVYGDVVMNHKGGADATEMVKAVEVNPNNRNQEVSGEYTIEAWTKFDFPGRANTHSNFKWRWYHFDGVDYDQSRKLNNRIYKFRTKAWDWEVDTEFGNYDYLLYADIDMDNPEVVNELRNWGVWYTNTLGLDGFRIDAVKHIKYSFTRDWINHVRSAIGKNMFAVAEFWKNDLGAIENYLNKTNWNHSVFDVPLHFNLYYASKSGGNYDMRQIFNGTVVQKHPTHAVTFVDNHDSQPEEALESFVREWFKPLAYALTLTREQGYPSIFYGDYYGIPTHGVPAMKSKIDPILEARQKYAYGRQNDYLDHHNIIGWTREGNTAHPNSGLATIMSDGAGGNKWMFVGRNKAGQVWTDITGNKAGTVTINADGWGNFSVNGGSVSIYVNK

SEQ ID NO: 24144 - protein, 483 aa, Bacillus subtilis
HHNGTNGTMMQYFEWYLPNDGNHWNRLRSDASNLKDKGITAVWIPPAWKGASQNDVGYGAYDLYDLGEFNQKGTVRTKYGTRNQLQAAVTALKSNGIQVYGDVVMNHKGGADATEWVRAVEVNPSNRNQEVSGDYTIEAWTKFDFPGRGNTHSNFKWRWYHFDGVDWDQSRQLQNRIYKFRGKGWDWEVDTENGNYDYLMYADIDMDHPEVVNELRNWGVWYTNTLGLDGFRIDAVKHIKYSFTRDWLTHVRNTTGKNMFAVAEFWKNDIGAIENYLSKTNWNHSVFDVPLHYNLYNASRSGGNYDMRQIFNGTVVQRHPTHAVTFVDNHDSQPEEALESFVEEWFKPLAYALTLTRDQGYPSVFYGDYYGIPTHGVPAMKSKIDPILEARQKYAYGTQHDYLDHPDVIGWTREGDSIHANSGLATLMSDGPGGSKWMNVGKNNAGEIWYDITGNQTNTVTINKDGWGQFHVNGGSVSIYVQK

SEQ ID NO: 24145 - protein, 484 aa, Synthetic construct
HHNGTNGTMMQYFEWYLPNDGNHWNRLNSDASNLKSKGITAVWIPPAWKGASQNDVGYGAYDLYDLGEFNQKGTVRTKYGTRSQLQAAVTSLKNNGIQVYGDVVMNHKAGADYTENVTAVEVNPSNRNQETSGEYNIQAWTGFNFPGRGTTYSNFKWQWFHFDGTDWDQSRSLSRIFKFRGTGKAWDWEVSSENGNYDYLMYADIDMDHPEVVNELRNWGVWYTNTLGLDGFRIDAVKHIKYSFTRDWINHVRSATGKNMFAVAEFWKNDLGAIENYLQKTNWNHSVFDVPLHYNLYNASKSGGNYDMRNIFNGTVVQRHPSHAVTFVDNHDSQPEEALESFVEEWFKPLAYALTLTREQGYPSVFYGDYYGIPTHGVPAMRSKIDPILEARQKYAYGKQNDYLDHHNIIGWTREGNTAHPNSGLATIMSDGAGGSKWMFVGRNKAGQVWSDITGNRTGTVTINADGWGNFSVNGGSVSIWVNK

SEQ ID NO: 24146 - protein, 484 aa, Synthetic construct
SVPVNGTMMQYFEWYLPDDGTLWTKVANNAQSLANLGITALWLPPAYKGTSSSDVGYGVYDLYDLGEFNQKGTVRTKYGTKTQYIQAIQAAHTAGMQVYADVVFNHKGGADATENVLAVEVNPNNRNQEISGDYTIEAWTKFDFPGRGNTYSDFKWRWYHFDGVDWDQSRQFQNRIYKFRGDGKAWDWEVDSENGNYDYLMYADVDMDHPEVVSELKNWGKWYVTTTNIDGFRLDAVKHIKYSFFPDWLSYVRTQTQKPLFAVGEFWSYDISKLHNYITKTNGSMSLFDAPLHNNFYIASKSGGYFDMRTLLNNTLMKDQPTLAVTLVDNHDTEPGQSLQSWVEPWFKPLAYAFILTRQEGYPCVFYGDYYGIPKYNIPALKSKLDPLLIARRDYAYGTQHDYIDSADIIGWTREGVAEKANSGLAALITDGPGGSKWMYVGKQHAGKTFYDLTGNRSDTVTINADGWGEFKVNGGSVSIWVPK

SEQ ID NO: 24147 - protein, 484 aa, Synthetic construct
SVPVNGTMMQYFEWYLPDDGTLWTKVANNAQSLANLGITALWLPPAYKGTSSSDVGYGVYDLYDLGEFNQKGTVRTKYGTKTQYIQAIQAAHTAGMQVYADVVFNHKGGADATEMVRAVEVNPNNRNQEVSGEYTIEAWTKFDFPGRGNTHSNFKWRWYHFDGVDWDQSRKLNNRIYKFRGDGKGWDWEVDTENGNYDYLMYADIDMDHPEVVSELKNWGKWYVTTTNIDGFRLDAVKHIKYSFFPDWLSYVRTQTQKPLFAVGEFWSYDISKLHNYITKTNGSMSLFDAPLHNNFYIASKSGGYFDMRTLLNNTLMKDQPTLAVTLVDNHDTEPGQSLQSWVEPWFKPLAYAFILTRQEGYPCVFYGDYYGIPKYNIPALKSKLDPLLIARRDYAYGTQHDYIDSADIIGWTREGVAEKANSGLAALITDGPGGSKWMYVGKQHAGKTFYDLTGNRSDTVTINADGWGEFKVNGGSVSIWVPK

SEQ ID NO: 24148 - protein, 480 aa, Bacillus sp.
APINETMMQYFEWDLPNDGTLWTKVKNEAANLSSLGITALWLPPAYKGTSQSDVGYGVYDLYDLGEFNQKGTIRTKYGTKTQYIQAIQAAKAAGMQVYADVVFNHKAGADGTEFVDAVEVDPSNRNQETSGTYQIQAWTKFDFPGRGNTYSSFKWRWYHFDGTDWDESRKLNRIYKFRGKAWDWEVDTENGNYDYLMFADLDMDHPEVVTELKNWGTWYVNTTNIDGFRLDAVKHIKYSFFRDWLTYVRNQTGKNLFAVGEFWKYDVNALHNYITKTNGSMSLFDAPLHNNFYTASKSSGYFDMRYLLNNTLMKDQPSLAVTLVDNHDTQPGQSLQSWVEPWFKPLAYAFILTRQEGYPCVFYGDYYGIPKYNIPGLKSKIDPLLIARRDYAYGTQRDYIDHQDIIGWTREGIDTKPNSGLAALITDGPGGSKWMYVGKKHAGKVFYDLTGNRSDTVTINADGWGEFKVNGGSVSIWVAK

SEQ ID NO: 24149 - protein, 480 aa, Bacillus sp.
APINETMMQYFEWDLPNDGTLWTKVKNEAANLSSLGITALWLPPAYKGTSQSDVGYGVYDLYDLGEFNQKGTIRTKYGTKTQYIQAIQAAKAAGMQVYADVVFNHKAGADQTEFVDAVEVDPSNRNQEVSGTYQIEAWTKFDFPGRGNTYSSFKWRWYHFDGTDWDESRKLNRIYKFRGKAWDWEVDTENGNYDYLMFADLDMDHPEVVTELKNWGTWYVNTTNIDGFRLDAVKHIKFSFMRDWLTYVRNQTGKNLFAVGEFWSYDVNKLHNYITKTNGSMSLFDAPLHNNFYTASKSSGYFDMRYLLNNTLMKDQPSLAVTLVDNHDTQPGQSLQSWVEPWFKPLAYAFILTRQEGYPCVFYGDYYGIPKYNIPGLKSKIDPLLIARRDYAYGTQRDYIDHQDIIGWTREGIDTKPNSGLAALITDGPGGSKWMYVGKKHAGKVFYDLTGNRSDTVTINADGWGEFKVNGGSVSIWVAK

SEQ ID NO: 24150 - protein, 480 aa, Bacillus sp. TS-23
APINETMMQYFEWDLPNDGTLWTKVKNEAANLSSLGITALWLPPAYKGTSQSDVGYGVYDLYDLGEFNQKGTIRTKYGTKTQYIQAIQAAKAAGMQVYADVVFNHKAGADGTEFVDAVEVDPSNRYQETSGEYQIQAWTKFDFPGRGNTYSSWKWRWYHFDGTDWDESRKLNRIYKFHGKAWDWPVDTENGNYDYLMFADLDMDHPEVVTELKNWGTWYVNTTNIDGFRLDAVKHIKYSFFPDWLTYVRNQTGKNLFAVGEFWSYDVNKLHNYITKTNGSMSLFDAPLHNNFYTASKSSGYFDMRYLLNNTLMKDQPSLAVTLVDNHDTQPGQSLQSWVEPWFKPLAYAFILTRQEGYPCVFYGDYYGIPKYNIPGLKSKIDPLLIARRDYAYGTQRDYIDHQDIIGWTREGIDTKPNSGLAALITDGPGGSKWMYVGKKHAGKVFYDLTGNRSDTVTINADGWGEFKVNRGSVSIWVAK

SEQ ID NO: 24151 - protein, 480 aa, Bacillus sp. TS-23
APINETMMQYFEWDLPNDGTLWTKVKNEAANLSSLGITALWLPPAYKGTSQSDVGYGVYDLYDLGEFNQKGTIRTKYGTKTQYIQAIQAAKAAGMQVYADVVFNHKAGADGTEFVDAVEVDPSNRYQETSGEYQIQAWTKFDFPGRGNTYSSWKWRWYHFDGTDWDESRKLNRIYKFGGKAWDWPVDTENGNYDYLMFADLDMDHPEVVTELKNWGTWYVNTTNIDGFRLDAVKHIKYSFFPDWLTYVRNQTGKNLFAVGEFWSYDVNKLHNYITKTNGSMSLFDAPLHNNFYTASKSSGYFDMRYLLNNTLMKDQPSLAVTLVDNHDTQPGQSLQSWVEPWFKPLAYAFILTRQEGYPCVFYGDYYGIPKYNIPGLKSKIDPLLIARRDYAYGTQRDYIDHQDIIGWTREGIDTKPNSGLAALITDGPGGSKWMYVGKKHAGKVFYDLTGNRSDTVTINADGWGEFKVNRGSVSIWVAK

SEQ ID NO: 24152 - protein, 480 aa, Bacillus sp. TS-23
APINETMMQYFEWDLPNDGTLWTKVKNEAANLSSLGITALWLPPAYKGTSQSDVGYGVYDLYDLGEFNQKGTIRTKYGTKTQYIQAIQAAKAAGMQVYADVVFNHKAGADGTEFVDAVEVDPSNRYQETSGHYQIQAWTKFDFPGRGNTYSSWKWRWYHFDGTDWDESRKLNRIYKFDGKAWDWPVDTENGNYDYLMFADLDMDHPEVVTELKNWGTWYVNTTNIDGFRLDAVKHIKYSFFPDWLTYVRNQTGKNLFAVGEFWSYDVNKLHNYITKTNGSMSLFDAPLHNNFYTASKSSGYFDMRYLLNNTLMKDQPSLAVTLVDNHDTQPGQSLQSWVEPWFKPLAYAFILTRQEGYPCVFYGDYYGIPKYNIPGLKSKIDPLLIARRDYAYGTQRDYIDHQDIIGWTREGIDTKPNSGLAALITDGPGGSKWMYVGKKHAGKVFYDLTGNRSDTVTINADGWGEFKVNRGSVSIWVAK

SEQ ID NO: 24153 - protein, 482 aa, Synthetic construct
APVNGTMMQYFEWDLPNDGTLWTKVKNEASSLSALGITALWLPPAYKGTSQADVGYGVYDLYDLGEFNQKGTIRTKYGTKTQYLQAIQAAKSAGMQVYADVVFNHKAGADGTEFVDAVEVNPSNRNQETSGTYQIQAWTKFDFPGRGNTYSSFKWRWYHFDGTDWDESRKLNRVYKFRGTGKAWDWEVDTENGNYDYLMFADLDMDHPEVVAELKNWGKWYVNTTNVDGFRLDAVKHIKYSFFPDWLSYVRNQTGKNLFAVGEFWGYDVNKLHNYITKTNGAMSLFDAPLHNNFYIASKSSGYFDMRYLLNNTLMKDQPALAVTLVDNHDTQPGQSLQSWVEPWFKPLAYAFILTRQEGYPCVFYGDYYGIPKYNIPGLKSKIDPLLIARRDYAYGTQRDYIDHQDIIGWTREGIDAKPNSGLAALITDGPGGSKWMYVGKRHAGKVFYDLTGNRSDTVTINADGWGEFKVNGGSVSIWVAK

SEQ ID NO: 24154 - protein, 483 aa, Synthetic construct
APVNGTMMQYFEWDLPNDGTLWTKVKNEAANLSSLGITALWLPPAYKGTSQSDVGYGVYDLYDLGEFNQKGTVRTKYGTKDQYIQAIQAAKAAGMQVYADVVFNHKGGADATEMVRAVEVNPNNRNQEVSGEYTIEAWTKFDFPGRGNTHSNFKWRWYHFDGVDWDQSRKLNNRIYKFRGDGKGWDWEVDTENGNYDYLMYADIDMDHPEVVTELKNWGKWYVNTTNVDGFRLDAVKHIKYSFFPDWLASVRSQTGKNLFAVGEFWSYDVNKLHNYITKTNGTMSLFDAPLHNNFYTASKSSGYFDMRYLLNNTLMKDQPVLAVTLVDNHDTQPGQSLQSWVEPWFKPLAYAFILTRQEGYPCVFYGDYYGIPKYNIPGLKSKIDPLLIARRDYAYGTQRDYIDHQDIIGWTREGIDSKPNSGLAALITDGPGGSKWMYVGKKHAGKVFYDLTGNRSDTVTINADGWGEFKVNGGSVSIWVAK

SEQ ID NO: 24155 - protein, 483 aa, Synthetic construct
APVNGTMMQYFEWDLPNDGTLWTKVKNEAANLSSLGITALWLPPAYKGTSQSDVGYGVYDLYDLGEFNQKGTVRTKYGTKDQYIQAIQAAKAAGMQVYADVVFNHKGGADATENVLAVEVNPNNRNQEISGDYTIEAWTKFDFPGRGNTYSDFKWRWYHFDGVDWDQSRQFQNRIYKFRGDGKAWDWEVDSENGNYDYLMYADVDMDHPEVVTELKNWGKWYVNTTNVDGFRLDAVKHIKYSFFPDWLASVRSQTGKNLFAVGEFWSYDVNKLHNYITKTNGTMSLFDAPLHNNFYTASKSSGYFDMRYLLNNTLMKDQPVLAVTLVDNHDTQPGQSLQSWVEPWFKPLAYAFILTRQEGYPCVFYGDYYGIPKYNIPGLKSKIDPLLIARRDYAYGTQRDYIDHQDIIGWTREGIDSKPNSGLAALITDGPGGSKWMYVGKKHAGKVFYDLTGNRSDTVTINADGWGEFKVNGGSVSIWVAK

SEQ ID NO: 24156 - protein, 485 aa, Bacillus sp. TS-23
APINETMMQYFEWDLPNDGTLWTKVKNEAANLSSLGITALWLPPAWKGTSQSDVGYGAYDLYDLGEFNQKGTIRTKYGTKTQYIQAIQAAKAAGMQVYADVVFNHKAGADGTEFVDAVEVDPSNRNQETSGTYQIQAWTKFDFPGRGNTYSSFKWRWYHFDGTDWDESRKLNRIYKFSGKAWDWEVDTENGNYDYLMFADYDMDHPEVVTELKNWGTWYVNTTNIDGFRLDAVKHIKYSFFPDWLTYVRNQTGKNLFAVGEFWSYDVNKLHNYITKTNGSMSLFDAPLHNNFYTASKSSGYFDMRYLLNNTLMKDQPSLAVTLVDNHDTQPGQSLQSWVEPWFKPLAYAFILTRQEGYPCVFYGDYYGIPKYNIPGLKSKIDPLLIARRDYAYGTQRDYIDHQDIIGWTREGIDTKPNSGLAALITDGPGGSKWMYVGKKHAGKVFYDLTGNRSDTVTINADGWGEFKVNGGSVSIWVAKTSNVT

SEQ ID NO: 24157 - protein, 486 aa, Bacillus sp. TS-23
APINETMMQYFEWDLPNDGTLWTKVKNEAANLSSLGITALWLPPAYKGTSQSDVGYGVYDLYDLGEFNQKGTIRTKYGTKTQYIQAIQAAKAAGMQVYADVVFNHKAGADGTEFVDAVEVDPSNRNQETSGTYQIQAWTKFDFPGRGNTYSSFKWRWYHFDGTDWDEQSRKLNRIYKFRGKAWDWEVDTENGNYDYLMFADLDMDHPEVVTELKNWGTWYVNTTNIDGFRLDAVKHIKYSFFPDWLTYVRNQTGKNLFAVGEFWSYDVNKLHNYITKTNGSMSLFDAPLHNNFYTASKSSGYFDMRYLLNNTLMKDQPSLAVTLVDNHDTQPGQSLQSWVEPWFKPLAYAFILTRQEGYPCVFYGDYYGIPKYNIPGLKSKIDPLLIARRDYAYGTQRDYIDHQDIIGWTREGIDTKPNSGLAALITDGPGGSKWMYVGKKHAGKVFYDLTGNRSDTVTINADGWGEFKVNGGSVSIWVAKTSNVT

SEQ ID NO: 24158 - protein, 486 aa, Bacillus sp. TS-23
APINETMMQYFEWDLPNDGTLWTKVKNEAANLSSLGITALWLPPAYKGTSQSDVGYGVYDLYDLGEFNQKGTIRTKYGTKTQYIQAIQAAKAAGMQVYADVVFNHKAGADGTEFVDAVEVDPSNRNQETSGTYQIQAWTKFDFPGRGNTYSSFKWRWYHFDGTDWDESRKLNARIYKFTGKAWDWEVDTENGNYDYLMFADLDMDHPEVVTELKNWGTWYVNTTNIDGFRLDAVKHIKYSFFPDWLTYVRNQTGKNLFAVGEFWSYDVNKLHNYITKTNGSMSLFDAPLHNNFYTASKSSGYFDMRYLLNNTLMKDQPSLAVTLVDNHDTQPGQSLQSWVEPWFKPLAYAFILTRQEGYPCVFYGDYYGIPKYNIPGLKSKIDPLLIARRDYAYGTQRDYIDHQDIIGWTREGIDTKPNSGLAALITDGPGGSKWMYVGKKHAGKVFYDLTGNRSDTVTINADGWGEFKVNGGSVSIWVAKTSNVT

SEQ ID NO: 24159 - protein, 486 aa, Bacillus sp. TS-23
APINETMMQYFEWDLPNDGTLWTKVKNEAANLSSLGITALWLPPAYKGTSQSDVGYGVYDLYDLGEFNQKGTIRTKYGTKTQYIQAIQAAKAAGMQVYADVVFNHKAGADGTEFVDAVEVDPSNRNQETSGTYQIQAWTKFDFPGRGNTYSSFKWRWYHFDGTDWDESRKLNQRIYKFSTKAWDWEVDTENGNYDYLMFADLDMDHPEVVTELKNWGTWYVNTTNIDGFRLDAVKHIKYSFFPDWLTYVRNQTGKNLFAVGEFWSYDVNKLHNYITKTNGSMSLFDAPLHNNFYTASKSSGYFDMRYLLNNTLMKDQPSLAVTLVDNHDTQPGQSLQSWVEPWFKPLAYAFILTRQEGYPCVFYGDYYGIPKYNIPGLKSKIDPLLIARRDYAYGTQRDYIDHQDIIGWTREGIDTKPNSGLAALITDGPGGSKWMYVGKKHAGKVFYDLTGNRSDTVTINADGWGEFKVNGGSVSIWVAKTSNVT

SEQ ID NO: 24160 - protein, 487 aa, Bacillus sp. TS-23
APINETMMQYFEWDLPNDGTLWTKVKNEAANLSSLGITALWLPPAYKGTSQSDVGYGVYDLYDLGEFNQKGTIRTKYGTKTQYIQAIQAAKAAGMQVYADVVFNHKAGADGTEFVDAVEVDPSNRNQETSGTYQIQAWTKFDFPGRGNTYSSFKWRWYHFDGTDWDESRKLNRIYKFRSTGKAWDWEVDTENGNYDYLMFADLDMDHPEVVTELKNWGTWYVNTTNIDGFRLDAVKHIKYQFFPDWLTYVRNQTGKNLFAVGEFWSYDVNKLHNYITKTNGSMSLFDAPLHNNFYTASKSSGYFDMRYLLNNTLMKDQPSLAVTLVDNHDTQPGQSLQSWVEPWFKPLAYAFILTRQEGYPCVFYGDYYGIPKYNIPGLKSKIDPLLIARRDYAYGTQRDYIDHQDIIGWTREGIDTKPNSGLAALITDGPGGSKWMYVGKKHAGKVFYDLTGNRSDTVTINADGWGEFKVNGGSVSIWVAKTSNVT

SEQ ID NO: 24161 - protein, 485 aa, Bacillus sp. TS-23
APINETMMQYFEWDLPNDGTLWTKVKNEAANLSSLGITALWLPPAYKGTSQSDVGYGVYDLYDLGEFNQKGTIRTKYGTKTQYIQAIQAAKAAGMQVYADVVFNHKAGADGTEFVDAVEVDPSNRNQETSGTYQIQAWTKFDFPGRGNTYSSFKWRWYHFDGTDWDESRKLNRIYKFSGKAWDWEVDTENGNYDYLMFADLDMDHPEVVTELKNWGTWYVNTTNIDGFRLDAVKHIKYSFFPDWLTYVRNQTGKNLFAVGEFWSYDVNKLHNYITKTNGSMSLFDAPLHNNFYTASKSSGYFDMRYLLNNTLLKDQPSLAVTLVDNHDTQPGQSLQSWVEPWFKPLAYAFILTRQEGYPCVFYGDYYGIPKYNIPGLKSKIDPLLIARRDYAYGTQRDYIDHQDIIGWTREGIDTKPNSGLAALITDGPGGSKWMYVGKKHAGKVFYDLTGNRSDTVTINADGWGEFKVNGGSVSIWVAKTSNVT

SEQ ID NO: 24162 - protein, 486 aa, Bacillus sp. TS-23
APINETMMQYFEWDLPNDGTLWTKVKNEAANLSSLGITALWLPPAYKGTSQSDVGYGVYDLYDLGEFNQKGTIRTKYGTKTQYIQAIQAAKAAGMQVYADVVFNHKAGADGTEFVDAVEVDPSNRNQETSGTYQIQAWTKFDFPGRGNTYSSFKWRWYHFDGTDWDESRKLNLRIYKFRGKAWDWEVDTENGNYDYLMFADLDMDHPEVVTELKNWGTWYVNTTNIDGFRLDAVKHIKYSFFPDWLTYVRNQTGKNLFAVGEFWSYDVNKLHNYITKTNGSMSLFDAPLHNNFYTASKSSGYFDMRYLLNNTLMKDQPSLAVTLVDNHDTQPGQSLQSWVEPWFKPLAYAFILTRQEGYPCVFYGDYYGIPKYNIPGLKSKIDPLLIARRDYAYGTQRDYIDHQDIIGWTREGIDTKPNSGLAALITDGPGGSKWMYVGKKHAGKVFYDLTGNRSDTVTINADGWGEFKVNGGSVSIWVAKTSNVT

SEQ ID NO: 24163 - protein, 485 aa, Bacillus sp. TS-23
APINETMMQYFEWDLPNDGTLWTKVKNEAANLSSLGITALWLPPAYKGTSQSDVGYGVYDLYDLGEFNQKGTIRTKYGTKTQYIQAIQAAKAAGMQVYADVVFNHKAGADGTEFVDAVEVDPSNRNQETSGTYQIQAWTKFDFPGRGNTYSSFKWRWYHFDGTDWDESRKLNRIYKFSGKAWDWEVDTENGNYDYLMFADFDMDHPEVVTELKNWGTWYVNTTNIDGFRLDAVKHIKYSFFPDWLTYVRNQTGKNLFAVGEFWSYDVNKLHNYITKTNGSMSLFDAPLHNNFYTASKSSGYFDMRYLLNNTLMKDQPSLAVTLVDNHDTQPGQSLQSWVEPWFKPLAYAFILTRQEGYPCVFYGDYYGIPKYNIPGLKSKIDPLLIARRDYAYGTQRDYIDHQDIIGWTREGIDTKPNSGLAALITDGPGGSKWMYVGKKHAGKVFYDLTGNRSDTVTINADGWGEFKVNGGSVSIWVAKTSNVT

SEQ ID NO: 24164 - protein, 485 aa, Bacillus sp.
APINETMMQYFEWDLPNDGTLWTKVKNEAANLSSLGITALWLPPAYKGTSQSDVGYGVYDLYDLGEFNQKGTIRTKYGTKTQYIQAIQAAKAAGMQVYADVVFNHKAGADGTEFVDAVEVDPSNRNQETSGTYQIQAWTKFDFPGRGNTYSSFKWRWYHFDGTDWDESRKLNRIYKFSGKAWDWEVDTENGNYDYLMFADLDMDHPEVVTELKNWGTWYVNTTNIDGFRLDAVKHIKYQFFPDWLTYVRNQTGKNLFAVGEFWSYDVNKLHNYITKTNGSMSLFDAPLHNNFYTASKSSGYFDMRYLLNNTLMKDQPSLAVTLVDNHDTQPGQSLQSWVEPWFKPLAYAFILTRQEGYPCVFYGDYYGIPKYNIPGLKSKIDPLLIARRDYAYGTQRDYIDHQDIIGWTREGIDTKPNSGLAALITDGPGGSKWMYVGKKHAGKVFYDLTGNRSDTVTINADGWGEFKVNKGSVSIWVAKTSNVT

SEQ ID NO: 24165 - protein, 487 aa, Bacillus sp. TS-23
APINETMMQYFEWDLPNDGTLWTKVKNEAANLSSLGITALWLPPAYKGTSQSDVGYGVYDLYDLGEFNQKGTIRTKYGTKTQYIQAIQAAKAAGMQVYADVVFNHKAGADGTEFVDAVEVDPSNRNQETSGTYQIQAWTKFDFPGRGNTYSSFKWRWYHFDGTDWDESRKLNRIYKFRSTGKAWDWEVDTENGNYDYLMFADLDMDHPEVVTELKNWGTWYVNTTNIDGFRLDAVKHIKYSFFPDWLTYVRNQTGKNLFAVGEFWSYDVNKLHNYITKTRGSMSLFDAPLHNNFYTASKSSGYFDMRYLLNNTLMKDQPSLAVTLVDNHDTQPGQSLQSWVEPWFKPLAYAFILTRQEGYPCVFYGDYYGIPKYNIPGLKSKIDPLLIARRDYAYGTQRDYIDHQDIIGWTREGIDTKPNSGLAALITDGPGGSKWMYVGKKHAGKVFYDLTGNRSDTVTINADGWGEFKVNGGSVSIWVAKTSNVT

SEQ ID NO: 24166 - protein, 486 aa, Bacillus sp. TS-23
APINETMMQYFEWDLPNDGTLWTKVKNEAANLSSLGITALWLPPAYKGTSQSDVGYGVYDLYDLGEFNQKGTIRTKYGTKTQYIQAIQAAKAAGMQVYADVVFNHKAGADGTEFVDAVEVDPSNRNQETSGTYQIQAWTKFDFPGRGNTYSSFKWRWYHFDGTDWDESRKLNLRIYKFSTKAWDWEVDTENGNYDYLMFADLDMDHPEVVTELKNWGTWYVNTTNIDGFRLDAVKHIKYSFFPDWLTYVRNQTGKNLFAVGEFWSYDVNKLHNYITKTNGSMSLFDAPLHNNFYTASKSSGYFDMRYLLNNTLMKDQPSLAVTLVDNHDTQPGQSLQSWVEPWFKPLAYAFILTRQEGYPCVFYGDYYGIPKYNIPGLKSKIDPLLIARRDYAYGTQRDYIDHQDIIGWTREGIDTKPNSGLAALITDGPGGSKWMYVGKKHAGKVFYDLTGNRSDTVTINADGWGEFKVNGGSVSIWVAKTSNVT

SEQ ID NO: 24167 - protein, 486 aa, Bacillus sp. TS-23
APINETMMQYFEWDLPNDGTLWTKVKNEAANLSSLGITALWLPPAYKGTSQSDVGYGVYDLYDLGEFNQKGTIRTKYGTKTQYIQAIQAAKAAGMQVYADVVFNHKAGADGTEFVDAVEVDPSNRNQETSGTYQIQAWTKFDFPGRGNTYSSFKWRWYHFDGTDWDESRKLNLRIYKFTGKAWDWEVDTENGNYDYLMFADLDMDHPEVVTELKNWGTWYVNTTNIDGFRLDAVKHIKYSFFPDWLTYVRNQTGKNLFAVGEFWSYDVNKLHNYITKTNGSMSLFDAPLHNNFYTASKSSGYFDMRYLLNNTLMKDQPSLAVTLVDNHDTQPGQSLQSWVEPWFKPLAYAFILTRQEGYPCVFYGDYYGIPKYNIPGLKSKIDPLLIARRDYAYGTQRDYIDHQDIIGWTREGIDTKPNSGLAALITDGPGGSKWMYVGKKHAGKVFYDLTGNRSDTVTINADGWGEFKVNGGSVSIWVAKTSNVT

SEQ ID NO: 24168 - protein, 486 aa, Bacillus sp. TS-23
APINETMMQYFEWDLPNDGTLWTKVKNEAANLSSLGITALWLPPAYKGTSQSDVGYGVYDLYDLGEFNQKGTIRTKYGTKTQYIQAIQAAKAAGMQVYADVVFNHKAGADGTEFVDAVEVDPSNRNQETSGTYQIQAWTKFDFPGRGNTYSSFKWRWYHFDGTDWDESRKLNNRIYKFSTKAWDWEVDTENGNYDYLMFADLDMDHPEVVTELKNWGTWYVNTTNIDGFRLDAVKHIKYSFFPDWLTYVRNQTGKNLFAVGEFWSYDVNKLHNYITKTNGSMSLFDAPLHNNFYTASKSSGYFDMRYLLNNTLMKDQPSLAVTLVDNHDTQPGQSLQSWVEPWFKPLAYAFILTRQEGYPCVFYGDYYGIPKYNIPGLKSKIDPLLIARRDYAYGTQRDYIDHQDIIGWTREGIDTKPNSGLAALITDGPGGSKWMYVGKKHAGKVFYDLTGNRSDTVTINADGWGEFKVNGGSVSIWVAKTSNVT

SEQ ID NO: 24169 - protein, 486 aa, Bacillus sp. TS-23
APINETMMQYFEWDLPNDGTLWTKVKNEAANLSSLGITALWLPPAYKGTSQSDVGYGVYDLYDLGEFNQKGTIRTKYGTKTQYIQAIQAAKAAGMQVYADVVFNHKAGADGTEFVDAVEVDPSNRNQETSGTYQIQAWTKFDFPGRGNTYSSFKWRWYHFDGTDWDESRKLNARIYKFSTKAWDWEVDTENGNYDYLMFADLDMDHPEVVTELKNWGTWYVNTTNIDGFRLDAVKHIKYSFFPDWLTYVRNQTGKNLFAVGEFWSYDVNKLHNYITKTNGSMSLFDAPLHNNFYTASKSSGYFDMRYLLNNTLMKDQPSLAVTLVDNHDTQPGQSLQSWVEPWFKPLAYAFILTRQEGYPCVFYGDYYGIPKYNIPGLKSKIDPLLIARRDYAYGTQRDYIDHQDIIGWTREGIDTKPNSGLAALITDGPGGSKWMYVGKKHAGKVFYDLTGNRSDTVTINADGWGEFKVNGGSVSIWVAKTSNVT

SEQ ID NO: 24170 - protein, 485 aa, Bacillus sp. TS-23
APINETMMQYFEWDLPNDGTLWTKVKNEAANLSSLGITALWLPPAYKGTSQSDVGYGAYDLYDLGEFNQKGTIRTKYGTKTQYIQAIQAAKAAGMQVYADVVFNHKAGADGTEFVDAVEVDPSNRNQETSGTYQIQAWTKFDFPGRGNTYSSFKWRWYHFDGTDWDESRKLNRIYKFRGKAWDWEVDTENGNYDYLMFADYDMDHPEVVTELKNWGTWYVNTTNIDGFRLDAVKHIKYSFFPDWLTYVRNQTGKNLFAVGEFWSYDVNKLHNYITKTNGSMSLFDAPLHNNFYTASKSSGYFDMRYLLNNTLMKDQPSLAVTLVDNHDTQPGQSLQSWVEPWFKPLAYAFILTRQEGYPCVFYGDYYGIPKYNIPGLKSKIDPLLIARRDYAYGTQRDYIDHQDIIGWTREGIDTKPNSGLAALITDGPGGSKWMYVGKKHAGKVFYDLTGNRSDTVTINADGWGEFKVNGGSVSIWVAKTSNVT

SEQ ID NO: 24171 - protein, 486 aa, Bacillus sp. TS-23
APINETMMQYFEWDLPNDGTLWTKVKNEAANLSSLGITALWLPPAYKGTSQSDVGYGVYDLYDLGEFNQKGTIRTKYGTKTQYIQAIQAAKAAGMQVYADVVFNHKAGADGTEFVDAVEVDPSNRNQETSGTYQIQAWTKFDFPGRGNTYSSFKWRWYHFDGTDWDESRKLNNRIYKFRGKAWDWEVDTENGNYDYLMFADLDMDHPEVVTELKNWGTWYVNTTNIDGFRLDAVKHIKYSFFPDWLTYVRNQTGKNLFAVGEFWSYDVNKLHNYITKTNGSMSLFDAPLHNNFYTASKSSGYFDMRYLLNNTLMKDQPSLAVTLVDNHDTQPGQSLQSWVEPWFKPLAYAFILTRQEGYPCVFYGDYYGIPKYNIPGLKSKIDPLLIARRDYAYGTQRDYIDHQDIIGWTREGIDTKPNSGLAALITDGPGGSKWMYVGKKHAGKVFYDLTGNRSDTVTINADGWGEFKVNGGSVSIWVAKTSNVT

SEQ ID NO: 24172 - protein, 486 aa, Bacillus sp. TS-23
APINETMMQYFEWDLPNDGTLWTKVKNEAANLSSLGITALWLPPAYKGTSQSDVGYGVYDLYDLGEFNQKGTIRTKYGTKTQYIQAIQAAKAAGMQVYADVVFNHKAGADGTEFVDAVEVDPSNRNQETSGTYQIQAWTKFDFPGRGNTYSSFKWRWYHFDGTDWDESRKLNQRIYKFRGKAWDWEVDTENGNYDYLMFADLDMDHPEVVTELKNWGTWYVNTTNIDGFRLDAVKHIKYSFFPDWLTYVRNQTGKNLFAVGEFWSYDVNKLHNYITKTNGSMSLFDAPLHNNFYTASKSSGYFDMRYLLNNTLMKDQPSLAVTLVDNHDTQPGQSLQSWVEPWFKPLAYAFILTRQEGYPCVFYGDYYGIPKYNIPGLKSKIDPLLIARRDYAYGTQRDYIDHQDIIGWTREGIDTKPNSGLAALITDGPGGSKWMYVGKKHAGKVFYDLTGNRSDTVTINADGWGEFKVNGGSVSIWVAKTSNVT

SEQ ID NO: 24173 - protein, 486 aa, Bacillus sp. TS-23
APINETMMQYFEWDLPNDGTLWTKVKNEAANLSSLGITALWLPPAYKGTSQSDVGYGVYDLYDLGEFNQKGTIRTKYGTKTQYIQAIQAAKAAGMQVYADVVFNHKAGADGTEFVDAVEVDPSNRNQETSGTYQIQAWTKFDFPGRGNTYSSFKWRWYHFDGTDWDEQSRKLNRIYKFSTKAWDWEVDTENGNYDYLMFADLDMDHPEVVTELKNWGTWYVNTTNIDGFRLDAVKHIKYSFFPDWLTYVRNQTGKNLFAVGEFWSYDVNKLHNYITKTNGSMSLFDAPLHNNFYTASKSSGYFDMRYLLNNTLMKDQPSLAVTLVDNHDTQPGQSLQSWVEPWFKPLAYAFILTRQEGYPCVFYGDYYGIPKYNIPGLKSKIDPLLIARRDYAYGTQRDYIDHQDIIGWTREGIDTKPNSGLAALITDGPGGSKWMYVGKKHAGKVFYDLTGNRSDTVTINADGWGEFKVNGGSVSIWVAKTSNVT

SEQ ID NO: 24174 - protein, 486 aa, Bacillus sp. TS-23
APINETMMQYFEWDLPNDGTLWTKVKNEAANLSSLGITALWLPPAYKGTSQSDVGYGVYDLYDLGEFNQKGTIRTKYGTKTQYIQAIQAAKAAGMQVYADVVFNHKAGADGTEFVDAVEVDPSNRNQETSGTYQIQAWTKFDFPGRGNTYSSFKWRWYHFDGTDWDESRKLNNRIYKFTGKAWDWEVDTENGNYDYLMFADLDMDHPEVVTELKNWGTWYVNTTNIDGFRLDAVKHIKYSFFPDWLTYVRNQTGKNLFAVGEFWSYDVNKLHNYITKTNGSMSLFDAPLHNNFYTASKSSGYFDMRYLLNNTLMKDQPSLAVTLVDNHDTQPGQSLQSWVEPWFKPLAYAFILTRQEGYPCVFYGDYYGIPKYNIPGLKSKIDPLLIARRDYAYGTQRDYIDHQDIIGWTREGIDTKPNSGLAALITDGPGGSKWMYVGKKHAGKVFYDLTGNRSDTVTINADGWGEFKVNGGSVSIWVAKTSNVT

SEQ ID NO: 24175 - protein, 486 aa, Bacillus sp. TS-23
APINETMMQYFEWDLPNDGTLWTKVKNEAANLSSLGITALWLPPAYKGTSQSDVGYGVYDLYDLGEFNQKGTIRTKYGTKTQYIQAIQAAKAAGMQVYADVVFNHKAGADGTEFVDAVEVDPSNRNQETSGTYQIQAWTKFDFPGRGNTYSSFKWRWYHFDGTDWDESRKLNQRIYKFTGKAWDWEVDTENGNYDYLMFADLDMDHPEVVTELKNWGTWYVNTTNIDGFRLDAVKHIKYSFFPDWLTYVRNQTGKNLFAVGEFWSYDVNKLHNYITKTNGSMSLFDAPLHNNFYTASKSSGYFDMRYLLNNTLMKDQPSLAVTLVDNHDTQPGQSLQSWVEPWFKPLAYAFILTRQEGYPCVFYGDYYGIPKYNIPGLKSKIDPLLIARRDYAYGTQRDYIDHQDIIGWTREGIDTKPNSGLAALITDGPGGSKWMYVGKKHAGKVFYDLTGNRSDTVTINADGWGEFKVNGGSVSIWVAKTSNVT

SEQ ID NO: 24176 - protein, 487 aa, Bacillus sp. TS-23
APINETMMQYFEWDLPNDGTLWTKVKNEAANLSSLGITALWLPPAYKGTSQSDVGYGVYDLYDLGEFNQKGTIRTKYGTKTQYIQAIQAAKAAGMQVYADVVFNHKAGADGTEFVDAVEVDPSNRNQETSGTYQIQAWTKFDFPGRGNTYSSFKWRWYHFDGTDWDESRKLNRIYKFRSTGKAWDWEVDTENGNYDYLMFADLDMDHPEVVTELKNWGTWYVNTTNIDGFRLDAVKHIKYSFFPDWLTYVRNQTGKNLFAVGEFWSYDVNKLHNYITKTEGSMSLFDAPLHNNFYTASKSSGYFDMRYLLNNTLMKDQPSLAVTLVDNHDTQPGQSLQSWVEPWFKPLAYAFILTRQEGYPCVFYGDYYGIPKYNIPGLKSKIDPLLIARRDYAYGTQRDYIDHQDIIGWTREGIDTKPNSGLAALITDGPGGSKWMYVGKKHAGKVFYDLTGNRSDTVTINADGWGEFKVNGGSVSIWVAKTSNVT

SEQ ID NO: 24177 - protein, 485 aa, Bacillus sp. TS-23
APINETMMQYFEWDLPNDGTLWTKVKNEAANLSSLGITALWLPPAYKGTSQSDVGYGVYDLYDLGEFNQKGTIRTKYGTKTQYIQAIQAAKAAGMQVYADVVFNHKAGADGTEFVDAVEVDPSNRNQETSGTYQIQAWTKFDFPGRGNTYSSFKWRWYHFDGTDWDESRKLNRIYKFTGKAWDWEVDTENGNYDYLMFADLDMDHPEVVTELKNWGTWYVNTTNIDGFRLDAVKHIKYSFFPDWLTYVRNQTGKNLFAVGEFWSYDVNKLHNYITKTNGSMSLFDAPLHNNFYTASKSSGYFDMRYLLNNTLMKDQPSLAVTLVDNHDTQPGQSLQSWVEPWFKPLAYAFILTRQEGYPCVFYGDYYGIPKYNIPGLKSKIDPLLIARRDYAYGTQRDYIDHQDIIGWTREGIDTKPNSGLAALITDGPGGSKWMYVGKKHAGKVFYDLTGNRSDTVTINADGWGEFKVNGGSVSIWVAKTSNVT

SEQ ID NO: 24178 - protein, 486 aa, Bacillus sp. TS-23
APINETMMQYFEWDLPNDGTLWTKVKNEAANLSSLGITALWLPPAYKGTSQSDVGYGVYDLYDLGEFNQKGTIRTKYGTKTQYIQAIQAAKAAGMQVYADVVFNHKAGADGTEFVDAVEVDPSNRNQETSGTYQIQAWTKFDFPGRGNTYSSFKWRWYHFDGTDWDEQSRKLNRIYKFTGKAWDWEVDTENGNYDYLMFADLDMDHPEVVTELKNWGTWYVNTTNIDGFRLDAVKHIKYSFFPDWLTYVRNQTGKNLFAVGEFWSYDVNKLHNYITKTNGSMSLFDAPLHNNFYTASKSSGYFDMRYLLNNTLMKDQPSLAVTLVDNHDTQPGQSLQSWVEPWFKPLAYAFILTRQEGYPCVFYGDYYGIPKYNIPGLKSKIDPLLIARRDYAYGTQRDYIDHQDIIGWTREGIDTKPNSGLAALITDGPGGSKWMYVGKKHAGKVFYDLTGNRSDTVTINADGWGEFKVNGGSVSIWVAKTSNVT

SEQ ID NO: 24179 - protein, 485 aa, Bacillus sp. TS-23
APINETMMQYFEWDLPNDGTLWTKVKNEAANLSSLGITALWLPPAYKGTSQSDVGYGAYDLYDLGEFNQKGTIRTKYGTKTQYIQAIQAAKAAGMQVYADVVFNHKAGADGTEFVDAVEVDPSNRNQETSGTYQIQAWTKFDFPGRGNTYSSFKWRWYHFDGTDWDESRKLNRIYKFTGKAWDWEVDTENGNYDYLMFADYDMDHPEVVTELKNWGTWYVNTTNIDGFRLDAVKHIKYSFFPDWLTYVRNQTGKNLFAVGEFWSYDVNKLHNYITKTNGSMSLFDAPLHNNFYTASKSSGYFDMRYLLNNTLMKDQPSLAVTLVDNHDTQPGQSLQSWVEPWFKPLAYAFILTRQEGYPCVFYGDYYGIPKYNIPGLKSKIDPLLIARRDYAYGTQRDYIDHQDIIGWTREGIDTKPNSGLAALITDGPGGSKWMYVGKKHAGKVFYDLTGNRSDTVTINADGWGEFKVNGGSVSIWVAKTSNVT

SEQ ID NO: 24180 - protein, 485 aa, Bacillus sp. TS-23
APINETMMQYFEWDLPNDGTLWTKVKNEAANLSSLGITALWLPPAYKGTSQSDVGYGVYDLYDLGEFNQKGTIRTKYGTKTQYIQAIQAAKAAGMQVYADVVFNHKAGADGTEFVDAVEVDPSNRNQETSGTYQIQAWTKFDFPGRGNTYSSFKWRWYHFDGTDWDESRKLNRIYKFRGKAWDWEVDTENGNYDYLMFADLDMDHPEVVTELKNWGTWYVNTTNIDGFRLDAVKHIKYSFFPDWLTYVRNQTGKNLFAVGEFWSYDVNKLHNYITKTNGSMSLFDAPLHNNFYTASKSSGYFDMRYLLNNTLMKDQPSLAVTLVDNHDTQPGQSLQSWVEPWFKPLAYAFILTRQEGYPCVFYGDYYGIPKYNIPGLKSKIDPLLIARRDYAYGTQRDYIDHQDIIGWTREGIDTKPNSGLAALITDGPGGSKWMYVGKKHAGKVFYDLTGNRSDTVTINADGWGEFKVNGGSVSIWVAKTSNVT

SEQ ID NO: 24181 - protein, 485 aa, Bacillus sp. TS-23
APINETMMQYFEWDLPNDGTLWTKVKNEAANLSSLGITALWLPPAWKGTSQSDVGYGVYDLYDLGEFNQKGTIRTKYGTKTQYIQAIQAAKAAGMQVYADVVFNHKAGADGTEFVDAVEVDPSNRNQETSGTYQIQAWTKFDFPGRGNTYSSFKWRWYHFDGTDWDESRKLNRIYKFSGKAWDWEVDTENGNYDYLMFADLDMDHPEVVTELKNWGTWYVNTTNIDGFRLDAVKHIKYSFFPDWLTYVRNQTGKNLFAVGEFWSYDVNKLHNYITKTNGSMSLFDAPLHNNFYTASKSSGYFDMRYLLNNTLMKDQPSLAVTLVDNHDTQPGQSLQSWVEPWFKPLAYAFILTRQEGYPCVFYGDYYGIPKYNIPGLKSKIDPLLIARRDYAYGTQRDYIDHQDIIGWTREGIDTKPNSGLAALITDGPGGSKWMYVGKKHAGKVFYDLTGNRSDTVTINADGWGEFKVNGGSVSIWVAKTSNVT

SEQ ID NO: 24182 - protein, 485 aa, Bacillus sp. TS-23
APINETMMQYFEWDLPNDGTLWTKVKNEAANLSSLGITALWLPPAYKGTSQSDVGYGVYDLYDLGEFNQKGTIRTKYGTKTQYIQAIQAAKAAGMQVYADVVFNHKAGADGTEFVDAVEVDPSNRNQETSGTYQIQAWTKFDFPGRGNTYSSFKWRWYHFDGTDWDESRKLNRIYKFSGKAWDWEVDTENGNYDYLMFADLDMDHPEVVTELKNWGTWYVNTTNIDGFRLDAVKHIKYSFFPDWLTYVRNQTGKNLFAVGEFWSYDVNKLHNYITKTNGSMSLFDAPLHNNFYTASKSSGYFDMWYLLNNTLMKDQPSLAVTLVDNHDTQPGQSLQSWVEPWFKPLAYAFILTRQEGYPCVFYGDYYGIPKYNIPGLKSKIDPLLIARRDYAYGTQRDYIDHQDIIGWTREGIDTKPNSGLAALITDGPGGSKWMYVGKKHAGKVFYDLTGNRSDTVTINADGWGEFKVNGGSVSIWVAKTSNVT

SEQ ID NO: 24183 - protein, 486 aa, Bacillus sp. TS-23
APINETMMQYFEWDLPNDGTLWTKVKNEAANLSSLGITALWLPPAYKGTSQSDVGYGVYDLYDLGEFNQKGTIRTKYGTKTQYIQAIQAAKAAGMQVYADVVFNHKAGADGTEFVDAVEVDPSNRNQETSGTYQIQAWTKFDFPGRGNTYSSFKWRWYHFDGTDWDESRKLNARIYKFRGKAWDWEVDTENGNYDYLMFADLDMDHPEVVTELKNWGTWYVNTTNIDGFRLDAVKHIKYSFFPDWLTYVRNQTGKNLFAVGEFWSYDVNKLHNYITKTNGSMSLFDAPLHNNFYTASKSSGYFDMRYLLNNTLMKDQPSLAVTLVDNHDTQPGQSLQSWVEPWFKPLAYAFILTRQEGYPCVFYGDYYGIPKYNIPGLKSKIDPLLIARRDYAYGTQRDYIDHQDIIGWTREGIDTKPNSGLAALITDGPGGSKWMYVGKKHAGKVFYDLTGNRSDTVTINADGWGEFKVNGGSVSIWVAKTSNVT

SEQ ID NO: 24184 - protein, 485 aa, Bacillus sp. TS-23
APINETMMQYFEWDLPNDGTLWTKVKNEAANLSSLGITALWLPPAYKGTSQSDVGYGAYDLYDLGEFNQKGTIRTKYGTKTQYIQAIQAAKAAGMQVYADVVFNHKAGADGTEFVDAVEVDPSNRNQETSGTYQIQAWTKFDFPGRGNTYSSFKWRWYHFDGTDWDESRKLNRIYKFSTKAWDWEVDTENGNYDYLMFADYDMDHPEVVTELKNWGTWYVNTTNIDGFRLDAVKHIKYSFFPDWLTYVRNQTGKNLFAVGEFWSYDVNKLHNYITKTNGSMSLFDAPLHNNFYTASKSSGYFDMRYLLNNTLMKDQPSLAVTLVDNHDTQPGQSLQSWVEPWFKPLAYAFILTRQEGYPCVFYGDYYGIPKYNIPGLKSKIDPLLIARRDYAYGTQRDYIDHQDIIGWTREGIDTKPNSGLAALITDGPGGSKWMYVGKKHAGKVFYDLTGNRSDTVTINADGWGEFKVNGGSVSIWVAKTSNVT

SEQ ID NO: 24185 - protein, 487 aa, Bacillus sp. TS-23
APINETMMQYFEWDLPNDGTLWTKVKNEAANLSSLGITALWLPPAYKGTSQSDVGYGVYDLYDLGEFNQKGTIRTKYGTKTQYIQAIQAAKAAGMQVYADVVFNHKAGADGTEFVDAVEVDPSNRNQETSGTYQIQAWTKFDFPGRGNTYSSFKWRWYHFDGTDWDESRKLNRIYKFRSTGKAWDWEVDTENGNYDYLMFADLDMDHPEVVTELKNWGTWYVNTTNIDGFRLDAVKHIKYSFFPDWLTYVRNQTGKNLFAVGEFWSYDVNKLHNYITKTNGSMSLFDAPLHNNFYTASKSSGYFDMRYLLNNTLMKDQPSLAVTLVDNHDTQPGQSLQSWVEPWFKPLAYAFILTRQEGYPCVFYGDYYGIPKYNIPGLKSKIDPLLIARRDYAYGTQRDYIDHQDIIGWTREGIDTKPNSGLAALITDGPGGSKWMYVGKKHAGKVFYDLTGNRSDTVTINADGWGEFKVNGGSVSIWVAKTSNVT

SEQ ID NO: 24186 - protein, 485 aa, Bacillus sp. TS-23
APINETMMQYFEWDLPNDGTLWTKVKNEAANLSSLGITALWLPPAYKGTSQSDVGYGVYDLYDLGEFNQKGTIRTKYGTKTQYIQAIQAAKAAGMQVYADVVFNHKAGADGTEFVDAVEVDPSNRNQETSGTYQIQAWTKFDFPGRGNTYSSFKWRWYHFDGTDWDESRKLNRIYKFSTKAWDWEVDTENGNYDYLMFADLDMDHPEVVTELKNWGTWYVNTTNIDGFRLDAVKHIKYSFFPDWLTYVRNQTGKNLFAVGEFWSYDVNKLHNYITKTNGSMSLFDAPLHNNFYTASKSSGYFDMRYLLNNTLMKDQPSLAVTLVDNHDTQPGQSLQSWVEPWFKPLAYAFILTRQEGYPCVFYGDYYGIPKYNIPGLKSKIDPLLIARRDYAYGTQRDYIDHQDIIGWTREGIDTKPNSGLAALITDGPGGSKWMYVGKKHAGKVFYDLTGNRSDTVTINADGWGEFKVNGGSVSIWVAKTSNVT

SEQ ID NO: 24187 - protein, 485 aa, Bacillus sp. TS-23
APINETMMQYFEWDLPNDGTLWTKVKNEAANLSSLGITALWLPPAYKGTSQSDVGYGVYDLYDLGEFNQKGTIRTKYGTKTQYIQAIQAAKAAGMQVYADVVFNHKAGADGTEFVDAVEVDPSNRNQETSGTYQIQAWTKFDFPGRGNTYSSFKWRWYHFDGTDWDESRKLNRIYKFSGKAWDWEVDTENGNYDYLMFADYDMDHPEVVTELKNWGTWYVNTTNIDGFRLDAVKHIKYSFFPDWLTYVRNQTGKNLFAVGEFWSYDVNKLHNYITKTNGSMSLFDAPLHNNFYTASKSSGYFDMRYLLNNTLMKDQPSLAVTLVDNHDTQPGQSLQSWVEPWFKPLAYAFILTRQEGYPCVFYGDYYGIPKYNIPGLKSKIDPLLIARRDYAYGTQRDYIDHQDIIGWTREGIDTKPNSGLAALITDGPGGSKWMYVGKKHAGKVFYDLTGNRSDTVTINADGWGEFKVNGGSVSIWVAKTSNVT

SEQ ID NO: 24188 - protein, 486 aa, Bacillus sp
APINETMMQYFEWDLPNDGTLWTKVKNEAANLSSLGITALWLPPAYKGTSQSDVGYGVYDLYDLGEFNQKGTIRTKYGTKTQYIQAIQAAKAAGMQVYADVVFNHKAGADGTEFVDAVEVDPSNRNQETSGTYQIQAWTKFDFPGRGNTYSSFKWRWYHFDGTDWDESRKLNRIYKFRSTGKAWDWEVDTENGNYDYLMFADLDMDHPEVVTELKNWGTWYVNTTNIDGFRLDAVKHIKYSFFPDWLTYVRNQTGKNLFAVGEFWSYDVNKLHNYITKTNGSMSLFDALHNNFYTASKSSGYFDMRYLLNNTLMKDQPSLAVTLVDNHDTQPGQSLQSWVEPWFKPLAYAFILTRQEGYPCVFYGDYYGIPKYNIPGLKSKIDPLLIARRDYAYGTQRDYIDHQDIIGWTREGIDTKPNSGLAALITDGPGGSKWMYVGKKHAGKVFYDLTGNRSDTVTINADGWGEFKVNGGSVSIWVAKTSNVT

SEQ ID NO: 24189 - protein, 483 aa, Bacillus licheniformis
HHNGTNGTMMQYFEWYLPNDGNHWNRLRDDASNLKDKGITAVWIPPAWKGASQNDVGYGAYDLYDLGEFNQKGTVRTKYGTRNQLQAAVTALKSNGIQVYGDVVMNHKGGADATEWVRAVEVNPSNRNQEVSGDYTIEAWTKFDFPGRGNTHSNFKWRWYHFDGVDWDQSRQLQNRIYKFRGKGWDWEVDTENGNYDYLMYADIDMDHPEVVNELRNWGVWYTNTLGLDGFRIDAVKHIKYSFTRDWLTHVRNTTGKNMFAVAEFWKNDIGAIENYLSKTNWNHSVFDVPLHYNLYNASRSGGNYDMRQIFNGTVVQRHPTHAVTFVDNHDSQPEEALESFVEEWFKPLAYALTLTRDQGYPSVFYGDYYGIPTHGVPAMKSKIDPILEARQKYAYGTQRDYLDHPDVIGWTREGDGVHADSGLATLMSDGPGGSKWMEVGKNNAGEVWYDITGNQTNTVTINKDGWGQFHVSGGSVSIYVQQ

SEQ ID NO: 24190 - protein, 483 aa, Bacillus licheniformis
HHNGTNGTMMQYFEWYLPNDGNHWNRLRSDASNLKNKGITAVWIPPAWKGASQNDVGYGAYDLYDLGEFNQKGTVRTKYGTRNQLQAAVTALKSNGIQVYGDVVMNHKGGADATEWVRAVEVNPSNRNQEVSGDYTIEAWTKFDFPGRGNTHSNFKWRWYHFDGVDWDQSRQLQNRIYKFRGKGWDWEVDTENGNYDYLMYADIDMDHPEVVNELRNWGVWYTNTLGLDGFRIDAVKHIKYSFTRDWLTHVRNTTGKNMFAVAEFWKNDIGAIENYLSKTNWNHSVFDVPLHYNLYNASRSGGNYDMRQIFNGTVVQRHPTHAVTFVDNHDSQPEEALESFVEEWFKPLAYALTLTRDQGYPSVFYGDYYGIPTHGVPAMKSKIDPILEARQKYAYGTQRDYLDHPDVIGWTREGDGVHADSGLATLMSDGPGGSKWMEVGKNNAGEVWYDITGNQTNTVTINKDGWGQFHVSGGSVSIYVQQ

SEQ ID NO: 24191 - protein, 483 aa, Bacillus licheniformis
HHNGTNGTMMQYFEWYLPNDGNHWNRLRSDASNLKDKGITAVWIPPAWKGASQNDVGYGAYDLYDLGEFNQKGTVRTKYGTRSQLQAAVTALKSNGIQVYGDVVMNHKGGADATEWVRAVEVNPSNRNQEVSGDYTIEAWTKFDFPGRGNTHSNFKWRWYHFDGVDWDQSRQLQNRIYKFRGKGWDWEVDTENGNYDYLMYADIDMDHPEVVNELRNWGVWYTNTLGLDGFRIDAVKHIKYSFTRDWLTHVRNTTGKNMFAVAEFWKNDIGAIENYLSKTNWNHSVFDVPLHYNLYNASRSGGNYDMRQIFNGTVVQRHPTHAVTFVDNHDSQPEEALESFVEEWFKPLAYALTLTRDQGYPSVFYGDYYGIPTHGVPAMKSKIDPILEARQKYAYGTQRDYLDHPDVIGWTREGDGVHADSGLATLMSDGPGGSKWMEVGKNNAGEVWYDITGNQTNTVTINKDGWGQFHVSGGSVSIYVQQ

SEQ ID NO: 24192 - protein, 483 aa, Bacillus licheniformis
HHNGTNGTMMQYFEWYLPNDGNHWNRLRSDASNLKDKGITAVWIPPAWKGASQNDVGYGAYDLYDLGEFNQKGTVRTKYGTRNQLQAAVTALKSNGIQVYGDVVMNHKGGADATEWVRAVEVNPSNRNQEVSGDYTIEAWTKFDFPGRGNTHSNFKWRWYHFDGVDWDQSRQLQNRIYKFRGKGWDWEVDTENGNYDYLMYADIDMDHPEVVNELRNWGVWYTNTLGLDGFRIDAVKHIKYSFTRDWLTHVRNTTGKNMFAVAEFWKNDIGAIENYLSKTNWNHSVFDVPLHYNLYNASRSGGNYDMRQLFNGTVVQRHPTHAVTFVDNHDSQPEEALESFVEEWFKPLAYALTLTRDQGYPSVFYGDYYGIPTHGVPAMKSKIDPILEARQKYAYGTQRDYLDHPDVIGWTREGDGVHADSGLATLMSDGPGGSKWMEVGKNNAGEVWYDITGNQTNTVTINKDGWGQFHVSGGSVSIYVQQ

SEQ ID NO: 24193 - protein, 483 aa, Bacillus licheniformis
HHNGTNGTMMQYFEWYLPNDGNHWNRLRSDASNLKDKGITAVWIPPAWKGASQNDVGYGAYDLYDLGEFNQKGTVRTKYGTRNQLQAAVTALKSNGIQVYGDVVMNHKGGADATEWVRAVEVNPSNRNQEVSGDYTIEAWTKFDFPGRGNTHSNFKWRWYHFDGVDWDQSRQLQNRIYKFRGKGWDWEVDTENGNYDYLMYADIDMDHPEVVNELRNWGVWYTNTLGLDGFRIDAVKHIKYSFTRDWLTHVRNTTGKNMFAVAEFWKNDIGAIENYLSKTNWNHSVFDVPLHYNLYNASRSGGNYDMRQIFNGTVVQRHPTHAVTFVDNHDSQPEEALESFVEEWFKPLAYALTLTRDQGYPSVFYGDYYGIPTHGVPAMKSKIDPILEARQKYAYGTQRDYLDHPDVIGWTREGDGVHADSGLATLMSDGPGGSKWMEVGKNNAGEVWYDITGNQTGTVTINKDGWGQFHVSGGSVSIYVQQ

SEQ ID NO: 24194 - protein, 483 aa, Bacillus licheniformis
HHNGTNGTMMQYFEWYLPNDGNHWNRLRSDASNLKDKGITAVWIPPAWKGASQNDVGYGAYDLYDLGEFNQKGTVRTKYGTRNQLQAAVTALKSNGIQVYGDVVMNHKGGADATEWVRAVEVNPSNRNQEVSGDYTIEAWTKFDFPGRGNTHSNFKWRWYHFDGVDWDQSRQLQNRIYKFRGKGWDWEVDTENGNYDYLMYADIDMDHPEVVNELRNWGVWYTNTLGLDGFRIDAVKHIKYSFTRDWLTHVRNTTGKNMFAVAEFWKNDIGAIENYLSKTNWNHSVFDVPLHYNLYNASRSGGNYDMRQIFNGTVVQRHPTHAVTFVDNHDSQPEEALESFVEEWFKPLAYALTLTRDQGYPSVFYGDYYGIPTHGVPAMKSKIDPILEARQKYAYGTQRDYLDHPDVIGWTREGDGVHADSGLATLMSDGPGGSKWMEVGKNNAGQVWYDITGNQTNTVTINKDGWGQFHVSGGSVSIYVQQ

SEQ ID NO: 24195 - protein, 485 aa, Bacillus sp.
HHNGTNGTXLQYFEWYLPNDGNHWNRLRSDASNLKDKGISAVWIPPAWKGASQNDVGYGAYDLYDLGEFNQKGTIRTKYGTRNQLQAAVNALKSNGIQVYGDVVXNHKGGADATEXVRAVEVNPNNRNQEVSGEYTIEAWTKFDFPGRGNTHSNFKWRWYHFDGVDWDQSRKLNNRIYKFRGDGKGWDWEVDTENGNYDYLXYADIDXDHPEVVNELRNWGVWYTNTLGLDGFRIDAVKHIKYSFTRDWINHVRSATGKNXFAVAEFWKNDLGAIENYLNKTNWNHSVFDVPLHYNLYNASKSGGNYDXRQIFNGTVVQRHPXHAVTFVDNHDSQPEEALESFVEEWFKPLAYALTLTREQGYPSVFYGDYYGIPTHGVPAXKSKIDPILEARQKYAYGRQNDYLDHHNIIGWTREGNTAHPNSGLATIXSDGAGGNKWXFVGRNKAGQVWTDITGNRAGTVTINADGWGNFSVNGGSVSIWVNK

SEQ ID NO: 24196 - protein, 483 aa, Bacillus licheniformis
HHNGTNGTMMQYFEWYLPNDGNHWNRLRSDASNLKDKGITAVWIPPAWKGASQNDVGYGAYDLYDLGEFNQKGTVRTKYGTRNQLQAAVTALKSNGIQVYGDVVMNHKGGADATEWVRAVEVNPSNRNQEVSGDYTIEAWTKFDFPGRGNTHSNFKWRWYHFDGVDWDQSRQLQNRIYKFRGKGWDWEVDTENGNYDYLMYADIDMDHPEVVNELRNWGVWYTNTLGLDGFRIDAVKHIKYSFTRDWLTHVRNTTGKNMFAVAEFWKNDIGAIENYLNKTNWNHSVFDVPLHYNLYNASRSGGNYDMRQIFNGTVVQRHPTHAVTFVDNHDSQPEEALESFVEEWFKPLAYALTLTRDQGYPSVFYGDYYGIPTHGVPAMKSKIDPILEARQKYAYGTQRDYLDHPDVIGWTREGDGVHADSGLATLMSDGPGGSKWMEVGKNNAGEVWYDITGNQTNTVTINKDGWGQFHVSGGSVSIYVQQ

SEQ ID NO: 24197 - protein, 483 aa, Bacillus subtilis
HHNGTNGTMMQYFEWYLPNDGNHWNRLRSDASNLKDKGITAVWIPPAWKGASQNDVGYGAYDLYDLGEFNQKGTVRTKYGTRNQLQAAVTALKSNGIQVYGDVVMNHKGGADATEWVRAVEVNPSNRNQEVSGDYTIEAWTKFDFPGRGNTHSNFKWRWYHFDGVDWDQSRQLQNRIYKFRGKGWDWEVDTENGNYDYLMYADIDMDHPEVVNELRNWGVWYTNTLGLDGFRIDAVKHIKYSFTRDWLTHVRNTTGKNMFAVAEFWKNDIGAIENYLSKTNWNHSVFDVPLHYNLYNASRSGGNYDMRQIFNGTVVQRHPTHAVTFVDNHDSQPEEALESFVEEWFKPLAYALTLTRDQGYPSVFYGDYYGIPTHGVPAMKSKIDPILEARQKYAYGTQRDYLDHPDVIGWTREGDSVHANSGLATLMSDGPGGAKWMDVGKNNAGEIWYDITGNQTNTVTINKDGWGQFQVSGGSVSIYVQR

SEQ ID NO: 24198 - protein, 483 aa, Bacillus licheniformis
HHNGTNGTMMQYFEWYLPNDGNHWNRLRSDASNLKDKGITAVWIPPAWKGASQNDVGYGAYDLYDLGEFNQKGTVRTKYGTRNQLQAAVTALKSNGIQVYGDVVMNHKGGADATEWVRAVEVNPSNRNQEVSGDYTIEAWTKFDFPGRGNTHSNFKWRWYHFDGVDWDQSRQLQNRIYKFRGKEWDWEVDEENGNYDYLMYADYDMDHPEVVNELRNWGVWYTNTLGLDGFRIDAVKHIKYSFTRDWLTHVRNTTGKNMFAVAEFWKNDIGAIENYLSKTNWNHSVFDVPLHYNLYNASRSGGNYDMRQIFNGTVVQRHPTHAVTFVDNHDSQPEEALESFVEEWFKPLAYALTLTRDQGYPSVFYGDYYGIPTHGVPAMKSKIDPILEARQKYAYGTQRDYMDHPDVIGWTREGDGVHADSGLATLMSDGPGGSKWMEVGKNNAGEVWYDITGNQTNTVTINKDGWGQFHVSGGSVSIWVQQ

SEQ ID NO: 24199 - protein, 483 aa, Bacillus licheniformis
HHNGTNGTMMQYFEWYLPNDGNHWNRLRSDASNLKDKGITAIWIPPAWKGASQNDVGYGAYDLYDLGEFNQKGTVRTKYGTRNQLQAAVTALKSNGIQVYGDVVMNHKGGADATEWVRAVEVNPSNRNQEVSGDYTIEAWTKFDFPGRGNTHSNFKWRWYHFDGVDWDQSRQLQNRIYKFRGKGWDWEVDTENGNYDYLMYADIDMDHPEVVNELRNWGVWYTNTLGLDGFRIDAVKHIKYSFTRDWLTHVRNTTGKNMFAVAEFWKNDIGAIENYLSKTNWNHSVFDVPLHYNLYNASRSGGNYDMRQIFNGTVVQRHPTHAVTFVDNHDSQPEEALESFVEEWFKPLAYALTLTRDQGYPSVFYGDYYGIPTHGVPAMKSKIDPILEARQKYAYGTQRDYLDHPDVIGWTREGDGVHADSGLATLMSDGPGGSKWMEVGKNNAGEVWYDITGNQTNTVTINKDGWGQFHVSGGSVSIYVQQ

SEQ ID NO: 24200 - protein, 483 aa, Bacillus licheniformis
HHNGTNGTMMQYFEWYLPNDGNHWNRLRSDASNLKDKGITAVWIPPAWKGASQNDVGYGAYDLYDLGEFNQKGTVRTKYGTRNQLQAAVTALKSNGIQVYGDVVMNHKGGADATEWVRAVEVNPSNRNQEVSGDYTIEAWTKFDFPGRGNTHSNFKWRWYHFDGVDWDQSRQLQNRIYKFRGKGWDWEVDTENGNYDYLMYADIDMDHPEVVNELRNWGVWYTNTLGLDGFRIDAVKHIKYSFTRDWLTHVRNTTGKNMFAVAEFWKNDIGAIENYLSKTNWNHSVFDVPLHYNLYNASRSGGNYDMRQIFNGTVVQRHPTHAVTFVDNHDSQPEEALESFVEEWFKPLAYALTLTRDQGYPSVFYGDYYGIPTHGVPAMKSKIDPILEARQKYAYGTQRDYLDHPDVIGWTREGDGVHADSGLATIMSDGPGGSKWMEVGKNNAGEVWYDITGNQTNTVTINKDGWGQFHVSGGSVSIYVQQ

SEQ ID NO: 24201 - protein, 483 aa, Bacillus licheniformis
HHNGTNGTMMQYFEWYLPNDGNHWNRLRSDASNLKDKGITAVWIPPAWKGASQNDVGYGAYDLYDLGEFNQKGTVRTKYGTRNQLQAAVTALKSNGIQVYGDVVMNHKGGADATEWVRAVEVNPSNRNQEVSGDYTIEAWTKFDFPGRGNTHSNFKWRWYHFDGVDWDQSRQLQNRIYKFRGKGWDWEVDTENGNYDYLMYADIDMDHPEVVNELRNWGVWYTNTLGLDGFRIDAVKHIKYSFTRDWLTHVRNTTGKNMFAVAEFWKNDIGAIENYLSKTNWNHSVFDVPLHYNLYNASRSGGNYDMRQIFNGTVVQRHPTHAVTFVDNHDSQPEEALESFVQEWFKPLAYALTLTRDQGYPSVFYGDYYGIPTHGVPAMKSKIDPILEARQKYAYGTQRDYLDHPDVIGWTREGDGVHADSGLATLMSDGPGGSKWMEVGKNNAGEVWYDITGNQTNTVTINKDGWGQFHVSGGSVSIYVQQ

SEQ ID NO: 24202 - protein, 483 aa, Bacillus licheniformis
HHNGTNGTMMQYFEWYLPNDGNHWNRLRSDASNLKDKGITAVWIPPAWKGASQNDVGYGAYDLYDLGEFNQKGTVRTKYGTRNQLQAAVTALKSNGIQVYGDVVMNHKGGADATEWVRAVEVNPNNRNQEVSGDYTIEAWTKFDFPGRGNTHSNFKWRWYHFDGVDWDQSRQLQNRIYKFRGKGWDWEVDTENGNYDYLMYADIDMDHPEVVNELRNWGVWYTNTLGLDGFRIDAVKHIKYSFTRDWLTHVRNTTGKNMFAVAEFWKNDIGAIENYLSKTNWNHSVFDVPLHYNLYNASRSGGNYDMRQIFNGTVVQRHPTHAVTFVDNHDSQPEEALESFVEEWFKPLAYALTLTRDQGYPSVFYGDYYGIPTHGVPAMKSKIDPILEARQKYAYGTQRDYLDHPDVIGWTREGDGVHADSGLATLMSDGPGGSKWMEVGKNNAGEVWYDITGNQTNTVTINKDGWGQFHVSGGSVSIYVQQ

SEQ ID NO: 24203 - protein, 483 aa, Bacillus licheniformis
HHNGTNGTMMQYFEWYLPNDGNHWNRLRSDASNLKDKGITAVWIPPAWKGASQNDVGYGAYDLYDLGEFNQKGTVRTKYGTRNQLQAAVTALKSNGIQVYGDVVMNHKGGADATEWVRAVEVNPSNRNQEVSGDYTIEAWTKFDFPGRGNTHSNFKWRWYHFDGVDWDQSRQLQNRIYKFRGKGWDWEVDTENGNYDYLMYADIDMDHPEVVNELRRWGVWYTNTLGLDGFRIDAVKHIKYSFTRDWLTHVRNTTGKNMFAVAEFWKNDIGAIENYLSKTNWNHSVFDVPLHYNLYNASRSGGNYDMRQIFNGTVVQRHPTHAVTFVDNHDSQPEEALESFVEEWFKPLAYALTLTRDQGYPSVFYGDYYGIPTHGVPAMKSKIDPILEARQKYAYGTQRDYLDHPDVIGWTREGDGVHADSGLATLMSDGPGGSKWMEVGKNNAGEVWYDITGNQTNTVTINKDGWGQFHVSGGSVSIYVQQ

SEQ ID NO: 24204 - protein, 483 aa, Bacillus licheniformis
HHNGTNGTMMQYFEWYLPNDGNHWNRLRSDASNLKDKGITAVWIPPAWKGASQNDVGYGAYDLYDLGEFNQKGTVRTKYGTRNQLQAAVTALKSNGIQVYGDVVMNHKGGADATEWVRAVEVNPSNRNQEISGDYTIEAWTKFDFPGRGNTHSNFKWRWYHFDGVDWDQSRQLQNRIYKFRGKGWDWEVDTENGNYDYLMYADIDMDHPEVVNELRNWGVWYTNTLGLDGFRIDAVKHIKYSFTRDWLTHVRNTTGKNMFAVAEFWKNDIGAIENYLSKTNWNHSVFDVPLHYNLYNASRSGGNYDMRQIFNGTVVQRHPTHAVTFVDNHDSQPEEALESFVEEWFKPLAYALTLTRDQGYPSVFYGDYYGIPTHGVPAMKSKIDPILEARQKYAYGTQRDYLDHPDVIGWTREGDGVHADSGLATLMSDGPGGSKWMEVGKNNAGEVWYDITGNQTNTVTINKDGWGQFHVSGGSVSIYVQQ

SEQ ID NO: 24205 - protein, 483 aa, Bacillus subtilis
HHNGTNGTMMQYFEWYLPNDGNHWNRLRSDASNLKDKGITAVWIPPAWKGASQNDVGYGAYDLYDLGEFNQKGTVRTKYGTRNQLQAAVTALKSNGIQVYGDVVMNHKGGADATEWVRAVEVNPSNRNQEVSGDYTIEAWTKFDFPGRGNTHSNFKWRWYHFDGVDWDQSRQLQNRIYKFRGKGWDWEVDTENGNYDYLMYADIDMDHPEVVNELRNWGVWYTNTLGLDGFRIDAVKHIKYSFTRDWLTHVRNTTGKNMFAVAEFWKNDIGAIENYLSKTNWNHSVFDVPLHYNLYNASRSGGNYDMRQIFNGTVVQRHPTHAVTFVDNHDSQPEEALESFVEEWFKPLAYALTLTRDQGYPSVFYGDYYGIPTHGVPAMKSKIDPILEARQKYAYGTQRDYLDHPDVIGWTREGDSVHANSGLATLMSDGPGGAKWMDVGKNNAGEVWYDITGNQTNTVTINKDGWGQFQVSGGSVSIYVQQ

SEQ ID NO: 24206 - protein, 483 aa, Bacillus licheniformis
HHNGTNGTMMQYFEWYLPNDGNHWNRLRSDASNLKDKGITAVWIPPAWKGASQNDVGYGAYDLYDLGEFNQKGTVRTKYGTRNQLQAAVTALKSNGIQVYGDVVMNHKGGADATEWVRAVEVNPSNRNQEVSGDYTIEAWTKFDFPGRGNTHSNFKWRWYHFDGVDWDQSRQLQNRIYKFRGKGWDWEVDTENGNYDYLMYADIDMDHPEVVNELRNWGVWYTNTLGLDGFRIDAVKHIKYSFTRDWLTHVRNTTGKNMFAVAEFWKNDIGAIENYLSKTNWNHSVFDVPLHYNLYNASRSGGNYDMAQIFNGTVVQRHPTHAVTFVDNHDSQPEEALESFVEEWFKPLAYALTLTRDQGYPSVFYGDYYGIPTHGVPAMKSKIDPILEARQKYAYGTQRDYLDHPDVIGWTREGDGVHADSGLATLMSDGPGGSKWMEVGKNNAGEVWYDITGNQTNTVTINKDGWGQFHVSGGSVSIYVQQ

SEQ ID NO: 24207 - protein, 483 aa, Bacillus subtilis
HHNGTNGTMMQYFEWYLPNDGNHWNRLRSDASNLKDKGITAVWIPPAWKGASQNDVGYGAYDLYDLGEFNQKGTVRTKYGTRNQLQAAVTALKSNGIQVYGDVVMNHKGGADATEWVRAVEVNPSNRNQEVSGDYTIEAWTKFDFPGRGNTHSNFKWRWYHFDGVDWDQSRQLQNRIYKFRGKGWDWEVDTENGNYDYLMYADIDMDHPEVVNELRNWGVWYTNTLGLDGFRIDAVKHIKYSFTRDWLTHVRNTTGKNMFAVAEFWKNDIGAIENYLSKTNWNHSVFDVPLHYNLYNASRSGGNYDMRQIFNGTVVQRHPTHAVTFVDNHDSQPEEALESFVEEWFKPLAYALTLTRDQGYPSVFYGDYYGIPTHGVPAMKSKIDPILEARQKYAYGTQRDYLDHPDVIGWTREGDGVHANSGLATLMSDGPGGSKWMDVGKNNAGEVWYDITGNQTNTVTINKDGWGQFHVNGGSVSIYIQQ

SEQ ID NO: 24208 - protein, 485 aa, Bacillus sp.
HHNGTNGTMMQYFEWYLPNDGNHWNRLRSDASNLKDKGISAVWIPPAWKGASQNDVGYGAYDLYDLGEFNQKGTIRTKYGTRNQLQAAVNALKSNGIQVYGDVVMNHKGGADATEMVRAVEVNPNNRNQEVSGEYTIEAWTKFDFPGRGNTHSNFKWRWYHFNGVDWDQSRKLNNRIYKFANDGTNWNWEVDTENGNYDYLMYANIDFSHPEVVNELRNWGVWYTNTLGLDGFRIDAVKHIPYWFTRDWINHVRSATGKNMFAVAEFWKNDLGAIENYLNKTNWNHSVFDVPLHYNLYNASKSGGNYDMRQIFNGTVVQRHPMHAVTFVDNHDSQPEEALESFVEEWFKPLAYALTLTREQGYPSVFYGDYYGIPTHGVPAMKSKIDPILEARQKYAYGRQNDYLDHWDIIGWTREGNTAHPNSGLATIMSNGPGGNKWMFVGRNKAGQVWTDITGNRAGTVTINADGWGNFSVNGGSVSIWVNK

SEQ ID NO: 24209 - protein, 483 aa, Bacillus licheniformis
HHNGTNGTMMQYFEWYLPNDGNHWNRLRSDASNLKDKGITAVWIPPAWKGTSQNDVGYGAYDLYDLGEFNQKGTVRTKYGTRNQLQAAVTALKSNGIQVYGDVVMNHKGGADATEWVRAVEVNPSNRNQEVSGDYTIEAWTKFDFPGRGNTHSNFKWRWYHFDGVDWDQSRQLQNRIYKFRGKGWDWEVDTENGNYDYLMYADIDMDHPEVVNELRNWGVWYTNTLGLDGFRIDAVKHIKYSFTRDWLTHVRNTTGKNMFAVAEFWKNDIGAIENYLSKTNWNHSVFDVPLHYNLYNASRSGGNYDMRQIFNGTVVQRHPTHAVTFVDNHDSQPEEALESFVEEWFKPLAYALTLTRDQGYPSVFYGDYYGIPTHGVPAMKSKIDPILEARQKYAYGTQRDYLDHPDVIGWTREGDGVHADSGLATLMSDGPGGSKWMEVGKNNAGEVWYDITGNQTNTVTINKDGWGQFHVSGGSVSIYVQQ

SEQ ID NO: 24210 - protein, 483 aa, Bacillus licheniformis
HHNGTNGTMMQYFEWYLPNDGNHWNRLRSDASNLKDKGITAVWIPPAWKGASQNDVGYGAYDLYDLGEFNQKGTVRTKYGTRNQLQAAVTALKSNGIQVYGDVVMNHKGGADATEWVRAVEVNPSNRNQEVSGDYTIEAWTKFDFPGRGNTHSNFKWRWYHFDGVDWDQSRQLQNRIYKFRGKGWDWEVDTENGNYDYLMYADIDMDHPEVVNELRNWGVWYTNTLGLDGFRIDAVKHIKYSFTRDWLTHVRNTTGKNMFAVAEFWKNDIGAIENYLSKTNWNHSVFDVPLHYNLYNASRSGGNYDMRKIFNGTVVQRHPTHAVTFVDNHDSQPEEALESFVEEWFKPLAYALTLTRDQGYPSVFYGDYYGIPTHGVPAMKSKIDPILEARQKYAYGTQRDYLDHPDVIGWTREGDGVHADSGLATLMSDGPGGSKWMEVGKNNAGEVWYDITGNQTNTVTINKDGWGQFHVSGGSVSIYVQQ

SEQ ID NO: 24211 - protein, 483 aa, Bacillus licheniformis
HHNQTNGTMMQYFEWYLPNDGNHWNRLRSDASNLKDKGITAVWIPPAWKGASQNDVGYGAYDLYDLGEFNQKGTVRTKYGTRNQLQAAVTALKSNGIQVYGDVVMNHKGGADATEWVRAVEVNPSNRNQEVSGDYTIEAWTKFDFPGRGNTHSNFKWRWYHFDGVDWDQSRQLQNRIYKFRGKGWDWEVDTENGNYDYLMYADYDMDHPEVVNELRNWGVWYTNTLGLDGFRIDAVKHIKYSFTRDWLTHVRNTTGKNMFAVAEFWKNDIGAIENYLSKTNWNHSVFDVPLHYNLYNASRSGGNYDMRQIFNGTVVQRHPTHAVTFVDNHDSQPEEALESFVEEWFKPLAYALTLTRDQGYPSVFYGDYYGIPTHGVPAMKSKIDPILEARQKYAYGTQRDYLDHPDVIGWTREGDGVHADSGLATLMSDGPGGSKWMEVGKNNAGEVWYDITGNQTGTVTINKDGWGQFHVSGGSVSIWVQQ

SEQ ID NO: 24212 - protein, 483 aa, Bacillus subtilis
HHNGTNGTMMQYFEWYLPNDGNHWNRLRSDASNLKDKGITAVWIPPAWKGASQNDVGYGAYDLYDLGEFNQKGTVRTKYGTRNQLQAAVTALKSNGIQVYGDVVMNHKGGADATEWVRAVEVNPSNRNQEVSGDYTIEAWTKFDFPGRGNTHSNFKWRWYHFDGVDWDQSRQLQNRIYKFRGKGWDWEVDTENGNYDYLMYADIDMDHPEVVNELRNWGVWYTNTLGLDGFRIDAVKHIKYSFTRDWLTHVRNTTGKNMFAVAEFWKNDIGAIENYLSKTNWNHSVFDVPLHYNLYNASRSGGNYDMRQIFNGTVVQRHPTHAVTFVDNHDSQPEEALESFVEEWFKPLAYALTLTRDQGYPSVFYGDYYGIPTHGVPAMKSKIDPILEARQKYAYGTQRDYLDHPDVIGWTREGDSVHANSGLATLMSDGPGGSKWMDVGKNNAGEVWRDITGNQTNTVTINKDGWGQFHVSGGSVSIYVQQ

SEQ ID NO: 24213 - protein, 485 aa, Bacillus subtilis
HHNGTNGTMMQYFEWYLPNDGNHWNRLRSDASNLKDKGITAVWIPPAWKGASQNDVGYGAYDLYDLGEFNQKGTVRTKYGTRNQLQAAVTALKSNGIQVYGDVVMNHKGGADATEWVRAVEVNPSNRNQEVSGDYTIEAWTKFDFPGRGNTHSNFKWRWYHFDGVDWDQSRQLQNRIYKFRGDGKGWDWEVDTENGNYDYLMYADIDMDHPEVVNELRNWGVWYTNTLGLDGFRIDAVKHIKYSFTRDWLTHVRNTTGKNMFAVAEFWKNDIGAIENYLSKTNWNHSVFDVPLHYNLYNASRSGGNYDMRQIFNGTVVQRHPTHAVTFVDNHDSQPEEALESFVEEWFKPLAYALTLTRDQGYPSVFYGDYYGIPTHGVPAMKSKIDPILEARQKYAYGTQRDYFDHPDVIGWTREGDSVHANSGLATLISDGPGGAKWMDVGKNNAGEIWYDITGNQTNTVTINKDGWGQFQVSGGSVSIYVQR

SEQ ID NO: 24214 - protein, 483 aa, Bacillus licheniformis
HHNGTNGTMMQYFEWYLPNDGNHWNRLRSDASNLKDKGITAVWIPPAWKGASQNDVGYGAYDLYDLGEFNQKGTVRTKYGTRNQLQAAVTALKSNGIQVYGDVVMNHKGGADATEWVRAVEVNPSNRNQEVSGDYTIEAWTKFDFPGRGNTHSNFKWRWYHFDGVDWDQSRQLQNRIYKFRGKGWDWEVDTENGNYDYLMYADIDMDHPEVVNELRNWGVWYTNTLGLDGFRIDAVKHIKYSFTRDWLTHVRNTTGKNMFAVAEFWKNDIGAIENYLSKTNWNHSVFDVPLHYNLYNASRSGGNYDMRQIFNGTVVQRHPTHAVTFVDNHDSQPGEALESFVEEWFKPLAYALTLTRDQGYPSVFYGDYYGIPTHGVPAMKSKIDPILEARQKYAYGTQRDYLDHPDVIGWTREGDGVHADSGLATLMSDGPGGSKWMEVGKNNAGEVWYDITGNQTNTVTINKDGWGQFHVSGGSVSIYVQQ

SEQ ID NO: 24215 - protein, 483 aa, Bacillus licheniformis
HHNGTNGTMMQYFEWYLPNDGNHWNRLRSDASNLKDKGITAVWIPPAWKGASQNDVGYGAYDLYDLGEFNQKGTVRTKYGTRNQLQAAVTALKSNGIQVYGDVVMNHKGGADATEWVRAVEVNPSNRNQEVSGDYTIEAWTKFDFPGRGNTHSNFKWRWYHFDGVDWDQSRQLQNRIYKFRGKGWDWEVDTENGNYDYLMYADIDMDHPEVVNELRNWGVWYTNTLGLDGFRIDAVKHIKYSFTRDWLTHVRNTTGKNMFAVAEFWKNDIGAIENYLSKTNWNHSVFDVPLHYNLYNASRSGGNYDMRQIFNGTVVQRHPTHAVTFVDNHDSQPEEALESFVEEWFKPLAYALTLTRDQGYPSVFYGDYYGIPTHGVPAMKSKIDPILEARQKYAYGTQRDYLDHPDVIGWTREGDGVHADSGLATLMSDGPGGSKWMEVGKNNAGEVWYDITGNKTNTVTINKDGWGQFHVSGGSVSIYVQQ

SEQ ID NO: 24216 - protein, 483 aa, Bacillus licheniformis
HHNGTNGTMMQYFEWYLPNDGNHWNRLRSDASNLKDKGITAVWIPPAWKGASQNDVGYGAYDLYDLGEFNQKGTVRTKYGTRNQLQAAVTALKSNGIQVYGDVVMNHKGGADATEWVRAVEVNPSNRNQEVSGDYTIEAWTKFDFPGRGNTHSNFKWRWYHFDGVDWDQSRQLQNRIYKFRGKGWDWEVDTENGNYDYLMYADIDMDHPEVVNELRNWGVWYTNTLGLDGFRIDAVKHIKYSFTRDWLTHVRNTTGKNMFAVAEFWKNDLGAIENYLSKTNWNHSVFDVPLHYNLYNASRSGGNYDMRQIFNGTVVQRHPTHAVTFVDNHDSQPEEALESFVEEWFKPLAYALTLTRDQGYPSVFYGDYYGIPTHGVPAMKSKIDPILEARQKYAYGTQRDYLDHPDVIGWTREGDGVHADSGLATLMSDGPGGSKWMEVGKNNAGEVWYDITGNQTNTVTINKDGWGQFHVSGGSVSIYVQQ

SEQ ID NO: 24217 - protein, 483 aa, Bacillus licheniformis
HHNGTNGTMMQYFEWYLPNDGNHWNRLRSDASNLKDKGITAVWIPPAWKGASQNDVGYGAYDLYDLGEFNQKGTVRTKYGTRNQLQAAVTALKSNGIQVYGDVVMNHKGGADATEWVRAVEVNPSNRNQEVSGDYTIEAWTKFDFPGRGNTHSNFKWRWYHFDGVDWDQSRQLQNRIYKFRGKGWDWEVDTENGNYDYLMYADIDMDHPEVVNELRNWGVWYTNTLGLDGFRIDAVKHIKYSFTRDWLTHVRNTTGKNMFAVAEFWKNDIGAIENYLSKTNWNHSVFDVPLHYNLYNASRSGGNYDMRQIFNGTVVQRHPTHAVTFVDNHDSQPEEALESFVEEWFKPLAYALTLTRDQGYPSVFYGDYYGIPTHGVPAMKSKIDPILEARQKYAYGTQRDYLDHPDVIGWTREGDGVHADSGLATLMSDGPGGSKWMEVGKNNAGEVWYDITGNQTNTVTINKDGWAQFHVSGGSVSIYVQQ

SEQ ID NO: 24218 - protein, 483 aa, Bacillus licheniformis
HHNGTNGTMMQYFEWYLPNDGNHWNRLRSDASNLRDKGITAVWIPPAWKGASQNDVGYGAYDLYDLGEFNQKGTVRTKYGTRNQLQAAVTALKSNGIQVYGDVVMNHKGGADATEWVRAVEVNPSNRNQEVSGDYTIEAWTKFDFPGRGNTHSNFKWRWYHFDGVDWDQSRQLQNRIYKFRGKGWDWEVDTENGNYDYLMYADIDMDHPEVVNELRNWGVWYTNTLGLDGFRIDAVKHIKYSFTRDWLTHVRNTTGKNMFAVAEFWKNDIGAIENYLSKTNWNHSVFDVPLHYNLYNASRSGGNYDMRQIFNGTVVQRHPTHAVTFVDNHDSQPEEALESFVEEWFKPLAYALTLTRDQGYPSVFYGDYYGIPTHGVPAMKSKIDPILEARQKYAYGTQRDYLDHPDVIGWTREGDGVHADSGLATLMSDGPGGSKWMEVGKNNAGEVWYDITGNQTNTVTINKDGWGQFHVSGGSVSIYVQQ

SEQ ID NO: 24219 - protein, 483 aa, Bacillus licheniformis
HHNGTNGTMMQYFEWYLPNDGNHWNRLRSDASNLKDKGITAVWIPPAWKGASQNDVGYGAYDLYDLGEFNQKGTVRTKYGTRNQLQAAVTALKSNGIQVYGDVVMNHKGGADATEWVRAVEVNPSNRNQEVSGDYTIEAWTKFDFPGRGNTHSNFKWRWYHFDGVDWDQSRQLQNRIYKFRGKEWDWEVDTENGNYDYLMYADIDMDHPEVVNELRNWGVWYTNTLGLDGFRIDAVKHIKYSFTRDWLTHVRNTTGKNMFAVAEFWKNDIGAIENYLSKTNWNHSVFDVPLHYNLYNASRSGGNYDMRKIFNGTVVQRHPTHAVTFVDNHDSQPEEALESFVEEWFKPLAYALTLTRDQGYPSVFYGDYYGIPTHGVPAMKSKIDPILEARQKYAYGTQRDYLDHPDVIGWTREGDGEHADSGLATLMSDGPGGSKWMEVGKNNAGEVWYDITGNQTNTVTINKDGWGEFHVSGGSVSIYVQQ

SEQ ID NO: 24220 - protein, 483 aa, Bacillus licheniformis
HHNGTNGTMMQYFEWYLPNDGNHWNRLRSDASNLKDKGITAVWIPPAWKGASQNDVGYGAYDLYDLGEFNQKGTVRTKYGTRNQLQAAVTALKSNGVQVYGDVVMNHKGGADATEWVRAVEVNPSNRNQEVSGDYTIEAWTKFDFPGRGNTHSNFKWRWYHFDGVDWDQSRQLQNRIYKFRGKGWDWEVDTENGNYDYLMYADIDMDHPEVVNELRNWGVWYTNTLGLDGFRIDAVKHIKYSFTRDWLTHVRNTTGKNMFAVAEFWKNDIGAIENYLSKTNWNHSVFDVPLHYNLYNASRSGGNYDMRQIFNGTVVQRHPTHAVTFVDNHDSQPEEALESFVEEWFKPLAYALTLTRDQGYPSVFYGDYYGIPTHGVPAMKSKIDPILEARQKYAYGTQRDYLDHPDVIGWTREGDGVHADSGLATLMSDGPGGSKWMEVGKNNAGEVWYDITGNQTNTVTINKDGWGQFHVSGGSVSIYVQQ

SEQ ID NO: 24221 - protein, 483 aa, Bacillus licheniformis
HHNGTNGTMMQYFEWYLPNDGNHWNRLRSDASNLKDKGITAVWIPPAWKGASQNDVGYGAYDLYDLGEFNQKGTVRTKYGTRNQLQAAVTALKSNGIQVYGDVVMNHKGGADATEWVRAVEVNPSNRNQEVSGDYTIEAWTKFDFPGRGNTHSNFKWRWYHFDGVDWDQSRQLQNRIYKFRGKGWDWEVDTENGNYDYLMYADIDMDHPEVVNELRNWGVWYTNTLGLDGFRIDAVKHIKYSFTRDWLTHVRNTTGKNMFAVAEFWKNDIGAIENYLSKTNWNHSVFDVPLHYNLYNASRSGGNYDMRQIFNGTVVQKHPTHAVTFVDNHDSQPEEALESFVEEWFKPLAYALTLTRDQGYPSVFYGDYYGIPTHGVPAMKSKIDPILEARQKYAYGTQRDYLDHPDVIGWTREGDGVHADSGLATLMSDGPGGSKWMEVGKNNAGEVWYDITGNQTNTVTINKDGWGQFHVSGGSVSIYVQQ

SEQ ID NO: 24222 - protein, 483 aa, Synthetic construct
LNGTLMQYFEWYMPNDGQHWKRLQNDSAYLAEHGITAVWIPPAYKGTSQADVGYGAYDLYDLGEFHQKGTVRTKYGTKGELQSAIKSLHSRDINVYGDVVINHKAGADATEDVTAVEVNPANRNQETSEEYQIKAWTDFRFPGRGNTYSDFKWHWYHFDGADWDESRKISRIFKFRGEGKAWDWEVSSENGNYDYLMYADVDYDHPDVAAEIKRWGTWYANELQLDGFRLDAVKHIKFSFLRDWVNHVREKTGKEMFTVAEYWSYDLGALENYLNKTNFNHSVFDVPLHYQFHAASTQGGGYDMRKLLNGTVVSKHPLKSVTFVDNHDTQPGQSLESTVQTWFKPLAYAFILTRESGYPQVFYGDMYGTKGDSQREIPALKHKIEPILKARKQYAYGAQHDYFDHHDIVGWTREGDSSVANSGLAALITDGPGGAKRMYVGRQNAGETWHDITGNRSEPVVINSAGWGEFHVNGGSVSIYVQR

SEQ ID NO: 24223 - protein, 485 aa, Bacillus sp.
ANTAPVNGTMMQYFEWDLPNDGTLWTKVKNEASSLSALGITALWLPPAYKGTSQADVGYGVYDLYDLGEFNQKGTIRTKYGTKTQYLQAIQAAKSAGMQVYADVVFNHKAGADSTEWVDAVEVNPSNRNQETSGTYQIQAWTKFDFPGRGNTYSSFKWRWYHFDGTDWDESRKLNRIYKFRGTGKAWDWEVDTENGNYDYLMFADLDMDHPEVVAELKNWGKWYVNTTNVDGFRLDAVKHIKYSFFPDWLSYVRNQTGKNLFAVGEFWGYDVNKLHNYITKTNGAMSLFDAPLHNNFYIASKSSGYFDMRYLLNNTLMKDQPALAVTLVDNHDTQPGQSLQSWVEPWFKPLAYAFILTRQEGYPCVFYGDYYGIPKYNIPGLKSKIDPLLIARRDYAYGTQRDYIDHQDIIGWTREGIDAKPNSGLAALITDGPGGSKWMYVGKRHAGKVFYDLTGNRSDTVTINADGWGEFKVNGGSVSIWVAK

SEQ ID NO: 24224 - protein, 513 aa, Bacillus sp. TS-23
APINETMMQYFEWDLPNDGTLWTKVKNEAANLSSLGITALWLPPAYKGTSQSDVGYGVYDLYDLGEFNQKGTIRTKYGTKTQYIQAIQAAKAAGMQVYADVVFNHKAGADGTEFVDAVEVDPSNRNQETSGTYQIQAWTKFDFPGRGNTYSSFKWRWYHFDGTDWDESRKLNRIYKFRSTGKAWDWEVDTENGNYDYLMFADLDMDHPEVVTELKNWGTWYVNTTNIDGFRLDAVKHIKYSFFPDWLTYVRNQTGKNLFAVGEFWSYDVNKLHNYITKTRGSMSLFDAPLHNNFYTASKSSGYFDMRYLLNNTLMKDQPSLAVTLVDNHDTQPGQSLQSWVEPWFKPLAYAFILTRQEGYPCVFYGDYYGIPKYNIPGLKSKIDPLLIARRDYAYGTQRDYIDHQDIIGWTREGIDTKPNSGLAALITDGPGGSKWMYVGKKHAGKVFYDLTGNRSDTVTINADGWGEFKVNGGSVSIWVAKTSNVTFTVNNATTTSGQNVYVVANIPELGNW

SEQ ID NO: 24225 - protein, 512 aa, Bacillus sp. TS-23
APINETMMQYFEWDLPNDGTLWTKVKNEAANLSSLGITALWLPPAYKGTSQSDVGYGVYDLYDLGEFNQKGTIRTKYGTKTQYIQAIQAAKAAGMQVYADVVFNHKAGADGTEFVDAVEVDPSNRNQETSGTYQIQAWTKFDFPGRGNTYSSFKWRWYHFDGTDWDESRKLNNRIYKFRGKAWDWEVDTENGNYDYLMFADLDMDHPEVVTELKNWGTWYVNTTNIDGFRLDAVKHIKYSFFPDWLTYVRNQTGKNLFAVGEFWSYDVNKLHNYITKTNGSMSLFDAPLHNNFYTASKSSGYFDMRYLLNNTLMKDQPSLAVTLVDNHDTQPGQSLQSWVEPWFKPLAYAFILTRQEGYPCVFYGDYYGIPKYNIPGLKSKIDPLLIARRDYAYGTQRDYIDHQDIIGWTREGIDTKPNSGLAALITDGPGGSKWMYVGKKHAGKVFYDLTGNRSDTVTINADGWGEFKVNGGSVSIWVAKTSNVTFTVNNATTTSGQNVYVVANIPELGNW

SEQ ID NO: 24226 - protein, 512 aa, Bacillus sp. TS-23
APINETMMQYFEWDLPNDGTLWTKVKNEAANLSSLGITALWLPPAYKGTSQSDVGYGVYDLYDLGEFNQKGTIRTKYGTKTQYIQAIQAAKAAGMQVYADVVFNHKAGADGTEFVDAVEVDPSNRNQETSGTYQIQAWTKFDFPGRGNTYSSFKWRWYHFDGTDWDEQSRKLNRIYKFRGKAWDWEVDTENGNYDYLMFADLDMDHPEVVTELKNWGTWYVNTTNIDGFRLDAVKHIKYSFFPDWLTYVRNQTGKNLFAVGEFWSYDVNKLHNYITKTNGSMSLFDAPLHNNFYTASKSSGYFDMRYLLNNTLMKDQPSLAVTLVDNHDTQPGQSLQSWVEPWFKPLAYAFILTRQEGYPCVFYGDYYGIPKYNIPGLKSKIDPLLIARRDYAYGTQRDYIDHQDIIGWTREGIDTKPNSGLAALITDGPGGSKWMYVGKKHAGKVFYDLTGNRSDTVTINADGWGEFKVNGGSVSIWVAKTSNVTFTVNNATTTSGQNVYVVANIPELGNW

SEQ ID NO: 24227 - protein, 511 aa, Bacillus sp.
APINETMMQYFEWDLPNDGTLWTKVKNEAANLSSLGITALWLPPAYKGTSQSDVGYGVYDLYDLGEFNQKGTIRTKYGTKTQYIQAIQAAKAAGMQVYADVVFNHKAGADGTEFVDAVEVDPSNRNQETSGTYQIQAWTKFDFPGRGNTYSSFKWRWYHFDGTDWDESRKLNRIYKFTGKAWDWEVDTENGNYDYLMFADLDMDHPEVVTELKNWGTWYVNTTNIDGFRLDAVKHIKFSFFPDWLTYVRNQTGKNLFAVGEYWSYDVNKLHNYITKTNGSMSLFDAPLHNNFYTASKSSGYFDMRYLLNNTLMKDQPSLAVTLVDNHDTQPGQSLQSWVEPWFKPLAYAFILTRQEGYPCVFYGDYYGIPKYNIPGLKSKIDPLLIARRDYAYGTQRDYIDHQDIIGWTREGIDTKPNSGLAALITDGPGGSKWMYVGKKHAGKVFYDLTGNRSDTVTINADGWGEFKVNKGSVSIWVAKTSNVTFTVNNATTTSGQNVYVVANIPELGNW

SEQ ID NO: 24228 - protein, 512 aa, Bacillus sp. TS-23
APINETMMQYFEWDLPNDGTLWTKVKNEAANLSSLGITALWLPPAYKGTSQSDVGYGVYDLYDLGEFNQKGTIRTKYGTKTQYIQAIQAAKAAGMQVYADVVFNHKAGADGTEFVDAVEVDPSNRNQETSGTYQIQAWTKFDFPGRGNTYSSFKWRWYHFDGTDWDESRKLNLRIYKFRGKAWDWEVDTENGNYDYLMFADLDMDHPEVVTELKNWGTWYVNTTNIDGFRLDAVKHIKYSFFPDWLTYVRNQTGKNLFAVGEFWSYDVNKLHNYITKTNGSMSLFDAPLHNNFYTASKSSGYFDMRYLLNNTLMKDQPSLAVTLVDNHDTQPGQSLQSWVEPWFKPLAYAFILTRQEGYPCVFYGDYYGIPKYNIPGLKSKIDPLLIARRDYAYGTQRDYIDHQDIIGWTREGIDTKPNSGLAALITDGPGGSKWMYVGKKHAGKVFYDLTGNRSDTVTINADGWGEFKVNGGSVSIWVAKTSNVTFTVNNATTTSGQNVYVVANIPELGNW

SEQ ID NO: 24229 - protein, 512 aa, Bacillus sp. TS-23
APINETMMQYFEWDLPNDGTLWTKVKNEAANLSSLGITALWLPPAYKGTSQSDVGYGVYDLYDLGEFNQKGTIRTKYGTKTQYIQAIQAAKAAGMQVYADVVFNHKAGADGTEFVDAVEVDPSNRNQETSGTYQIQAWTKFDFPGRGNTYSSFKWRWYHFDGTDWDESRKLNARIYKFRGKAWDWEVDTENGNYDYLMFADLDMDHPEVVTELKNWGTWYVNTTNIDGFRLDAVKHIKYSFFPDWLTYVRNQTGKNLFAVGEFWSYDVNKLHNYITKTNGSMSLFDAPLHNNFYTASKSSGYFDMRYLLNNTLMKDQPSLAVTLVDNHDTQPGQSLQSWVEPWFKPLAYAFILTRQEGYPCVFYGDYYGIPKYNIPGLKSKIDPLLIARRDYAYGTQRDYIDHQDIIGWTREGIDTKPNSGLAALITDGPGGSKWMYVGKKHAGKVFYDLTGNRSDTVTINADGWGEFKVNGGSVSIWVAKTSNVTFTVNNATTTSGQNVYVVANIPELGNW

SEQ ID NO: 24230 - protein, 511 aa, Bacillus sp. TS-23
APINETMMQYFEWDLPNDGTLWTKVKNEAANLSSLGITALWLPPAYKGTSQSDVGYGVYDLYDLGEFNQKGTIRTKYGTKTQYIQAIQAAKAAGMQVYADVVFNHKAGADGTEFVDAVEVDPSNRNQETSGTYQIQAWTKFDFPGRGNTYSSFKWRWYHFDGTDWDESRKLNRIYKFRGKAWDWEVDTENGNYDYLMFADLDMDHPEVVTELKNWGTWYVNTTNIDGFRLDAVKHIKYSFFPDWLTYVRNQTGKNLFAVGEFWSYDVNKLHNYITKTNGSMSLFDAPLHNNFYTASKSSGYFDMRYLLNNTLMKDQPSLAVTLVDNHDTQPGQSLQSWVEPWFKPLAYAFILTRQEGYPCVFYGDYYGIPKYNIPGLKSKIDPLLIARRDYAYGTQRDYIDHQDIIGWTREGIDTKPNSGLAALITDGPGGSKWMYVGKKHAGKVFYDLTGNRSDTVTINADGWGEFKVNGGSVSIWVAKTSNVTFTVNNATTTSGQNVYVVANIPELGNW

SEQ ID NO: 24231 - protein, 512 aa, Bacillus sp. TS-23
APINETMMQYFEWDLPNDGTLWTKVKNEAANLSSLGITALWLPPAYKGTSQSDVGYGVYDLYDLGEFNQKGTIRTKYGTKTQYIQAIQAAKAAGMQVYADVVFNHKAGADGTEFVDAVEVDPSNRNQETSGTYQIQAWTKFDFPGRGNTYSSFKWRWYHFDGTDWDESRKLNQRIYKFRGKAWDWEVDTENGNYDYLMFADLDMDHPEVVTELKNWGTWYVNTTNIDGFRLDAVKHIKYSFFPDWLTYVRNQTGKNLFAVGEFWSYDVNKLHNYITKTNGSMSLFDAPLHNNFYTASKSSGYFDMRYLLNNTLMKDQPSLAVTLVDNHDTQPGQSLQSWVEPWFKPLAYAFILTRQEGYPCVFYGDYYGIPKYNIPGLKSKIDPLLIARRDYAYGTQRDYIDHQDIIGWTREGIDTKPNSGLAALITDGPGGSKWMYVGKKHAGKVFYDLTGNRSDTVTINADGWGEFKVNGGSVSIWVAKTSNVTFTVNNATTTSGQNVYVVANIPELGNW

SEQ ID NO: 24232 - protein, 513 aa, Bacillus sp.
APINETMMQYFEWDLPNDGTLWTKVKNEAANLSSLGITALWLPPAYKGTSQSDVGYGVYDLYDLGEFNQKGTIRTKYGTKTQYIQAIQAAKAAGMQVYADVVFNHKAGADGTEFVDAVEVDPSNRNQETSGTYQIQAWTKFDFPGRGNTYSSFKWRWYHFDGTDWDESRKLNRIYKFRSTGKAWDWEVDTENGNYDYLMFADLDMDHPEVVTELKNWGTWYVNTTNIDGFRLDAVKHIKYSFFPDWLTYVRNQTGKNLFAVGEFWSYDVNKLHNYITKTNGSMSLFDAPLHNNFYTASKSSGYFDMRYLLNNTLMKDQPSLAVTLVDNHDTQPGQSLQSWVEPWFKPLAYAFILTRQEGYPCVFYGDYYGIPKYNIPGLKSKIDPLLIARRDYAYGTQRDYIDHQDIIGWTREGIDTKPNSGLAALITDGPGGSKWMYVGKKHAGKVFYDLTGNRSDTVTINADGWGEFKVNGGSVSIWVAKTSNVTFTVNNATTTSGQNVYVVANIPELGNW

SEQ ID NO: 24233 - protein, 513 aa, Bacillus sp. TS-23
APINETMMQYFEWDLPNDGTLWTKVKNEAANLSSLGITALWLPPAYKGTSQSDVGYGVYDLYDLGEFNQKGTIRTKYGTKTQYIQAIQAAKAAGMQVYADVVFNHKAGADGTEFVDAVEVDPSNRNQETSGTYQIQAWTKFDFPGRGNTYSSFKWRWYHFDGTDWDESRKLNRIYKFRSTGKAWDWEVDTENGNYDYLMFADLDMDHPEVVTELKNWGTWYVNTTNIDGFRLDAVKHIKYSFFPDWLTYVRNQTGKNLFAVGEFWSYDVNKLHNYITKTEGSMSLFDAPLHNNFYTASKSSGYFDMRYLLNNTLMKDQPSLAVTLVDNHDTQPGQSLQSWVEPWFKPLAYAFILTRQEGYPCVFYGDYYGIPKYNIPGLKSKIDPLLIARRDYAYGTQRDYIDHQDIIGWTREGIDTKPNSGLAALITDGPGGSKWMYVGKKHAGKVFYDLTGNRSDTVTINADGWGEFKVNGGSVSIWVAKTSNVTFTVNNATTTSGQNVYVVANIPELGNW

SEQ ID NO: 24234 - protein, 485 aa, Bacillus sp.
APINETMMQYFEWDLPNDGTLWTKVKNEAANLSSLGITALWLPPAYKGTSQSDVGYGVYDLYDLGEFNQKGTIRTKYGTKTQYIQAIQAAKAAGMQVYADVVFNHKAGADGTEFVDAVEVDPSNRNQETSGTYQIQAWTKFDFPGRGNTYSSFKWRWYHFDGTDWDESRKLNRIYKFSSKAWDWEVDTENGNYDYLMFADLDMDHPEVVTELKNWGTWYVNTTNIDGFRLDAVKHIKYQFFPDWLTYVRNQTGKNLFAVGEFWSYDVNKLHNYITKTNGSMSLFDAPLHNNFYTASKSSGYFDMRYLLNNTLMKDQPSLAVTLVDNHDTQPGQSLQSWVEPWFKPLAYAFILTRQEGYPCVFYGDYYGIPKYNIPGLKSKIDPLLIARRDYAYGTQRDYIDHQDIIGWTREGIDTKPNSGLAALITDGPGGSKWMYVGKKHAGKVFYDLTGNRSDTVTINADGWGEFKVNKGSVSIWVAKTSNVT

SEQ ID NO: 24235 - protein, 487 aa, Bacillus sp. TS-23
APINETMMQYFEWDLPNDGTLWTKVKNEAANLSSLGITALWLPPAYKGTSQSDVGYGVYDLYDLGEFNQKGTIRTKYGTKTQYIQAIQAAKAAGMQVYADVVFNHKAGADGTEFVDAVEVDPSNRNQETSGTYQIQAWTKFDFPGRGNTYSSFKWRWYHFDGTDWDESRKLNRIYKFRSTGKAWDWEVDTENGNYDYLMFADLDMDHPEVVTELKNWGTWYVNTTNIDGFRLDAVKHIKYSFFPDWLTYVRNQTGKNLFAVGEFWSYDVNKLHNYITKTNGSMSLFDAPLHNNFYTASKSSGYFDMQYLLNNTLMKDQPSLAVTLVDNHDTQPGQSLQSWVEPWFKPLAYAFILTRQEGYPCVFYGDYYGIPKYNIPGLKSKIDPLLIARRDYAYGTQRDYIDHQDIIGWTREGIDTKPNSGLAALITDGPGGSKWMYVGKKHAGKVFYDLTGNRSDTVTINADGWGEFKVNGGSVSIWVAKTSNVT

SEQ ID NO: 24236 - protein, 487 aa, Bacillus sp. TS-23
APINETMMQYFEWDLPNDGTLWTKVKNEAANLSSLGITALWLPPAYKGTSQSDVGYGVYDLYDLGEFNQKGTIRTKYGTKTQYIEAIQAAKAAGMQVYADVVFNHKAGADGTEFVDAVEVDPSNRNQETSGTYQIQAWTKFDFPGRGNTYSSFKWRWYHFDGTDWDESRKLNRIYKFRSTGKAWDWEVDTENGNYDYLMFADLDMDHPEVVTELKNWGTWYVNTTNIDGFRLDAVKHIKYSFFPDWLTYVRNQTGKNLFAVGEFWSYDVNKLHNYITKTEGSMSLFDAPLHNNFYTASKSSGYFDMRYLLNNTLMKDQPSLAVTLVDNHDTQPGQSLQSWVEPWFKPLAYAFILTRQEGYPCVFYGDYYGIPKYNIPGLKSKIDPLLIARRDYAYGTQRDYIDHQDIIGWTREGIDTKPNSGLAALITDGPGGSKWMYVGKKHAGKVFYDLTGNRSDTVTINADGWGEFKVNGGSVSIWVAKTSNVT

SEQ ID NO: 24237 - protein, 485 aa, Bacillus sp. TS-23
APINETMMQYFEWDLPNDGTLWTKVKNEAANLSSLGITALWLPPAYKGTSQSDVGYGVYDLYDLGEFNQKGTIRTKYGTKTQYIQAIQAAKAAGMQVYADVVFNHKAGADGTEFVDAVEVDPSNRNQETSGTYQIQAWTKFDFPGRGNTYSSFKWRWYHFDGTDWDESRKLNRIYKFTGKAWDWEVDTENGNYDYLMFADLDMDHPEVVTELKNWGTWYVNTTNIDGFRLDAVKHIKYSFFPDWLTYVRNQTGKNLFAVGEFWSYDVNKLHNYITKTNGSMSLFDAPLHNNFYTASKSSGYFDMRYLLNNTLLKDQPSLAVTLVDNHDTQPGQSLQSWVEPWFKPLAYAFILTRQEGYPCVFYGDYYGIPKYNIPGLKSKIDPLLIARRDYAYGTQRDYIDHQDIIGWTREGIDTKPNSGLAALITDGPGGSKWMYVGKKHAGKVFYDLTGNRSDTVTINADGWGEFKVNGGSVSIWVAKTSNVT

SEQ ID NO: 24238 - protein, 487 aa, Bacillus sp. TS-23
APINETMMQYFEWDLPNDGTLWTKVKNEAANLSSLGITALWLPPAYKGTSQSDVGYGVYDLYDLGEFNQKGTIRTKYGTKTQYIEAIQAAKAAGMQVYADVVFNHKAGADGTEFVDAVEVDPSNRNQETSGTYQIQAWTKFDFPGRGNTYSSFKWRWYHFDGTDWDESRKLNRIYKFRSTGKAWDWEVDTENGNYDYLMFADLDMDHPEVVTELKNWGTWYVNTTNIDGFRLDAVKHIKYSFFPDWLTYVRNQTGKNLFAVGEFWSYDVNKLHNYITKTRGSMSLFDAPLHNNFYTASKSSGYFDMRYLLNNTLMKDQPSLAVTLVDNHDTQPGQSLQSWVEPWFKPLAYAFILTRQEGYPCVFYGDYYGIPKYNIPGLKSKIDPLLIARRDYAYGTQRDYIDHQDIIGWTREGIDTKPNSGLAALITDGPGGSKWMYVGKKHAGKVFYDLTGNRSDTVTINADGWGEFKVNGGSVSIWVAKTSNVT

SEQ ID NO: 24239 - protein, 487 aa, Bacillus sp. TS-23
APINETMMQYFEWDLPNDGTLWTKVKNEAANLSSLGITALWLPPAYKGTSQSDVGYGVYDLYDLGEFNQKGTIRTKYGTKTQYIEAIQAAKAAGMQVYADVVFNHKAGADGTEFVDAVEVDPSNRNQETSGTYQIQAWTKFDFPGRGNTYSSFKWRWYHFDGTDWDESRKLNRIYKFRSTGKAWDWEVDTENGNYDYLMFADLDMDHPEVVTELKNWGTWYVNTTNIDGFRLDAVKHIKYSFFPDWLTYVRNQTGKNLFAVGEFWSYDVNKLHNYITKTNGSMSLFDAPLHNNFYTASKSSGYFDMRYLLNNTLMKDQPSLAVTLVDNHDTQPGQSLQSWVEPWFKPLAYAFILTRQEGYPCVFYGDYYGIPKYNIPGLKSKIDPLLIARRDYAYGTQRDYIDHQDIIGWTREGIDTKPNSGLAALITDGPGGSKWMYVGKKHAGKVFYDLTGNRSDTVTINADGWGEFKVNGGSVSIWVAKTSNVT

SEQ ID NO: 24240 - protein, 487 aa, Bacillus sp. TS-23
APINETMMQYFEWDLPNDGTLWTKVKNEAANLSSLGITALWLPPAYKGTSQSDVGYGVYDLYDLGEFNQKGTIRTKYGTKTQYIQAIQAAKAAGMQVYADVVFNHKAGADGTEFVDAVEVDPSNRNQETSGTYQIQAWTKFDFPGRGNTYSSFKWRWYHFDGTDWDESRKLNRIYKFRSTGKAWDWEVDTENGNYDYLMFADLDMDHPEVVTELKNWGTWYVNTTNIDGFRLDAVKHIKYSFFPDWLTYVRNQTGKNLFAVGEFWSYDVRKLHNYITKTEGSMSLFDAPLHNNFYTASKSSGYFDMRYLLNNTLMKDQPSLAVTLVDNHDTQPGQSLQSWVEPWFKPLAYAFILTRQEGYPCVFYGDYYGIPKYNIPGLKSKIDPLLIARRDYAYGTQRDYIDHQDIIGWTREGIDTKPNSGLAALITDGPGGSKWMYVGKKHAGKVFYDLTGNRSDTVTINADGWGEFKVNGGSVSIWVAKTSNVT

SEQ ID NO: 24241 - protein, 485 aa, Bacillus sp. TS-23
APINETMMQYFEWDLPNDGTLWTKVKNEAANLSSLGITALWLPPAYKGTSQSDVGYGVYDLYDLGEFNQKGTIRTKYGTKTQYIQAIQAAKAAGMQVYADVVFNHKAGADGTEFVDAVEVDPSNRNQETSGTYQIQAWTKFDFPGRGNTYSSFKWRWYHFDGTDWDESRKLNRIYKFRGKAWDWEVDTENGNYDYLMFADFDMDHPEVVTELKNWGTWYVNTTNIDGFRLDAVKHIKYSFFPDWLTYVRNQTGKNLFAVGEFWSYDVNKLHNYITKTNGSMSLFDAPLHNNFYTASKSSGYFDMRYLLNNTLMKDQPSLAVTLVDNHDTQPGQSLQSWVEPWFKPLAYAFILTRQEGYPCVFYGDYYGIPKYNIPGLKSKIDPLLIARRDYAYGTQRDYIDHQDIIGWTREGIDTKPNSGLAALITDGPGGSKWMYVGKKHAGKVFYDLTGNRSDTVTINADGWGEFKVNGGSVSIWVAKTSNVT

SEQ ID NO: 24242 - protein, 486 aa, Bacillus sp. TS-23
APINETMMQYFEWDLPNDGTLWTKVKNEAANLSSLGITALWLPPAYKGTSQSDVGYGVYDLYDLGEFNQKGTIRTKYGTKTQYIQAIQAAKAAGMQVYADVVFNHKAGADGTEFVDAVEVDPSNRNQETSGTYQIQAWTKFDFPGRGNTYSSFKWRWYHFDGTDWDESRKLNARIYKFRSKAWDWEVDTENGNYDYLMFADLDMDHPEVVTELKNWGTWYVNTTNIDGFRLDAVKHIKYSFFPDWLTYVRNQTGKNLFAVGEFWSYDVNKLHNYITKTNGSMSLFDAPLHNNFYTASKSSGYFDMRYLLNNTLMKDQPSLAVTLVDNHDTQPGQSLQSWVEPWFKPLAYAFILTRQEGYPCVFYGDYYGIPKYNIPGLKSKIDPLLIARRDYAYGTQRDYIDHQDIIGWTREGIDTKPNSGLAALITDGPGGSKWMYVGKKHAGKVFYDLTGNRSDTVTINADGWGEFKVNGGSVSIWVAKTSNVT

SEQ ID NO: 24243 - protein, 485 aa, Bacillus sp.
APINETMMQYFEWDLPNDGTLWTKVKNEAANLSSLGITALWLPPAYKGTSQSDVGYGVYDLYDLGEFNQKGTIRTKYGTKTQYIQAIQAAKAAGMQVYADVVFNHKAGADGTEFVDAVEVDPSNRNQETSGTYQIQAWTKFDFPGRGNTYSSFKWRWYHFDGTDWDESRKLNRIYKFTGKAWDWEVDTENGNYDYLMFADLDMDHPEVVTELKNWGTWYVNTTNIDGFRLDAVKHIKYQFFPDWLTYVRNQTGKNLFAVGEFWSYDVNKLHNYITKTNGSMSLFDAPLHNNFYTASKSSGYFDMRYLLNNTLMKDQPSLAVTLVDNHDTQPGQSLQSWVEPWFKPLAYAFILTRQEGYPCVFYGDYYGIPKYNIPGLKSKIDPLLIARRDYAYGTQRDYIDHQDIIGWTREGIDTKPNSGLAALITDGPGGSKWMYVGKKHAGKVFYDLTGNRSDTVTINADGWGEFKVNKGSVSIWVAKTSNVT

SEQ ID NO: 24244 - protein, 485 aa, Bacillus sp. TS-23
APINETMMQYFEWDLPNDGTLWTKVKNEAANLSSLGITALWLPPAYKGTSQSDVGYGVYDLYDLGEFNQKGTIRTKYGTKTQYIQAIQAAKAAGMQVYADVVFNHKAGADGTEFVDAVEVDPSNRNQETSGTYQIQAWTKFDFPGRGNTYSSFKWRWYHFDGTDWDESRKLNRIYKFTGKAWDWEVDTENGNYDYLMFADLDMDHPEVVTELKNWGTWYVNTTNIDGFRLDAVKHIKYSFFPDWLTYVRNQTGKNLFAVGEFWSYDVNKLHNYITKTNGSMSLFDAPLHNNFYTASKSSGYFDMQYLLNNTLMKDQPSLAVTLVDNHDTQPGQSLQSWVEPWFKPLAYAFILTRQEGYPCVFYGDYYGIPKYNIPGLKSKIDPLLIARRDYAYGTQRDYIDHQDIIGWTREGIDTKPNSGLAALITDGPGGSKWMYVGKKHAGKVFYDLTGNRSDTVTINADGWGEFKVNGGSVSIWVAKTSNVT

SEQ ID NO: 24245 - protein, 487 aa, Bacillus sp. TS-23
APINETMMQYFEWDLPNDGTLWTKVKNEAANLSSLGITALWLPPAYKGTSQSDVGYGVYDLYDLGEFNQKGTIRTKYGTKTQYIQAIQAAKAAGMQVYADVVFNHKAGADGTEFVDAVEVDPSNRNQETSGTYQIQAWTKFDFPGRGNTYSSFKWRWYHFDGTDWDESRKLNRIYKFRSTGKAWDWEVDTENGNYDYLMFADLDMDHPEVVTELKNWGTWYVRTTNIDGFRLDAVKHIKYSFFPDWLTYVRNQTGKNLFAVGEFWSYDVNKLHNYITKTRGSMSLFDAPLHNNFYTASKSSGYFDMRYLLNNTLMKDQPSLAVTLVDNHDTQPGQSLQSWVEPWFKPLAYAFILTRQEGYPCVFYGDYYGIPKYNIPGLKSKIDPLLIARRDYAYGTQRDYIDHQDIIGWTREGIDTKPNSGLAALITDGPGGSKWMYVGKKHAGKVFYDLTGNRSDTVTINADGWGEFKVNGGSVSIWVAKTSNVT

SEQ ID NO: 24246 - protein, 486 aa, Bacillus sp. TS-23
APINETMMQYFEWDLPNDGTLWTKVKNEAANLSSLGITALWLPPAYKGTSQSDVGYGVYDLYDLGEFNQKGTIRTKYGTKTQYIQAIQAAKAAGMQVYADVVFNHKAGADGTEFVDAVEVDPSNRNQETSGTYQIQAWTKFDFPGRGNTYSSFKWRWYHFDGTDWDESRKLNLRIYKFRSKAWDWEVDTENGNYDYLMFADLDMDHPEVVTELKNWGTWYVNTTNIDGFRLDAVKHIKYSFFPDWLTYVRNQTGKNLFAVGEFWSYDVNKLHNYITKTNGSMSLFDAPLHNNFYTASKSSGYFDMRYLLNNTLMKDQPSLAVTLVDNHDTQPGQSLQSWVEPWFKPLAYAFILTRQEGYPCVFYGDYYGIPKYNIPGLKSKIDPLLIARRDYAYGTQRDYIDHQDIIGWTREGIDTKPNSGLAALITDGPGGSKWMYVGKKHAGKVFYDLTGNRSDTVTINADGWGEFKVNGGSVSIWVAKTSNVT

SEQ ID NO: 24247 - protein, 485 aa, Bacillus sp. TS-23
APINETMMQYFEWDLPNDGTLWTKVKNEAANLSSLGITALWLPPAYKGTSQSDVGYGVYDLYDLGEFNQKGTIRTKYGTKTQYIQAIQAAKAAGMQVYADVVFNHKAGADGTEFVDAVEVDPSNRNQETSGTYQIQAWTKFDFPGRGNTYSSFKWRWYHFDGTDWDESRKLNRIYKFRGKAWDWEVDTENGNYDYLMFADLDMDHPEVVTELKNWGTWYVNTTNIDGFRLDAVKHIKYSFFPDWLTYVRNQTGKNLFAVGEFWSYDVNKLHNYITKTNGSMSLFDAPLHNNFYTASKSSGYFDMRYLLNNTLLKDQPSLAVTLVDNHDTQPGQSLQSWVEPWFKPLAYAFILTRQEGYPCVFYGDYYGIPKYNIPGLKSKIDPLLIARRDYAYGTQRDYIDHQDIIGWTREGIDTKPNSGLAALITDGPGGSKWMYVGKKHAGKVFYDLTGNRSDTVTINADGWGEFKVNGGSVSIWVAKTSNVT

SEQ ID NO: 24248 - protein, 487 aa, Bacillus sp. TS-23
APINETMMQYFEWDLPNDGTLWTKVKNEAANLSSLGITALWLPPAYKGTSQSDVGYGVYDLYDLGEFNQKGTIRTKYGTKTQYIQAIQAAKAAGMQVYADVVFNHKAGADGTEFVDAVEVDPSNRNQETSGTYQIQAWTKFDFPGRGNTYSSFKWRWYHFDGTDWDESRKLNRIYKFRSTGKAWDWEVDTENGNYDYLMFADLDMDHPEVVTELKNWGTWYVNTTNIDGFRLDAVKHIKYSFFPDWLTYVRNQTGKNLFAVGEFWSYDVEKLHNYITKTRGSMSLFDAPLHNNFYTASKSSGYFDMRYLLNNTLMKDQPSLAVTLVDNHDTQPGQSLQSWVEPWFKPLAYAFILTRQEGYPCVFYGDYYGIPKYNIPGLKSKIDPLLIARRDYAYGTQRDYIDHQDIIGWTREGIDTKPNSGLAALITDGPGGSKWMYVGKKHAGKVFYDLTGNRSDTVTINADGWGEFKVNGGSVSIWVAKTSNVT

SEQ ID NO: 24249 - protein, 485 aa, Bacillus sp. TS-23
APINETMMQYFEWDLPNDGTLWTKVKNEAANLSSLGITALWLPPAYKGTSQSDVGYGVYDLYDLGEFNQKGTIRTKYGTKTQYIQAIQAAKAAGMQVYADVVFNHKAGADGTEFVDAVEVDPSNRNQETSGTYQIQAWTKFDFPGRGNTYSSFKWRWYHFDGTDWDESRKLNRIYKFRGKAWDWEVDTENGNYDYLMFADLDMDHPEVVTELKNWGTWYVNTTNIDGFRLDAVKHIKYSFFPDWLTYVRNQTGKNLFAVGEFWSYDVNKLHNYITKTNGSMSLFDAPLHNNFYTASKSSGYFDMQYLLNNTLMKDQPSLAVTLVDNHDTQPGQSLQSWVEPWFKPLAYAFILTRQEGYPCVFYGDYYGIPKYNIPGLKSKIDPLLIARRDYAYGTQRDYIDHQDIIGWTREGIDTKPNSGLAALITDGPGGSKWMYVGKKHAGKVFYDLTGNRSDTVTINADGWGEFKVNGGSVSIWVAKTSNVT

SEQ ID NO: 24250 - protein, 486 aa, Bacillus sp. TS-23
APINETMMQYFEWDLPNDGTLWTKVKNEAANLSSLGITALWLPPAYKGTSQSDVGYGVYDLYDLGEFNQKGTIRTKYGTKTQYIQAIQAAKAAGMQVYADVVFNHKAGADGTEFVDAVEVDPSNRNQETSGTYQIQAWTKFDFPGRGNTYSSFKWRWYHFDGTDWDESRKLNQRIYKFRSKAWDWEVDTENGNYDYLMFADLDMDHPEVVTELKNWGTWYVNTTNIDGFRLDAVKHIKYSFFPDWLTYVRNQTGKNLFAVGEFWSYDVNKLHNYITKTNGSMSLFDAPLHNNFYTASKSSGYFDMRYLLNNTLMKDQPSLAVTLVDNHDTQPGQSLQSWVEPWFKPLAYAFILTRQEGYPCVFYGDYYGIPKYNIPGLKSKIDPLLIARRDYAYGTQRDYIDHQDIIGWTREGIDTKPNSGLAALITDGPGGSKWMYVGKKHAGKVFYDLTGNRSDTVTINADGWGEFKVNGGSVSIWVAKTSNVT

SEQ ID NO: 24251 - protein, 485 aa, Bacillus sp. TS-23
APINETMMQYFEWDLPNDGTLWTKVKNEAANLSSLGITALWLPPAWKGTSQSDVGYGVYDLYDLGEFNQKGTIRTKYGTKTQYIQAIQAAKAAGMQVYADVVFNHKAGADGTEFVDAVEVDPSNRNQETSGTYQIQAWTKFDFPGRGNTYSSFKWRWYHFDGTDWDESRKLNRIYKFRGKAWDWEVDTENGNYDYLMFADLDMDHPEVVTELKNWGTWYVNTTNIDGFRLDAVKHIKYSFFPDWLTYVRNQTGKNLFAVGEFWSYDVNKLHNYITKTNGSMSLFDAPLHNNFYTASKSSGYFDMRYLLNNTLMKDQPSLAVTLVDNHDTQPGQSLQSWVEPWFKPLAYAFILTRQEGYPCVFYGDYYGIPKYNIPGLKSKIDPLLIARRDYAYGTQRDYIDHQDIIGWTREGIDTKPNSGLAALITDGPGGSKWMYVGKKHAGKVFYDLTGNRSDTVTINADGWGEFKVNGGSVSIWVAKTSNVT

SEQ ID NO: 24252 - protein, 485 aa, Bacillus sp. TS-23
APINETMMQYFEWDLPNDGTLWTKVKNEAANLSSLGITALWLPPAYKGTSQSDVGYGVYDLYDLGEFNQKGTIRTKYGTKTQYIQAIQAAKAAGMQVYADVVFNHKAGADGTEFVDAVEVDPSNRNQETSGTYQIQAWTKFDFPGRGNTYSSFKWRWYHFDGTDWDESRKLNRIYKFRSKAWDWEVDTENGNYDYLMFADLDMDHPEVVTELKNWGTWYVNTTNIDGFRLDAVKHIKYSFFPDWLTYVRNQTGKNLFAVGEFWSYDVNKLHNYITKTNGSMSLFDAPLHNNFYTASKSSGYFDMRYLLNNTLMKDQPSLAVTLVDNHDTQPGQSLQSWVEPWFKPLAYAFILTRQEGYPCVFYGDYYGIPKYNIPGLKSKIDPLLIARRDYAYGTQRDYIDHQDIIGWTREGIDTKPNSGLAALITDGPGGSKWMYVGKKHAGKVFYDLTGNRSDTVTINADGWGEFKVNGGSVSIWVAKTSNVT

SEQ ID NO: 24253 - protein, 485 aa, Bacillus sp. TS-23
APINETMMQYFEWDLPNDGTLWTKVKNEAANLSSLGITALWLPPAYKGTSQSDVGYGAYDLYDLGEFNQKGTIRTKYGTKTQYIQAIQAAKAAGMQVYADVVFNHKAGADGTEFVDAVEVDPSNRNQETSGTYQIQAWTKFDFPGRGNTYSSFKWRWYHFDGTDWDESRKLNRIYKFRSKAWDWEVDTENGNYDYLMFADYDMDHPEVVTELKNWGTWYVNTTNIDGFRLDAVKHIKYSFFPDWLTYVRNQTGKNLFAVGEFWSYDVNKLHNYITKTNGSMSLFDAPLHNNFYTASKSSGYFDMRYLLNNTLMKDQPSLAVTLVDNHDTQPGQSLQSWVEPWFKPLAYAFILTRQEGYPCVFYGDYYGIPKYNIPGLKSKIDPLLIARRDYAYGTQRDYIDHQDIIGWTREGIDTKPNSGLAALITDGPGGSKWMYVGKKHAGKVFYDLTGNRSDTVTINADGWGEFKVNGGSVSIWVAKTSNVT

SEQ ID NO: 24254 - protein, 487 aa, Bacillus sp. TS-23
APINETMMQYFEWDLPNDGTLWTKVKNEAANLSSLGITALWLPPAYKGTSQSDVGYGVYDLYDLGEFNQKGTIRTKYGTKTQYIQAIQAAKAAGMQVYADVVFNHKAGADGTEFVDAVEVDPSNRNQETSGTYQIQAWTKFDFPGRGNTYSSFKWRWYHFDGTDWDESRKLNRIYKFRSTGKAWDWEVDTENGNYDYLMFADLDMDHPEVVTELKNWGTWYVNTTNIDGFRLDAVKHIKYSFFPDWLTYVRNQTGKNLFAVGEFWSYDVRKLHNYITKTRGSMSLFDAPLHNNFYTASKSSGYFDMRYLLNNTLMKDQPSLAVTLVDNHDTQPGQSLQSWVEPWFKPLAYAFILTRQEGYPCVFYGDYYGIPKYNIPGLKSKIDPLLIARRDYAYGTQRDYIDHQDIIGWTREGIDTKPNSGLAALITDGPGGSKWMYVGKKHAGKVFYDLTGNRSDTVTINADGWGEFKVNGGSVSIWVAKTSNVT

SEQ ID NO: 24255 - protein, 487 aa, Bacillus sp. TS-23
APINETMMQYFEWDLPNDGTLWTKVKNEAANLSSLGITALWLPPAYKGTSQSDVGYGVYDLYDLGEFNQKGTIRTKYGTKTQYIRAIQAAKAAGMQVYADVVFNHKAGADGTEFVDAVEVDPSNRNQETSGTYQIQAWTKFDFPGRGNTYSSFKWRWYHFDGTDWDESRKLNRIYKFRSTGKAWDWEVDTENGNYDYLMFADLDMDHPEVVTELKNWGTWYVNTTNIDGFRLDAVKHIKYSFFPDWLTYVRNQTGKNLFAVGEFWSYDVNKLHNYITKTEGSMSLFDAPLHNNFYTASKSSGYFDMRYLLNNTLMKDQPSLAVTLVDNHDTQPGQSLQSWVEPWFKPLAYAFILTRQEGYPCVFYGDYYGIPKYNIPGLKSKIDPLLIARRDYAYGTQRDYIDHQDIIGWTREGIDTKPNSGLAALITDGPGGSKWMYVGKKHAGKVFYDLTGNRSDTVTINADGWGEFKVNGGSVSIWVAKTSNVT

SEQ ID NO: 24256 - protein, 487 aa, Bacillus sp. TS-23
APINETMMQYFEWDLPNDGTLWTKVKNEAANLSSLGITALWLPPAYKGTSQSDVGYGVYDLYDLGEFNQKGTIRTKYGTKTQYIQAIQAAKAAGMQVYADVVFNHKAGADGTEFVDAVEVDPSNRNQETSGTYQIQAWTKFDFPGRGNTYSSFKWRWYHFDGTDWDESRKLNRIYKFRSTGKAWDWEVDTENGNYDYLMFADLDMDHPEVVTELKNWGTWYVETTNIDGFRLDAVKHIKYSFFPDWLTYVRNQTGKNLFAVGEFWSYDVNKLHNYITKTEGSMSLFDAPLHNNFYTASKSSGYFDMRYLLNNTLMKDQPSLAVTLVDNHDTQPGQSLQSWVEPWFKPLAYAFILTRQEGYPCVFYGDYYGIPKYNIPGLKSKIDPLLIARRDYAYGTQRDYIDHQDIIGWTREGIDTKPNSGLAALITDGPGGSKWMYVGKKHAGKVFYDLTGNRSDTVTINADGWGEFKVNGGSVSIWVAKTSNVT

SEQ ID NO: 24257 - protein, 487 aa, Bacillus sp. TS-23
APINETMMQYFEWDLPNDGTLWTKVKNEAANLSSLGITALWLPPAYKGTSQSDVGYGVYDLYDLGEFNQKGTIRTKYGTKTQYIQAIQAAKAAGMQVYADVVFNHKAGADGTEFVDAVEVDPSNRNQETSGTYQIQAWTKFDFPGRGNTYSSFKWRWYHFDGTDWDESRKLNRIYKFRSTGKAWDWEVDTENGNYDYLMFADLDMDHPEVVTELKNWGTWYVNTTNIDGFRLDAVKHIKYSFFPDWLTYVRNQTGKNLFAVGEFWSYDVEKLHNYITKTEGSMSLFDAPLHNNFYTASKSSGYFDMRYLLNNTLMKDQPSLAVTLVDNHDTQPGQSLQSWVEPWFKPLAYAFILTRQEGYPCVFYGDYYGIPKYNIPGLKSKIDPLLIARRDYAYGTQRDYIDHQDIIGWTREGIDTKPNSGLAALITDGPGGSKWMYVGKKHAGKVFYDLTGNRSDTVTINADGWGEFKVNGGSVSIWVAKTSNVT

SEQ ID NO: 24258 - protein, 485 aa, Bacillus sp. TS-23
APINETMMQYFEWDLPNDGTLWTKVKNEAANLSSLGITALWLPPAWKGTSQSDVGYGVYDLYDLGEFNQKGTIRTKYGTKTQYIQAIQAAKAAGMQVYADVVFNHKAGADGTEFVDAVEVDPSNRNQETSGTYQIQAWTKFDFPGRGNTYSSFKWRWYHFDGTDWDESRKLNRIYKFSTKAWDWEVDTENGNYDYLMFADLDMDHPEVVTELKNWGTWYVNTTNIDGFRLDAVKHIKYSFFPDWLTYVRNQTGKNLFAVGEFWSYDVNKLHNYITKTNGSMSLFDAPLHNNFYTASKSSGYFDMRYLLNNTLMKDQPSLAVTLVDNHDTQPGQSLQSWVEPWFKPLAYAFILTRQEGYPCVFYGDYYGIPKYNIPGLKSKIDPLLIARRDYAYGTQRDYIDHQDIIGWTREGIDTKPNSGLAALITDGPGGSKWMYVGKKHAGKVFYDLTGNRSDTVTINADGWGEFKVNGGSVSIWVAKTSNVT

SEQ ID NO: 24259 - protein, 487 aa, Bacillus sp. TS-23
APINETMMQYFEWDLPNDGTLWTKVKNEAANLSSLGITALWLPPAYKGTSQSDVGYGVYDLYDLGEFNQKGTIRTKYGTKTQYIQAIQAAKAAGMQVYADVVFNHKAGADGTEFVDAVEVDPSNRNQETSGTYQIQAWTKFDFPGRGNTYSSFKWRWYHFDGTDWDESRKLNRIYKFRSTGKAWDWEVDTENGNYDYLMFADLDMDHPEVVTELKNWGTWYVNTTNIDGFRLDAVKHIKYSFFPDWLTYVRNQTGKNLFAVGEFWSYDVNKLHNYITKTNGSMSLFDAPLHNNFYTASKSSGYFDMRYLLNNTLMKDQPSLAVTLVDNHDTQPGQSLQSWVEPWFKPLAYAFILTREEGYPCVFYGDYYGIPKYNIPGLKSKIDPLLIARRDYAYGTQRDYIDHQDIIGWTREGIDTKPNSGLAALITDGPGGSKWMYVGKKHAGKVFYDLTGNRSDTVTINADGWGEFKVNGGSVSIWVAKTSNVT

SEQ ID NO: 24260 - protein, 485 aa, Bacillus sp. TS-23
APINETMMQYFEWDLPNDGTLWTKVKNEAANLSSLGITALWLPPAWKGTSQSDVGYGAYDLYDLGEFNQKGTIRTKYGTKTQYIQAIQAAKAAGMQVYADVVFNHKAGADGTEFVDAVEVDPSNRNQETSGTYQIQAWTKFDFPGRGNTYSSFKWRWYHFDGTDWDESRKLNRIYKFTGKAWDWEVDTENGNYDYLMFADYDMDHPEVVTELKNWGTWYVNTTNIDGFRLDAVKHIKYSFFPDWLTYVRNQTGKNLFAVGEFWSYDVNKLHNYITKTNGSMSLFDAPLHNNFYTASKSSGYFDMRYLLNNTLMKDQPSLAVTLVDNHDTQPGQSLQSWVEPWFKPLAYAFILTRQEGYPCVFYGDYYGIPKYNIPGLKSKIDPLLIARRDYAYGTQRDYIDHQDIIGWTREGIDTKPNSGLAALITDGPGGSKWMYVGKKHAGKVFYDLTGNRSDTVTINADGWGEFKVNGGSVSIWVAKTSNVT

SEQ ID NO: 24261 - protein, 485 aa, Bacillus sp. TS-23
APINETMMQYFEWDLPNDGTLWTKVKNEAANLSSLGITALWLPPAYKGTSQSDVGYGVYDLYDLGEFNQKGTIRTKYGTKTQYIQAIQAAKAAGMQVYADVVFNHKAGADGTEFVDAVEVDPSNRNQETSGTYQIQAWTKFDFPGRGNTYSSFKWRWYHFDGTDWDESRKLNRIYKFRGKAWDWEVDTENGNYDYLMFADYDMDHPEVVTELKNWGTWYVNTTNIDGFRLDAVKHIKYSFFPDWLTYVRNQTGKNLFAVGEFWSYDVNKLHNYITKTNGSMSLFDAPLHNNFYTASKSSGYFDMRYLLNNTLMKDQPSLAVTLVDNHDTQPGQSLQSWVEPWFKPLAYAFILTRQEGYPCVFYGDYYGIPKYNIPGLKSKIDPLLIARRDYAYGTQRDYIDHQDIIGWTREGIDTKPNSGLAALITDGPGGSKWMYVGKKHAGKVFYDLTGNRSDTVTINADGWGEFKVNGGSVSIWVAKTSNVT

SEQ ID NO: 24262 - protein, 485 aa, Bacillus sp. TS-23
APINETMMQYFEWDLPNDGTLWTKVKNEAANLSSLGITALWLPPAYKGTSQSDVGYGVYDLYDLGEFNQKGTIRTKYGTKTQYIQAIQAAKAAGMQVYADVVFNHKAGADGTEFVDAVEVDPSNRNQETSGTYQIQAWTKFDFPGRGNTYSSFKWRWYHFDGTDWDESRKLNRIYKFSTKAWDWEVDTENGNYDYLMFADFDMDHPEVVTELKNWGTWYVNTTNIDGFRLDAVKHIKYSFFPDWLTYVRNQTGKNLFAVGEFWSYDVNKLHNYITKTNGSMSLFDAPLHNNFYTASKSSGYFDMRYLLNNTLMKDQPSLAVTLVDNHDTQPGQSLQSWVEPWFKPLAYAFILTRQEGYPCVFYGDYYGIPKYNIPGLKSKIDPLLIARRDYAYGTQRDYIDHQDIIGWTREGIDTKPNSGLAALITDGPGGSKWMYVGKKHAGKVFYDLTGNRSDTVTINADGWGEFKVNGGSVSIWVAKTSNVT

SEQ ID NO: 24263 - protein, 487 aa, Bacillus sp. TS-23
APINETMMQYFEWDLPNDGTLWTKVKNEAANLSSLGITALWLPPAYKGTSQSDVGYGVYDLYDLGEFNQKGTIRTKYGTKTQYIQAIQAAKAAGMQVYADVVFNHKAGADGTEFVDAVEVDPSNRNQETSGTYQIQAWTKFDFPGRGNTYSSFKWRWYHFDGTDWDESRKLNRIYKFRSTGKAWDWEVDTENGNYDYLMFADLDMDHPEVVTELKNWGTWYVETTNIDGFRLDAVKHIKYSFFPDWLTYVRNQTGKNLFAVGEFWSYDVNKLHNYITKTRGSMSLFDAPLHNNFYTASKSSGYFDMRYLLNNTLMKDQPSLAVTLVDNHDTQPGQSLQSWVEPWFKPLAYAFILTRQEGYPCVFYGDYYGIPKYNIPGLKSKIDPLLIARRDYAYGTQRDYIDHQDIIGWTREGIDTKPNSGLAALITDGPGGSKWMYVGKKHAGKVFYDLTGNRSDTVTINADGWGEFKVNGGSVSIWVAKTSNVT

SEQ ID NO: 24264 - protein, 485 aa, Bacillus sp. TS-23
APINETMMQYFEWDLPNDGTLWTKVKNEAANLSSLGITALWLPPAYKGTSQSDVGYGVYDLYDLGEFNQKGTIRTKYGTKTQYIQAIQAAKAAGMQVYADVVFNHKAGADGTEFVDAVEVDPSNRNQETSGTYQIQAWTKFDFPGRGNTYSSFKWRWYHFDGTDWDESRKLNRIYKFSTKAWDWEVDTENGNYDYLMFADYDMDHPEVVTELKNWGTWYVNTTNIDGFRLDAVKHIKYSFFPDWLTYVRNQTGKNLFAVGEFWSYDVNKLHNYITKTNGSMSLFDAPLHNNFYTASKSSGYFDMRYLLNNTLMKDQPSLAVTLVDNHDTQPGQSLQSWVEPWFKPLAYAFILTRQEGYPCVFYGDYYGIPKYNIPGLKSKIDPLLIARRDYAYGTQRDYIDHQDIIGWTREGIDTKPNSGLAALITDGPGGSKWMYVGKKHAGKVFYDLTGNRSDTVTINADGWGEFKVNGGSVSIWVAKTSNVT

SEQ ID NO: 24265 - protein, 485 aa, Bacillus sp. TS-23
APINETMMQYFEWDLPNDGTLWTKVKNEAANLSSLGITALWLPPAWKGTSQSDVGYGAYDLYDLGEFNQKGTIRTKYGTKTQYIQAIQAAKAAGMQVYADVVFNHKAGADGTEFVDAVEVDPSNRNQETSGTYQIQAWTKFDFPGRGNTYSSFKWRWYHFDGTDWDESRKLNRIYKFRGKAWDWEVDTENGNYDYLMFADYDMDHPEVVTELKNWGTWYVNTTNIDGFRLDAVKHIKYSFFPDWLTYVRNQTGKNLFAVGEFWSYDVNKLHNYITKTNGSMSLFDAPLHNNFYTASKSSGYFDMRYLLNNTLMKDQPSLAVTLVDNHDTQPGQSLQSWVEPWFKPLAYAFILTRQEGYPCVFYGDYYGIPKYNIPGLKSKIDPLLIARRDYAYGTQRDYIDHQDIIGWTREGIDTKPNSGLAALITDGPGGSKWMYVGKKHAGKVFYDLTGNRSDTVTINADGWGEFKVNGGSVSIWVAKTSNVT

SEQ ID NO: 24266 - protein, 487 aa, Bacillus sp. TS-23
APINETMMQYFEWDLPNDGTLWTKVKNEAANLSSLGITALWLPPAYKGTSQSDVGYGVYDLYDLGEFNQKGTIRTKYGTKTQYIQAIQAAKAAGMQVYADVVFNHKAGADGTEFVDAVEVDPSNRNQETSGTYQIQAWTKFDFPGRGNTYSSFKWRWYHFDGTDWDESRKLNRIYKFRSTGKAWDWEVDTENGNYDYLMFADLDMDHPEVVTELKNWGTWYVETTNIDGFRLDAVKHIKYSFFPDWLTYVRNQTGKNLFAVGEFWSYDVNKLHNYITKTNGSMSLFDAPLHNNFYTASKSSGYFDMRYLLNNTLMKDQPSLAVTLVDNHDTQPGQSLQSWVEPWFKPLAYAFILTRQEGYPCVFYGDYYGIPKYNIPGLKSKIDPLLIARRDYAYGTQRDYIDHQDIIGWTREGIDTKPNSGLAALITDGPGGSKWMYVGKKHAGKVFYDLTGNRSDTVTINADGWGEFKVNGGSVSIWVAKTSNVT

SEQ ID NO: 24267 - protein, 485 aa, Bacillus sp. TS-23
APINETMMQYFEWDLPNDGTLWTKVKNEAANLSSLGITALWLPPAYKGTSQSDVGYGVYDLYDLGEFNQKGTIRTKYGTKTQYIQAIQAAKAAGMQVYADVVFNHKAGADGTEFVDAVEVDPSNRNQETSGTYQIQAWTKFDFPGRGNTYSSFKWRWYHFDGTDWDESRKLNRIYKFTGKAWDWEVDTENGNYDYLMFADYDMDHPEVVTELKNWGTWYVNTTNIDGFRLDAVKHIKYSFFPDWLTYVRNQTGKNLFAVGEFWSYDVNKLHNYITKTNGSMSLFDAPLHNNFYTASKSSGYFDMRYLLNNTLMKDQPSLAVTLVDNHDTQPGQSLQSWVEPWFKPLAYAFILTRQEGYPCVFYGDYYGIPKYNIPGLKSKIDPLLIARRDYAYGTQRDYIDHQDIIGWTREGIDTKPNSGLAALITDGPGGSKWMYVGKKHAGKVFYDLTGNRSDTVTINADGWGEFKVNGGSVSIWVAKTSNVT

SEQ ID NO: 24268 - protein, 485 aa, Bacillus sp. TS-23
APINETMMQYFEWDLPNDGTLWTKVKNEAANLSSLGITALWLPPAWKGTSQSDVGYGAYDLYDLGEFNQKGTIRTKYGTKTQYIQAIQAAKAAGMQVYADVVFNHKAGADGTEFVDAVEVDPSNRNQETSGTYQIQAWTKFDFPGRGNTYSSFKWRWYHFDGTDWDESRKLNRIYKFSTKAWDWEVDTENGNYDYLMFADYDMDHPEVVTELKNWGTWYVNTTNIDGFRLDAVKHIKYSFFPDWLTYVRNQTGKNLFAVGEFWSYDVNKLHNYITKTNGSMSLFDAPLHNNFYTASKSSGYFDMRYLLNNTLMKDQPSLAVTLVDNHDTQPGQSLQSWVEPWFKPLAYAFILTRQEGYPCVFYGDYYGIPKYNIPGLKSKIDPLLIARRDYAYGTQRDYIDHQDIIGWTREGIDTKPNSGLAALITDGPGGSKWMYVGKKHAGKVFYDLTGNRSDTVTINADGWGEFKVNGGSVSIWVAKTSNVT

SEQ ID NO: 24269 - protein, 487 aa, Bacillus sp.
APVNGTMMQYFEWDLPNDGTLWTKVKNEASSLSSLGITALWLPPAYKGTSQGDVGYGVYDLYDLGEFNQKGTIRTKYGTKTQYLQAIQAAKSAGMQVYADVVFNHKAGADSTEWVDAVEVNPSNRNQETSGTYQIQAWTKFDFPGRGNTYSSFKWRWYHFDGTDWDESRKLNRIYKFRGTGKAWDWEVDTENGNYDYLMFADLDMDHPEVVTELKNWGTWYVNTTNVDGFRLDAVKHIKYSFFPDWLTHVRSQTRKNLFAVGEFWSYDVNKLHNYITKTSGTMSLFDAPLHNNFYTASKSSGYFDMRYLLNNTLMKDQPSLAVTLVDNHDTQPGQSLQSWVEPWFKPLAYAFILTRQEGYPCVFYGDYYGIPKYNIPGLKSKIDPLLIARRDYAYGTQRDYIDHQDIIGWTREGIDSKPNSGLAALITDGPGGSKWMYVGKKHAGKVFYDLTGNRSDTVTINADGWGEFKVNGGSVSIWVAKTSQVT

SEQ ID NO: 24270 - protein, 485 aa, Bacillus sp. TS-23
APINETMMQYFEWDLPNDGTLWTKVKNEAANLSSLGITALWLPPAWKGTSQSDVGYGVYDLYDLGEFNQKGTIRTKYGTKTQYIQAIQAAKAAGMQVYADVVFNHKAGADGTEFVDAVEVDPSNRNQETSGTYQIQAWTKFDFPGRGNTYSSFKWRWYHFDGTDWDESRKLNRIYKFTGKAWDWEVDTENGNYDYLMFADLDMDHPEVVTELKNWGTWYVNTTNIDGFRLDAVKHIKYSFFPDWLTYVRNQTGKNLFAVGEFWSYDVNKLHNYITKTNGSMSLFDAPLHNNFYTASKSSGYFDMRYLLNNTLMKDQPSLAVTLVDNHDTQPGQSLQSWVEPWFKPLAYAFILTRQEGYPCVFYGDYYGIPKYNIPGLKSKIDPLLIARRDYAYGTQRDYIDHQDIIGWTREGIDTKPNSGLAALITDGPGGSKWMYVGKKHAGKVFYDLTGNRSDTVTINADGWGEFKVNGGSVSIWVAKTSNVT

SEQ ID NO: 24271 - protein, 487 aa, Bacillus sp. TS-23
APINETMMQYFEWDLPNDGTLWTKVKNEAANLSSLGITALWLPPAYKGTSQSDVGYGVYDLYDLGEFNQKGTIRTKYGTKTQYIQAIQAAKAAGMQVYADVVFNHKAGADGTEFVDAVEVDPSNRNQETSGTYQIQAWTKFDFPGRGNTYSSFKWRWYHFDGTDWDESRKLNRIYKFRSTGKAWDWEVDTENGNYDYLMFADLDMDHPEVVTELKNWGTWYVRTTNIDGFRLDAVKHIKYSFFPDWLTYVRNQTGKNLFAVGEFWSYDVNKLHNYITKTEGSMSLFDAPLHNNFYTASKSSGYFDMRYLLNNTLMKDQPSLAVTLVDNHDTQPGQSLQSWVEPWFKPLAYAFILTRQEGYPCVFYGDYYGIPKYNIPGLKSKIDPLLIARRDYAYGTQRDYIDHQDIIGWTREGIDTKPNSGLAALITDGPGGSKWMYVGKKHAGKVFYDLTGNRSDTVTINADGWGEFKVNGGSVSIWVAKTSNVT

SEQ ID NO: 24272 - protein, 487 aa, Bacillus sp. TS-23
APINETMMQYFEWDLPNDGTLWTKVKNEAANLSSLGITALWLPPAYKGTSQSDVGYGVYDLYDLGEFNQKGTIRTKYGTKTQYIQAIQAAKAAGMQVYADVVFNHKAGADGTEFVDAVEVDPSNRNQETSGTYQIQAWTKFDFPGRGNTYSSFKWRWYHFDGTDWDESRKLNRIYKFRSTGKAWDWEVDTENGNYDYLMFADLDMDHPEVVTELKNWGTWYVNTTNIDGFRLDAVKHIKYSFFPDWLTYVRNQTGKNLFAVGEFWSYDVNKLHNYITKTNGSMSLFDAPLHNNFYTASKSSGYFDMRYLLNNTLMKDRPSLAVTLVDNHDTQPGQSLQSWVEPWFKPLAYAFILTRQEGYPCVFYGDYYGIPKYNIPGLKSKIDPLLIARRDYAYGTQRDYIDHQDIIGWTREGIDTKPNSGLAALITDGPGGSKWMYVGKKHAGKVFYDLTGNRSDTVTINADGWGEFKVNGGSVSIWVAKTSNVT

SEQ ID NO: 24273 - protein, 486 aa, Bacillus sp. TS-23
APINETMMQYFEWDLPNDGTLWTKVKNEAANLSSLGITALWLPPAYKGTSQSDVGYGVYDLYDLGEFNQKGTIRTKYGTKTQYIQAIQAAKAAGMQVYADVVFNHKAGADGTEFVDAVEVDPSNRNQETSGTYQIQAWTKFDFPGRGNTYSSFKWRWYHFDGTDWDEQSRKLNRIYKFRSKAWDWEVDTENGNYDYLMFADLDMDHPEVVTELKNWGTWYVNTTNIDGFRLDAVKHIKYSFFPDWLTYVRNQTGKNLFAVGEFWSYDVNKLHNYITKTNGSMSLFDAPLHNNFYTASKSSGYFDMRYLLNNTLMKDQPSLAVTLVDNHDTQPGQSLQSWVEPWFKPLAYAFILTRQEGYPCVFYGDYYGIPKYNIPGLKSKIDPLLIARRDYAYGTQRDYIDHQDIIGWTREGIDTKPNSGLAALITDGPGGSKWMYVGKKHAGKVFYDLTGNRSDTVTINADGWGEFKVNGGSVSIWVAKTSNVT

SEQ ID NO: 24274 - protein, 486 aa, Bacillus sp. TS-23
APINETMMQYFEWDLPNDGTLWTKVKNEAANLSSLGITALWLPPAYKGTSQSDVGYGVYDLYDLGEFNQKGTIRTKYGTKTQYIQAIQAAKAAGMQVYADVVFNHKAGADGTEFVDAVEVDPSNRNQETSGTYQIQAWTKFDFPGRGNTYSSFKWRWYHFDGTDWDESRKLNNRIYKFRSKAWDWEVDTENGNYDYLMFADLDMDHPEVVTELKNWGTWYVNTTNIDGFRLDAVKHIKYSFFPDWLTYVRNQTGKNLFAVGEFWSYDVNKLHNYITKTNGSMSLFDAPLHNNFYTASKSSGYFDMRYLLNNTLMKDQPSLAVTLVDNHDTQPGQSLQSWVEPWFKPLAYAFILTRQEGYPCVFYGDYYGIPKYNIPGLKSKIDPLLIARRDYAYGTQRDYIDHQDIIGWTREGIDTKPNSGLAALITDGPGGSKWMYVGKKHAGKVFYDLTGNRSDTVTINADGWGEFKVNGGSVSIWVAKTSNVT

SEQ ID NO: 24275 - protein, 485 aa, Bacillus sp. TS-23
APINETMMQYFEWDLPNDGTLWTKVKNEAANLSSLGITALWLPPAYKGTSQSDVGYGVYDLYDLGEFNQKGTIRTKYGTKTQYIQAIQAAKAAGMQVYADVVFNHKAGADGTEFVDAVEVDPSNRNQETSGTYQIQAWTKFDFPGRGNTYSSFKWRWYHFDGTDWDESRKLNRIYKFSTKAWDWEVDTENGNYDYLMFADLDMDHPEVVTELKNWGTWYVNTTNIDGFRLDAVKHIKYSFFPDWLTYVRNQTGKNLFAVGEFWSYDVNKLHNYITKTNGSMSLFDAPLHNNFYTASKSSGYFDMQYLLNNTLMKDQPSLAVTLVDNHDTQPGQSLQSWVEPWFKPLAYAFILTRQEGYPCVFYGDYYGIPKYNIPGLKSKIDPLLIARRDYAYGTQRDYIDHQDIIGWTREGIDTKPNSGLAALITDGPGGSKWMYVGKKHAGKVFYDLTGNRSDTVTINADGWGEFKVNGGSVSIWVAKTSNVT

SEQ ID NO: 24276 - protein, 485 aa, Bacillus sp. TS-23
APINETMMQYFEWDLPNDGTLWTKVKNEAANLSSLGITALWLPPAWKGTSQSDVGYGVYDLYDLGEFNQKGTIRTKYGTKTQYIQAIQAAKAAGMQVYADVVFNHKAGADGTEFVDAVEVDPSNRNQETSGTYQIQAWTKFDFPGRGNTYSSFKWRWYHFDGTDWDESRKLNRIYKFSGKAWDWEVDTENGNYDYLMFADYDMDHPEVVTELKNWGTWYVNTTNIDGFRLDAVKHIKYSFFPDWLTYVRNQTGKNLFAVGEFWSYDVNKLHNYITKTNGSMSLFDAPLHNNFYTASKSSGYFDMRYLLNNTLMKDQPSLAVTLVDNHDTQPGQSLQSWVEPWFKPLAYAFILTRQEGYPCVFYGDYYGIPKYNIPGLKSKIDPLLIARRDYAYGTQRDYIDHQDIIGWTREGIDTKPNSGLAALITDGPGGSKWMYVGKKHAGKVFYDLTGNRSDTVTINADGWGEFKVNGGSVSIWVAKTSNVT

SEQ ID NO: 24277 - protein, 485 aa, Bacillus sp. TS-23
APINETMMQYFEWDLPNDGTLWTKVKNEAANLSSLGITALWLPPAWKGTSQSDVGYGAYDLYDLGEFNQKGTIRTKYGTKTQYIQAIQAAKAAGMQVYADVVFNHKAGADGTEFVDAVEVDPSNRNQETSGTYQIQAWTKFDFPGRGNTYSSFKWRWYHFDGTDWDESRKLNRIYKFSGKAWDWEVDTENGNYDYLMFADYDMDHPEVVTELKNWGTWYVNTTNIDGFRLDAVKHIKYSFFPDWLTYVRNQTGKNLFAVGEFWSYDVNKLHNYITKTNGSMSLFDAPLHNNFYTASKSSGYFDMRYLLNNTLMKDQPSLAVTLVDNHDTQPGQSLQSWVEPWFKPLAYAFILTRQEGYPCVFYGDYYGIPKYNIPGLKSKIDPLLEARRDYAYGTQRDYIDHQDIIGWTREGIDTKPNSGLAALITDGPGGSKWMYVGKKHAGKVFYDLTGNRSDTVTINADGWGEFKVNGGSVSIWVAKTSNVT

SEQ ID NO: 24278 - protein, 487 aa, Bacillus sp. TS-23
APINETMMQYFEWDLPNDGTLWTKVKNEAANLSSLGITALWLPPAYKGTSQSDVGYGVYDLYDLGEFNQKGTIRTKYGTKTQYIQAIQAAKAAGMQVYADVVFNHKAGADGTEFVDAVEVDPSNRNQETSGTYQIQAWTKFDFPGRGNTYSSFKWRWYHFDGTDWDESRKLNRIYKFRSTGKAWDWEVDTENGNYDYLMFADLDMDHPEVVTELKNWGTWYVRTTNIDGFRLDAVKHIKYSFFPDWLTYVRNQTGKNLFAVGEFWSYDVNKLHNYITKTNGSMSLFDAPLHNNFYTASKSSGYFDMRYLLNNTLMKDQPSLAVTLVDNHDTQPGQSLQSWVEPWFKPLAYAFILTRQEGYPCVFYGDYYGIPKYNIPGLKSKIDPLLIARRDYAYGTQRDYIDHQDIIGWTREGIDTKPNSGLAALITDGPGGSKWMYVGKKHAGKVFYDLTGNRSDTVTINADGWGEFKVNGGSVSIWVAKTSNVT

SEQ ID NO: 24279 - protein, 485 aa, Bacillus sp. TS-23
APINETMMQYFEWDLPNDGTLWTKVKNEAANLSSLGITALWLPPAYKGTSQSDVGYGVYDLYDLGEFNQKGTIRTKYGTKTQYIQAIQAAKAAGMQVYADVVFNHKAGADGTEFVDAVEVDPSNRNQETSGTYQIQAWTKFDFPGRGNTYSSFKWRWYHFDGTDWDESRKLNRIYKFTGKAWDWEVDTENGNYDYLMFADFDMDHPEVVTELKNWGTWYVNTTNIDGFRLDAVKHIKYSFFPDWLTYVRNQTGKNLFAVGEFWSYDVNKLHNYITKTNGSMSLFDAPLHNNFYTASKSSGYFDMRYLLNNTLMKDQPSLAVTLVDNHDTQPGQSLQSWVEPWFKPLAYAFILTRQEGYPCVFYGDYYGIPKYNIPGLKSKIDPLLIARRDYAYGTQRDYIDHQDIIGWTREGIDTKPNSGLAALITDGPGGSKWMYVGKKHAGKVFYDLTGNRSDTVTINADGWGEFKVNGGSVSIWVAKTSNVT

SEQ ID NO: 24280 - protein, 485 aa, Bacillus sp. TS-23
APINETMMQYFEWDLPNDGTLWTKVKNEAANLSSLGITALWLPPAYKGTSQSDVGYGVYDLYDLGEFNQKGTIRTKYGTKTQYIQAIQAAKAAGMQVYADVVFNHKAGADGTEFVDAVEVDPSNRNQETSGTYQIQAWTKFDFPGRGNTYSSFKWRWYHFDGTDWDESRKLNRIYKFRTKAWDWEVDTENGNYDYLMFADLDMDHPEVVTELKNWGTWYVNTTNIDGFRLDAVKHIKYSFFPDWLTYVRNQTGKNLFAVGEFWSYDVNKLHNYITKTNGSMSLFDAPLHNNFYTASKSSGYFDMRYLLNNTLMKDQPSLAVTLVDNHDTQPGQSLQSWVEPWFKPLAYAFILTRQEGYPCVFYGDYYGIPKYNIPGLKSKIDPLLIARRDYAYGTQRDYIDHQDIIGWTREGIDTKPNSGLAALITDGPGGSKWMYVGKKHAGKVFYDLTGNRSDTVTINADGWGEFKVNGGSVSIWVAKTSNVT

SEQ ID NO: 24281 - protein, 487 aa, Bacillus sp. TS-23
APINETMMQYFEWDLPNDGTLWTKVKNEAANLSSLGITALWLPPAYKGTSQSDVGYGVYDLYDLGEFNQKGTIRTKYGTKTQYIQAIQAAKAAGMRVYADVVFNHKAGADGTEFVDAVEVDPSNRNQETSGTYQIQAWTKFDFPGRGNTYSSFKWRWYHFDGTDWDESRKLNRIYKFRSTGKAWDWEVDTENGNYDYLMFADLDMDHPEVVTELKNWGTWYVNTTNIDGFRLDAVKHIKYSFFPDWLTYVRNQTGKNLFAVGEFWSYDVNKLHNYITKTNGSMSLFDAPLHNNFYTASKSSGYFDMRYLLNNTLMKDQPSLAVTLVDNHDTQPGQSLQSWVEPWFKPLAYAFILTRQEGYPCVFYGDYYGIPKYNIPGLKSKIDPLLIARRDYAYGTQRDYIDHQDIIGWTREGIDTKPNSGLAALITDGPGGSKWMYVGKKHAGKVFYDLTGNRSDTVTINADGWGEFKVNGGSVSIWVAKTSNVT

SEQ ID NO: 24282 - protein, 487 aa, Bacillus sp. TS-23
APINETMMQYFEWDLPNDGTLWTKVKNEAANLSSLGITALWLPPAYKGTSQSDVGYGVYDLYDLGEFNQKGTIRTKYGTKTQYIQAIQAAKAAGMQVYADVVFNHKAGADGTEFVDAVEVDPSNRNQETSGTYQIQAWTKFDFPGRGNTYSSFKWRWYHFDGTDWDESRKLNRIYKFRSTGKAWDWEVDTENGNYDYLMFADLDMDHPEVVTELKNWGTWYVNTTNIDGFRLDAVKHIKYSFFPDWLTYVRNQTGKNLFAVGEFWSYDVRKLHNYITKTNGSMSLFDAPLHNNFYTASKSSGYFDMRYLLNNTLMKDQPSLAVTLVDNHDTQPGQSLQSWVEPWFKPLAYAFILTRQEGYPCVFYGDYYGIPKYNIPGLKSKIDPLLIARRDYAYGTQRDYIDHQDIIGWTREGIDTKPNSGLAALITDGPGGSKWMYVGKKHAGKVFYDLTGNRSDTVTINADGWGEFKVNGGSVSIWVAKTSNVT

SEQ ID NO: 24283 - protein, 487 aa, Bacillus sp. TS-23
APINETMMQYFEWDLPNDGTLWTKVKNEAANLSSLGITALWLPPAYKGTSQSDVGYGVYDLYDLGEFNQKGTIRTKYGTKTQYIQAIQAAKAAGMQVYADVVFNHKAGADGTEFVDAVEVDPSNRNQETSGTYQIQAWTKFDFPGRGNTYSSFKWRWYHFDGTDWDESRKLNRIYKFRSTGKAWDWEVDTENGNYDYLLFADLDMDHPEVVTELKNWGTWYVNTTNIDGFRLDAVKHIKYSFFPDWLTYVRNQTGKNLFAVGEFWSYDVNKLHNYITKTNGSMSLFDAPLHNNFYTASKSSGYFDMRYLLNNTLMKDQPSLAVTLVDNHDTQPGQSLQSWVEPWFKPLAYAFILTRQEGYPCVFYGDYYGIPKYNIPGLKSKIDPLLIARRDYAYGTQRDYIDHQDIIGWTREGIDTKPNSGLAALITDGPGGSKWMYVGKKHAGKVFYDLTGNRSDTVTINADGWGEFKVNGGSVSIWVAKTSNVT

SEQ ID NO: 24284 - protein, 487 aa, Bacillus sp. TS-23
APINETMMQYFEWDLPNDGTLWTKVKNEAANLSSLGITALWLPPAYKGTSQSDVGYGVYDLYDLGEFNQKGTIRTKYGTKTQYIRAIQAAKAAGMQVYADVVFNHKAGADGTEFVDAVEVDPSNRNQETSGTYQIQAWTKFDFPGRGNTYSSFKWRWYHFDGTDWDESRKLNRIYKFRSTGKAWDWEVDTENGNYDYLMFADLDMDHPEVVTELKNWGTWYVNTTNIDGFRLDAVKHIKYSFFPDWLTYVRNQTGKNLFAVGEFWSYDVNKLHNYITKTNGSMSLFDAPLHNNFYTASKSSGYFDMRYLLNNTLMKDQPSLAVTLVDNHDTQPGQSLQSWVEPWFKPLAYAFILTRQEGYPCVFYGDYYGIPKYNIPGLKSKIDPLLIARRDYAYGTQRDYIDHQDIIGWTREGIDTKPNSGLAALITDGPGGSKWMYVGKKHAGKVFYDLTGNRSDTVTINADGWGEFKVNGGSVSIWVAKTSNVT

SEQ ID NO: 24285 - protein, 487 aa, Bacillus sp. TS-23
APINETMMQYFEWDLPNDGTLWTKVKNEAANLSSLGITALWLPPAYKGTSQSDVGYGVYDLYDLGEFNQKGTIRTKYGTKTQYIRAIQAAKAAGMQVYADVVFNHKAGADGTEFVDAVEVDPSNRNQETSGTYQIQAWTKFDFPGRGNTYSSFKWRWYHFDGTDWDESRKLNRIYKFRSTGKAWDWEVDTENGNYDYLMFADLDMDHPEVVTELKNWGTWYVNTTNIDGFRLDAVKHIKYSFFPDWLTYVRNQTGKNLFAVGEFWSYDVNKLHNYITKTRGSMSLFDAPLHNNFYTASKSSGYFDMRYLLNNTLMKDQPSLAVTLVDNHDTQPGQSLQSWVEPWFKPLAYAFILTRQEGYPCVFYGDYYGIPKYNIPGLKSKIDPLLIARRDYAYGTQRDYIDHQDIIGWTREGIDTKPNSGLAALITDGPGGSKWMYVGKKHAGKVFYDLTGNRSDTVTINADGWGEFKVNGGSVSIWVAKTSNVT

SEQ ID NO: 24286 - protein, 487 aa, Bacillus sp. TS-23
APINETMMQYFEWDLPNDGTLWTKVKNEAANLSSLGITALWLPPAYKGTSQSDVGYGVYDLYDLGEFNQKGTIRTKYGTKTQYIQAIQAAKAAGMQVYADVVFNHKAGADGTEFVDAVEVDPSNRNQETSGTYQIQAWTKFDFPGRGNTYSSFKWRWYHFDGTDWDESRKLNRIYKFRSTGKAWDWEVDTENGNYDYLMFADLDMDHPEVVTELKNWGTWYVNTTNIDGFRLDAVKHIKYSFFPDWLTYVRNQTGKNLFAVGEFWSYDVEKLHNYITKTNGSMSLFDAPLHNNFYTASKSSGYFDMRYLLNNTLMKDQPSLAVTLVDNHDTQPGQSLQSWVEPWFKPLAYAFILTRQEGYPCVFYGDYYGIPKYNIPGLKSKIDPLLIARRDYAYGTQRDYIDHQDIIGWTREGIDTKPNSGLAALITDGPGGSKWMYVGKKHAGKVFYDLTGNRSDTVTINADGWGEFKVNGGSVSIWVAKTSNVT

SEQ ID NO: 24287 - protein, 512 aa, Bacillus sp.
APINETMMQYFEWDLPNDGTLWTKVKNEAANLSSLGITALWLPPAYKGTSQSDVGYGVYDLYDLGEFNQKGTIRTKYGTKTQYIQAIQAAKAAGMQVYADVVFNHKAGADGTEFVDAVEVDPSNRNQETSGTYQIQAWTKFDFPGRGNTYSSFKWRWYHFDGTDWDESRKLNRIYKFRSTGKAWDWEVDTENGNYDYLMFADLDMDHPEVVTELKNWGTWYVNTTNIDGFRLDAVKHIKYSFFPDWLTYVRNQTGKNLFAVGEFWSYDVNKLHNYITKTNGSMSLFDALHNNFYTASKSSGYFDMRYLLNNTLMKDQPSLAVTLVDNHDTQPGQSLQSWVEPWFKPLAYAFILTRQEGYPCVFYGDYYGIPKYNIPGLKSKIDPLLIARRDYAYGTQRDYIDHQDIIGWTREGIDTKPNSGLAALITDGPGGSKWMYVGKKHAGKVFYDLTGNRSDTVTINADGWGEFKVNGGSVSIWVAKTSNVTFTVNNATTTSGQNVYVVANIPELGNW

SEQ ID NO: 24288 - protein, 483 aa, Bacillus licheniformis
HHNGTNGTMMQYFEWYLPNDGNHWNRLRSDASNLHDKGITAVWIPPAWKGASQNDVGYGAYDLYDLGEFNQKGTVRTKYGTRNQLQAAVTALKSNGIQVYGDVVMNHKGGADATEWVRAVEVNPSNRNQEVSGDYTIEAWTKFDFPGRGNTHSNFKWRWYHFDGVDWDQSRQLQNRIYKFRGKGWDWEVDTENGNYDYLMYADIDMDHPEVVNELRNWGVWYTNTLGLDGFRIDAVKHIKYSFTRDWLTHVRNTTGKNMFAVAEFWKNDIGAIENYLSKTNWNHSVFDVPLHYNLYNASRSGGNYDMRQIFNGTVVQRHPTHAVTFVDNHDSQPEEALESFVEEWFKPLAYALTLTRDQGYPSVFYGDYYGIPTHGVPAMKSKIDPILEARQKYAYGTQRDYLDHPDVIGWTREGDGVHADSGLATLMSDGPGGSKWMEVGKNNAGEVWYDITGNQTNTVTINKDGWGQFHVSGGSVSIYVQQ

SEQ ID NO: 24289 - protein, 483 aa, Bacillus licheniformis
HHNGTNGTMMQYFEWYLPNDGNHWNRLRSDASNLKDKGITAQWIPPAWKGASQNDVGYGAYDLYDLGEFNQKGTVRTKYGTRNQLQAAVTALKSNGIQVYGDVVMNHKGGADATEWVRAVEVNPSNRNQEVSGDYTIEAWTKFDFPGRGNTHSNFKWRWYHFDGVDWDQSRQLQNRIYKFRGKGWDWEVDTENGNYDYLMYADIDMDHPEVVNELRNWGVWYTNTLGLDGFRIDAVKHIKYSFTRDWLTHVRNTTGKNMFAVAEFWKNDIGAIENYLSKTNWNHSVFDVPLHYNLYNASRSGGNYDMRQIFNGTVVQRHPTHAVTFVDNHDSQPEEALESFVEEWFKPLAYALTLTRDQGYPSVFYGDYYGIPTHGVPAMKSKIDPILEARQKYAYGTQRDYLDHPDVIGWTREGDGVHADSGLATLMSDGPGGSKWMEVGKNNAGEVWYDITGNQTNTVTINKDGWGQFHVSGGSVSIYVQQ

SEQ ID NO: 24290 - protein, 483 aa, Bacillus licheniformis
HHNGTNGTMMQYFEWYLPNDGNHWNRLRSDASNLKDKGITAVWIPPAWKGASQNDVGYGAYDLYDLGEFNQKGTVRTKYGTRNQLQAAVTALKSNGIQVYGDVVMNHKGGADATEWVRAVEVNPSNRNQEVSGDYTIEAWTKFDFPGRGNTHSNFKWRWYHFDGVDWDQSRQLQNRIYKFRGKGWDWEVDTENGNYDYLMYADIDMDHPEVVNELRNWGVWYTNTLGLDGFRIDAVKHIKYSFTRDWLTHVRNTTGKNMFAVAEFWKNDIGAIENYLSKTNWNHSVFDVPLHYNLYNASRSGGNYDMRQIFNGTVVQRHPTHAVTFVDNHDSQPEEALESFVEEWFKPLAYALTLTRDQGYPSVFYGDYYGIPTHGVPAMKSKIDPILEARQKYAYGTQRDYLDHPDVIGWTREGDGVHADSGLATLMSDGPGGSKWMEVGKNNAGEVWYDITGNQTNTVTINKDGWQQFHVSGGSVSIYVQQ

SEQ ID NO: 24291 - protein, 483 aa, Bacillus licheniformis
HHNGTNGTMMQYFEWYLPNDGNHWNRLRSDASNLKDKGITAVWIPPAWKGASQNDVGYGAYDLYDLGEFNQKGTVRTKYGTRNQLQAAVTALKSNGIQVYGDVVMNHKGGADATEWVRAVEVNPSNRNQEVSGDYTIEAWTKFDFPGRGNTHSNFKWRWYHFDGVDWDQSRQLQNRIYKFRGKGWDWEVDTENGNYDYLMYADIDMDHPEVVNELRNWGVWYTNTLGLDGFRIDAVKHIKYSFTRDWLTHVRNTTGKNMFAVAEFWKNDIGAIENYLSKTNWNHSVFDVPLHYNLYNASRSGGNYDMRQIFNGTVVQRHPTHAVTFVDNHDSQPEEALESFVEEWFKPLAYALTLTRDQGYPSVFYGDYYGIPTHGVPAMKSKIDPILEARQKCAYGTQRDYLDHPDVIGWTREGDGVHADSGLATLMSDGPGGSKWMEVGKNNAGEVWYDITGNQTNTVTINKDGWGQFHVSGGSVSIYVQQ

SEQ ID NO: 24292 - protein, 483 aa, Bacillus licheniformis
HHNGTNGTMMQYFEWYLPNDGNHWNRLRSDASNLKDKGITAVWIPPAWKGASQNDVGYGAYDLYDLGEFNQKGTVRTKYGTRNQLQAAVTALKSNGIQVYGDVVMNHKGGADATEWVRAVEVNPWNRNQEVSGDYTIEAWTKFDFPGRGNTHSNFKWRWYHFDGVDWDQSRQLQNRIYKFRGKGWDWEVDTENGNYDYLMYADIDMDHPEVVNELRNWGVWYTNTLGLDGFRIDAVKHIKYSFTRDWLTHVRNTTGKNMFAVAEFWKNDIGAIENYLSKTNWNHSVFDVPLHYNLYNASRSGGNYDMRQIFNGTVVQRHPTHAVTFVDNHDSQPEEALESFVEEWFKPLAYALTLTRDQGYPSVFYGDYYGIPTHGVPAMKSKIDPILEARQKYAYGTQRDYLDHPDVIGWTREGDGVHADSGLATLMSDGPGGSKWMEVGKNNAGEVWYDITGNQTNTVTINKDGWGQFHVSGGSVSIYVQQ

SEQ ID NO: 24293 - protein, 483 aa, Bacillus licheniformis
HHNGTNGTMMQYFEWYLPNDGNHWNRLRSDASNLLDKGITAVWIPPAWKGASQNDVGYGAYDLYDLGEFNQKGTVRTKYGTRNQLQAAVTALKSNGIQVYGDVVMNHKGGADATEWVRAVEVNPSNRNQEVSGDYTIEAWTKFDFPGRGNTHSNFKWRWYHFDGVDWDQSRQLQNRIYKFRGKGWDWEVDTENGNYDYLMYADIDMDHPEVVNELRNWGVWYTNTLGLDGFRIDAVKHIKYSFTRDWLTHVRNTTGKNMFAVAEFWKNDIGAIENYLSKTNWNHSVFDVPLHYNLYNASRSGGNYDMRQIFNGTVVQRHPTHAVTFVDNHDSQPEEALESFVEEWFKPLAYALTLTRDQGYPSVFYGDYYGIPTHGVPAMKSKIDPILEARQKYAYGTQRDYLDHPDVIGWTREGDGVHADSGLATLMSDGPGGSKWMEVGKNNAGEVWYDITGNQTNTVTINKDGWGQFHVSGGSVSIYVQQ

SEQ ID NO: 24294 - protein, 483 aa, Bacillus licheniformis
HHNGTNGTMMQYFEWYLPNDGNHWNRLRSDASNLKDKGITAVWIPPAWKGASQNDVGYGAYDLYDLGEFNQKGTVRTKYGTRNQLQAAVTALKSNGIQVYGDVVMNHKGGADATEWVRAVEVNPSNRNQEVSGDYTIEAWTKFDFPGRGNTHSNFKWRWYHFDGVDWDQSRQIQNRIYKFRGKGWDWEVDTENGNYDYLMYADIDMDHPEVVNELRNWGVWYTNTLGLDGFRIDAVKHIKYSFTRDWLTHVRNTTGKNMFAVAEFWKNDIGAIENYLSKTNWNHSVFDVPLHYNLYNASRSGGNYDMRQIFNGTVVQRHPTHAVTFVDNHDSQPEEALESFVEEWFKPLAYALTLTRDQGYPSVFYGDYYGIPTHGVPAMKSKIDPILEARQKYAYGTQRDYLDHPDVIGWTREGDGVHADSGLATLMSDGPGGSKWMEVGKNNAGEVWYDITGNQTNTVTINKDGWGQFHVSGGSVSIYVQQ

SEQ ID NO: 24295 - protein, 483 aa, Bacillus licheniformis
HHNGTNGTMMQYFEWYLPNDGNHWHRLRSDASNLKDKGITAVWIPPAWKGASQNDVGYGAYDLYDLGEFNQKGTVRTKYGTRNQLQAAVTALKSNGIQVYGDVVMNHKGGADATEWVRAVEVNPSNRNQEVSGDYTIEAWTKFDFPGRGNTHSNFKWRWYHFDGVDWDQSRQLQNRIYKFRGKEWDWEVDTENGNYDYLMYADYDMDHPEVVNELRNWGVWYTNTLGLDGFRIDAVKHIKYSFTRDWLTHVRNTTGKNMFAVAEFWKNDIGAIENYLSKTNWNHSVFDVPLHYNLYNASRSGGNYDMRQIFNGTVVQRHPTHAVTFVDNHDSQPEEALESFVEEWFKPLAYALTLTRDQGYPSVFYGDYYGIPTHGVPAMKSKIDPILEARQKYAYGTQRDYMDHPDVIGWTREGDGVHADSGLATLMSDGPGGSKWMEVGKNNAGEVWYDITGNQTGTVTINKDGWGQFHVSGGSVSIYVQQ

SEQ ID NO: 24296 - protein, 483 aa, Bacillus licheniformis
HHNGTNGTMMQYFEWYLPNDGNHWNRLRSDASNLIDKGITAVWIPPAWKGASQNDVGYGAYDLYDLGEFNQKGTVRTKYGTRNQLQAAVTALKSNGIQVYGDVVMNHKGGADATEWVRAVEVNPSNRNQEVSGDYTIEAWTKFDFPGRGNTHSNFKWRWYHFDGVDWDQSRQLQNRIYKFRGKGWDWEVDTENGNYDYLMYADIDMDHPEVVNELRNWGVWYTNTLGLDGFRIDAVKHIKYSFTRDWLTHVRNTTGKNMFAVAEFWKNDIGAIENYLSKTNWNHSVFDVPLHYNLYNASRSGGNYDMRQIFNGTVVQRHPTHAVTFVDNHDSQPEEALESFVEEWFKPLAYALTLTRDQGYPSVFYGDYYGIPTHGVPAMKSKIDPILEARQKYAYGTQRDYLDHPDVIGWTREGDGVHADSGLATLMSDGPGGSKWMEVGKNNAGEVWYDITGNQTNTVTINKDGWGQFHVSGGSVSIYVQQ

SEQ ID NO: 24297 - protein, 483 aa, Bacillus licheniformis
HHNGTNGTMMQYFEWYLPNDGNHWNRLRSDASNLKDKGITAVWIPPAWKGASQNDVGYGAYDLYDLGEFNQKGTVRTKYGTRNQLQAAVTALKSNGIQVYGDVVMNHKGGADATEWVRAVEVNPSNRNQEVSGDYTIEAWTKFDFPGRGNTHSNFKWRWYHFDGVDWDQSRQLQNRIYKFRGKGWDWEVDTENGNYDYLMYADIDMDHPEVVNELRNWGVWYTNTLGLDGFRIDAVKHIKYSFTRDWLTHVRNTTGKNMFAVAEFWKNDIGAIENYLSKTNWNHSVFDVPLHYNLYNASRSGGNYDMRQIFNGTVVQRHPTHAVTFVDNHDSQPEEALESFVEEWFKPLAYALTLTRDQGYPSVFYGDYYGIPTHGVPAMKSKIDPILEARQKYAYGTQRDYLDHPDVIGWTREGDGVHADSGLATLMSDGPGGSKWMEVGKNNAGFVWYDITGNQTNTVTINKDGWGQFHVSGGSVSIYVQQ

SEQ ID NO: 24298 - protein, 483 aa, Bacillus licheniformis
HHNGTNGTMMQYFEWYLPNDGNHWNRLRSDASNLKDKGITAVWIPPAWKGASQNDVGYGAYDLYDLGEFNQKGTVRTKYGTRNQLQAAVTALKSNGIQVYGDVVMNHKGGADATEWVRAVEVNPSNRNQEVSGDYTIEAWTKFDFPGRGNTHSNFKWRWYHFDGVDWDQSRQLQNRIYKFRGKGWDWEVDTENGNYDYLMYADIDMDHPEVVNELRNWGVWYTNTLGLDGFRIDAVKHIKYSFTRDWLTHVRNTTGKNMFAVAEFWKNDIGAIENYLSKTNWNHSVFDVPLHYNLYNASRSGGNYDMRQIFNGTVVQEHPTHAVTFVDNHDSQPEEALESFVEEWFKPLAYALTLTRDQGYPSVFYGDYYGIPTHGVPAMKSKIDPILEARQKYAYGTQRDYLDHPDVIGWTREGDGVHADSGLATLMSDGPGGSKWMEVGKNNAGEVWYDITGNQTNTVTINKDGWGQFHVSGGSVSIYVQQ

SEQ ID NO: 24299 - protein, 483 aa, Bacillus licheniformis
HHNGTNGTMMQYFEWYLPNDGNHWNRLRSDASNLKDKGITAVWIPPAWKGASQNDVGYGAYDLYDLGEFNQKGTVRTKYGTRNQLQAAVTALKSNGIQVYGDVVMNHKGGADATEWVRAVEVNPSNRNQEVSGDYTIEAWTKFDFPGRGNTHSNFKWRWYHFDGVDWDQSRQLQNRIYKFRGKGWDWEVDTENGNYDYLMYADIDMDHPEVVNELRNWGVWYTNTLGLDGFRIDAVKHIKYSFTRDWLTHVRNTTGKNMFAVAEFWKNDIGAIENYLSKTNWNHSVFDVPLHYNLYNASRSGGNYDMRQIFNGTVVQRHPTHAVTFVDNHDSQPEEALESFVEEWFKPLAYALTLTRDQGYPSVFYGDYYGIPTHGVPAMKSKIDPILEARQKYAYGTQRDYLDHPDVIGWTREGDGVHADSGLATLMSDGPGGSKWMEVGKNNAGEVWYDITGNQTNTVTINKDGWGQFHVSGGSVSIYVQQ

SEQ ID NO: 24300 - protein, 483 aa, Bacillus licheniformis
HHNGTNGTMMQYFEWYLPNDGNHWNRLRSDASNLKDKGITAVWIPPAWKGASQNDVGYGAYDLYDLGEFNQKGTVRTKYGTRNQLQAAVTALKSNGIQVYGDVVMNHKGGADATEWVRAVEVNPSNRNQEVSGDYTIEAWTKFDFPGRGNTHSNFKWRWYHFDGVDWDQSRQLQNRIYKFRGKGWDWEVDTENGNYDYLMYADIDMDHPEVVNELRNWGVWYTNTLGLDGFRIDAVKHIKYSFTRDWLTHVRNTTGKNMFAVAEFWKNDIGAIENYLSKTNWNHSVFDVPLHYNLYNASRSGGNYDMRQIFNGTVVQRHPTHAVTFVDNHDSQPEEALESFVEEWFKPLAYALTLTRDQGYPSVFYGDYYGIPTHGVPAMKSKIDPILEARQKYAYGTQRDYLDHPDVIGWTREGDGVHADSGLATLMSDGPGGSKWMEVGKNNAGEVWYDITGNWTNTVTINKDGWGQFHVSGGSVSIYVQQ

SEQ ID NO: 24301 - protein, 483 aa, Bacillus licheniformis
HHNGTNGTMMQYFEWYLPNDGNHWNRLRSDASNLKDKGITAVWIPPAWKGASQNDVGYGAYDLYDLGEFNQKGTVRTKYGTRNQLQAAVTALKSNGIQVYGDVVMNHKGGADATEWVRAVEVNPSNRNQEVSGDYTIEAWTKFDFPGRGNTHSNFKWRWYHFDGVDWDQSRQLQNRIYKFRGKEWDWEVDTENGNYDYLMYADIDMDHPEVVNELRNWGVWYTNTLGLDGFRIDAVKHIKYSFTRDWLTHVRNTTGKNMFAVAEFWKNDIGAIENYLSKTNWNHSVFDVPLHYNLYNASRSGGNYDMRQIFNGTVVQRHPTHAVTFVDNHDSQPEEALESFVEEWFKPLAYALTLTRDQGYPSVFYGDYYGIPTHGVPAMKSKIDPILEARQKYAYGTQRDYLDHPDVIGWTREGDGVHADSGLATLMSDGPGGSKWMEVGKNNAGEVWYDITGNQTDTVTINKDGWGEFHVSGGSVSIYVQQ

SEQ ID NO: 24302 - protein, 483 aa, Bacillus licheniformis
HHNGTNGTMMQYFEWYLPNDGNHWNRLRSDASNLKDKGITAVWIPPAWKGASQNDVGYGAYDLYDLGEFNQKGTVRTKYGTRNQLQAAVTALKSNGIQVYGDVVMNHKGGADATEWVRAVEVNPSNRNQEVSGDYTIEAWTKFDFPGRGNTHSNFKWRWYHFDGVDWDQSRQLQNRIYKFRGKGWDWEVDTENGNYDYLMYADIDMDHPEVVNELRNWGVWYTNTLGLDGFRIDAVKHIKYSFTRDWLTHVRNTTGKNMFAVAEFWKNDIGAIENYLSKTNWNHSVFDVPLHYNLYNASRSGGNYDMRQIFNGTVVQRHPTHAVTFVDNHDSQPEEALESFVEEWFKPLAYALTLTRDQGYPSVFYGDYYGIPTHGVPAMKSKIDPILEARQKYAYGTQRDYLDHPDVIGWTREGDGVHADSGLATLMSDGPGGSKWMEVGKNNAGGVWYDITGNQTNTVTINKDGWGQFHVSGGSVSIYVQQ

SEQ ID NO: 24303 - protein, 483 aa, Bacillus licheniformis
HHNGTNGTMMQYFEWYLPNDGNHWNRLRSDASNLKDKGITAVWIPPAWKGASQNDVGYGAYDLYDLGEFNQKGTVRTKYGTRNQLQAAVTALKSNGIQVYGDVVMNHKGGADATEWVRAVEVNPSNRNQEVSGDYTIEAWTKFDFPGRGNTHSNFKWRWYHFDGVDWDQSRQLQNRIYKFRGKGWDWEVDTENGNYDYLMYADIDMDHPEVVNELRNWGVWYTNTLGLDGFRIDAVKHIKYSFTRDWLTHVRNTTGKNMFAVAEFWKNDIGAIENYLSKTNWNHSVFDVPLHYNLYNASRSGGNYDMRQIFNGTVVQRHPTHAVTFVDNHDSQPEEALESFVEEWFKPLAYALTLTRRQGYPSVFYGDYYGIPTHGVPAMKSKIDPILEARQKYAYGTQRDYLDHPDVIGWTREGDGVHADSGLATLMSDGPGGSKWMEVGKNNAGEVWYDITGNQTNTVTINKDGWGQFHVSGGSVSIYVQQ

SEQ ID NO: 24304 - protein, 483 aa, Bacillus licheniformis
HHNGTNGTMMQYFEWYLPNDGNHWNRLRSDASNLKDLGITAVWIPPAWKGASQNDVGYGAYDLYDLGEFNQKGTVRTKYGTRNQLQAAVTALKSNGIQVYGDVVMNHKGGADATEWVRAVEVNPSNRNQEVSGDYTIEAWTKFDFPGRGNTHSNFKWRWYHFDGVDWDQSRQLQNRIYKFRGKGWDWEVDTENGNYDYLMYADIDMDHPEVVNELRNWGVWYTNTLGLDGFRIDAVKHIKYSFTRDWLTHVRNTTGKNMFAVAEFWKNDIGAIENYLSKTNWNHSVFDVPLHYNLYNASRSGGNYDMRQIFNGTVVQRHPTHAVTFVDNHDSQPEEALESFVEEWFKPLAYALTLTRDQGYPSVFYGDYYGIPTHGVPAMKSKIDPILEARQKYAYGTQRDYLDHPDVIGWTREGDGVHADSGLATLMSDGPGGSKWMEVGKNNAGEVWYDITGNQTNTVTINKDGWGQFHVSGGSVSIYVQQ

SEQ ID NO: 24305 - protein, 483 aa, Bacillus licheniformis
HHNGTNGTMMQYFEWYLPNDGNHWNRLRSDASNLKDKGITAVWIPPAWKGASQNDVGYGAYDLYDLGEFNQKGTVRTKYGTRNQLQAAVTALKSNGIQVYGDVVMNHKGGADATEWVRAVEVNPSNRNQEVSGDYTIEAWTKFDFPGRGNTHSNFKWRWYHFDGVDWDQSRQLQNRIYKFRGKGWDWEVDTENGNYDYLMYADIDMDHPEVVNELRNWGVWYTNTLGLDGFRIDAVKHIKYSFTRDWLTHVRNTTGKNMFAVAEFWKNDIGAIENYLSKTNWNHSVFDVPLHYNLYNASRSGGNYDMRQIFNGTVVQRHPTHAVTFVDNHDSQPEEALESFVEEWFKPLAYALTLTRDQGYPSVFYGDYYGIPTHGVPAMKSKIDPILEARQKYAYGTQRDYLDHPDVIGWTREGDGVHADSGLATLMSDGPGGSKWMEVGKNNAGPVWYDITGNQTNTVTINKDGWGQFHVSGGSVSIYVQQ

SEQ ID NO: 24306 - protein, 483 aa, Bacillus licheniformis
HHNGTNGTMMQYFEWYLPNDGNHWNRLRSDASNLKDKGITAVWIPPAWKGASQNDVGYGAYDLYDLGEFNQKGTVRTKYGTRNQLQAAVDALKSNGIQVYGDVVMNHKGGADATEWVRAVEVNPSNRNQEVSGDYTIEAWTKFDFPGRGNTHSNFKWRWYHFDGVDWDQSRQLQNRIYKFRGKGWDWEVDTENGNYDYLMYADIDMDHPEVVNELRNWGVWYTNTLGLDGFRIDAVKHIKYSFTRDWLTHVRNTTGKNMFAVAEFWKNDIGAIENYLSKTNWNHSVFDVPLHYNLYNASRSGGNYDMRQIFNGTVVQRHPTHAVTFVDNHDSQPEEALESFVEEWFKPLAYALTLTRDQGYPSVFYGDYYGIPTHGVPAMKSKIDPILEARQKYAYGTQRDYLDHPDVIGWTREGDGVHADSGLATLMSDGPGGSKWMEVGKNNAGEVWYDITGNQTNTVTINKDGWGQFHVSGGSVSIYVQQ

SEQ ID NO: 24307 - protein, 483 aa, Bacillus licheniformis
HHNGTNGTMMQYFEWYLPNDGNHWNRLRSDASNLKDKGITAVWIPPAWKGASQNDVGYGAYDLYDLGEFNQKGTVRTKYGTRNQLQAAVTALKSNGIQVYGDVVMNHKGGADATEWVRAVEVNPSNRNQEVSGDYTIEAWTKFDFPGRGNTHSNFKWRWYHFDGVDWDQSRQLQNRIYKFRGKGWDWEVDTENGNYDYLMYADIDMDHPEVVNELRNWGVWYTNTLGLDGFRIDAVKHIKYSFTRDWLTHVRNTTGKNMFAVAEFWKNDIGAIENYLSKTNWNHSVFDVPLHYNLYNASRSGGNYDMRQIFNGTVVQRHPTHAVTFVDNHDSQPNEALESFVEEWFKPLAYALTLTRDQGYPSVFYGDYYGIPTHGVPAMKSKIDPILEARQKYAYGTQRDYLDHPDVIGWTREGDGVHADSGLATLMSDGPGGSKWMEVGKNNAGEVWYDITGNQTNTVTINKDGWGQFHVSGGSVSIYVQQ

SEQ ID NO: 24308 - protein, 483 aa, Bacillus licheniformis
HHNGTNGTMMQYFEWYLPNDGNHWHRLRSDASNLKDKGITAVWIPPAWKGASQNDVGYGAYDLYDLGEFNQKGTVRTKYGTRNQLQAAVTALKSNGIQVYGDVVMNHKGGADATEWVRAVEVNPSNRNQEVSGDYTIEAWTKFDFPGRGNTHSNFKWRWYHFDGVDWDQSRQLQNRIYKFRGKEWDWEVDTENGNYDYLMYADYDMDHPEVVNELRNWGVWYTNTLGLDGFRIDAVKHIKYSFTRDWLTHVRNTTGKNMFAVAEFWKNDIGAIENYLSKTNWNHSVFDVPLHYNLYNASRSGGNYDMRQIFNGTVVQRHPTHAVTFVDNHDSQPEEALESFVEEWFKPLAYALTLTRDQGYPSVFYGDYYGIPTHGVPAMKSKIDPILEARQKYAYGTQRDYLDHPDVIGWTREGDGVHADSGLATLMSDGPGGSKWMEVGKNNAGEVWYDITGNQTNTVTINKDGWGQFHVSGGSVSIWVQQ

SEQ ID NO: 24309 - protein, 483 aa, Bacillus licheniformis
HHNGTNGTMMQYFEWYLPNDGNHWNRLRSDASNLKDKGITAVWIPPAWKGASQNDVGYGAYDLYDLGEFNQKGTVRTKYGTRNQLQAAVTALKSNGIQVYGDVVMNHKGGADATEWVRAVEVNPSNRNQEVSGDYTIEAWTKFDFPGRGNTHSNFKWRWYHFDGVDWDQSRQLQNRIYKFRGKGWDWEVDTENGNYDYLMYADIDMDHPEVVNELRNWGVWYTNTLGLDGFRIDAVKHIKYSFTRDWLTHVRNTTGKNMFAVAEFWKNDIGAIENYLSKTNWNHSVFDVPLHYNLYNASRSGGNYDMRQIFNGTVVQRHPTHAVTFVDNHDSQPEEALESFVEEWFKPLAYALTLTRDQGYPSVFYGDYYGIPTHGVPAMKSKIDPILEARQKYAYGTQRDYLDHPDVIGWTREGDGVHADSGLATLMSDGPGGSKWMEVGKNNAGEVWYDITGNQENTVTINKDGWGQFHVSGGSVSIYVQQ

SEQ ID NO: 24310 - protein, 483 aa, Bacillus licheniformis
HHNGTNGTMMQYFEWYLPNDGNHWNRLRSDASNLKDKGITAVWIPPAWKGASQNDVGYGAYDLYDLGEFNQKGTVRTKYGTRNQLQAAVTALKSNGIQVYGDVVMNHKGGADATEWVRAVEVNPKNRNQEVSGDYTIEAWTKFDFPGRGNTHSNFKWRWYHFDGVDWDQSRQLQNRIYKFRGKGWDWEVDTENGNYDYLMYADIDMDHPEVVNELRNWGVWYTNTLGLDGFRIDAVKHIKYSFTRDWLTHVRNTTGKNMFAVAEFWKNDIGAIENYLSKTNWNHSVFDVPLHYNLYNASRSGGNYDMRQIFNGTVVQRHPTHAVTFVDNHDSQPEEALESFVEEWFKPLAYALTLTRDQGYPSVFYGDYYGIPTHGVPAMKSKIDPILEARQKYAYGTQRDYLDHPDVIGWTREGDGVHADSGLATLMSDGPGGSKWMEVGKNNAGEVWYDITGNQTNTVTINKDGWGQFHVSGGSVSIYVQQ

SEQ ID NO: 24311 - protein, 483 aa, Bacillus licheniformis
HHNGTNGTMMQYFEWYLPNDGNHWNRLRSDASNLKDKGITAVWIPPAWKGASQNDVGYGAYDLYDLGEFNQKGTVRTKYGTRNQLQAAVTALKSNGIQVYGDVVMNHKGGADATEWVRAVEVNPSNRNQEVSGDYTIEAWTKFDFPGRGNTHSNFKWRWYHFDGVDWDQSRQLQNRIYKFRGKGWDWEVDTENGNYDYLMYADIDMDHPEVVNELRNWGVWYTNTLGLDGFRIDAVKHIKYSFTRDWLTHVRNTTGKNMFAVAEFWKNDIGAIENYLSKTNWNHSVFDVPLHYNLYNASRSGGNYDMRQIFNGTVVQRHPTHAVTFVDNHDSQPEEALESFVEEWFKPLAYALTLTRDQGYPSVFYGDYYGIPTHGVPAMKSKIDPILEARQKYAYGTQRDYLDHPDVIGWTREGDGVHADSGLATLMSDGPGGSKWMEVGKNRAGEVWYDITGNQTNTVTINKDGWGQFHVSGGSVSIYVQQ

SEQ ID NO: 24312 - protein, 483 aa, Bacillus licheniformis
HHNGTNGTMMQYFEWYLPNDGNHWNRLRSDASNLKGKGITAVWIPPAWKGASQNDVGYGAYDLYDLGEFNQKGTVRTKYGTRNQLQAAVTALKSNGIQVYGDVVMNHKGGADATEWVRAVEVNPSNRNQEVSGDYTIEAWTKFDFPGRGNTHSNFKWRWYHFDGVDWDQSRQLQNRIYKFRGKGWDWEVDTENGNYDYLMYADIDMDHPEVVNELRNWGVWYTNTLGLDGFRIDAVKHIKYSFTRDWLTHVRNTTGKNMFAVAEFWKNDIGAIENYLSKTNWNHSVFDVPLHYNLYNASRSGGNYDMRQIFNGTVVQRHPTHAVTFVDNHDSQPEEALESFVEEWFKPLAYALTLTRDQGYPSVFYGDYYGIPTHGVPAMKSKIDPILEARQKYAYGTQRDYLDHPDVIGWTREGDGVHADSGLATLMSDGPGGSKWMEVGKNNAGEVWYDITGNQTNTVTINKDGWGQFHVSGGSVSIYVQQ

SEQ ID NO: 24313 - protein, 483 aa, Bacillus licheniformis
HHNGTNGTMMQYFEWYLPNDGNHWNRLRSDASNLKDKGITAVWIPPAWKGASQNDVGYGAYDLYDLGEFNQKGTVRTKYGTRNQLQAAVTALKSNGIQVYGDVVMNHKGGADATEWVRAVEVNPSNRNQEVSGDYTIEAWTKFDFPGRGNTHSNFKWRWYHFDGVDWDQSRQLQNRIYKFRGKGWDWEVDTENGNYDYLMYADIDMDHPEVVNELRNWGVWYTNTLGLDGFRIDAVKHIKYSFTRDWLTHVRNTTGKNMFAVAEFWKNDIGAIENYLSKTNWNHSVFDVPLHYNLYNASRSGGNYDMRQIFNGTVVQRHPTHAVTFVDNHDSQPEEALESFVEEWFKPLAYALTLTRTQGYPSVFYGDYYGIPTHGVPAMKSKIDPILEARQKYAYGTQRDYLDHPDVIGWTREGDGVHADSGLATLMSDGPGGSKWMEVGKNNAGEVWYDITGNQTNTVTINKDGWGQFHVSGGSVSIYVQQ

SEQ ID NO: 24314 - protein, 483 aa, Bacillus licheniformis
HHNGTNGTMMQYFEWYLPNDGNHWNRLRSDASNLKDKGITAVWIPPAWKGASQNDVGYGAYDLYDLGEFNQKGTVRTKYGTRNQLQAAVTALKSNGIQVYGDVVMNHKGGADATEWVRAVEVNPYNRNQEVSGDYTIEAWTKFDFPGRGNTHSNFKWRWYHFDGVDWDQSRQLQNRIYKFRGKGWDWEVDTENGNYDYLMYADIDMDHPEVVNELRNWGVWYTNTLGLDGFRIDAVKHIKYSFTRDWLTHVRNTTGKNMFAVAEFWKNDIGAIENYLSKTNWNHSVFDVPLHYNLYNASRSGGNYDMRQIFNGTVVQRHPTHAVTFVDNHDSQPEEALESFVEEWFKPLAYALTLTRDQGYPSVFYGDYYGIPTHGVPAMKSKIDPILEARQKYAYGTQRDYLDHPDVIGWTREGDGVHADSGLATLMSDGPGGSKWMEVGKNNAGEVWYDITGNQTNTVTINKDGWGQFHVSGGSVSIYVQQ

SEQ ID NO: 24315 - protein, 483 aa, Bacillus licheniformis
HHNGTNGTMMQYFEWYLPNDGNHWNRLRSDASNLKDKGITAVWIPPAWKGASQNDVGYGAYDLYDLGEFNQKGTVRTKYGTRNQLQAAVTALKSNGIQVYGDVVMNHKGGADATEWVRAVEVNPSNRNQEVSGDYTIEAWTKFDFPGRGNTHSNFKWRWYHFDGVDWDQSRQLQNRIYKFRGKGWDWEVDTENGNYDYLMYADIDMDHPEVVNELRNWGVWYTNTLGLDGFRIDAVKHIKYSFTRDWLTHVRNTTGKNMFAVAEFWKNDIGAIENYLYKTNWNHSVFDVPLHYNLYNASRSGGNYDMRQIFNGTVVQRHPTHAVTFVDNHDSQPEEALESFVEEWFKPLAYALTLTRDQGYPSVFYGDYYGIPTHGVPAMKSKIDPILEARQKYAYGTQRDYLDHPDVIGWTREGDGVHADSGLATLMSDGPGGSKWMEVGKNNAGEVWYDITGNQTNTVTINKDGWGQFHVSGGSVSIYVQQ

SEQ ID NO: 24316 - protein, 483 aa, Bacillus licheniformis
HHNGTNGTMMQYFEWYLPNDGNHWNRLRSDASNLKDKGITAVWIPPAWKGASQNDVGYGAYDLYDLGEFNQKGTVRTKYGTRNQLQAAVTALKSNGIQVYGDVVMNHKGGADATEWVRAVEVNPSNRNQEVSGDYTIEAWTKFDFPGRGNTHSNFKWRWYHFDGVDWDQSRQLQNRIYKFRGKEWDWEVDEENGNYDYLMYADYDMDHPEVVNELRNWGVWYTNTLGLDGFRIDAVKHIKYSFTRDWLTHVRNTTGKNMFAVAEFWKNDIGAIENYLSKTNWNHSVFDVPLHYNLYNASRSGGNYDMRQIFNGTVVQRHPTHAVTFVDNHDSQPEEALESFVEEWFKPLAYALTLTRDQGYPSVFYGDYYGIPTHGVPAMKSKIDPILEARQKYAYGTQRDYMDHPDVIGWTREGDGVHADSGLATLMSDGPGGSKWMEVGKNNAGEVWYDITGNQTNTVTINKDGWGQFHVSGGSVSIYVQQ

SEQ ID NO: 24317 - protein, 483 aa, Bacillus licheniformis
HHNGTNGTMMQYFEWYLPNDGNHWNRLRSDASNLYDKGITAVWIPPAWKGASQNDVGYGAYDLYDLGEFNQKGTVRTKYGTRNQLQAAVTALKSNGIQVYGDVVMNHKGGADATEWVRAVEVNPSNRNQEVSGDYTIEAWTKFDFPGRGNTHSNFKWRWYHFDGVDWDQSRQLQNRIYKFRGKGWDWEVDTENGNYDYLMYADIDMDHPEVVNELRNWGVWYTNTLGLDGFRIDAVKHIKYSFTRDWLTHVRNTTGKNMFAVAEFWKNDIGAIENYLSKTNWNHSVFDVPLHYNLYNASRSGGNYDMRQIFNGTVVQRHPTHAVTFVDNHDSQPEEALESFVEEWFKPLAYALTLTRDQGYPSVFYGDYYGIPTHGVPAMKSKIDPILEARQKYAYGTQRDYLDHPDVIGWTREGDGVHADSGLATLMSDGPGGSKWMEVGKNNAGEVWYDITGNQTNTVTINKDGWGQFHVSGGSVSIYVQQ

SEQ ID NO: 24318 - protein, 483 aa, Bacillus licheniformis
HHNGTNGTMMQYFEWYLPNDGNHWNRLRSDASNLKDKGITAVWIPPAWKGASQNDVGYGAYDLYDLGEFNQKGTVRTKYGTRNQLQAAVTALKSNGIQVYGDVVMNHKGGADATEWVRAVEVNPSNRNQEVSGDYTIEAWTKFDFPGRGNTHSNFKWRWYHFDGVDWDQSRQLQNRIYKFRGKGWDWEVDTENGNYDYLMYADIDMDHPEVVNELRNWGVWYTNTLGLDGFRIDAVKHIKYSFTRDWLTHVRNTTGKNMFAVAEFWKNDIGAIENYLSKTNWNHSVFDVPLHYNLYNASRSGGNYDMRQIFNGTVVQRHPKHAVTFVDNHDSQPEEALESFVEEWFKPLAYALTLTRDQGYPSVFYGDYYGIPTHGVPAMKSKIDPILEARQKYAYGTQRDYLDHPDVIGWTREGDGVHADSGLATLMSDGPGGSKWMEVGKNNAGEVWYDITGNQTNTVTINKDGWGQFHVSGGSVSIYVQQ

SEQ ID NO: 24319 - protein, 483 aa, Bacillus licheniformis
HHNGTNGTMMQYFEWYLPNDGNHWNRLRSDASNLKDKGITAVWIPPAWKGASQNDVGYGAYDLYDLGEFNQKGTVRTKYGTRNQLQAAVNALKSNGIQVYGDVVMNHKGGADATEWVRAVEVNPSNRNQEVSGDYTIEAWTKFDFPGRGNTHSNFKWRWYHFDGVDWDQSRQLQNRIYKFRGKGWDWEVDTENGNYDYLMYADIDMDHPEVVNELRNWGVWYTNTLGLDGFRIDAVKHIKYSFTRDWLTHVRNTTGKNMFAVAEFWKNDIGAIENYLSKTNWNHSVFDVPLHYNLYNASRSGGNYDMRQIFNGTVVQRHPTHAVTFVDNHDSQPEEALESFVEEWFKPLAYALTLTRDQGYPSVFYGDYYGIPTHGVPAMKSKIDPILEARQKYAYGTQRDYLDHPDVIGWTREGDGVHADSGLATLMSDGPGGSKWMEVGKNNAGEVWYDITGNQTNTVTINKDGWGQFHVSGGSVSIYVQQ

SEQ ID NO: 24320 - protein, 483 aa, Bacillus licheniformis
HHNGTNGTMMQYFEWYLPNDGNHWNRLRSDASNLKDKGITAVWIPPAWKGASQNDVGYGAYDLYDLGEFNQKGTVRTKYGTRNQLQAAVTALKSNGIQVYGDVVMNHKGGADATEWVRAVEVNPSNRNQEVSGDYTIEAWTKFDFPGRGNTHSNFKWRWYHFDGVDWDQSRQLQNKIYKFRGKGWDWEVDTENGNYDYLMYADYDMDHPEVVNELRNWGVWYTNTLGLDGFRIDAVKHIKYSFTRDWLTHVRNTTGKNMFAVAEFWKNDIGAIENYLSKTNWNHSVFDVPLHYNLYNASRSGGNYDMRQIFNGTVVQRHPTHAVTFVDNHDSQPEEALESFVEEWFKPLAYALTLTRDQGYPSVFYGDYYGIPTHGVPAMKSKIDPILEARQKYAYGTQRDYMDHPDVIGWTREGDGVHADSGLATLMSDGPGGSKWMEVGKNNAGEVWYDITGNQTGTVTINKDGWGQFHVSGGSVSIYVQQ

SEQ ID NO: 24321 - protein, 483 aa, Bacillus licheniformis
HHNGTNGTMMQYFEWYLPNDGNHWNRLRSDASNLKDKGITAVWIPPAWKGASQNDVGYGAYDLYDLGEFNQKGTVRTKYGTRNQLQAAVTALKSNGIQVYGDVVMNHKGGADATEWVRAVEVNPTNRNQEVSGDYTIEAWTKFDFPGRGNTHSNFKWRWYHFDGVDWDQSRQLQNRIYKFRGKGWDWEVDTENGNYDYLMYADIDMDHPEVVNELRNWGVWYTNTLGLDGFRIDAVKHIKYSFTRDWLTHVRNTTGKNMFAVAEFWKNDIGAIENYLSKTNWNHSVFDVPLHYNLYNASRSGGNYDMRQIFNGTVVQRHPTHAVTFVDNHDSQPEEALESFVEEWFKPLAYALTLTRDQGYPSVFYGDYYGIPTHGVPAMKSKIDPILEARQKYAYGTQRDYLDHPDVIGWTREGDGVHADSGLATLMSDGPGGSKWMEVGKNNAGEVWYDITGNQTNTVTINKDGWGQFHVSGGSVSIYVQQ

SEQ ID NO: 24322 - protein, 483 aa, Bacillus licheniformis
HHNGTNGTMMQYFEWYLPNDGNHWNRLRSDASNLKDKGITAVWIPPAWKGASQNDVGYGAYDLYDLGEFNQKGTVRTKYGTRNQLQAAVTALKDNGIQVYGDVVMNHKGGADATEWVRAVEVNPSNRNQEVSGDYTIEAWTKFDFPGRGNTHSNFKWRWYHFDGVDWDQSRQLQNRIYKFRGKGWDWEVDTENGNYDYLMYADIDMDHPEVVNELRNWGVWYTNTLGLDGFRIDAVKHIKYSFTRDWLTHVRNTTGKNMFAVAEFWKNDIGAIENYLSKTNWNHSVFDVPLHYNLYNASRSGGNYDMRQIFNGTVVQRHPTHAVTFVDNHDSQPEEALESFVEEWFKPLAYALTLTRDQGYPSVFYGDYYGIPTHGVPAMKSKIDPILEARQKYAYGTQRDYLDHPDVIGWTREGDGVHADSGLATLMSDGPGGSKWMEVGKNNAGEVWYDITGNQTNTVTINKDGWGQFHVSGGSVSIYVQQ

SEQ ID NO: 24323 - protein, 483 aa, Bacillus licheniformis
HHNGTNGTMMQYFEWYLPNDGNHWNRLRSDASNLKDKGITAVWIPPAWKGASQNDVGYGAYDLYDLGEFNQKGTVRTKYGTRNQLQAAVTALKSNGIQVYGDVVMNHKGGADATEIVRAVEVNPSNRNQEVSGDYTIEAWTKFDFPGRGNTHSNFKWRWYHFDGVDWDQSRQLQNRIYKFRGKGWDWEVDTENGNYDYLMYADIDMDHPEVVNELRNWGVWYTNTLGLDGFRIDAVKHIKYSFTRDWLTHVRNTTGKNMFAVAEFWKNDIGAIENYLSKTNWNHSVFDVPLHYNLYNASRSGGNYDMRQIFNGTVVQRHPTHAVTFVDNHDSQPEEALESFVEEWFKPLAYALTLTRDQGYPSVFYGDYYGIPTHGVPAMKSKIDPILEARQKYAYGTQRDYLDHPDVIGWTREGDGVHADSGLATLMSDGPGGSKWMEVGKNNAGEVWYDITGNQTNTVTINKDGWGQFHVSGGSVSIYVQQ

SEQ ID NO: 24324 - protein, 483 aa, Bacillus licheniformis
HHNGTNGTMMQYFEWYLPNDGNHWNRLRSDASNLKDKGITAVWIPPAWKGASQNDVGYGAYDLYDLGEFNQKGTVRTKYGTRNQLQAAVTALKSNGIQVYGDVVMNHKGGADATEWVRAVEVNPSNRNQEVSGDYTIEAWTKFDFPGRGNTHSNFKWRWYHFDGVDWDQSRQLQNRIYKFRGKGWDWEVDTENGNYDYLMYADIDMDHPEVVNELRNWGVWYTNTLGLDGFRIDAVKHIKYSFTRDWLTHVRNTTGKNMFAVAEFWKNDIGAIENYLSKTNWNHSVFDVPLHYNLYNASRSGGNYDMRQIFNGTVVQRHPTHAVTFVDNHDSQPREALESFVEEWFKPLAYALTLTRDQGYPSVFYGDYYGIPTHGVPAMKSKIDPILEARQKYAYGTQRDYLDHPDVIGWTREGDGVHADSGLATLMSDGPGGSKWMEVGKNNAGEVWYDITGNQTNTVTINKDGWGQFHVSGGSVSIYVQQ

SEQ ID NO: 24325 - protein, 483 aa, Bacillus licheniformis
HHNGTNGTMMQYFEWYLPNDGNHWNRLRSDASNLKDKGITAVWIPPAWKGASQNDVGYGAYDLYDLGEFNQKGTVRTKYGTRNQLQAAVTALKKNGIQVYGDVVMNHKGGADATEWVRAVEVNPSNRNQEVSGDYTIEAWTKFDFPGRGNTHSNFKWRWYHFDGVDWDQSRQLQNRIYKFRGKGWDWEVDTENGNYDYLMYADIDMDHPEVVNELRNWGVWYTNTLGLDGFRIDAVKHIKYSFTRDWLTHVRNTTGKNMFAVAEFWKNDIGAIENYLSKTNWNHSVFDVPLHYNLYNASRSGGNYDMRQIFNGTVVQRHPTHAVTFVDNHDSQPEEALESFVEEWFKPLAYALTLTRDQGYPSVFYGDYYGIPTHGVPAMKSKIDPILEARQKYAYGTQRDYLDHPDVIGWTREGDGVHADSGLATLMSDGPGGSKWMEVGKNNAGEVWYDITGNQTNTVTINKDGWGQFHVSGGSVSIYVQQ

SEQ ID NO: 24326 - protein, 483 aa, Bacillus subtilis
HHNGTNGTMMQYFEWYLPNDGNHWNRLRSDASNLKDKGITAVWIPPAWKGASQNDVGYGAYDLYDLGEFNQKGTVRTKYGTRNQLQAAVTALKSNGIQVYGDVVMNHKGGADATEWVRAVEVNPSNRNQEVSGDYTIEAWTKFDFPGRGNTHSNFKWRWYHFDGVDWDQSRQLQNRIYKFRGKGWDWEVDTENGNYDYLMYADIDMDHPEVVNELRNWGVWYTNTLGLDGFRIDAVKHIKYSFTRDWLTHVRNTTGKNMFAVAEFWKNDIGAIENYLSKTNWNHSVFDVPLHYNLYNASRSGGNYDMRQIFNGTVVQRHPTHAVTFVDNHDSQPEEALESFVEEWFKPLAYALTLTRDQGYPSVFYGDYYGIPTHGVPAMKSKIDPILEARQKYAYGTQRDYLDHPDVIGWTREGDGVHAGSGLATLMSDGPGGSKWMEVGENNAGEVWYDITGNQTNTVTINKDGWGQFHVSGGSVSIYVQQ

SEQ ID NO: 24327 - protein, 483 aa, Bacillus licheniformis
HHNGTNGTMMQYFEWYLPNDGNHWNRLRSDASNLKDKGITAVWIPPAWKGASQNDVGYGAYDLYDLGEFNQKGTVRTKYGTRNQLQAAVTALKSNGIQVYGDVVMNHKGGADATEWVRAVEVNPSNRNQEVSGDYTIEAWTKFDFPGRGNTHSNFKWRWYHFDGVDWDQSRQLQNRIYKFRGKEWDWEVDTENGNYDYLMYADIDMDHPEVVNELRNWGVWYTDTLGLDGFRIDAVKHIKYSFTRDWLTHVRNTTGKNMFAVAEFWKNDIGAIENYLSKTNWNHSVFDVPLHYNLYNASRSGGNYDMRKIFNGTVVQRHPTHAVTFVDNHDSQPEEALESFVEEWFKPLAYALTLTRDQGYPSVFYGDYYGIPTHGVPAMKSKIDPILEARQKYAYGTQRDYLDHPDVIGWTREGDGVHADSGLATLMSDGPGGSKWMEVGKNNAGEVWYDITGNQTDTVTINKDGWGQFHVSGGSVSIYVQQ

SEQ ID NO: 24328 - protein, 483 aa, Bacillus licheniformis
HHNGTNGTMMQYFEWYLPNDGNHWNRLRSDASNLKDKGITAVWIPPAWKGASQNDVGYGAYDLYDLGEFNQKGTVRTKYGTRNQLQAAVTALKSNGIQVYGDVVMNHKGGADATEWVRAVEVNPSNRNQEVSGDYTIEAWTKFDFPGRGNTHSNFKWRWYHFDGVDWDQSRQLQNRIYKFRGKGWDWEVDTENGNYDYLMYADIDMDHPEVVNELRNWGVWYTNTLGLDGFRIDAVKHIKYSFTRDWLTHVRNTTGKNMFAVAEFWKNDIGAIENYLSKTNWNHSVFDVPLHYNLYNASRSGGNYDMRGIFNGTVVQRHPTHAVTFVDNHDSQPEEALESFVEEWFKPLAYALTLTRDQGYPSVFYGDYYGIPTHGVPAMKSKIDPILEARQKYAYGTQRDYLDHPDVIGWTREGDGVHADSGLATLMSDGPGGSKWMEVGKNNAGEVWYDITGNQTNTVTINKDGWGQFHVSGGSVSIYVQQ

SEQ ID NO: 24329 - protein, 483 aa, Bacillus licheniformis
HHNGTNGTMMQYFEWYLPNDGNHWNRLRSDASNLKDKGITAVWIPPAWKGASQNDVGYGAYDLYDLGEFNQKGTVRTKYGTRNQLQAALTALKSNGIQVYGDVVMNHKGGADATEWVRAVEVNPSNRNQEVSGDYTIEAWTKFDFPGRGNTHSNFKWRWYHFDGVDWDQSRQLQNRIYKFRGKGWDWEVDTENGNYDYLMYADIDMDHPEVVNELRNWGVWYTNTLGLDGFRIDAVKHIKYSFTRDWLTHVRNTTGKNMFAVAEFWKNDIGAIENYLSKTNWNHSVFDVPLHYNLYNASRSGGNYDMRQIFNGTVVQRHPTHAVTFVDNHDSQPEEALESFVEEWFKPLAYALTLTRDQGYPSVFYGDYYGIPTHGVPAMKSKIDPILEARQKYAYGTQRDYLDHPDVIGWTREGDGVHADSGLATLMSDGPGGSKWMEVGKNNAGEVWYDITGNQTNTVTINKDGWGQFHVSGGSVSIYVQQ

SEQ ID NO: 24330 - protein, 483 aa, Bacillus licheniformis
HHNGTNGTMMQYFEWYLPNDGNHWNRLRSDASNLKDKGITAVWIPPAWKGASQNDVGYGAYDLYDLGEFNQKGTVRTKYGTRNQLQAAVTALKSNGIQVYGDVVMNHKGGADATEWVRAVEVNPSNRNQEVSGDYTIEAWTKFDFPGRGNTHSNFKWRWYHFDGVDWDQSRQLQNRIYKFRGKGWDWEVDTENGNYDYLMYADIDMDHPEVVNELRNWGVWYTNTLGLDGFRIDAVKHIKYSFTRDWLTHVRNTTGKNMFAVAEFWKNDIGAIENYLSKTNWNHSVFDVPLHYNLYNASRSGGNYDMRQIFNGTVVQRHPTHAVTFVDNHDSQPEEALESFVEEWFKPLAYALTLTRDQGYPSVFYGDYYGIPTHEVPAMKSKIDPILEARQKYAYGTQRDYLDHPDVIGWTREGDGVHADSGLATLMSDGPGGSKWMEVGKNNAGEVWYDITGNQTNTVTINKDGWGQFHVSGGSVSIYVQQ

SEQ ID NO: 24331 - protein, 483 aa, Bacillus licheniformis
HHNGTNGTMMQYFEWYLPNDGNHWNRLRNDASNLKDKGITAVWIPPAWKGASQNDVGYGAYDLYDLGEFNQKGTVRTKYGTRNQLQAAVTALKSNGIQVYGDVVMNHKGGADATEWVRAVEVNPSNRNQEVSGDYTIEAWTKFDFPGRGNTHSNFKWRWYHFDGVDWDQSRQLQNRIYKFRGKGWDWEVDTENGNYDYLMYADIDMDHPEVVNELRNWGVWYTNTLGLDGFRIDAVKHIKYSFTRDWLTHVRNTTGKNMFAVAEFWKNDIGAIENYLSKTNWNHSVFDVPLHYNLYNASRSGGNYDMRQIFNGTVVQRHPTHAVTFVDNHDSQPEEALESFVEEWFKPLAYALTLTRDQGYPSVFYGDYYGIPTHGVPAMKSKIDPILEARQKYAYGTQRDYLDHPDVIGWTREGDGVHADSGLATLMSDGPGGSKWMEVGKNNAGEVWYDITGNQTNTVTINKDGWGQFHVSGGSVSIYVQQ

SEQ ID NO: 24332 - protein, 483 aa, Bacillus licheniformis
HHNGTNGTMMQYFEWYLPNDGNHWNRLRSDASNLKDKGITAVWIPPAWKGASQNDVGYGAYDLYDLGEFNQKGTVRTKYGTRGQLQAAVTALKSNGIQVYGDVVMNHKGGADATEWVRAVEVNPSNRNQEVSGDYTIEAWTKFDFPGRGNTHSNFKWRWYHFDGVDWDQSRQLQNRIYKFRGKGWDWEVDTENGNYDYLMYADIDMDHPEVVNELRNWGVWYTNTLGLDGFRIDAVKHIKYSFTRDWLTHVRNTTGKNMFAVAEFWKNDIGAIENYLSKTNWNHSVFDVPLHYNLYNASRSGGNYDMRQIFNGTVVQRHPTHAVTFVDNHDSQPEEALESFVEEWFKPLAYALTLTRDQGYPSVFYGDYYGIPTHGVPAMKSKIDPILEARQKYAYGTQRDYLDHPDVIGWTREGDGVHADSGLATLMSDGPGGSKWMEVGKNNAGEVWYDITGNQTNTVTINKDGWGQFHVSGGSVSIYVQQ

SEQ ID NO: 24333 - protein, 483 aa, Bacillus licheniformis
HHNGTNGTMMQYFEWYLPNDGNHWNRLRSDASNLKDKGITAVWIPPAWKGASQNDVGYGAYDLYDLGEFNQKGTVRTKYGTRNQLQAAVTALKSNGIQVYGDVVMNHKGGADATEWVRAVEVNPSNRNQEVSGDYTIEAWTKFDFPGRGNTHSNFKWRWYHFDGVDWDQSRQLQNRIYKFRGKGWDWEVDTENGNYDYLMYADIDMDHPEVVNELRNWGVWYTNTLGLDGFRIDAVKHIKYSFTRDWLTHVRNTTGKNMFAVAEFWKNDGGAIENYLSKTNWNHSVFDVPLHYNLYNASRSGGNYDMRQIFNGTVVQRHPTHAVTFVDNHDSQPEEALESFVEEWFKPLAYALTLTRDQGYPSVFYGDYYGIPTHGVPAMKSKIDPILEARQKYAYGTQRDYLDHPDVIGWTREGDGVHADSGLATLMSDGPGGSKWMEVGKNNAGEVWYDITGNQTNTVTINKDGWGQFHVSGGSVSIYVQQ

SEQ ID NO: 24334 - protein, 483 aa, Bacillus licheniformis
HHNGTNGTMMQYFEWYLPNDGNHWNRLRSDASNLKDKGITAVWIPPAWKGASQNDVGYGAYDLYDLGEFNQKGTVRTKYGTRNQLQAAVTALKSNGIQVYGDVVMNHKGGADATEWVRAVEVNPSNRNQEVSGDYTIEAWTKFDFPGRGNTHSNFKWRWYHFDGVDWDQSRQLQNRIYKFRGKGWDWEVDTENGNYDYLMYADIDMDHPEVVNELRNWGVWYTNTLGLDGFRIDAVKHIKYSFTRDWLTHVRNTTGKNMFAVAEFWKNDIGAIENYLSKTNWNHSVFDVPLHYNLYNASRSGGNYDMRQIFNGTVVQRHPTHAVTFVDNHDSQPEEALESFVEEWFKPLAYALTLTRDQGYPSVFYGDYYGIPTHGVPAMKSKIDPILEARQKYAYGTQRDYLDHPDVIGWTREGDGVHADSGLATLMSDGPGGSKWMEVGKNIAGEVWYDITGNQTNTVTINKDGWGQFHVSGGSVSIYVQQ

SEQ ID NO: 24335 - protein, 483 aa, Bacillus subtilis
HHNGTNGTMMQYFEWYLPNDGNHWNRLRSDASNLKDKGITAVWIPPAWKGASQNDVGYGAYDLYDLGEFNQKGTVRTKYGTRNQLQAAVTALKSNGIQVYGDVVMNHKGGADATEWVRAVEVNPSNRNQEVSGDYTIEAWTKFDFPGRGNTHSNFKWRWYHFDGVDWDQSRQLQNRIYKFRGKGWDWEVDTENGNYDYLMYADIDMDHPEVVNELRNWGVWYTNTLGLDGFRIDAVKHIKYSFTRDWLTHVRNTTGKNMFAVAEFWKNDIGAIENYLSKTNWNHSVFDVPLHYNLYNASRSGGNYDMRQIFNGTVVQRHPTHAVTFVDNHDSQPEEALESFVEEWFKPLAYALTLTRDQGYPSVFYGDYYGIPTHGVPAMKSKIDPILEARQKYAYGTQRDYLDHPDVIGWTREGDGVHADSGLATLMSDGPGGSKWMDVGKNNAGEVWYDITGNQTNTVTINKDGWGQFHVSGGSVSIYVQQ

SEQ ID NO: 24336 - protein, 483 aa, Bacillus licheniformis
HHNGTNGTMMQYFEWYLPNDGNHWNRLRSDASNLKRKGITAVWIPPAWKGASQNDVGYGAYDLYDLGEFNQKGTVRTKYGTRNQLQAAVTALKSNGIQVYGDVVMNHKGGADATEWVRAVEVNPSNRNQEVSGDYTIEAWTKFDFPGRGNTHSNFKWRWYHFDGVDWDQSRQLQNRIYKFRGKGWDWEVDTENGNYDYLMYADIDMDHPEVVNELRNWGVWYTNTLGLDGFRIDAVKHIKYSFTRDWLTHVRNTTGKNMFAVAEFWKNDIGAIENYLSKTNWNHSVFDVPLHYNLYNASRSGGNYDMRQIFNGTVVQRHPTHAVTFVDNHDSQPEEALESFVEEWFKPLAYALTLTRDQGYPSVFYGDYYGIPTHGVPAMKSKIDPILEARQKYAYGTQRDYLDHPDVIGWTREGDGVHADSGLATLMSDGPGGSKWMEVGKNNAGEVWYDITGNQTNTVTINKDGWGQFHVSGGSVSIYVQQ

SEQ ID NO: 24337 - protein, 483 aa, Bacillus licheniformis
HHNGTNGTMMQYFEWYLPNDGNHWNRLRSDASNLKDKGITAVWIPPAWKGASQNDVGYGAYDLYDLGEFNQKGTVRTKYGTRNQLQAAVTALKSNGIQVYGDVVMNHKGGADATEWVRAVEVNPSNRNQEVSGDYTIEAWTKFDFPGRGNTHSNFKWRWYHFDGVDWDQSRQLQNRIYKFRGKGWDWEVDTENGNYDYLMYADIDMDHPEVVNELRNWGVWYTNTLGLDGFRIDAVKHIKYSFTRDWLTHVRNTTGKNMFAVAEFWKNDIGAIENYLSKTNWNHSVFDVPLHYNLYNASRSGGNYDMRQIFNGTVVQRHPTHAVTFVDNHDSQPAEALESFVEEWFKPLAYALTLTRDQGYPSVFYGDYYGIPTHGVPAMKSKIDPILEARQKYAYGTQRDYLDHPDVIGWTREGDGVHADSGLATLMSDGPGGSKWMEVGKNNAGEVWYDITGNQTNTVTINKDGWGQFHVSGGSVSIYVQQ

SEQ ID NO: 24338 - protein, 483 aa, Bacillus licheniformis
HHNGTNGTMMQYFEWYLPNDGNHWNRLRSDASNLKDKGITAVWIPPAWKGASQNDVGYGAYDLYDLGEFNQKGTVRTKYGTRNQLQAAVTALKSNGIQVYGDVVMNHKGGADATEWVRAVEVNPSNRNQEVSGDYTIEAWTKFDFPGRGNTHSNFKWRWYHFDGVDWDQSRQLQNRIYKFRGKGWDWEVDTENGNYDYLMYADIDMDHPEVVNELRNWGVWYTNTLGLDGFRIDAVKHIKYSFTRDWLTHVRNTTGKNMFAVAEFWKNDIGAIENYLSKTNWNHSVFDVPLHYNLYNASRSGGNYDMRQIFNGTVVQQHPTHAVTFVDNHDSQPEEALESFVEEWFKPLAYALTLTRDQGYPSVFYGDYYGIPTHGVPAMKSKIDPILEARQKYAYGTQRDYLDHPDVIGWTREGDGVHADSGLATLMSDGPGGSKWMEVGKNNAGEVWYDITGNQTNTVTINKDGWGQFHVSGGSVSIYVQQ

SEQ ID NO: 24339 - protein, 483 aa, Bacillus licheniformis
HHNGTNGTMMQYFEWYLPNDGNHWNRLRSDASNLKDKGITAVWIPPAWKGASQNDVGYGAYDLYDLGEFNQKGTVRTKYGTRRQLQAAVTALKSNGIQVYGDVVMNHKGGADATEWVRAVEVNPSNRNQEVSGDYTIEAWTKFDFPGRGNTHSNFKWRWYHFDGVDWDQSRQLQNRIYKFRGKEWDWEVDTENGNYDYLMYADIDMDHPEVVNELRRWGVWYTDTLGLDGFRIDAVKHIKYSFTRDWLTHVRNTTGKNMFAVAEFWKNDIGAIENYLSKTNWNHSVFDVPLHYNLYNASRSGGNYDMRQIFNGTVVQRHPTHAVTFVDNHDSQPEEALESFVEEWFKPLAYALTLTRDQGYPSVFYGDYYGIPTHGVPAMKSKIDPILEARQKYAYGTQRDYLDHPDVIGWTREGDGVHADSGLATLMSDGPGGSKWMEVGKNNAGEVWYDITGNQTNTVTINKDGWGQFHVSGGSVSIYVQQ

SEQ ID NO: 24340 - protein, 483 aa, Bacillus licheniformis
HHNGTNGTMMQYFEWYLPNDGNHWNRLRSDASNLKDKGITAVWIPPAWKGASQNDVGYGAYDLYDLGEFNQKGTVRTKYGTRNQLQAAVTALKSNGIQVYGDVVMNHKGGADATEWVRAVEVNPMNRNQEVSGDYTIEAWTKFDFPGRGNTHSNFKWRWYHFDGVDWDQSRQLQNRIYKFRGKGWDWEVDTENGNYDYLMYADIDMDHPEVVNELRNWGVWYTNTLGLDGFRIDAVKHIKYSFTRDWLTHVRNTTGKNMFAVAEFWKNDIGAIENYLSKTNWNHSVFDVPLHYNLYNASRSGGNYDMRQIFNGTVVQRHPTHAVTFVDNHDSQPEEALESFVEEWFKPLAYALTLTRDQGYPSVFYGDYYGIPTHGVPAMKSKIDPILEARQKYAYGTQRDYLDHPDVIGWTREGDGVHADSGLATLMSDGPGGSKWMEVGKNNAGEVWYDITGNQTNTVTINKDGWGQFHVSGGSVSIYVQQ

SEQ ID NO: 24341 - protein, 483 aa, Bacillus licheniformis
HHNGTNGTMMQYFEWYLPNDGNHWNRLRSDASNLKDWGITAVWIPPAWKGASQNDVGYGAYDLYDLGEFNQKGTVRTKYGTRNQLQAAVTALKSNGIQVYGDVVMNHKGGADATEWVRAVEVNPSNRNQEVSGDYTIEAWTKFDFPGRGNTHSNFKWRWYHFDGVDWDQSRQLQNRIYKFRGKGWDWEVDTENGNYDYLMYADIDMDHPEVVNELRNWGVWYTNTLGLDGFRIDAVKHIKYSFTRDWLTHVRNTTGKNMFAVAEFWKNDIGAIENYLSKTNWNHSVFDVPLHYNLYNASRSGGNYDMRQIFNGTVVQRHPTHAVTFVDNHDSQPEEALESFVEEWFKPLAYALTLTRDQGYPSVFYGDYYGIPTHGVPAMKSKIDPILEARQKYAYGTQRDYLDHPDVIGWTREGDGVHADSGLATLMSDGPGGSKWMEVGKNNAGEVWYDITGNQTNTVTINKDGWGQFHVSGGSVSIYVQQ

SEQ ID NO: 24342 - protein, 483 aa, Bacillus licheniformis
HHNGTNGTMMQYFEWYLPNDGNHWNRLRSDASNLKDKGITAVWIPPAWKGASQNDVGYGAYDLYDLGEFNQKGTVRTKYGTRNQLQAAVTALKSNGIQVYGDVVMNHKGGADATEWVRAVEVNPSNRNQEVSGDYTIEAWTKFDFPGRGNTHSNFKWRWYHFDGVDWDQSRQLQNRIYKFRGKGWDWEVDTENGNYDYLMYADIDMDHPEVVNELRNWGVWYTNTLGLDGFRIDAVKHIKYSFTRDWLTHVRNTTGKNMFAVAEFWKNDIGAIENYLKKTNWNHSVFDVPLHYNLYNASRSGGNYDMRQIFNGTVVQRHPTHAVTFVDNHDSQPEEALESFVEEWFKPLAYALTLTRDQGYPSVFYGDYYGIPTHGVPAMKSKIDPILEARQKYAYGTQRDYLDHPDVIGWTREGDGVHADSGLATLMSDGPGGSKWMEVGKNNAGEVWYDITGNQTNTVTINKDGWGQFHVSGGSVSIYVQQ

SEQ ID NO: 24343 - protein, 483 aa, Bacillus licheniformis
HHNGTNGTMMQYFEWYLPNDGNHWNRLRSDASNLKDKGITAVWIPPAWKGASQNDVGYGAYDLYDLGEFNQKGTVRTKYGTRNQLQAAVTALKSNGIQVYGDVVMNHKGGADATEWVRAVEVNPSNRNQEVSGDYTIEAWTKFDFPGRGNTHSNFKWRWYHFDGVDWDQSRQLQNRIYKFRGKGWDWEVDTENGNYDYLMYADIDMDHPEVVNELRNWGVWYTNTLGLDGFRIDAVKHIKYSFTRDWLTHVRNTTGKNMFAVAEFWKNDIGAIENYLSKTNWNHSVFDVPLHYNLYNASRSGGNYDMRQIFNGTVVQRHPTHAVTFVDNHDSQPEEALESFVEEWFKPLAYALTLTRDQGYPSVFYGDYYGIPTHGVPAMKSKIDPILEARQKYAYGTQRDYLDHPDVIGWTREGDGVHADSGLATLMSDGPGGSKWMKVGKNNAGEVWYDITGNQTNTVTINKDGWGQFHVSGGSVSIYVQQ

SEQ ID NO: 24344 - protein, 483 aa, Bacillus licheniformis
HHNGTNGTMMQYFEWYLPNDGNHWNRLRSDASNLKDKGITAVWIPPAWKGASQNDVGYGAYDLYDLGEFNQKGTVRTKYGTRNQLQAAVTALKSNGIQVYGDVVMNHKGGADATEWVRAVEVNPSNRNQEVSGDYTIEAWTKFDFPGRGNTHSNFKWRWYHFDGVDWDQSRQLQNRIYKFRGKGWDWEVDTENGNYDYLMYADIDMDHPEVVNELRNWGVWYTNTLGLDGFRIDAVKHIKYSFTRDWLTHVRNTTGKNMFAVAEFWKNDIGAIENYLSKTNWNHSVFDVPLHYNLYNASRSGGNYDMRQIFNGTVVQRHPTHAVTFVDNHDSQPEEALESFVEEWFKPLAYALTLTRDQGYPSVFYGDYYGIPTHGVPAMKSKIDPILEARQKYAYGTQRDYLDHPDVIGWTREGDGVHADSGLATLMSDGPGGSKWMEVGKNNAGEVWYDITGNQTATVTINKDGWGQFHVSGGSVSIYVQQ

SEQ ID NO: 24345 - protein, 483 aa, Alicyclobacillus
HHNGTNGTMMQYFEWYLPNDGNHWNRLNSDASNLKSKGITAVWIPPAWKGASQNDVGYGAYDLYDLGEFNQKGTVRTKYGTRSQLQAAVTSLKNNGIQVYGDVVMNHKGGADATEMVRAVEVNPNNRNQEVTGEYTIEAWTRFDFPGRGNTHSSFKWRWYHFDGVDWDQSRRLNNRIYKFRGKAWDWEVDTENGNYDYLMYADIDMDHPEVVNELRNWGVWYTNTLGLDGFRIDAVKHIKYSFTRDWINHVRSATGKNMFAVAEFWKNDLGAIENYLQKTNWNHSVFDVPLHYNLYNASKSGGNYDMRNIFNGTVVQRHPSHAVTFVDNHDSQPEEALESFVEEWFKPLAYALTLTREQGYPSVFYGDYYGIPTHGVPAMRSKIDPILEARQKYAYGTQHDYLDNQDVIGWTREGNTSHPGSGLATVMSDGPGGEKRMYVGTAHAGQVFKDITGNRTDTVTINSDGNGTFHCNGGSVSIWVKQ

SEQ ID NO: 24346 - protein, 483 aa, Bacillus licheniformis
HHNGTNGTMMQYFEWYLPNDGNHWNRLRSDASNLKDKGITAVWIPPAWKGASQNDVGYGAYDLYDLGEFNQKGTVRTKYGTRNQLQAAVTALKSNGIQVYGDVVMNHKGGADATEWVRAVEVNPSNRNQEVSGDYTIEAWTKFDFPGRGNTHSNFKWRWYHFDGVDWDQSRQLQNRIYKFRGKGWDWEVDTENGNYDYLMYADIDMDHPEVVNELRMWGVWYTNTLGLDGFRIDAVKHIKYSFTRDWLTHVRNTTGKNMFAVAEFWKNDIGAIENYLSKTNWNHSVFDVPLHYNLYNASRSGGNYDMRQIFNGTVVQRHPTHAVTFVDNHDSQPEEALESFVEEWFKPLAYALTLTRDQGYPSVFYGDYYGIPTHGVPAMKSKIDPILEARQKYAYGTQRDYLDHPDVIGWTREGDGVHADSGLATLMSDGPGGSKWMEVGKNNAGEVWYDITGNQTNTVTINKDGWGQFHVSGGSVSIYVQQ

SEQ ID NO: 24347 - protein, 483 aa, Bacillus licheniformis
HHNGTNGTMMQYFEWYLPNDGNHWNRLRSDASNLKDKGITAVWIPPAWKGASQNDVGYGAYDLYDLGEFNQKGTVRTKYGTRNQLQAAVTALKSNGIQVYGDVVMNHKGGADATEWVRAVEVNPSNRNQEVSGDYTIEAWTKFDFPGRGNTHSNFKWRWYHFDGVDWDQSRQLQNRIYKFRGKGWDWEVDTENGNYDYLMYADIDMDHPEVVNELRNWGVWYTNTLGLDGFRIDAVKHIKYSFTRDWLTHVRNTTGKNMFAVAEFWKNDIGAIENYLGKTNWNHSVFDVPLHYNLYNASRSGGNYDMRQIFNGTVVQRHPTHAVTFVDNHDSQPEEALESFVEEWFKPLAYALTLTRDQGYPSVFYGDYYGIPTHGVPAMKSKIDPILEARQKYAYGTQRDYLDHPDVIGWTREGDGVHADSGLATLMSDGPGGSKWMEVGKNNAGEVWYDITGNQTNTVTINKDGWGQFHVSGGSVSIYVQQ

SEQ ID NO: 24348 - protein, 483 aa, Bacillus licheniformis
HHNGTNGTMMQYFEWYLPNDGNHWNRLRSDASNLKDKGITAVWIPPAWKGASQNDVGYGAYDLYDLGEFNQKGTVRTKYGTRNQLQAAVTALKSNGIQVYGDVVMNHKGGADATEWVRAVEVNPSNRNQEVSGDYTIEAWTKFDFPGRGNTHSNFKWRWYHFDGVDWDQSRQLQNRIYKFRGKGWDWEVDTENGNYDYLMYADIDMDHPEVVNELRNWGVWYTNTLGLDGFRIDAVKHIKYSFTRDWLTHVRNTTGKNMFAVAEFWKNDIGAIENYLSKTNWNHSVFDVPLHYNLYNASRSGGNYDMRQIFNGTVVQRHPTHAVTFVDNHDSQPKEALESFVEEWFKPLAYALTLTRDQGYPSVFYGDYYGIPTHGVPAMKSKIDPILEARQKYAYGTQRDYLDHPDVIGWTREGDGVHADSGLATLMSDGPGGSKWMEVGKNNAGEVWYDITGNQTNTVTINKDGWGQFHVSGGSVSIYVQQ

SEQ ID NO: 24349 - protein, 483 aa, Bacillus licheniformis
HHNGTNGTMMQYFEWYLPNDGNHWNRLRSDASNLKDKGITAVWIPPAWKGASQNDVGYGAYDLYDLGEFNQKGTVRTKYGTRNQLQAAVTALKSNGIQVYGDVVMNHKGGADATEWVRAVEVNPSNRNQEVSGDYTIEAWTKFDFPGRGNTHSNFKWRWYHFDGVDWDQSRQLQNRIYKFRGKGWDWEVDTENGNYDYLMYADIDMDHPEVVNELRNWGVWYTNTLGLDGFRIDAVKHIKYSFTRDWLTHVRNTTGKNMFAVAEFWKNDIGAIENYLSKTNWNHSVFDVPLHYNLYNASRSGGNYDMRQIFNGTVVQRHPTHAVTFVDNHDSQPEEALESFVNEWFKPLAYALTLTRDQGYPSVFYGDYYGIPTHGVPAMKSKIDPILEARQKYAYGTQRDYLDHPDVIGWTREGDGVHADSGLATLMSDGPGGSKWMEVGKNNAGEVWYDITGNQTNTVTINKDGWGQFHVSGGSVSIYVQQ

SEQ ID NO: 24350 - protein, 483 aa, Bacillus licheniformis
HHNGTNGTMMQYFEWYLPNDGNHWNRLRSDASNLKDKGITAVWIPPAWKGASQNDVGYGAYDLYDLGEFNQKGTVRTKYGTRNQLQAAVTALKSNGIQVYGDVVMNHKGGADATEWVRAVEVNPSNRNQEVSGDYTIEAWTKFDFPGRGNTHSNFKWRWYHFDGVDWDQSRQLQNRIYKFRGKGWDWEVDTENGNYDYLMYADIDMDHPEVVNELRNWGVWYTNTLGLDGFRIDAVKHIKYSFTRDWLTHVRNTTGKNMFAVAEFWKNDIGAIENYLHKTNWNHSVFDVPLHYNLYNASRSGGNYDMRQIFNGTVVQRHPTHAVTFVDNHDSQPEEALESFVEEWFKPLAYALTLTRDQGYPSVFYGDYYGIPTHGVPAMKSKIDPILEARQKYAYGTQRDYLDHPDVIGWTREGDGVHADSGLATLMSDGPGGSKWMEVGKNNAGEVWYDITGNQTNTVTINKDGWGQFHVSGGSVSIYVQQ

SEQ ID NO: 24351 - protein, 483 aa, Bacillus licheniformis
HHNGTNGTMMQYFEWYLPNDGNHWNRLRSDASNLKDKGITAVWIPPAWKGASQNDVGYGAYDLYDLGEFNQKGTVRTKYGTRNQLQAAVTALKSNGIQVYGDVVMNHKGGADATEWVRAVEVNPSNRNQEVSGDYTIEAWTKFDFPGRGNTHSNFKWRWYHFDGVDWDQSRQLQNRIYKFRGKGWDWEVDTENGNYDYLMYADIDMDHPEVVNELRNWGVWYTNTLGLDGFRIDAVKHIKYSFTRDWLTHVRNTTGKNMFAVAEFWKNDIGAIENYLSKTNWNHSVFDVPLHYNLYNASRSGGNYDMRQIFNGTVVQRHPTHAVTFVDNHDSQPEEALESFVEEWFKPLAYALTLTRLQGYPSVFYGDYYGIPTHGVPAMKSKIDPILEARQKYAYGTQRDYLDHPDVIGWTREGDGVHADSGLATLMSDGPGGSKWMEVGKNNAGEVWYDITGNQTNTVTINKDGWGQFHVSGGSVSIYVQQ

SEQ ID NO: 24352 - protein, 483 aa, Bacillus licheniformis
HHNGTNGTMMQYFEWYLPNDGNHWNRLRSDASNLSDKGITAVWIPPAWKGASQNDVGYGAYDLYDLGEFNQKGTVRTKYGTRNQLQAAVTALKSNGIQVYGDVVMNHKGGADATEWVRAVEVNPSNRNQEVSGDYTIEAWTKFDFPGRGNTHSNFKWRWYHFDGVDWDQSRQLQNRIYKFRGKGWDWEVDTENGNYDYLMYADIDMDHPEVVNELRNWGVWYTNTLGLDGFRIDAVKHIKYSFTRDWLTHVRNTTGKNMFAVAEFWKNDIGAIENYLSKTNWNHSVFDVPLHYNLYNASRSGGNYDMRQIFNGTVVQRHPTHAVTFVDNHDSQPEEALESFVEEWFKPLAYALTLTRDQGYPSVFYGDYYGIPTHGVPAMKSKIDPILEARQKYAYGTQRDYLDHPDVIGWTREGDGVHADSGLATLMSDGPGGSKWMEVGKNNAGEVWYDITGNQTNTVTINKDGWGQFHVSGGSVSIYVQQ

SEQ ID NO: 24353 - protein, 483 aa, Bacillus licheniformis
HHNGTNGTMMQYFEWYLPNDGNHWNRLRSDASNLKDKGITAVWIPPAWKGASQNDVGYGAYDLYDLGEFNQKGTVRTKYGTRNQLQAAVTALKSNGIQVYGDVVMNHKGGADATEWVRAVEVNPSNRNQEVSGDYTIEAWTKFDFPGRGNTHSNFKWRWYHFDGVDWDQSRQLQNRIYKFRGKGWDWEVDTENGNYDYLMYADIDMDHPEVVNELRNWGVWYTNTLGLDGFRIDAVKHIKYSFTRDWLTHVRNTTGKNMFAVAEFWKNDIGAIENYLSKTNWNHSVFDVPLHYNLYNASRSGGNYDMRQIFNGTVVQRHPTHAVTFVDNHDSQPEEALESFVEEWFKPLAYALTLTRGQGYPSVFYGDYYGIPTHGVPAMKSKIDPILEARQKYAYGTQRDYLDHPDVIGWTREGDGVHADSGLATLMSDGPGGSKWMEVGKNNAGEVWYDITGNQTNTVTINKDGWGQFHVSGGSVSIYVQQ

SEQ ID NO: 24354 - protein, 483 aa, Bacillus licheniformis
HHNGTNGTMMQYFEWYLPNDGNHWNRLRSDASNLKDKGITAVWIPPAWKGASQNDVGYGAYDLYDLGEFNQKGTVRTKYGTRNQLQAAVTALKSNGIQVYGDVVMNHKGGADATEWVRAVEVNPSNRNQEVSGDYTIEAWTKFDFPGRGNTHSNFKWRWYHFDGVDWDQSRQLQNRIYKFRGKGWDWEVDTENGNYDYLMYADIDMDHPEVVNELRNWGVWYTNTLGLDGFRIDAVKHIKYSFTRDWLTHVRNTTGKNMFAVAEFWKNDIGAIENYLSKTNWNHSVFDVPLHYNLYNASRSGGNYDMRQMFNGTVVQRHPTHAVTFVDNHDSQPEEALESFVEEWFKPLAYALTLTRDQGYPSVFYGDYYGIPTHGVPAMKSKIDPILEARQKYAYGTQRDYLDHPDVIGWTREGDGVHADSGLATLMSDGPGGSKWMEVGKNNAGEVWYDITGNQTNTVTINKDGWGQFHVSGGSVSIYVQQ

SEQ ID NO: 24355 - protein, 483 aa, Bacillus licheniformis
HHNGTNGTMMQYFEWYLPNDGNHWNRLRSDASNLKDKGITAVWIPPAWKGASQNDVGYGAYDLYDLGEFNQKGTVRTKYGTRNQLQAAVTALKSNGIQVYGDVVMNHKGGADATEWVRAVEVNPSNRNQEVSGDYTIEAWTKFDFPGRGNTHSNFKWRWYHFDGVDWDQSRQLQNRIYKFRGKGWDWEVDTENGNYDYLMYADIDMDHPEVVNELRNWGVWYTNTLGLDGFRIDAVKHIKYSFTRDWLTHVRNTTGKNMFAVAEFWKNDIGAIENYLSKTNWNHSVFDVPLHYNLYNASRSGGNYDMRQIFNGTVVQRHPTHAVTFVDNHDSQPEEALESFVEEWFKPLAYALTLTRDQGYPSVFYGDYYGIPTHGVPAMKSKIDPILEARQKYAYGTQRDYLDHPDVIGWTREGDGVHADSGLATFMSDGPGGSKWMEVGKNNAGEVWYDITGNQTNTVTINKDGWGQFHVSGGSVSIYVQQ

SEQ ID NO: 24356 - protein, 483 aa, Bacillus licheniformis
HHNGTNGTMMQYFEWYLPNDGNHWNRLRSDASNLTDKGITAVWIPPAWKGASQNDVGYGAYDLYDLGEFNQKGTVRTKYGTRNQLQAAVTALKSNGIQVYGDVVMNHKGGADATEWVRAVEVNPSNRNQEVSGDYTIEAWTKFDFPGRGNTHSNFKWRWYHFDGVDWDQSRQLQNRIYKFRGKGWDWEVDTENGNYDYLMYADIDMDHPEVVNELRNWGVWYTNTLGLDGFRIDAVKHIKYSFTRDWLTHVRNTTGKNMFAVAEFWKNDIGAIENYLSKTNWNHSVFDVPLHYNLYNASRSGGNYDMRQIFNGTVVQRHPTHAVTFVDNHDSQPEEALESFVEEWFKPLAYALTLTRDQGYPSVFYGDYYGIPTHGVPAMKSKIDPILEARQKYAYGTQRDYLDHPDVIGWTREGDGVHADSGLATLMSDGPGGSKWMEVGKNNAGEVWYDITGNQTNTVTINKDGWGQFHVSGGSVSIYVQQ

SEQ ID NO: 24357 - protein, 483 aa, Bacillus licheniformis
HHNGTNGTMMQYFEWYLPNDGNHWNRLRSDASNLKDKGITAVWIPPAWKGASQNDVGYGAYDLYDLGEFNQKGTVRTKYGTRNQLQAAVTALKSNGIQVYGDVVMNHKGGADATEWVRAVEVNPSNRNQEISGDYTIEAWTKFDFPGRGNTHSNFKWRWYHFDGVDWDQSRQLQNRIYKFRGKGWDWEVDTENGNYDYLMYADIDMDHPEVVNELRNWGVWYTNTLGLDGFRIDAVKHIKYSFTRDWLTHVRNTTGKNMFAVAEFWKNDIGAIENYLSKTNWNHSVFDVPLHYNLYNASRSGGNYDMRQIFNGTVVQRHPTHAVTFVDNHDSQPEEALESFVEEWFKPLAYALTLTRDQGYPSVFYGDYYGIPTHGQPAMKSKIDPILEARQKYAYGTQRDYLDHPDHIGWTREGDGVHADSGLATLMSDGPGGSKWMEVGKNNAGEVWYDITGNQTNTVTINKDGWGQFHVSGGSVSIYVQQ

SEQ ID NO: 24358 - protein, 483 aa, Bacillus licheniformis
HHNGTNGTMMQYFEWYLPNDGNHWNRLRSDASNLKDKGITAVWIPPAWKGASQNDVGYGAYDLYDLGEFNQKGTVRTKYGTRNQLQAAVTALKSNGIQVYGDVVMNHKGGADATEWVRAVEVNPSNRNQEVSGDYTIEAWTKFDFPGRGNTHSNFKWRWYHFDGVDWDQSRQLQNRIYKFRGKGWDWEVDTENGNYDYLMYADIDMDHPEVVNELRNWGTWYTNTLGLDGFRIDAVKHIKYSFTRDWLTHVRNTTGKNMFAVAEFWKNDIGAIENYLSKTNWNHSVFDVPLHYNLYNASRSGGNYDMRQIFNGTVVQRHPTHAVTFVDNHDSQPEEALESFVEEWFKPLAYALTLTRDQGYPSVFYGDYYGIPTHGVPAMKSKIDPILEARQKYAYGTQRDYLDHPDVIGWTREGDGVHADSGLATLMSDGPGGSKWMEVGKNNAGEVWYDITGNQTNTVTINKDGWGQFHVSGGSVSIYVQQ

SEQ ID NO: 24359 - protein, 483 aa, Bacillus licheniformis
HHNGTNGTMMQYFEWYLPNDGNHWNRLRSDASNLKDKGITAVWIPPAWKGASQNDVGYGAYDLYDLGEFNQKGTVRTKYGTRNQLQAAVTALKSNGIQVYGDVVMNHKGGADATEWVRAVEVNPSNRNQEVSGDYTIEAWTKFDFPGRGNTHSNFKWRWYHFDGVDWDQSRQLQNRIYKFRGKGWDWEVDTENGNYDYLMYADIDMDHPEVVNELRNWGVWYTNTLGLDGFRIDAVKHIKYSFTRDWLTHVRNTTGKNMFAVAEFWKNDIGAIENYLSKTNWNHSVFDVPLHYNLYNASRSGGNYDMRQIFNGTVVQRHPTHAVTFVDNHDSQPEEALESFVEEWFKPLAYALTLTRDQGYPSVFYGDYYGIPTHGVPAMKSKIDPILEARQKYAYGTQRDYLDHPDVIGWTREGDGVHADSGLATLMSDGPGGSKWMEVGKNNAGEVWYDITGNQTDTVTINKDGWGQFHVSGGSVSIYVQQ

SEQ ID NO: 24360 - protein, 483 aa, Bacillus licheniformis
HHNGTNGTMMQYFEWYLPNDGNHWNRLRSDASNLKDKGITAVWIPPAWKGASQNDVGYGAYDLYDLGEFNQKGTVRTKYGTRNQLQAAVTALKSNGIQVYGDVVMNHKGGADATEWVRAVEVNPSNRNQEVSGDYTIEAWTKFDFPGRGNTHSNFKWRWYHFDGVDWDQSRQLQNRIYKFRGKGWDWEVDTENGNYDYLMYADIDMDHPEVVNELRNWGVWYTNTLGLDGFRIDAVKHIKYSFTRDWLTHVRNTTGKNMFAVAEFWKNDIGAVENYLSKTNWNHSVFDVPLHYNLYNASRSGGNYDMRQIFNGTVVQRHPTHAVTFVDNHDSQPEEALESFVEEWFKPLAYALTLTRDQGYPSVFYGDYYGIPTHGVPAMKSKIDPILEARQKYAYGTQRDYLDHPDVIGWTREGDGVHADSGLATLMSDGPGGSKWMEVGKNNAGEVWYDITGNQTNTVTINKDGWGQFHVSGGSVSIYVQQ

SEQ ID NO: 24361 - protein, 483 aa, Bacillus licheniformis
HHNGTNGTMMQYFEWYLPNDGNHWNRLRSDASNLKDKGITAVWIPPAWKGASQNDVGYGAYDLYDLGEFNQKGTVRTKYGTRNQLQAAVTALKSNGIQVYGDVVMNHKGGADATEWVRAVEVNPSNRNQEVSGDYTIEAWTKFDFPGRGNTHSNFKWRWYHFDGVDWDQSRQLQNRIYKFRGKGWDWEVDTENGNYDYLMYADIDMDHPEVVNELRNWGVWYTNTLGLDGFRIDAVKHIKYSFTRDWLTHVRNTTGKNMFAVAEFWKNDIGAIENYLSKTNWNHSVFDVPLHYNLYNASRSGGNYDMRQIFNGTVVQRHPTHAVTFVDNHDSQPEEALESFVEEWFKPLAYALTLTRDQGYPSVFYGDYYGIPTHGVPAMKSKIDPILEARQKYAYGTQRDYLDHPDVIGWTREGDGVHADSGLATLMSDGPGGSKWMEVGKNNAGEVWYDITGNQTNTVTINKDGWGQFHVSGGSVSITVQQ

SEQ ID NO: 24362 - protein, 483 aa, Bacillus licheniformis
HHNGTNGTMMQYFEWYLPNDGNHWNRLRSDASNLKDKGITAVWIPPAWKGASQNDVGYGAYDLYDLGEFNQKGTVRTKYGTRNQLQAAVTALKSNGIQVYGDVVMNHKGGADATEWVRAVEVNPSNRNQEVSGDYTIEAWTKFDFPGRGNTHSNFKWRWYHFDGVDWDQSRQLQNRIYKFRGKGWDWEVDTENGNYDYLMYADIDMDHPEVVNELRNWGSWYTNTLGLDGFRIDAVKHIKYSFTRDWLTHVRNTTGKNMFAVAEFWKNDIGAIENYLSKTNWNHSVFDVPLHYNLYNASRSGGNYDMRQIFNGTVVQRHPTHAVTFVDNHDSQPEEALESFVEEWFKPLAYALTLTRDQGYPSVFYGDYYGIPTHGVPAMKSKIDPILEARQKYAYGTQRDYLDHPDVIGWTREGDGVHADSGLATLMSDGPGGSKWMEVGKNNAGEVWYDITGNQTNTVTINKDGWGQFHVSGGSVSIYVQQ

SEQ ID NO: 24363 - protein, 483 aa, Bacillus licheniformis
HHNGTNGTMMQYFEWYLPNDGNHWNRLRSDASNLKDKGITAVWIPPAWKGASQNDVGYGAYDLYDLGEFNQKGTVRTKYGTRNQLQAAVTALKSNGIQVYGDVVMNHKGGADATEWVRAVEVNPSNRNQEVSGDYTIEAWTKFDFPGRGNTHSNFKWRWYHFDGVDWDQSRQLQNRIYKFRGKGWDWEVDTENGNYDYLMYADIDMDHPEVVNELRNWGVWYTNTLGLDGFRIDAVKHIKYSFTRDWLTHVRNTTGKNMFAVAEFWKNDIGAIENYLSKTNWNHSVFDVPLHYNLYNASRSGGNYDMRQIFNGTVVQRHPTHAVTFVDNHDSQPEEALESFVEEWFKPLAYALTLTRDQGYPSVFYGDYYGIPTHGVPAMKSKIDPILEARQKYAYGTQRDYLDHPDVIGWTREGDGVHADSGLATLMSDGPGGSKWMEVGKNVAGEVWYDITGNQTNTVTINKDGWGQFHVSGGSVSIYVQQ

SEQ ID NO: 24364 - protein, 483 aa, Bacillus licheniformis
HHNGTNGTMMQYFEWYLPNDGNHWNRLRHDASNLKDKGITAVWIPPAWKGASQNDVGYGAYDLYDLGEFNQKGTVRTKYGTRNQLQAAVTALKSNGIQVYGDVVMNHKGGADATEWVRAVEVNPSNRNQEVSGDYTIEAWTKFDFPGRGNTHSNFKWRWYHFDGVDWDQSRQLQNRIYKFRGKGWDWEVDTENGNYDYLMYADIDMDHPEVVNELRNWGVWYTNTLGLDGFRIDAVKHIKYSFTRDWLTHVRNTTGKNMFAVAEFWKNDIGAIENYLSKTNWNHSVFDVPLHYNLYNASRSGGNYDMRQIFNGTVVQRHPTHAVTFVDNHDSQPEEALESFVEEWFKPLAYALTLTRDQGYPSVFYGDYYGIPTHGVPAMKSKIDPILEARQKYAYGTQRDYLDHPDVIGWTREGDGVHADSGLATLMSDGPGGSKWMEVGKNNAGEVWYDITGNQTNTVTINKDGWGQFHVSGGSVSIYVQQ

SEQ ID NO: 24365 - protein, 483 aa, Bacillus licheniformis
HHNGTNGTMMQYFEWYLPNDGNHWNRLRSDASNLKDKGITAVWIPPAWKGASQNDVGYGAYDLYDLGEFNQKGTVRTKYGTRNQLQAAVTALKSNGIQVYGDVVMNHKGGADATEWVRAVEVNPSNRNQEVSGDYTIEAWTKFDFPGRGNTHSNFKWRWYHFDGVDWDQSRQLQNRIYKFRGKGWDWEVDTENGNYDYLMYADIDMDHPEVVNELRNWGVWYTNTLGLDGFRIDAVKHIKYSFTRDWLTHVRNTTGKNMFAVAEFWKNDIGAIENYLSKTNWNHSVFDVPLHYNLYNASRSGGNYDMRQIFNGTVVQRHPTHAVTFVDNHDSQPVEALESFVEEWFKPLAYALTLTRDQGYPSVFYGDYYGIPTHGVPAMKSKIDPILEARQKYAYGTQRDYLDHPDVIGWTREGDGVHADSGLATLMSDGPGGSKWMEVGKNNAGEVWYDITGNQTNTVTINKDGWGQFHVSGGSVSIYVQQ

SEQ ID NO: 24366 - protein, 483 aa, Bacillus licheniformis
HHNGTNGTMMQYFEWYLPNDGNHWNRLRSDASNLKDKGITAVWIPPAWKGASQNDVGYGAYDLYDLGEFNQKGTVRTKYGTRNQLQAAVTALKSNGIQVYGDVVMNHKGGADATEWVRAVEVNPSNRNQEVSGDYTIEAWTKFDFPGRGNTHSNFKWRWYHFDGVDWDQSRQLQNRIYKFRGKGWDWEVDTENGNYDYLMYADIDMDHPEVVNELRNWGVWYTNTLGLDGFRIDAVKHIKYSFTRDWLTHVRNTTGKNMFAVAEFWKNDSGAIENYLSKTNWNHSVFDVPLHYNLYNASRSGGNYDMRQIFNGTVVQRHPTHAVTFVDNHDSQPEEALESFVEEWFKPLAYALTLTRDQGYPSVFYGDYYGIPTHGVPAMKSKIDPILEARQKYAYGTQRDYLDHPDVIGWTREGDGVHADSGLATLMSDGPGGSKWMEVGKNNAGEVWYDITGNQTNTVTINKDGWGQFHVSGGSVSIYVQQ

SEQ ID NO: 24367 - protein, 483 aa, Bacillus licheniformis
HHNGTNGTMMQYFEWYLPNDGNHWNRLRSDASNLKDKGITAVWIPPAWKGASQNDVGYGAYDLYDLGEFNQKGTVRTKYGTRNQLQAAVTALKSNGIQVYGDVVMNHKGGADATEWVRAVEVNPSNRNQEVSGDYTIEAWTKFDFPGRGNTHSNFKWRWYHFDGVDWDQSRQYQNRIYKFRGKGWDWEVDTENGNYDYLMYADIDMDHPEVVNELRNWGVWYTNTLGLDGFRIDAVKHIKYSFTRDWLTHVRNTTGKNMFAVAEFWKNDIGAIENYLSKTNWNHSVFDVPLHYNLYNASRSGGNYDMRQIFNGTVVQRHPTHAVTFVDNHDSQPEEALESFVEEWFKPLAYALTLTRDQGYPSVFYGDYYGIPTHGVPAMKSKIDPILEARQKYAYGTQRDYLDHPDVIGWTREGDGVHADSGLATLMSDGPGGSKWMEVGKNNAGEVWYDITGNQTNTVTINKDGWGQFHVSGGSVSIYVQQ

SEQ ID NO: 24368 - protein, 483 aa, Bacillus licheniformis
HHNGTNGTMMQYFEWYLPNDGNHWNRLRSDASNLKDKGITAVWIPPAWKGASQNDVGYGAYDLYDLGEFNQKGTVRTKYGTRNQLQAAVTALKSNGIQVYGDVVMNHKGGADATEWVRAVEVNPSNRNQEVSGDYTIEAWTKFDFPGRGNTHSNFKWRWYHFDGVDWDQSRQLQNRIYKFRGKGWDWEVDTENGNYDYLMYADIDMDHPEVVNELRNWGVWYTNTLGLDGFRIDAVKHIKYSFTRDWLTHVRNTTGKNMFAVAEFWKNDIGAIENYLSKTNWNHSVFDVPLHYNLYNASRSGGNYDMRQIFNGTVVQSHPTHAVTFVDNHDSQPEEALESFVEEWFKPLAYALTLTRDQGYPSVFYGDYYGIPTHGVPAMKSKIDPILEARQKYAYGTQRDYLDHPDVIGWTREGDGVHADSGLATLMSDGPGGSKWMEVGKNNAGEVWYDITGNQTNTVTINKDGWGQFHVSGGSVSIYVQQ

SEQ ID NO: 24369 - protein, 483 aa, Bacillus licheniformis
HHNGTNGTMMQYFEWYLPNDGNHWNRLRSDASNLKDKGITAVWIPPAWKGASQNDVGYGAYDLYDLGEFNQKGTVRTKYGTRNQLQAAVTALKSNGIQVYGDVVMNHKGGADATEWVRAVEVNPSNRNQECSGDYTIEAWTKFDFPGRGNTHSNFKWRWYHFDGVDWDQSRQLQNRIYKFRGKGWDWEVDTENGNYDYLMYADIDMDHPEVVNELRNWGVWYTNTLGLDGFRIDAVKHIKYSFTRDWLTHVRNTTGKNMFAVAEFWKNDIGAIENYLSKTNWNHSVFDVPLHYNLYNASRSGGNYDMRQIFNGTVVQRHPTHAVTFVDNHDSQPEEALESFVEEWFKPLAYALTLTRDQGYPSVFYGDYYGIPTHGVPAMKSKIDPILEARQKYAYGTQRDYLDHPDVIGWTREGDGVHADSGLATLMSDGPGGSKWMEVGKNNAGEVWYDITGNQTNTVTINKDGWGQFHVSGGSVSIYVQQ

SEQ ID NO: 24370 - protein, 483 aa, Bacillus licheniformis
HHNGTNGTMMQYFEWYLPNDGNHWNRLRSDASNLKDKGITACWIPPAWKGASQNDVGYGAYDLYDLGEFNQKGTVRTKYGTRNQLQAAVTALKSNGIQVYGDVVMNHKGGADATEWVRAVEVNPSNRNQEVSGDYTIEAWTKFDFPGRGNTHSNFKWRWYHFDGVDWDQSRQLQNRIYKFRGKGWDWEVDTENGNYDYLMYADIDMDHPEVVNELRNWGVWYTNTLGLDGFRIDAVKHIKYSFTRDWLTHVRNTTGKNMFAVAEFWKNDIGAIENYLSKTNWNHSVFDVPLHYNLYNASRSGGNYDMRQIFNGTVVQRHPTHAVTFVDNHDSQPEEALESFVEEWFKPLAYALTLTRDQGYPSVFYGDYYGIPTHGVPAMKSKIDPILEARQKYAYGTQRDYLDHPDVIGWTREGDGVHADSGLATLMSDGPGGSKWMEVGKNNAGEVWYDITGNQTNTVTINKDGWGQFHVSGGSVSIYVQQ

SEQ ID NO: 24371 - protein, 483 aa, Bacillus licheniformis
HHNGTNGTMMQYFEWYLPNDGNHWNRLRSDASNLKDKGITAVWIPPAWKGASQNDVGYGAYDLYDLGEFNQKGTVRTKYGTRNQLQAAVTALKSNGIQVYGDVVMNHKGGADATEWVEAVEVNPSNRNQEVSGDYTIEAWTKFDFPGRGNTHSNFKWRWYHFDGVDWDQSRQLQNRIYKFRGKGWDWEVDTENGNYDYLMYADIDMDHPEVVNELRNWGVWYTNTLGLDGFRIDAVKHIKYSFTRDWLTHVRNTTGKNMFAVAEFWKNDIGAIENYLSKTNWNHSVFDVPLHYNLYNASRSGGNYDMRQIFNGTVVQRHPTHAVTFVDNHDSQPEEALESFVEEWFKPLAYALTLTRDQGYPSVFYGDYYGIPTHGVPAMKSKIDPILEARQKYAYGTQRDYLDHPDVIGWTREGDGVHADSGLATLMSDGPGGSKWMEVGKNNAGEVWYDITGNQTNTVTINKDGWGQFHVSGGSVSIYVQQ

SEQ ID NO: 24372 - protein, 483 aa, Bacillus subtilis
HHNGTNGTMMQYFEWYLPNDGNHWNRLRSDASNLKDKGITAVWIPPAWKGASQNDVGYGAYDLYDLGEFNQKGTVRTKYGTRNQLQAAVTALKSNGIQVYGDVVMNHKGGADATEWVRAVEVNPSNRNQEVSGDYTIEAWTKFDFPGRGNTHSNFKWRWYHFDGVDWDQSRQLQNRIYKFRGKGWDWEVDTENGNYDYLMYADIDMDHPEVVNELRNWGVWYTNTLGLDGFRIDAVKHIKYSFTRDWLTHVRNTTGKNMFAVAEFWKNDIGAIENYLSKTNWNHSVFDVPLHYNLYNASRSGGNYDMRQIFNGTVVQRHPTHAVTFVDNHDSQPEEALESFVEEWFKPLAYALTLTRDQGYPSVFYGDYYGIPTHGVPAMKSKIDPILEARQKYAYGTQRDYLDHPDVIGWTREGDGVHADSGLATLMSDGPGGSKWMEVGKNNAGEVWYDITGNQTNTVTINKDGWGQFHVSEGSVSIYVQR

SEQ ID NO: 24373 - protein, 483 aa, Bacillus licheniformis
HHNGTNGTMMQYFEWYLPNDGNHWNRLRSDASNLKDKGITAVWIPPAWKGASQNDVGYGAYDLYDLGEFNQKGTVRTKYGTRNQLQAAVTALKSNGIQVYGDVVMNHKGGADATEWVRAVEVNPHNRNQEVSGDYTIEAWTKFDFPGRGNTHSNFKWRWYHFDGVDWDQSRQLQNRIYKFRGKGWDWEVDTENGNYDYLMYADIDMDHPEVVNELRNWGVWYTNTLGLDGFRIDAVKHIKYSFTRDWLTHVRNTTGKNMFAVAEFWKNDIGAIENYLSKTNWNHSVFDVPLHYNLYNASRSGGNYDMRQIFNGTVVQRHPTHAVTFVDNHDSQPEEALESFVEEWFKPLAYALTLTRDQGYPSVFYGDYYGIPTHGVPAMKSKIDPILEARQKYAYGTQRDYLDHPDVIGWTREGDGVHADSGLATLMSDGPGGSKWMEVGKNNAGEVWYDITGNQTNTVTINKDGWGQFHVSGGSVSIYVQQ

SEQ ID NO: 24374 - protein, 483 aa, Bacillus licheniformis
HHNGTNGTMMQYFEWYLPNDGNHWNRLRKDASNLKDKGITAVWIPPAWKGASQNDVGYGAYDLYDLGEFNQKGTVRTKYGTRNQLQAAVTALKSNGIQVYGDVVMNHKGGADATEWVRAVEVNPSNRNQEVSGDYTIEAWTKFDFPGRGNTHSNFKWRWYHFDGVDWDQSRQLQNRIYKFRGKGWDWEVDTENGNYDYLMYADIDMDHPEVVNELRNWGVWYTNTLGLDGFRIDAVKHIKYSFTRDWLTHVRNTTGKNMFAVAEFWKNDIGAIENYLSKTNWNHSVFDVPLHYNLYNASRSGGNYDMRQIFNGTVVQRHPTHAVTFVDNHDSQPEEALESFVEEWFKPLAYALTLTRDQGYPSVFYGDYYGIPTHGVPAMKSKIDPILEARQKYAYGTQRDYLDHPDVIGWTREGDGVHADSGLATLMSDGPGGSKWMEVGKNNAGEVWYDITGNQTNTVTINKDGWGQFHVSGGSVSIYVQQ

SEQ ID NO: 24375 - protein, 483 aa, Bacillus licheniformis
HHNGTNGTMMQYFEWYLPNDGNHWNRLRFDASNLKDKGITAVWIPPAWKGASQNDVGYGAYDLYDLGEFNQKGTVRTKYGTRNQLQAAVTALKSNGIQVYGDVVMNHKGGADATEWVRAVEVNPSNRNQEVSGDYTIEAWTKFDFPGRGNTHSNFKWRWYHFDGVDWDQSRQLQNRIYKFRGKGWDWEVDTENGNYDYLMYADIDMDHPEVVNELRNWGVWYTNTLGLDGFRIDAVKHIKYSFTRDWLTHVRNTTGKNMFAVAEFWKNDIGAIENYLSKTNWNHSVFDVPLHYNLYNASRSGGNYDMRQIFNGTVVQRHPTHAVTFVDNHDSQPEEALESFVEEWFKPLAYALTLTRDQGYPSVFYGDYYGIPTHGVPAMKSKIDPILEARQKYAYGTQRDYLDHPDVIGWTREGDGVHADSGLATLMSDGPGGSKWMEVGKNNAGEVWYDITGNQTNTVTINKDGWGQFHVSGGSVSIYVQQ

SEQ ID NO: 24376 - protein, 483 aa, Bacillus licheniformis
HHNGTNGTMMQYFEWYLPNDGNHWNRLRSDASNLKDKGITAVWIPPAWKGASQNDVGYGAYDLYDLGEFNQKGTVRTKYGTRNQLQAAVTALKSNGIQVYGDVVMNHKGGADATEWVRAVEVNPSNRNQEVSGDYTIEAWTKFDFPGRGNTHSNFKWRWYHFDGVDWDQSRQLQNRIYKFRGKGWDWEVDTENGNYDYLMYADIDMDHPEVVNELRNWGVWYTNTLGLDGFRIDAVKHIKYSFTRDWLTHVRNTTGKNMFAVAEFWKNDIGAIENYLSKTNWNHSVFDVPLHYNLYNASRSGGNYDMRQIFNGTVVQRHPTHAVTFVDNHDSQPEEALESFVEEWFKPLAYALTLTRDQGYPSVFYGDYYGIPTHGVPAMKSKIDPILEARQKYAYGTQRDYLDHPDVIGWTREGDGVHADSGLATLMSDGPGGSKWMEVGKNNAGEVWYDITGNQTSTVTINKDGWGQFHVSGGSVSIYVQQ

SEQ ID NO: 24377 - protein, 483 aa, Bacillus licheniformis
HHNGTNGTMMQYFEWYLPNDGNHWNRLRSDASNLKDKGITAVWIPPAWKGASQNDVGYGAYDLYDLGEFNQKGTVRTKYGTRNQLQAAVTALKSNGIQVYGDVVMNHKGGADATEWVRAVEVNPSNRNQEVSGDYTIEAWTKFDFPGRGNTHSNFKWRWYHFDGVDWDQSRQLQNRIYKFRGKGWDWEVDTENGNYDYLMYADIDMDHPEVVNELRNWGVWYTNTLGLDGFRIDAVKHIKYSFTRDWLTHVRNTTGKNMFAVAEFWKNDIGAIENYLSKTNWNHSVFDVPLHYNLYNASRSGGNYDMRQIFNGTVVQRHPTHAVTFVDNHDSQPEEALESFVEEWFKPLAYALTLTRDQGYPSVFYGDYYGIPTHGVPAMKSKIDPILEARQKYAYGTQRDYLDHPDVIGWTREGDGVHADSGLATLMSDGPGGSKWMEVGKNNAGEVWYDITGNQTRTVTINKDGWGQFHVSGGSVSIYVQQ

SEQ ID NO: 24378 - protein, 483 aa, Bacillus licheniformis
HHNGTNGTMMQYFEWYLPNDGNHWNRLRSDASNLKHKGITAVWIPPAWKGASQNDVGYGAYDLYDLGEFNQKGTVRTKYGTRNQLQAAVTALKSNGIQVYGDVVMNHKGGADATEWVRAVEVNPSNRNQEVSGDYTIEAWTKFDFPGRGNTHSNFKWRWYHFDGVDWDQSRQLQNRIYKFRGKGWDWEVDTENGNYDYLMYADIDMDHPEVVNELRNWGVWYTNTLGLDGFRIDAVKHIKYSFTRDWLTHVRNTTGKNMFAVAEFWKNDIGAIENYLSKTNWNHSVFDVPLHYNLYNASRSGGNYDMRQIFNGTVVQRHPTHAVTFVDNHDSQPEEALESFVEEWFKPLAYALTLTRDQGYPSVFYGDYYGIPTHGVPAMKSKIDPILEARQKYAYGTQRDYLDHPDVIGWTREGDGVHADSGLATLMSDGPGGSKWMEVGKNNAGEVWYDITGNQTNTVTINKDGWGQFHVSGGSVSIYVQQ

SEQ ID NO: 24379 - protein, 483 aa, Bacillus licheniformis
HHNGTNGTMMQYFEWYLPNDGNHWNRLRSDASNLKDKGITAVWIPPAWKGASQNDVGYGAYDLYDLGEFNQKGTVRTKYGTRNQLQAAVTALKSNGIQVYGDVVMNHKGGADATEWVRAVEVNPSNRNQEVSGDYTIEAWTKFDFPGRGNTHSNFKWRWYHFDGVDWDQSRQLQNRIYKFRGKGWDWEVDTENGNYDYLMYADIDMDHPEVVNELRNWGVWYTNTLGLDGFRIDAVKHIKYSFTRDWLTHVRNTTGKNMFAVAEFWKNDIGAIENYLSKTNWNHSVFDVPLHYNLYNASRSGGNYDMRQIFNGTVVQRHPTHAVTFVDNHDSQPEEALESFVEEWFKPLAYALTLTRDQGYPSVFYGDYYGIPTHGVPAMKSKIDPILEARQKYAYGTQRDYLDHPDVIGWTREGDGVHADSGLATLMSDGPGGSKWMEVGKNNAGRVWYDITGNQTNTVTINKDGWGQFHVSGGSVSIYVQQ

SEQ ID NO: 24380 - protein, 483 aa, Bacillus licheniformis
HHNGTNGTMMQYFEWYLPNDGNHWNRLRSDASNLKDKGITAVWIPPAWKGASQNDVGYGAYDLYDLGEFNQKGTVRTKYGTRNQLQAAVTALKSNGIQVYGDVVMNHKGGADATEWVRAVEVNPSNRNQEVSGDYTIEAWTKFDFPGRGNTHSNFKWRWYHFDGVDWDQSRQLQNRIYKFRGKGWDWEVDTENGNYDYLMYADIDMDHPEVVNELRNWGVWYTNTLGLDGFRIDAVKHIKYSFTRDWLTHVRNTTGKNMFAVAEFWKNDIGAIENYLSKTNWNHSVFDVPLHYNLYNASRSGGNYDMRYIFNGTVVQRHPTHAVTFVDNHDSQPEEALESFVEEWFKPLAYALTLTRDQGYPSVFYGDYYGIPTHGVPAMKSKIDPILEARQKYAYGTQRDYLDHPDVIGWTREGDGVHADSGLATLMSDGPGGSKWMEVGKNNAGEVWYDITGNQTNTVTINKDGWGQFHVSGGSVSIYVQQ

SEQ ID NO: 24381 - protein, 483 aa, Bacillus licheniformis
HHNGTNGTMMQYFEWYLPNDGNHWNRLRSDASNLKDKGITAVWIPPAWKGASQNDVGYGAYDLYDLGEFNQKGTVRTKYGTRNQLQAAVTALKSNGIQVYGDVVMNHKGGADATEWVRAVEVNPSNRNQEVSGDYTIEAWTKFDFPGRGNTHSNFKWRWYHFDGVDWDQSRQLQNRIYKFRGKGWDWEVDTENGNYDYLMYADIDMDHPEVVNELRNWGVWYTNTLGLDGFRIDAVKHIKYSFTRDWLTHVRNTTGKNMFAVAEFWKNDIGAIENYLSKTNWNHSVFDVPLHYNLYNASRSGGNYDMRQIFNGTVVQHHPTHAVTFVDNHDSQPEEALESFVEEWFKPLAYALTLTRDQGYPSVFYGDYYGIPTHGVPAMKSKIDPILEARQKYAYGTQRDYLDHPDVIGWTREGDGVHADSGLATLMSDGPGGSKWMEVGKNNAGEVWYDITGNQTNTVTINKDGWGQFHVSGGSVSIYVQQ

SEQ ID NO: 24382 - protein, 483 aa, Bacillus licheniformis
HHNGTNGTMMQYFEWYLPNDGNHWNRLRSDASNLKDKGITAVWIPPAWKGASQNDVGYGAYDLYDLGEFNQKGTVRTKYGTRNQLQAAVTALKSNGIQVYGDVVMNHKGGADATEWVRAVEVNPSNRNQEVSGDYTIEAWTKFDFPGRGNTHSNFKWRWYHFDGVDWDQSRQLQNRIYKFRGKGWDWEVDTENGNYDYLMYADIDMDHPEVVNELRNWGVWYTNTLGLDGFRIDAVKHIKYSFTRDWLTHVRNTTGKNMFAVAEFWKNDIGAIENYLSKTNWNHSVFDVPLHYNLYNASRSGGNYDMRQIFNGTVVQRHPTHAVTFVDNHDSQPTEALESFVEEWFKPLAYALTLTRDQGYPSVFYGDYYGIPTHGVPAMKSKIDPILEARQKYAYGTQRDYLDHPDVIGWTREGDGVHADSGLATLMSDGPGGSKWMEVGKNNAGEVWYDITGNQTNTVTINKDGWGQFHVSGGSVSIYVQQ

SEQ ID NO: 24383 - protein, 483 aa, Bacillus licheniformis
HHNGTNGTMMQYFEWYLPNDGNHWNRLRSDASNLKDKGITAVWIPPAWKGASQNDVGYGAYDLYDLGEFNQKGTVRTKYGTRNQLQAAVTALKSNGIQVYGDVVMNHKGGADATEWVRAVEVNPSNRNQEVSGDYTIEAWTKFDFPGRGNTHSNFKWRWYHFDGVDWDQSRQLQNRIYKFRGKGWDWEVDTENGNYDYLMYADIDMDHPEVVNELRFWGVWYTNTLGLDGFRIDAVKHIKYSFTRDWLTHVRNTTGKNMFAVAEFWKNDIGAIENYLSKTNWNHSVFDVPLHYNLYNASRSGGNYDMRQIFNGTVVQRHPTHAVTFVDNHDSQPEEALESFVEEWFKPLAYALTLTRDQGYPSVFYGDYYGIPTHGVPAMKSKIDPILEARQKYAYGTQRDYLDHPDVIGWTREGDGVHADSGLATLMSDGPGGSKWMEVGKNNAGEVWYDITGNQTNTVTINKDGWGQFHVSGGSVSIYVQQ

SEQ ID NO: 24384 - protein, 483 aa, Bacillus licheniformis
HHNGTNGTMMQYFEWYLPNDGNHWNRLRSDASNLNDKGITAVWIPPAWKGASQNDVGYGAYDLYDLGEFNQKGTVRTKYGTRNQLQAAVTALKSNGIQVYGDVVMNHKGGADATEWVRAVEVNPSNRNQEVSGDYTIEAWTKFDFPGRGNTHSNFKWRWYHFDGVDWDQSRQLQNRIYKFRGKGWDWEVDTENGNYDYLMYADIDMDHPEVVNELRNWGVWYTNTLGLDGFRIDAVKHIKYSFTRDWLTHVRNTTGKNMFAVAEFWKNDIGAIENYLSKTNWNHSVFDVPLHYNLYNASRSGGNYDMRQIFNGTVVQRHPTHAVTFVDNHDSQPEEALESFVEEWFKPLAYALTLTRDQGYPSVFYGDYYGIPTHGVPAMKSKIDPILEARQKYAYGTQRDYLDHPDVIGWTREGDGVHADSGLATLMSDGPGGSKWMEVGKNNAGEVWYDITGNQTNTVTINKDGWGQFHVSGGSVSIYVQQ

SEQ ID NO: 24385 - protein, 483 aa, Bacillus licheniformis
HHNGTNGTMMQYFEWYLPNDGNHWNRLRSDASNLKDKGITAVWIPPAWKGASQNDVGYGAYDLYDLGEFNQKGTVRTKYGTRNQLQAAVTALKSNGIQVYGDVVMNHKGGADATEWVRAVEVNPSNRNQEVSGDYTIEAWTKFDFPGRGNTHSNFKWRWYHFDGVDWDQSRQLQNRIYKFRGKGWDWEVDTENGNYDYLMYADIDMDHPEVVNELRNWGVWYTNTLGLDGFRIDAVKHIKYSFTRDWLTHVRNTTGKNMFAVAEFWKNDIGAIENYLSKTNWNHSVFDVPLHYNLYNASRSGGNYDMRQIFNGTVVQRHPTHAVTFVDNHDSQPEEALESFVEEWFKPLAYALTLTRDQGYPSVFYGDYYGIPTHGVPAMKSKIDPILEARQKYAYGTQRDYLDHPDVIGWTREGDGVHADSGLATLMSDGPGGSKWMEVGKNNAGNVWYDITGNQTNTVTINKDGWGQFHVSGGSVSIYVQQ

SEQ ID NO: 24386 - protein, 483 aa, Bacillus subtilis
HHNGTNGTMMQYFEWYLPNDGNHWNRLRSDASNLKDKGITAVWIPPAWKGASQNDVGYGAYDLYDLGEFNQKGTVRTKYGTRNQLQAAVTALKSNGIQVYGDVVMNHKGGADATEWVRAVEVNPSNRNQEVSGDYTIEAWTKFDFPGRGNTHSNFKWRWYHFDGVDWDQSRQLQNRIYKFRGKSWDWEVDTENGNYDYLMYADIDMDHPEVVNELRNWGVWYTNTLGLDGFRIDAVKHIKYSFTRDWLTHVRNTTGKNMFAVAEFWKNDIGAIENYLSKTNWNHSVFDVPLHYNLYNASRSGGNYDMRQIFNGTVVQRHPTHAVTFVDNHDSQPEEALESFVEEWFKPLAYALTLTRDQGYPSVFYGDYYGIPTHGVPAMKSKIDPILEARQKYAYGTQRDYLDHPDVIGWTREGDGVHADSGLATLMSDGPGGSKWMEVGKNNAGEVWYDITGNQTNTVTINKDGWGQFHVSGGSVSIYVQQ

SEQ ID NO: 24387 - protein, 483 aa, Bacillus licheniformis
HHNGTNGTMMQYFEWYLPNDGNHWNRLRSDASNLKDKGITAVWIPPAWKGASQNDVGYGAYDLYDLGEFNQKGTVRTKYGTRNQLQAAVTALKSNGIQVYGDVVMNHKGGADATEWVRAVEVNPSNRNQEVSGDYTIEAWTKFDFPGRGNTHSNFKWRWYHFDGVDWDQSRQLQNRIYKFRGKGWDWEVDTENGNYDYLMYADIDMDHPEVVNELRNWGVWYTNTLGLDGFRIDAVKHIKYSFTRDWLTHVRNTTGKNMFAVAEFWKNDIGAIENYLSKTNWNHSVFDVPLHYNLYNASRSGGNYDMRQIFNGTVVQRHPTHAVTFVDNHDSQPEEALESFVEEWFKPLAYALTLTRAQGYPSVFYGDYYGIPTHGVPAMKSKIDPILEARQKYAYGTQRDYLDHPDVIGWTREGDGVHADSGLATLMSDGPGGSKWMEVGKNNAGEVWYDITGNQTNTVTINKDGWGQFHVSGGSVSIYVQQ

SEQ ID NO: 24388 - protein, 483 aa, Bacillus licheniformis
HHNGTNGTMMQYFEWYLPNDGNHWNRLRSDASNLKDKGITAVWIPPAWKGASQNDVGYGAYDLYDLGEFNQKGTVRTKYGTRNQLQAAVTALKSNGIQVYGDVVMNHKGGADATEWVRAVEVNPSNRNQEVSGDYTIEAWTKFDFPGRGNTHSNFKWRWYHFDGVDWDQSRQLQNRIYKFRGKGWDWEVDTENGNYDYLMYADIDMDHPEVVNELRTWGVWYTNTLGLDGFRIDAVKHIKYSFTRDWLTHVRNTTGKNMFAVAEFWKNDIGAIENYLSKTNWNHSVFDVPLHYNLYNASRSGGNYDMRQIFNGTVVQRHPTHAVTFVDNHDSQPEEALESFVEEWFKPLAYALTLTRDQGYPSVFYGDYYGIPTHGVPAMKSKIDPILEARQKYAYGTQRDYLDHPDVIGWTREGDGVHADSGLATLMSDGPGGSKWMEVGKNNAGEVWYDITGNQTNTVTINKDGWGQFHVSGGSVSIYVQQ

SEQ ID NO: 24389 - protein, 483 aa, Bacillus licheniformis
HHNGTNGTMMQYFEWYLPNDGNHWNRLRSDASNLKDKGITAVWIPPAWKGASQNDVGYGAYDLYDLGEFNQKGTVRTKYGTRNQLQAAVTALKSNGIQVYGDVVMNHKGGADATEWVRAVEVNPRNRNQEVSGDYTIEAWTKFDFPGRGNTHSNFKWRWYHFDGVDWDQSRQLQNRIYKFRGKGWDWEVDTENGNYDYLMYADIDMDHPEVVNELRNWGVWYTNTLGLDGFRIDAVKHIKYSFTRDWLTHVRNTTGKNMFAVAEFWKNDIGAIENYLSKTNWNHSVFDVPLHYNLYNASRSGGNYDMRQIFNGTVVQRHPTHAVTFVDNHDSQPEEALESFVEEWFKPLAYALTLTRDQGYPSVFYGDYYGIPTHGVPAMKSKIDPILEARQKYAYGTQRDYLDHPDVIGWTREGDGVHADSGLATLMSDGPGGSKWMEVGKNNAGEVWYDITGNQTNTVTINKDGWGQFHVSGGSVSIYVQQ

SEQ ID NO: 24390 - protein, 483 aa, Bacillus licheniformis
HHNGTNGTMMQYFEWYLPNDGNHWNRLRSDASNLKDKGITAVWIPPAWKGASQNDVGYGAYDLYDLGEFNQKGTVRTKYGTRNQLQAAVQALKSNGIQVYGDVVMNHKGGADATEWVRAVEVNPSNRNQEVSGDYTIEAWTKFDFPGRGNTHSNFKWRWYHFDGVDWDQSRQLQNRIYKFRGKGWDWEVDTENGNYDYLMYADIDMDHPEVVNELRNWGVWYTNTLGLDGFRIDAVKHIKYSFTRDWLTHVRNTTGKNMFAVAEFWKNDIGAIENYLSKTNWNHSVFDVPLHYNLYNASRSGGNYDMRQIFNGTVVQRHPTHAVTFVDNHDSQPEEALESFVEEWFKPLAYALTLTRDQGYPSVFYGDYYGIPTHGVPAMKSKIDPILEARQKYAYGTQRDYLDHPDVIGWTREGDGVHADSGLATLMSDGPGGSKWMEVGKNNAGEVWYDITGNQTNTVTINKDGWGQFHVSGGSVSIYVQQ

SEQ ID NO: 24391 - protein, 483 aa, Bacillus licheniformis
HHNGTNGTMMQYFEWYLPNDGNHWNRLRSDASNLKDKGITAVWIPPAWKGASQNDVGYGAYDLYDLGEFNQKGTVRTKYGTRNQLQAAVTALKSNGIQVYGDVVMNHKGGADATEWVRAVEVNPSNRNQEVSGDYTIEAWTKFDFPGRGNTHSNFKWRWYHFDGVDWDQSRQLQNRIYKFRGKGWDWEVDTENGNYDYLMYADIDMDHPEVVNELRNWGVWYTNTLGLDGFRIDAVKHIKYSFTRDWLTHVRNTTGKNMFAVAEFWKNDIGAIENYLSKTNWNHSVFDVPLHYNLYNASRSGGNYDMRQIFNGTVVQRHPTHAVTFVDNHDSQPLEALESFVEEWFKPLAYALTLTRDQGYPSVFYGDYYGIPTHGVPAMKSKIDPILEARQKYAYGTQRDYLDHPDVIGWTREGDGVHADSGLATLMSDGPGGSKWMEVGKNNAGEVWYDITGNQTNTVTINKDGWGQFHVSGGSVSIYVQQ

SEQ ID NO: 24392 - protein, 483 aa, Bacillus licheniformis
HHNGTNGTMMQYFEWYLPNDGNHWNRLRSDASNLKTKGITAVWIPPAWKGASQNDVGYGAYDLYDLGEFNQKGTVRTKYGTRNQLQAAVTALKSNGIQVYGDVVMNHKGGADATEWVRAVEVNPSNRNQEVSGDYTIEAWTKFDFPGRGNTHSNFKWRWYHFDGVDWDQSRQLQNRIYKFRGKGWDWEVDTENGNYDYLMYADIDMDHPEVVNELRNWGVWYTNTLGLDGFRIDAVKHIKYSFTRDWLTHVRNTTGKNMFAVAEFWKNDIGAIENYLSKTNWNHSVFDVPLHYNLYNASRSGGNYDMRQIFNGTVVQRHPTHAVTFVDNHDSQPEEALESFVEEWFKPLAYALTLTRDQGYPSVFYGDYYGIPTHGVPAMKSKIDPILEARQKYAYGTQRDYLDHPDVIGWTREGDGVHADSGLATLMSDGPGGSKWMEVGKNNAGEVWYDITGNQTNTVTINKDGWGQFHVSGGSVSIYVQQ

SEQ ID NO: 24393 - protein, 483 aa, Bacillus licheniformis
HHNGTNGTMMQYFEWYLPNDGNHWNRLRSDASNLKDKGITAVWIPPAWKGASQNDVGYGAYDLYDLGEFNQKGTVRTKYGTRNQLQAAVTALKSNGIQVYGDVVMNHKGGADATEWVRAVEVNPSNRNQEVSGDYTIEAWTKFDFPGRGNTHSNFKWRWYHFDGVDWDQSRQLQNRIYKFRGKGWDWEVDTENGNYDYLMYADIDMDHPEVVNELRNWGVWYTNTLGLDGFRIDAVKHIKYSFTRDWLTHVRNTTGKNMFAVAEFWKNDIGAIENYLSKTNWNHSVFDVPLHYNLYNASRSGGNYDMRAIFNGTVVQRHPTHAVTFVDNHDSQPEEALESFVEEWFKPLAYALTLTRDQGYPSVFYGDYYGIPTHGVPAMKSKIDPILEARQKYAYGTQRDYLDHPDVIGWTREGDGVHADSGLATLMSDGPGGSKWMEVGKNNAGEVWYDITGNQTNTVTINKDGWGQFHVSGGSVSIYVQQ

SEQ ID NO: 24394 - protein, 483 aa, Bacillus licheniformis
HHNGTNGTMMQYFEWYLPNDGNHWNRLRSDASNLKDKGITAVWIPPAWKGASQNDVGYGAYDLYDLGEFNQKGTVRTKYGTRNQLQAAVTALKSNGIQVYGDVVMNHKGGADATEWVRAVEVNPSNRNQEVSGDYTIEAWTKFDFPGRGNTHSNFKWRWYHFDGVDWDQSRQLQNRIYKFRGKGWDWEVDTENGNYDYLMYADIDMDHPEVVNELRGWGVWYTNTLGLDGFRIDAVKHIKYSFTRDWLTHVRNTTGKNMFAVAEFWKNDIGAIENYLSKTNWNHSVFDVPLHYNLYNASRSGGNYDMRQIFNGTVVQRHPTHAVTFVDNHDSQPEEALESFVEEWFKPLAYALTLTRDQGYPSVFYGDYYGIPTHGVPAMKSKIDPILEARQKYAYGTQRDYLDHPDVIGWTREGDGVHADSGLATLMSDGPGGSKWMEVGKNNAGEVWYDITGNQTNTVTINKDGWGQFHVSGGSVSIYVQQ

SEQ ID NO: 24395 - protein, 483 aa, Bacillus licheniformis
HHNGTNGTMMQYFEWYLPNDGNHWNRLRSDASNLKDKGITAVWIPPAWKGASQNDVGYGAYDLYDLGEFNQKGTVRTKYGTRNQLQAAVAALKSNGIQVYGDVVMNHKGGADATEWVRAVEVNPSNRNQEVSGDYTIEAWTKFDFPGRGNTHSNFKWRWYHFDGVDWDQSRQLQNRIYKFRGKGWDWEVDTENGNYDYLMYADIDMDHPEVVNELRNWGVWYTNTLGLDGFRIDAVKHIKYSFTRDWLTHVRNTTGKNMFAVAEFWKNDIGAIENYLSKTNWNHSVFDVPLHYNLYNASRSGGNYDMRQIFNGTVVQRHPTHAVTFVDNHDSQPEEALESFVEEWFKPLAYALTLTRDQGYPSVFYGDYYGIPTHGVPAMKSKIDPILEARQKYAYGTQRDYLDHPDVIGWTREGDGVHADSGLATLMSDGPGGSKWMEVGKNNAGEVWYDITGNQTNTVTINKDGWGQFHVSGGSVSIYVQQ

SEQ ID NO: 24396 - protein, 483 aa, Bacillus licheniformis
HHNGTNGTMMQYFEWYLPNDGNHWNRLRSDASNLKDKGITAVWIPPAWKGASQNDVGYGAYDLYDLGEFNQKGTVRTKYGTRNQLQAAVTALKSNGIQVYGDVVMNHKGGADATEWVRAVEVNPSNRNQEVSGDYTIEAWTKFDFPGRGNTHSNFKWRWYHFDGVDWDQSRQLQNRIYKFRGKGWDWEVDTENGNYDYLMYADIDMDHPEVVNELRNWGVWYTNTLGLDGFRIDAVKHIKYSFTRDWLTHVRNTTGKNMFAVAEFWKNDIGAIENYLSKTNWNHSVFDVPLHYNLYNASRSGGNYDMRQIFNGTVVQRHPTHAVTFVDNHDSQPEEALESFVEEWFKPLAYALTLTRDQGYPSVFYGDYYGIPTHGVPAMKSKIDPILEARQKYAYGTQRDYLDHPDVIGWTREGDGVHADSGLATLMSDGPGGSKWMEVGKNNAGEVWYDITGNQNNTVTINKDGWGQFHVSGGSVSIYVQQ

SEQ ID NO: 24397 - protein, 483 aa, Bacillus licheniformis
HHNGTNGTMMQYFEWYLPNDGNHWNRLRSDASNLKDKGITAVWIPPAWKGASQNDVGYGAYDLYDLGEFNQKGTVRTKYGTRNQLQAAVTALKSNGIQVYGDVVMNHKGGADATEWVRAVEVNPSNRNQEVSGDYTIEAWTKFDFPGRGNTHSNFKWRWYHFDGVDWDQSRQLQNRIYKFRGKGWDWEVDEENGNYDYLMYADIDMDHPEVVNELRNWGVWYTNTLGLDGFRIDAVKHIKYSFTRDWLTHVRNTTGKNMFAVAEFWKNDIGAIENYLSKTNWNHSVFDVPLHYNLYNASRSGGNYDMRQIFNGTVVQRHPTHAVTFVDNHDSQPEEALESFVEEWFKPLAYALTLTRDQGYPSVFYGDYYGIPTHGVPAMKSKIDPILEARQKYAYGTQRDYLDHPDVIGWTREGDGVHADSGLATLMSDGPGGSKWMEVGKNNAGEVWYDITGNQTNTVTINKDGWGQFHVSGGSVSIYVQQ

SEQ ID NO: 24398 - protein, 483 aa, Bacillus licheniformis
HHNGTNGTMMQYFEWYLPNDGNHWNRLRSDASNLKDKGITAVWIPPAWKGASQNDVGYGAYDLYDLGEFNQKGTVRTKYGTRNQLQAAVVALKSNGIQVYGDVVMNHKGGADATEWVRAVEVNPSNRNQEVSGDYTIEAWTKFDFPGRGNTHSNFKWRWYHFDGVDWDQSRQLQNRIYKFRGKGWDWEVDTENGNYDYLMYADIDMDHPEVVNELRNWGVWYTNTLGLDGFRIDAVKHIKYSFTRDWLTHVRNTTGKNMFAVAEFWKNDIGAIENYLSKTNWNHSVFDVPLHYNLYNASRSGGNYDMRQIFNGTVVQRHPTHAVTFVDNHDSQPEEALESFVEEWFKPLAYALTLTRDQGYPSVFYGDYYGIPTHGVPAMKSKIDPILEARQKYAYGTQRDYLDHPDVIGWTREGDGVHADSGLATLMSDGPGGSKWMEVGKNNAGEVWYDITGNQTNTVTINKDGWGQFHVSGGSVSIYVQQ

SEQ ID NO: 24399 - protein, 483 aa, Bacillus licheniformis
HHNGTNGTMMQYFEWYLPNDGNHWNRLRSDASNLKDYGITAVWIPPAWKGASQNDVGYGAYDLYDLGEFNQKGTVRTKYGTRNQLQAAVTALKSNGIQVYGDVVMNHKGGADATEWVRAVEVNPSNRNQEVSGDYTIEAWTKFDFPGRGNTHSNFKWRWYHFDGVDWDQSRQLQNRIYKFRGKGWDWEVDTENGNYDYLMYADIDMDHPEVVNELRNWGVWYTNTLGLDGFRIDAVKHIKYSFTRDWLTHVRNTTGKNMFAVAEFWKNDIGAIENYLSKTNWNHSVFDVPLHYNLYNASRSGGNYDMRQIFNGTVVQRHPTHAVTFVDNHDSQPEEALESFVEEWFKPLAYALTLTRDQGYPSVFYGDYYGIPTHGVPAMKSKIDPILEARQKYAYGTQRDYLDHPDVIGWTREGDGVHADSGLATLMSDGPGGSKWMEVGKNNAGEVWYDITGNQTNTVTINKDGWGQFHVSGGSVSIYVQQ

SEQ ID NO: 24400 - protein, 483 aa, Bacillus licheniformis
HHNGTNGTMMQYFEWYLPNDGNHWNRLRSDASNLKDKGITAVWIPPAWKGASQNDVGYGAYDLYDLGEFNQKGTVRTKYGTRNQLQAAVTALKSNGIQVYGDVVMNHKGGADATEMVRAVEVNPSNRNQEVSGDYTIEAWTKFDFPGRGNTHSNFKWRWYHFDGVDWDQSRQLQNRIYKFRGKGWDWEVDTENGNYDYLMYADIDMDHPEVVNELRNWGVWYTNTLGLDGFRIDAVKHIKYSFTRDWLTHVRNTTGKNMFAVAEFWKNDIGAIENYLSKTNWNHSVFDVPLHYNLYNASRSGGNYDMRQIFNGTVVQRHPTHAVTFVDNHDSQPEEALESFVEEWFKPLAYALTLTRDQGYPSVFYGDYYGIPTHGVPAMKSKIDPILEARQKYAYGTQRDYLDHPDVIGWTREGDGVHADSGLATLMSDGPGGSKWMEVGKNNAGEVWYDITGNQTNTVTINKDGWGQFHVSGGSVSIYVQQ

SEQ ID NO: 24401 - protein, 483 aa, Bacillus licheniformis
HHNGTNGTMMQYFEWYLPNDGNHWNRLRSDASNLKDKGITAVWIPPAWKGASQNDVGYGAYDLYDLGEFNQKGTVRTKYGTRNQLQAAVTALKSNGIQVYGDVVMNHKGGADATEWVRAVEVNPSNRNQEVSGDYTIEAWTKFDFPGRGNTHSNFKWRWYHFDGVDWDQSRQLQNRIYKFRGKGWDWEVDTENGNYDYLMYADIDMDHPEVVNELRNWGVWYTNTLGLDGFRIDAVKHIKYSFTRDWLTHVRNTTGKNMFAVAEFWKNDIGAIENYLSKTNWNHSVFDVPLHYNLYNASRSGGNYDMRQIFNGTVVQRHPTHAVTFVDNHDSQPYEALESFVEEWFKPLAYALTLTRDQGYPSVFYGDYYGIPTHGVPAMKSKIDPILEARQKYAYGTQRDYLDHPDVIGWTREGDGVHADSGLATLMSDGPGGSKWMEVGKNNAGEVWYDITGNQTNTVTINKDGWGQFHVSGGSVSIYVQQ

SEQ ID NO: 24402 - protein, 483 aa, Bacillus licheniformis
HHNGTNGTMMQYFEWYLPNDGNHWNRLRSDASNLKDKGITAVWIPPAWKGASQNDVGYGAYDLYDLGEFNQKGTVRTKYGTRNQLQAAVTALKSNGIQVYGDVVMNHKGGADATEWVRAVEVNPSNRNQEVSGDYTIEAWTKFDFPGRGNTHSNFKWRWYHFDGVDWDQSRQLQNRIYKFRGKGWDWEVDTENGNYDYLMYADIDMDHPEVVNELRNWGVWYTNTLGLDGFRIDAVKHIKYSFTRDWLTHVRNTTGKNMFAVAEFWKNDIGAIENYLSKTNWNHSVFDVPLHYNLYNASRSGGNYDMRQIFNGTVVQRHPTHAVTFVDNHDSQPEEALESFVEEWFKPLAYALTLTRDQGYPSVFYGDYYGIPTHGVPAMKSKIDPILEARQKYAYGTQRDYLDHPDVIGWTREGDGVHADSGLATLMSDGPGGSKWMEVGKNNAGEVWYDITGNQCNTVTINKDGWGQFHVSGGSVSIYVQQ

SEQ ID NO: 24403 - protein, 483 aa, Bacillus licheniformis
HHNGTNGTMMQYFEWYLPNDGNHWNRLRSDASNLKDKGITAVWIPPAWKGASQNDVGYGAYDLYDLGEFNQKGTVRTKYGTRNQLQAAVTALKSNGIQVYGDVVMNHKGGADATEWVDAVEVNPSNRNQEVSGDYTIEAWTKFDFPGRGNTHSNFKWRWYHFDGVDWDQSRQLQNRIYKFRGKGWDWEVDTENGNYDYLMYADIDMDHPEVVNELRNWGVWYTNTLGLDGFRIDAVKHIKYSFTRDWLTHVRNTTGKNMFAVAEFWKNDIGAIENYLSKTNWNHSVFDVPLHYNLYNASRSGGNYDMRQIFNGTVVQRHPTHAVTFVDNHDSQPEEALESFVEEWFKPLAYALTLTRDQGYPSVFYGDYYGIPTHGVPAMKSKIDPILEARQKYAYGTQRDYLDHPDVIGWTREGDGVHADSGLATLMSDGPGGSKWMEVGKNNAGEVWYDITGNQTNTVTINKDGWGQFHVSGGSVSIYVQQ

SEQ ID NO: 24404 - protein, 483 aa, Bacillus licheniformis
HHNGTNGTMMQYFEWYLPNDGNHWNRLRSDASNLKDKGITAVWIPPAWKGASQNDVGYGAYDLYDLGEFNQKGTVRTKYGTRNQLQAAVTALKSNGIQVYGDVVMNHKGGADATEWVRAVEVNPSNRNQEVSGDYTIEAWTKFDFPGRGNTHSNFKWRWYHFDGVDWDQSRQLQNRIYKFRGKGWDWEVDTENGNYDYLMYADIDMDHPEVVNELRNWGVWYTNTLGLDGFRIDAVKHIKYSFTRDWLTHVRNTTGKNMFAVAEFWKNDIGAIENYLSKTNWNHSVFDVPLHYNLYNASRSGGNYDMRQIFNGTVVQRHPTHAVTFVDNHDSQPEEALESFVEEWFKPLAYALTLTRFQGYPSVFYGDYYGIPTHGVPAMKSKIDPILEARQKYAYGTQRDYLDHPDVIGWTREGDGVHADSGLATLMSDGPGGSKWMEVGKNNAGEVWYDITGNQTNTVTINKDGWGQFHVSGGSVSIYVQQ

SEQ ID NO: 24405 - protein, 483 aa, Bacillus licheniformis
HHNGTNGTMMQYFEWYLPNDGNHWNRLRSDASNLADKGITAVWIPPAWKGASQNDVGYGAYDLYDLGEFNQKGTVRTKYGTRNQLQAAVTALKSNGIQVYGDVVMNHKGGADATEWVRAVEVNPSNRNQEVSGDYTIEAWTKFDFPGRGNTHSNFKWRWYHFDGVDWDQSRQLQNRIYKFRGKGWDWEVDTENGNYDYLMYADIDMDHPEVVNELRNWGVWYTNTLGLDGFRIDAVKHIKYSFTRDWLTHVRNTTGKNMFAVAEFWKNDIGAIENYLSKTNWNHSVFDVPLHYNLYNASRSGGNYDMRQIFNGTVVQRHPTHAVTFVDNHDSQPEEALESFVEEWFKPLAYALTLTRDQGYPSVFYGDYYGIPTHGVPAMKSKIDPILEARQKYAYGTQRDYLDHPDVIGWTREGDGVHADSGLATLMSDGPGGSKWMEVGKNNAGEVWYDITGNQTNTVTINKDGWGQFHVSGGSVSIYVQQ

SEQ ID NO: 24406 - protein, 483 aa, Bacillus licheniformis
HHNGTNGTMMQYFEWYLPNDGNHWNRLRSDASNLKDKGITAVWIPPAWKGASQNDVGYGAYDLYDLGEFNQKGTVRTKYGTRNQLQAAVTALKSNGIQVYGDVVMNHKGGADATEWVRAVEVNPSNRNQEVSGDYTIEAWTKFDFPGRGNTHSNFKWRWYHFDGVDWDQSRQLQNRIYKFRGKGWDWEVDTENGNYDYLMYADIDMDHPEVVNELRDWGVWYTNTLGLDGFRIDAVKHIKYSFTRDWLTHVRNTTGKNMFAVAEFWKNDIGAIENYLSKTNWNHSVFDVPLHYNLYNASRSGGNYDMRQIFNGTVVQRHPTHAVTFVDNHDSQPEEALESFVEEWFKPLAYALTLTRDQGYPSVFYGDYYGIPTHGVPAMKSKIDPILEARQKYAYGTQRDYLDHPDVIGWTREGDGVHADSGLATLMSDGPGGSKWMEVGKNNAGEVWYDITGNQTNTVTINKDGWGQFHVSGGSVSIYVQQ

SEQ ID NO: 24407 - protein, 483 aa, Bacillus licheniformis
HHNGTNGTMMQYFEWYLPNDGNHWNRLRSDASNLKDKGITAVWIPPAWKGASQNDVGYGAYDLYDLGEFNQKGTVRTKYGTRNQLQAAVTALKSNGIQVYGDVVMNHKGGADATEWVRAVEVNPSNRNQEVSGDYTIEAWTKFDFPGRGNTHSNFKWRWYHFDGVDWDQSRQLQNRIYKFRGKGWDWEVDTENGNYDYLMYADIDMDHPEVVNELRNWGVWYTNTLGLDGFRIDAVKHIKYSFTRDWLTHVRNTTGKNMFAVAEFWKNDIGAIENYLSKTNWNHSVFDVPLHYNLYNASRSGGNYDMRQIFNGTVVQRHPTHAVTFVDNHDSQPSEALESFVEEWFKPLAYALTLTRDQGYPSVFYGDYYGIPTHGVPAMKSKIDPILEARQKYAYGTQRDYLDHPDVIGWTREGDGVHADSGLATLMSDGPGGSKWMEVGKNNAGEVWYDITGNQTNTVTINKDGWGQFHVSGGSVSIYVQQ

SEQ ID NO: 24408 - protein, 483 aa, Bacillus licheniformis
HHNGTNGTMMQYFEWYLPNDGNHWNRLRLDASNLKDKGITAVWIPPAWKGASQNDVGYGAYDLYDLGEFNQKGTVRTKYGTRNQLQAAVTALKSNGIQVYGDVVMNHKGGADATEWVRAVEVNPSNRNQEVSGDYTIEAWTKFDFPGRGNTHSNFKWRWYHFDGVDWDQSRQLQNRIYKFRGKGWDWEVDTENGNYDYLMYADIDMDHPEVVNELRNWGVWYTNTLGLDGFRIDAVKHIKYSFTRDWLTHVRNTTGKNMFAVAEFWKNDIGAIENYLSKTNWNHSVFDVPLHYNLYNASRSGGNYDMRQIFNGTVVQRHPTHAVTFVDNHDSQPEEALESFVEEWFKPLAYALTLTRDQGYPSVFYGDYYGIPTHGVPAMKSKIDPILEARQKYAYGTQRDYLDHPDVIGWTREGDGVHADSGLATLMSDGPGGSKWMEVGKNNAGEVWYDITGNQTNTVTINKDGWGQFHVSGGSVSIYVQQ

SEQ ID NO: 24409 - protein, 483 aa, Bacillus licheniformis
HHNGTNGTMMQYFEWYLPNDGNHWNRLRSDASNLKDKGITAVWIPPAWKGASQNDVGYGAYDLYDLGEFNQKGTVRTKYGTRNQLQAAVTALKSNGIQVYGDVVMNHKGGADATEWVRAVEVNPSNRNQEVSGDYTIEAWTKFDFPGRGNTHSNFKWRWYHFDGVDWDQSRQLQNRIYKFRGKGWDWEVDTENGNYDYLMYADIDMDHPEVVNELRNWGVWYTNTLGLDGFRIDAVKHIKYSFTRDWLTHVRNTTGKNMFAVAEFWKNDIGAIENYLSKTNWNHSVFDVPLHYNLYNASRSGGNYDMRQIFNGTVVQRHPTHAVTFVDNHDSQPEEALESFVEEWFKPLAYALTLTRDQGYPSVFYGDYYGIPTHGVPAMKSKIDPILEARQKYAYGTQRDYLDHPDVIGWTREGDGVHADSGLATLMSDGPGGSKWMEVGKNNAGSVWYDITGNQTNTVTINKDGWGQFHVSGGSVSIYVQQ

SEQ ID NO: 24410 - protein, 483 aa, Bacillus licheniformis
HHNGTNGTMMQYFEWYLPNDGNHWNRLRSDASNLKDKGITAVWIPPAWKGASQNDVGYGAYDLYDLGEFNQKGTVRTKYGTRNQLQAAVTALKVNGIQVYGDVVMNHKGGADATEWVRAVEVNPSNRNQEVSGDYTIEAWTKFDFPGRGNTHSNFKWRWYHFDGVDWDQSRQLQNRIYKFRGKGWDWEVDTENGNYDYLMYADIDMDHPEVVNELRNWGVWYTNTLGLDGFRIDAVKHIKYSFTRDWLTHVRNTTGKNMFAVAEFWKNDIGAIENYLSKTNWNHSVFDVPLHYNLYNASRSGGNYDMRQIFNGTVVQRHPTHAVTFVDNHDSQPEEALESFVEEWFKPLAYALTLTRDQGYPSVFYGDYYGIPTHGVPAMKSKIDPILEARQKYAYGTQRDYLDHPDVIGWTREGDGVHADSGLATLMSDGPGGSKWMEVGKNNAGEVWYDITGNQTNTVTINKDGWGQFHVSGGSVSIYVQQ

SEQ ID NO: 24411 - protein, 483 aa, Bacillus licheniformis
HHNGTNGTMMQYFEWYLPNDGNHWNRLRSDASNLKDKGITAVWIPPAWKGASQNDVGYGAYDLYDLGEFNQKGTVRTKYGTRNQLQAAVTALKSNGIQVYGDVVMNHKGGADATEWVRAVEVNPSNRNQEVSGDYTIEAWTKFDFPGRGNTHSNFKWRWYHFDGVDWDQSRQLQNRIYKFRGKGWDWEVDDENGNYDYLMYADIDMDHPEVVNELRNWGVWYTNTLGLDGFRIDAVKHIKYSFTRDWLTHVRNTTGKNMFAVAEFWKNDIGAIENYLSKTNWNHSVFDVPLHYNLYNASRSGGNYDMRQIFNGTVVQRHPTHAVTFVDNHDSQPEEALESFVEEWFKPLAYALTLTRDQGYPSVFYGDYYGIPTHGVPAMKSKIDPILEARQKYAYGTQRDYLDHPDVIGWTREGDGVHADSGLATLMSDGPGGSKWMEVGKNNAGEVWYDITGNQTNTVTINKDGWGQFHVSGGSVSIYVQQ

SEQ ID NO: 24412 - protein, 483 aa, Bacillus licheniformis
HHNGTNGTMMQYFEWYLPNDGNHWNRLRWDASNLKDKGITAVWIPPAWKGASQNDVGYGAYDLYDLGEFNQKGTVRTKYGTRNQLQAAVTALKSNGIQVYGDVVMNHKGGADATEWVRAVEVNPSNRNQEVSGDYTIEAWTKFDFPGRGNTHSNFKWRWYHFDGVDWDQSRQLQNRIYKFRGKGWDWEVDTENGNYDYLMYADIDMDHPEVVNELRNWGVWYTNTLGLDGFRIDAVKHIKYSFTRDWLTHVRNTTGKNMFAVAEFWKNDIGAIENYLSKTNWNHSVFDVPLHYNLYNASRSGGNYDMRQIFNGTVVQRHPTHAVTFVDNHDSQPEEALESFVEEWFKPLAYALTLTRDQGYPSVFYGDYYGIPTHGVPAMKSKIDPILEARQKYAYGTQRDYLDHPDVIGWTREGDGVHADSGLATLMSDGPGGSKWMEVGKNNAGEVWYDITGNQTNTVTINKDGWGQFHVSGGSVSIYVQQ

SEQ ID NO: 24413 - protein, 483 aa, Bacillus licheniformis
HHNGTNGTMMQYFEWYLPNDGNHWNRLRSDASNLKDKGITAVWIPPAWKGASQNDVGYGAYDLYDLGEFNQKGTVRTKYGTRNQLQAAVTALKSNGIQVYGDVVMNHKGGADATEWVRAVEVNPSNRNQEQSGDYTIEAWTKFDFPGRGNTHSNFKWRWYHFDGVDWDQSRQLQNRIYKFRGKGWDWEVDTENGNYDYLMYADIDMDHPEVVNELRNWGVWYTNTLGLDGFRIDAVKHIKYSFTRDWLTHVRNTTGKNMFAVAEFWKNDIGAIENYLSKTNWNHSVFDVPLHYNLYNASRSGGNYDMRQIFNGTVVQRHPTHAVTFVDNHDSQPEEALESFVEEWFKPLAYALTLTRDQGYPSVFYGDYYGIPTHGVPAMKSKIDPILEARQKYAYGTQRDYLDHPDVIGWTREGDGVHADSGLATLMSDGPGGSKWMEVGKNNAGEVWYDITGNQTNTVTINKDGWGQFHVSGGSVSIYVQQ

SEQ ID NO: 24414 - protein, 483 aa, Bacillus licheniformis
HHNGTNGTMMQYFEWYLPNDGNHWNRLRSDASNLKDKGITAVWIPPAWKGASQNDVGYGAYDLYDLGEFNQKGTVRTKYGTRNQLQAAVTALKSNGIQVYGDVVMNHKGGADATEWVRAVEVNPSNRNQEVSGDYTIEAWTKFDFPGRGNTHSNFKWRWYHFDGVDWDQSRQLQNRIYKFRGKGWDWEVDTENGNYDYLMYADIDMDHPEVVNELRNWGVWYTNTLGLDGFRIDAVKHIKYSFTRDWLTHVRNTTGKNMFAVAEFWKNDIGAIENYLSKTNWNHSVFDVPLHYNLYNASRSGGNYDMRQIFNGTVVQRHPTHAVTFVDNHDSQPEEALESFVEEWFKPLAYALTLTRYQGYPSVFYGDYYGIPTHGVPAMKSKIDPILEARQKYAYGTQRDYLDHPDVIGWTREGDGVHADSGLATLMSDGPGGSKWMEVGKNNAGEVWYDITGNQTNTVTINKDGWGQFHVSGGSVSIYVQQ

SEQ ID NO: 24415 - protein, 483 aa, Bacillus licheniformis
HHNGTNGTMMQYFEWYLPNDGNHWNRLRSDASNLKDKGITAVWIPPAWKGASQNDVGYGAYDLYDLGEFNQKGTVRTKYGTRNQLQRAVTALKSNGIQVYGDVVMNHKGGADATEWVRAVEVNPSNRNQEVSGDYTIEAWTKFDFPGRGNTHSNFKWRWYHFDGVDWDQSRQLQNRIYKFRGKEWDWEVDTENGNYDYLMYADIDMDHPEVVNELRNWGVWYTNTLGLDGFRIDAVKHIKYSFTRDWLTHVRNTTGKNMFAVAEFWKNDIGAIENYLSKTNWNHSVFDVPLHYNLYNASRSGGNYDMRKIFEGTVVQRHPTHAVTFVDNHDSQPEEALESFVEEWFKPLAYALTLTRDQGYPSVFYGDYYGIPTHGVPAMKSKIDPILEARQKYAYGTQRDYLDHPDVIGWTREGDGVHADSGLATLMSDGPGGSKWMEVGKNNAGEVWYDITGNQTNTVTINKDGWGQFHVSGGSVSIYVQQ

SEQ ID NO: 24416 - protein, 483 aa, Bacillus licheniformis
HHNGTNGTMMQYFEWYLPNDGNHWNRLRSDASNLKDKGITAVWIPPAWKGASQNDVGYGAYDLYDLGEFNQKGTVRTKYGTRDQLQAAVTALKENGIQVYGDVVMNHKGGADATEWVRAVEVNPSNRNQEVSGDYTIEAWTKFDFPGRGNTHSNFKWRWYHFDGVDWDQSRQLQNRIYKFRGKGWDWEVDTENGNYDYLMYADIDMDHPEVVNELRNWGVWYTNTLGLDGFRIDAVKHIKYSFTRDWLTHVRNTTGKNMFAVAEFWKNDIGAIENYLSKTNWNHSVFDVPLHYNLYNASRSGGNYDMRQIFNGTVVQRHPTHAVTFVDNHDSQPEEALESFVEEWFKPLAYALTLTRDQGYPSVFYGDYYGIPTHGVPAMKSKIDPILEARQKYAYGTQRDYLDHPDVIGWTREGDGVHADSGLATLMSDGPGGSKWMEVGKNNAGEVWYDITGNQTNTVTINKDGWGQFHVSGGSVSIYVQQ

SEQ ID NO: 24417 - protein, 483 aa, Bacillus licheniformis
HHNGTNGTMMQYFEWYLPNDGNHWNRLRSDASNLKMKGITAVWIPPAWKGASQNDVGYGAYDLYDLGEFNQKGTVRTKYGTRNQLQAAVTALKSNGIQVYGDVVMNHKGGADATEWVRAVEVNPSNRNQEVSGDYTIEAWTKFDFPGRGNTHSNFKWRWYHFDGVDWDQSRQLQNRIYKFRGKGWDWEVDTENGNYDYLMYADIDMDHPEVVNELRNWGVWYTNTLGLDGFRIDAVKHIKYSFTRDWLTHVRNTTGKNMFAVAEFWKNDIGAIENYLSKTNWNHSVFDVPLHYNLYNASRSGGNYDMRQIFNGTVVQRHPTHAVTFVDNHDSQPEEALESFVEEWFKPLAYALTLTRDQGYPSVFYGDYYGIPTHGVPAMKSKIDPILEARQKYAYGTQRDYLDHPDVIGWTREGDGVHADSGLATLMSDGPGGSKWMEVGKNNAGEVWYDITGNQTNTVTINKDGWGQFHVSGGSVSIYVQQ

SEQ ID NO: 24418 - protein, 483 aa, Bacillus licheniformis
HHNGTNGTMMQYFEWYLPNDGNHWNRLRSDASNLKDKGITAVWIPPAWKGASQNDVGYGAYDLYDLGEFNQKGTVRTKYGTRNQLQAAVTALKSNGIQVYGDVVMNHKGGADATEWVRAVEVNPSNRNQEVSGDYTIEAWTKFDFPGRGNTHSNFKWRWYHFDGVDWDQSRQLQNRIYKFRGKGWDWEVDTENGNYDYLMYADIDMDHPEVVNELRNWGVWYTNTLGLDGFRIDAVKHIKYSFTRDWLTHVRNTTGKNMFAVAEFWKNDIGAIENYLSKTNWNHSVFDVPLHYNLYNASRSGGNYDMRQIFNGTVVQRHPTHAVTFVDNHDSQPEEALESFVEEWFKPLAYALTLTRDQGYPSVFYGDYYGIPTHGVPAMKSKIDPILEARQKYAYGTQRDYLDHPDVIGWTREGDGVHADSGLATPMSDGPGGSKWMEVGKNNAGEVWYDITGNQTNTVTINKDGWGQFHVSGGSVSIYVQQ

SEQ ID NO: 24419 - protein, 483 aa, Bacillus licheniformis
HHNGTNGTMMQYFEWRLPNDGNHWNRLRSDASNLKDKGITAVWIPPAWKGASQNDVGYGAYDLYDLGEFNQKGTVRTKYGTRNQLQAAVTALKSNGIQVYGDVVMNHKGGADATEWVRAVEVNPSNRNQEVSGDYTIEAWTKFDFPGRGNTHSNFKWRWYHFDGVDWDQSRQLQNRIYKFRGKGWDWEVDTENGNYDYLMYADIDMDHPEVVNELRNWGVWYTNTLGLDGFRIDAVKHIKYSFTRDWLTHVRNTTGKNMFAVAEFWKNDIGAIENYLSKTNWNHSVFDVPLHYNLYNASRSGGNYDMRQIFNGTVVQRHPTHAVTFVDNHDSQPEEALESFVEEWFKPLAYALTLTRDQGYPSVFYGDYYGIPTHGVPAMKSKIDPILEARQKYAYGTQRDYLDHPDVIGWTREGDGVHADSGLATLMSDGPGGSKWMEVGKNNAGEVWYDITGNQTNTVTINKDGWGQFHVSGGSVSIYVQQ

SEQ ID NO: 24420 - protein, 483 aa, Bacillus licheniformis
HHNGTNGTMMQYFEWYLPNDGNHWNRLRSDASNLKDKGITAVWIPPAWKGASQNDVGYGAYDLYDLGEFNQKGTVRTKYGTRNQLQAAVTALKSNGIQVYGDVVMNHKGGADATEWVRAVEVNPSNRNQEVSGDYTIEAWTKFDFPGRGNTHSNFKWRWYHFDGVDWDQSRQLQNRIYKFRGKGWDWEVDTENGNYDYLMYADIDMDHPEVVNELRQWGVWYTNTLGLDGFRIDAVKHIKYSFTRDWLTHVRNTTGKNMFAVAEFWKNDIGAIENYLSKTNWNHSVFDVPLHYNLYNASRSGGNYDMRQIFNGTVVQRHPTHAVTFVDNHDSQPEEALESFVEEWFKPLAYALTLTRDQGYPSVFYGDYYGIPTHGVPAMKSKIDPILEARQKYAYGTQRDYLDHPDVIGWTREGDGVHADSGLATLMSDGPGGSKWMEVGKNNAGEVWYDITGNQTNTVTINKDGWGQFHVSGGSVSIYVQQ

SEQ ID NO: 24421 - protein, 483 aa, Bacillus licheniformis
HHNGTNGTMMQYFEWYLPNDGNHWNRLRSDASNLKDKGITAVWIPPAWKGASQNDVGYGAYDLYDLGEFNQKGTVRTKYGTRNQLQAAVTALKSNGIQVYGDVVMNHKGGADATEWVRAVEVNPSNRNQEVSGDYTIEAWTKFDFPGRGNTHSNFKWRWYHFDGVDWDQSRQLQNRIYKFRGKGWDWEVDTENGNYDYLMYADIDMDHPEVVNELRNWGVWYTNTLGLDGFRIDAVKHIKYSFTRDWLTHVRNTTGKNMFAVAEFWKNDIGAIENYLSKTNWNHSVFDVPLHYNLYNASRSGGNYDMRQIFNGTVVQRHPTHAVTFVDNHDSQPEEALESFVEEWFKPLAYALTLTRDQGYPSVFYGDYYGIPTHGVPAMKSKIDPILEARQKYAYGTQRDYLDHPDVIGWTREGDGVHADSGLATLMSDGPGGSKWMEVGKNNAGEVWYDITGNQDNTVTINKDGWGQFHVSGGSVSIYVQQ

SEQ ID NO: 24422 - protein, 483 aa, Bacillus subtilis
HHNGTNGTMMQYFEWYLPNDGNHWNRLRSDASNLKDKGITAVWIPPAWKGASQNDVGYGAYDLYDLGEFNQKGTVRTKYGTRNQLQAAVTALKSNGIQVYGDVVMNHKGGADATEWVRAVEVNPSNRNQEVSGDYTIEAWTKFDFPGRGNTHSNFKWRWYHFDGVDWDQSRQLQNRIYKFRGKGWDWEVDTENGNYDYLMYADIDMDHPEVVNELRNWGVWYTNTLGLDGFRIDAVKHIKYSFTRDWLTHVRNTTGKNMFAVAEFWKNDIGAIENYLSKTNWNHSVFDVPLHYNLYNASRSGGNYDMRQIFNGTVVQRHPTHAVTFVDNHDSQPEEALESFVEEWFKPLAYALTLTRDQGYPSVFYGDYYGIPTHGVPAMKSKIDPILEARQKYAYGTQRDYLDHPDVIGWTREGDSVHAKSGLATLMSDGPGGSKWMDVGKNNAGEVWYDITGNQTNTVTINKDGWGQFHVSGGSVSIYVQQ

SEQ ID NO: 24423 - protein, 483 aa, Bacillus licheniformis
HHNGTNGTMMQYFEWYLPNDGNHWNRLRSDASNLKDKGITAVWIPPAWKGASQNDVGYGAYDLYDLGEFNQKGTVRTKYGTRNQLQAAVTALKSNGIQVYGDVVMNHKGGADATELVRAVEVNPSNRNQEVSGDYTIEAWTKFDFPGRGNTHSNFKWRWYHFDGVDWDQSRQLQNRIYKFRGKGWDWEVDTENGNYDYLMYADIDMDHPEVVNELRNWGVWYTNTLGLDGFRIDAVKHIKYSFTRDWLTHVRNTTGKNMFAVAEFWKNDIGAIENYLSKTNWNHSVFDVPLHYNLYNASRSGGNYDMRQIFNGTVVQRHPTHAVTFVDNHDSQPEEALESFVEEWFKPLAYALTLTRDQGYPSVFYGDYYGIPTHGVPAMKSKIDPILEARQKYAYGTQRDYLDHPDVIGWTREGDGVHADSGLATLMSDGPGGSKWMEVGKNNAGEVWYDITGNQTNTVTINKDGWGQFHVSGGSVSIYVQQ

SEQ ID NO: 24424 - protein, 483 aa, Bacillus licheniformis
HHNGTNGTMMQYFEWYLPNDGNHWNRLRSDASNLKDKGITAVWIPPAWKGASQNDVGYGAYDLYDLGEFNQKGTVRTKYGTRNQLQAAVYALKSNGIQVYGDVVMNHKGGADATEWVRAVEVNPSNRNQEVSGDYTIEAWTKFDFPGRGNTHSNFKWRWYHFDGVDWDQSRQLQNRIYKFRGKGWDWEVDTENGNYDYLMYADIDMDHPEVVNELRNWGVWYTNTLGLDGFRIDAVKHIKYSFTRDWLTHVRNTTGKNMFAVAEFWKNDIGAIENYLSKTNWNHSVFDVPLHYNLYNASRSGGNYDMRQIFNGTVVQRHPTHAVTFVDNHDSQPEEALESFVEEWFKPLAYALTLTRDQGYPSVFYGDYYGIPTHGVPAMKSKIDPILEARQKYAYGTQRDYLDHPDVIGWTREGDGVHADSGLATLMSDGPGGSKWMEVGKNNAGEVWYDITGNQTNTVTINKDGWGQFHVSGGSVSIYVQQ

SEQ ID NO: 24425 - protein, 483 aa, Bacillus licheniformis
HHNGTNGTMMQYFEWYLPNDGNHWNRLRSDASNLKDKGITAVWIPPAWKGASQNDVGYGAYDLYDLGEFNQKGTVRTKYGTRNQLQAAVTALKSNGIQVYGDVVMNHKGGADATEWVRAVEVNPSNRNQEVSGDYTIEAWTKFDFPGRGNTHSNFKWRWYHFDGVDWDQSRQLQNRIYKFRGKGWDWEVDTENGNYDYLMYADIDMDHPEVVNELRAWGVWYTNTLGLDGFRIDAVKHIKYSFTRDWLTHVRNTTGKNMFAVAEFWKNDIGAIENYLSKTNWNHSVFDVPLHYNLYNASRSGGNYDMRQIFNGTVVQRHPTHAVTFVDNHDSQPEEALESFVEEWFKPLAYALTLTRDQGYPSVFYGDYYGIPTHGVPAMKSKIDPILEARQKYAYGTQRDYLDHPDVIGWTREGDGVHADSGLATLMSDGPGGSKWMEVGKNNAGEVWYDITGNQTNTVTINKDGWGQFHVSGGSVSIYVQQ

SEQ ID NO: 24426 - protein, 483 aa, Bacillus licheniformis
HHNGTNGTMMQYFEWYLPNDGNHWNRLRSDASNLKDKGITAVWIPPAWKGASQNDVGYGAYDLYDLGEFNQKGTVRTKYGTRNQLQAAVGALKSNGIQVYGDVVMNHKGGADATEWVRAVEVNPSNRNQEVSGDYTIEAWTKFDFPGRGNTHSNFKWRWYHFDGVDWDQSRQLQNRIYKFRGKGWDWEVDTENGNYDYLMYADIDMDHPEVVNELRNWGVWYTNTLGLDGFRIDAVKHIKYSFTRDWLTHVRNTTGKNMFAVAEFWKNDIGAIENYLSKTNWNHSVFDVPLHYNLYNASRSGGNYDMRQIFNGTVVQRHPTHAVTFVDNHDSQPEEALESFVEEWFKPLAYALTLTRDQGYPSVFYGDYYGIPTHGVPAMKSKIDPILEARQKYAYGTQRDYLDHPDVIGWTREGDGVHADSGLATLMSDGPGGSKWMEVGKNNAGEVWYDITGNQTNTVTINKDGWGQFHVSGGSVSIYVQQ

SEQ ID NO: 24427 - protein, 483 aa, Bacillus licheniformis
HHNGTNGTMMQYFEWYLPNDGNHWNRLRSDASNLKQKGITAVWIPPAWKGASQNDVGYGAYDLYDLGEFNQKGTVRTKYGTRNQLQAAVTALKSNGIQVYGDVVMNHKGGADATEWVRAVEVNPSNRNQEVSGDYTIEAWTKFDFPGRGNTHSNFKWRWYHFDGVDWDQSRQLQNRIYKFRGKGWDWEVDTENGNYDYLMYADIDMDHPEVVNELRNWGVWYTNTLGLDGFRIDAVKHIKYSFTRDWLTHVRNTTGKNMFAVAEFWKNDIGAIENYLSKTNWNHSVFDVPLHYNLYNASRSGGNYDMRQIFNGTVVQRHPTHAVTFVDNHDSQPEEALESFVEEWFKPLAYALTLTRDQGYPSVFYGDYYGIPTHGVPAMKSKIDPILEARQKYAYGTQRDYLDHPDVIGWTREGDGVHADSGLATLMSDGPGGSKWMEVGKNNAGEVWYDITGNQTNTVTINKDGWGQFHVSGGSVSIYVQQ

SEQ ID NO: 24428 - protein, 483 aa, Bacillus licheniformis
HHNGTNGTMMQYFEWYLPNDGNHWNRLRSDASNLKDKGITAVWIPPAWKGASQNDVGYGAYDLYDLGEFNQKGTVRTKYGTRNQLQAAVRALKSNGIQVYGDVVMNHKGGADATEWVRAVEVNPSNRNQEVSGDYTIEAWTKFDFPGRGNTHSNFKWRWYHFDGVDWDQSRQLQNRIYKFRGKGWDWEVDTENGNYDYLMYADIDMDHPEVVNELRNWGVWYTNTLGLDGFRIDAVKHIKYSFTRDWLTHVRNTTGKNMFAVAEFWKNDIGAIENYLSKTNWNHSVFDVPLHYNLYNASRSGGNYDMRQIFNGTVVQRHPTHAVTFVDNHDSQPEEALESFVEEWFKPLAYALTLTRDQGYPSVFYGDYYGIPTHGVPAMKSKIDPILEARQKYAYGTQRDYLDHPDVIGWTREGDGVHADSGLATLMSDGPGGSKWMEVGKNNAGEVWYDITGNQTNTVTINKDGWGQFHVSGGSVSIYVQQ

SEQ ID NO: 24429 - protein, 483 aa, Bacillus licheniformis
HHNGTNGTMMQYFEWYLPNDGNHWNRLRSDASNLMDKGITAVWIPPAWKGASQNDVGYGAYDLYDLGEFNQKGTVRTKYGTRNQLQAAVTALKSNGIQVYGDVVMNHKGGADATEWVRAVEVNPSNRNQEVSGDYTIEAWTKFDFPGRGNTHSNFKWRWYHFDGVDWDQSRQLQNRIYKFRGKGWDWEVDTENGNYDYLMYADIDMDHPEVVNELRNWGVWYTNTLGLDGFRIDAVKHIKYSFTRDWLTHVRNTTGKNMFAVAEFWKNDIGAIENYLSKTNWNHSVFDVPLHYNLYNASRSGGNYDMRQIFNGTVVQRHPTHAVTFVDNHDSQPEEALESFVEEWFKPLAYALTLTRDQGYPSVFYGDYYGIPTHGVPAMKSKIDPILEARQKYAYGTQRDYLDHPDVIGWTREGDGVHADSGLATLMSDGPGGSKWMEVGKNNAGEVWYDITGNQTNTVTINKDGWGQFHVSGGSVSIYVQQ

SEQ ID NO: 24430 - protein, 483 aa, Bacillus licheniformis
HHNGTNGTMMQYFEWYLPNDGNHWNRLRSDASNLKDKGITAVWIPPAWKGASQNDVGYGAYDLYDLGEFNQKGTVRTKYGTRNQLQAAVTALKSNGIQVYGDVVMNHKGGADATEWVRAVEVNPSNRNQEVSGDYTIEAWTKFDFPGRGNTHSNFKWRWYHFDGVDWDQSRQLQNRIYKFRGKGWDWEVDTENGNYDYLMYADIDMDHPEVVNELRNWGVWYTNTLGLDGFRIDAVKHIKYSFTRDWLTHVRNTTGKNMFAVAEFWKNDIGAIENYLSKTNWNHSVFDVPLHYNLYNASRSGGNYDMRQIFNGTVVQRHPTHAVTFVDNHDSQPEEALESFVEEWFKPLAYALTLTRDQGYPSVFYGDYYGIPTHGVPAMKSKIDPILEARQKYAYGTQRDYLDHPDVIGWTREGDGVHADSGLATLMSDGPGGSKWMEVGKNNAGEVWYDITGNITNTVTINKDGWGQFHVSGGSVSIYVQQ

SEQ ID NO: 24431 - protein, 483 aa, Bacillus licheniformis
HHNGTNGTMMQYFEWYLPNDGNHWNRLRSDASNLKDKGITAVWIPPAWKGASQNDVGYGAYDLYDLGEFNQKGTVRTKYGTRNQLQAAVTALKSNGIQVYGDVVMNHKGGADATEWVRAVEVNPSNRNQEVSGDYTIEAWTKFDFPGRGNTHSNFKWRWYHFDGVDWDQSRQLQNRIYKFRGKGWDWEVDTENGNYDYLMYADIDMDHPEVVNELRNWGVWYTNTLGLDGFRIDAVKHIKYSFTRDWLTHVRNTTGKNMFAVAEFWKNDIGAIENYLSKTNWNHSVFDVPLHYNLYNASRSGGNYDMRQIFNGTVVQRHPTHAVTFVDNHDSQPEEALESFVEEWFKPLAYALTLTRDQGYPSVFYGDYYGIPTHGVPAMKSKIDPILEARQKYAYGTQRDYLDHPDVIGWTREGDGVHADSGLATLMSDGPGGSKWMEVGKNNAGMVWYDITGNQTNTVTINKDGWGQFHVSGGSVSIYVQQ

SEQ ID NO: 24432 - protein, 483 aa, Bacillus licheniformis
HHNGTNGTMMQYFEWYLPNDGNHWHRLRSDASNLKDKGITAVWIPPAWKGASQNDVGYGAYDLYDLGEFNQKGTVRTKYGTRNQLQAAVTALKSNGIQVYGDVVMNHKGGADATEWVRAVEVNPSNRNQEVSGDYTIEAWTKFDFPGRGNTHSNFKWRWYHFDGVDWDQSRQLQNRIYKFRGKEWDWEVDTENGNYDYLMYADYDMDHPEVVNELRNWGVWYTNTLGLDGFRIDAVKHIKYSFTRDWLTHVRNTTGKNMFAVAEFWKNDIGAIENYLSKTNWNHSVFDVPLHYNLYNASRSGGNYDMRQIFNGTVVQRHPTHAVTFVDNHDSQPEEALESFVEEWFKPLAYALTLTRDQGYPSVFYGDYYGIPTHGVPAMKSKIDPILEARQKYAYGTQRDYMDHPDVIGWTREGDGVHADSGLATLMSDGPGGSKWMEVGKNNAGEVWYDITGNQTNTVTINKDGWGQFHVSGGSVSIWVQQ

SEQ ID NO: 24433 - protein, 483 aa, Bacillus licheniformis
HHNGTNGTMMQYFEWYLPNDGNHWNRLRSDASNLKDKGITAVWIPPAWKGASQNDVGYGAYDLYDLGEFNQKGTVRTKYGTRNQLQAAVTALKSNGIQVYGDVVMNHKGGADATEWVRAVEVNPSNRNQEVSGDYTIEAWTKFDFPGRGNTHSNFKWRWYHFDGVDWDQSRQLQNRIYKFRGKGWDWEVDTENGNYDYLMYADIDMDHPEVVNELRNWGVWYTNTLGLDGFRIDAVKHIKYSFTRDWLTHVRNTTGKNMFAVAEFWKNDIGAIENYLSKTNWNHSVFDVPLHYNLYNASRSGGNYDMRQIFNGTVVQRHPTHAVTFVDNHDSQPEEALESFVEEWFKPLAYALTLTRDQGYPSVFYGDYYGIPTHGVPAMKSKIDPILEARQKYAYGTQRDYMDHPDVIGWTREGDGVHADSGLATLMSDGPGGSKWMEVGKNNAGEVWYDITGNQTNTVTINKDGWGQFHVSGGSVSIYVQQ

SEQ ID NO: 24434 - protein, 483 aa, Bacillus licheniformis
HHNGTNGTMMQYFEWYLPNDGNHWNRLRSDASNLKDKGITAVWIPPAWKGASQNDVGYGAYDLYDLGEFNQKGTVRTKYGTRNQLQAAFTALKSNGIQVYGDVVMNHKGGADATEWVRAVEVNPSNRNQEVSGDYTIEAWTKFDFPGRGNTHSNFKWRWYHFDGVDWDQSRQLQNRIYKFRGKGWDWEVDTENGNYDYLMYADIDMDHPEVVNELRNWGVWYTNTLGLDGFRIDAVKHIKYSFTRDWLTHVRNTTGKNMFAVAEFWKNDIGAIENYLSKTNWNHSVFDVPLHYNLYNASRSGGNYDMRQIFNGTVVQRHPTHAVTFVDNHDSQPEEALESFVEEWFKPLAYALTLTRDQGYPSVFYGDYYGIPTHGVPAMKSKIDPILEARQKYAYGTQRDYLDHPDVIGWTREGDGVHADSGLATLMSDGPGGSKWMEVGKNNAGEVWYDITGNQTNTVTINKDGWGQFHVSGGSVSIYVQQ

SEQ ID NO: 24435 - protein, 483 aa, Bacillus licheniformis
HHNGTNGTMMQYFEWYLPNDGNHWNRLRSDASNLKDKGITAVWIPPAWKGASQNDVGYGAYDLYDLGEFNQKGTVRTKYGTRNQLQAAVTALKSNGIQVYGDVVMNHKGGADATEWVRAVEVNPSNRNQEVSGDYTIEAWTKFDFPGRGNTHSYFKWRWYHFDGVDWDQSRQLQNRIYKFRGKGWDWEVDTENGNYDYLMYADIDMDHPEVVNELRNWGVWYTNTLGLDGFRIDAVKHIKYSFTRDWLTHVRNTTGKNMFAVAEFWKNDIGAIENYLSKTNWNHSVFDVPLHYNLYNASRSGGNYDMRQIFNGTVVQRHPTHAVTFVDNHDSQPEEALESFVEEWFKPLAYALTLTRDQGYPSVFYGDYYGIPTHGVPAMKSKIDPILEARQKYAYGTQRDYLDHPDVIGWTREGDGVHADSGLATLMSDGPGGSKWMEVGKNNAGEVWYDITGNQTNTVTINKDGWGQFHVSGGSVSIYVQQ

SEQ ID NO: 24436 - protein, 483 aa, Bacillus licheniformis
HHNGTNGTMMQYFEWYLPNDGNHWNRLRSDASNLKDKGITAVWIPPAWKGASQNDVGYGAYDLYDLGEFNQKGTVRTKYGTRNQLQAAVTALKSNGIQVYGDVVMNHKGGADATEWVRAVEVNPENRNQEVSGDYTIEAWTKFDFPGRGNTHSNFKWRWYHFDGVDWDQSRQLQNRIYKFRGKGWDWEVDTENGNYDYLMYADIDMDHPEVVNELRNWGVWYTNTLGLDGFRIDAVKHIKYSFTRDWLTHVRNTTGKNMFAVAEFWKNDIGAIENYLSKTNWNHSVFDVPLHYNLYNASRSGGNYDMRQIFNGTVVQRHPTHAVTFVDNHDSQPEEALESFVEEWFKPLAYALTLTRDQGYPSVFYGDYYGIPTHGVPAMKSKIDPILEARQKYAYGTQRDYLDHPDVIGWTREGDGVHADSGLATLMSDGPGGSKWMEVGKNNAGEVWYDITGNQTNTVTINKDGWGQFHVSGGSVSIYVQQ

SEQ ID NO: 24437 - protein, 483 aa, Bacillus licheniformis
HHNGTNGTMMQYFEWYLPNDGNHWNRLRSDASNLKDKGITAVWIPPAWKGASQNDVGYGAYDLYDLGEFNQKGTVRTKYGTRNQLQAAVTALKSNGIQVYGDVVMNHKGGADATEWVRAVEVNPSNRNQEVSGDYTIEAWTKFDFPGRGNTHSNFKWRWYHFDGVDWDQSRQLQNRIYKFRGKGWDWEVDTENGNYDYLMYADIDMDHPEVVNELRNWGVWYTNTLGLDGFRIDAVKHIKYSFTRDWLTHVRNTTGKNMFAVAEFWKNDIGAIENYLSKTNWNHSVFDVPLHYNLYNASRSGGNYDMRQIFNGTVVQLHPTHAVTFVDNHDSQPEEALESFVEEWFKPLAYALTLTRDQGYPSVFYGDYYGIPTHGVPAMKSKIDPILEARQKYAYGTQRDYLDHPDVIGWTREGDGVHADSGLATLMSDGPGGSKWMEVGKNNAGEVWYDITGNQTNTVTINKDGWGQFHVSGGSVSIYVQQ

SEQ ID NO: 24438 - protein, 483 aa, Bacillus licheniformis
HHNGTNGTMMQYFEWYLPNDGNHWNRLRSDASNLKDKGITAVWIPPAWKGASQNDVGYGAYDLYDLGEFNQKGTVRTKYGTRNQLQAACTALKSNGIQVYGDVVMNHKGGADATEWVRAVEVNPSNRNQEVSGDYTIEAWTKFDFPGRGNTHSNFKWRWYHFDGVDWDQSRQLQNRIYKFRGKGWDWEVDTENGNYDYLMYADIDMDHPEVVNELRNWGVWYTNTLGLDGFRIDAVKHIKYSFTRDWLTHVRNTTGKNMFAVAEFWKNDIGAIENYLSKTNWNHSVFDVPLHYNLYNASRSGGNYDMRQIFNGTVVQRHPTHAVTFVDNHDSQPEEALESFVEEWFKPLAYALTLTRDQGYPSVFYGDYYGIPTHGVPAMKSKIDPILEARQKYAYGTQRDYLDHPDVIGWTREGDGVHADSGLATLMSDGPGGSKWMEVGKNNAGEVWYDITGNQTNTVTINKDGWGQFHVSGGSVSIYVQQ

SEQ ID NO: 24439 - protein, 483 aa, Bacillus licheniformis
HHNGTNGTMMQYFEWYLPNDGNHWNRLRSDASNLKDKGITAVWIPPAWKGASQNDVGYGAYDLYDLGEFNQKGTVRTKYGTRNQLQAAVTALKSNGIQVYGDVVMNHKGGADATEWVRAVEVNPVNRNQEVSGDYTIEAWTKFDFPGRGNTHSNFKWRWYHFDGVDWDQSRQLQNRIYKFRGKGWDWEVDTENGNYDYLMYADIDMDHPEVVNELRNWGVWYTNTLGLDGFRIDAVKHIKYSFTRDWLTHVRNTTGKNMFAVAEFWKNDIGAIENYLSKTNWNHSVFDVPLHYNLYNASRSGGNYDMRQIFNGTVVQRHPTHAVTFVDNHDSQPEEALESFVEEWFKPLAYALTLTRDQGYPSVFYGDYYGIPTHGVPAMKSKIDPILEARQKYAYGTQRDYLDHPDVIGWTREGDGVHADSGLATLMSDGPGGSKWMEVGKNNAGEVWYDITGNQTNTVTINKDGWGQFHVSGGSVSIYVQQ

SEQ ID NO: 24440 - protein, 483 aa, Bacillus licheniformis
HHNGTNGTMMQYFEWYLPNDGNHWNRLRSDASNLKDKGITAVWIPPAWKGASQNDVGYGAYDLYDLGEFNQKGTVRTKYGTRNQLQAAVTALKYNGIQVYGDVVMNHKGGADATEWVRAVEVNPSNRNQEVSGDYTIEAWTKFDFPGRGNTHSNFKWRWYHFDGVDWDQSRQLQNRIYKFRGKGWDWEVDTENGNYDYLMYADIDMDHPEVVNELRNWGVWYTNTLGLDGFRIDAVKHIKYSFTRDWLTHVRNTTGKNMFAVAEFWKNDIGAIENYLSKTNWNHSVFDVPLHYNLYNASRSGGNYDMRQIFNGTVVQRHPTHAVTFVDNHDSQPEEALESFVEEWFKPLAYALTLTRDQGYPSVFYGDYYGIPTHGVPAMKSKIDPILEARQKYAYGTQRDYLDHPDVIGWTREGDGVHADSGLATLMSDGPGGSKWMEVGKNNAGEVWYDITGNQTNTVTINKDGWGQFHVSGGSVSIYVQQ

SEQ ID NO: 24441 - protein, 483 aa, Bacillus licheniformis
HHNGTNGTMMQYFEWYLPNDGNHWNRLRSDASNLKDKGITAVWIPPAWKGASQNDVGYGAYDLYDLGEFNQKGTVRTKYGTRNQLQAAVTALKSNGIQVYGDVVMNHKGGADATEWVRAVEVNPSNRNQEVSGDYTIEAWTKFDFPGRGNTHSNFKWRWYHFDGVDWDQSRQLQNRIYKFRGKGWDWEVDTENGNYDYLMYADIDMDHPEVVNELRNWGVWYTNTLGLDGFRIDAVKHIKYSFTRDWLTHVRNTTGKNMFAVAEFWKNDIGAIENYLSKTNWNHSVFDVPLHYNLYNASRSGGNYDMRQIFNGTVVQRHPTHAVTFVDNHDSQPEEALESFVEEWFKPLAYALTLTRMQGYPSVFYGDYYGIPTHGVPAMKSKIDPILEARQKYAYGTQRDYLDHPDVIGWTREGDGVHADSGLATLMSDGPGGSKWMEVGKNNAGEVWYDITGNQTNTVTINKDGWGQFHVSGGSVSIYVQQ

SEQ ID NO: 24442 - protein, 483 aa, Bacillus licheniformis
HHNGTNGTMMQYFEWYLPNDGNHWNRLRSDASNLKDKGITAVWIPPAWKGASQNDVGYGAYDLYDLGEFNQKGTVRTKYGTRNQLQAAVTALKSNGIQVYGDVVMNHKGGADATEWVRAVEVNPSNRNQEVSGDYTIEAWTKFDFPGRGNTHSNFKWRWYHFDGVDWDQSRQLQNRIYKFRGKGWDWEVDTENGNYDYLMYADIDMDHPEVVNELRNWGVWYTNTLGLDGFRIDAVKHIKYSFTRDWLTHVRNTTGKNMFAVAEFWKNDIGAIENYLSKTNWNHSVFDVPLHYNLYNASRSGGNYDMRQIFNGTVVQRHPTHAVTFVDNHDSQPEEALESFVEEWFKPLAYALTLTRDQGYPSVFYGDYYGIPTHGVPAMKSKIDPILEARQKYAYGTQRDYLDHPDVIGWTREGDGVHADSGLATLMSDGPGGSKWMEVGKNNAGEVWYDITGNQQNTVTINKDGWGQFHVSGGSVSIYVQQ

SEQ ID NO: 24443 - protein, 483 aa, Bacillus licheniformis
HHNGTNGTMMQYFEWYLPNDGNHWNRLRSDASNLKDKGITAVWIPPAWKGASQNDVGYGAYDLYDLGEFNQKGTVRTKYGTRNQLQAAVTALKSNGIQVYGDVVMNHKGGADATEWVRAVEVNPSNRNQEVSGDYTIEAWTKFDFPGRGNTHSNFKWRWYHFDGVDWDQSRQLQNRIYKFRGKGWDWEVDTENGNYDYLMYADIDMDHPEVVNELRNWGVWYTNTLGLDGFRIDAVKHIKYSFTRDWLTHVRNTTGKNMFAVAEFWKNDIGAIENYLSKTNWNHSVFDVPLHYNLYNASRSGGNYDMRTIFNGTVVQRHPTHAVTFVDNHDSQPEEALESFVEEWFKPLAYALTLTRDQGYPSVFYGDYYGIPTHGVPAMKSKIDPILEARQKYAYGTQRDYLDHPDVIGWTREGDGVHADSGLATLMSDGPGGSKWMEVGKNNAGEVWYDITGNQTNTVTINKDGWGQFHVSGGSVSIYVQQ

SEQ ID NO: 24444 - protein, 483 aa, Bacillus licheniformis
HHNGTNGTMMQYFEWYLPNDGNHWNRLRSDASNLKDKGITAVWIPPAWKGASQNDVGYGAYDLYDLGEFNQKGTVRTKYGTRNQLQAAVTALKSNGIQVYGDVVMNHKGGADATEWVRAVEVNPSNRNQEVSGDYTIEAWTKFDFPGRGNTHSNFKWRWYHFDGVDWDQSRQLQNRIYKFRGKGWDWEVDTENGNYDYLMYADIDMDHPEVVNELRNWGVWYTNTLGLDGFRIDAVKHIKYSFTRDWLTHVRNTTGKNMFAVAEFWKNDIGAIENYLSKTNWNHSVFDVPLHYNLYNASRSGGNYDMRQIFNGTVVQRHPTHAVTFVDNHDSQPEEALESFVEEWFKPLAYALTLTRSQGYPSVFYGDYYGIPTHGVPAMKSKIDPILEARQKYAYGTQRDYLDHPDVIGWTREGDGVHADSGLATLMSDGPGGSKWMEVGKNNAGEVWYDITGNQTNTVTINKDGWGQFHVSGGSVSIYVQQ

SEQ ID NO: 24445 - protein, 483 aa, Bacillus licheniformis
HHNGTNGTMMQYFEWYLPNDGNHWNRLRSDASNLKPKGITAVWIPPAWKGASQNDVGYGAYDLYDLGEFNQKGTVRTKYGTRNQLQAAVTALKSNGIQVYGDVVMNHKGGADATEWVRAVEVNPSNRNQEVSGDYTIEAWTKFDFPGRGNTHSNFKWRWYHFDGVDWDQSRQLQNRIYKFRGKGWDWEVDTENGNYDYLMYADIDMDHPEVVNELRNWGVWYTNTLGLDGFRIDAVKHIKYSFTRDWLTHVRNTTGKNMFAVAEFWKNDIGAIENYLSKTNWNHSVFDVPLHYNLYNASRSGGNYDMRQIFNGTVVQRHPTHAVTFVDNHDSQPEEALESFVEEWFKPLAYALTLTRDQGYPSVFYGDYYGIPTHGVPAMKSKIDPILEARQKYAYGTQRDYLDHPDVIGWTREGDGVHADSGLATLMSDGPGGSKWMEVGKNNAGEVWYDITGNQTNTVTINKDGWGQFHVSGGSVSIYVQQ

SEQ ID NO: 24446 - protein, 483 aa, Bacillus licheniformis
HHNGTNGTMMQYFEWYLPNDGNHWNRLRSDASNLKDKGITAVWIPPAWKGASQNDVGYGAYDLYDLGEFNQKGTVRTKYGTRNQLQAAVTALKSNGIQVYGDVVMNHKGGADATEWVRAVEVNPSNRNQEVSGDYTIEAWTKFDFPGRGNTHSNFKWRWYHFDGVDWDQSRQLQNRIYKFRGKGWDWEVDTENGNYDYLMYADIDMDHPEVVNELRNWGVWYTNTLGLDGFRIDAVKHIKYSFTRDWLTHVRNTTGKNMFAVAEFWKNDIGAIENYLSKTNWNHSVFDVPLHYNLYNASRSGGNYDMRQIFNGTVVQRHPTHAVTFVDNHDSQPEEALESFVEEWFKPLAYALTLTRIQGYPSVFYGDYYGIPTHGVPAMKSKIDPILEARQKYAYGTQRDYLDHPDVIGWTREGDGVHADSGLATLMSDGPGGSKWMEVGKNNAGEVWYDITGNQTNTVTINKDGWGQFHVSGGSVSIYVQQ

SEQ ID NO: 24447 - protein, 483 aa, Bacillus licheniformis
HHNGTNGTMMQYFEWYLPNDGNHWNRLRSDASNLKDKGITAVWIPPAWKGASQNDVGYGAYDLYDLGEFNQKGTVRTKYGTRNQLQAAVTALKSNGIQVYGDVVMNHKGGADATEWVRAVEVNPSNRNQEVSGDYTIEAWTKFDFPGRGNTHSNFKWRWYHFDGVDWDQSRQLQNRIYKFRGKEWDWEVDTENGNYDYLMYADYDMDHPEVVNELRNWGVWYTNTLGLDGFRIDAVKHIKYSFTRDWLTHVRNTTGKNMFAVAEFWKNDIGAIENYLSKTNWNHSVFDVPLHYNLYNASRSGGNYDMRQIFNGTVVQRHPTHAVTFVDNHDSQPEEALESFVEEWFKPLAYALTLTRDQGYPSVFYGDYYGIPTHGVPAMKSKIDPILEARQKYAYGTQRDYLDHPDVIGWTREGDGVHADSGLATLMSDGPGGSKWMEVGKNNAGEVWYDITGNQTNTVTINKDGWGQFHVSGGSVSIYVQQ

SEQ ID NO: 24448 - protein, 483 aa, Bacillus licheniformis
HHNGTNGTMMQYFEWYLPNDGNHWNRLRSDASNLGDKGITAVWIPPAWKGASQNDVGYGAYDLYDLGEFNQKGTVRTKYGTRNQLQAAVTALKSNGIQVYGDVVMNHKGGADATEWVRAVEVNPSNRNQEVSGDYTIEAWTKFDFPGRGNTHSNFKWRWYHFDGVDWDQSRQLQNRIYKFRGKGWDWEVDTENGNYDYLMYADIDMDHPEVVNELRNWGVWYTNTLGLDGFRIDAVKHIKYSFTRDWLTHVRNTTGKNMFAVAEFWKNDIGAIENYLSKTNWNHSVFDVPLHYNLYNASRSGGNYDMRQIFNGTVVQRHPTHAVTFVDNHDSQPEEALESFVEEWFKPLAYALTLTRDQGYPSVFYGDYYGIPTHGVPAMKSKIDPILEARQKYAYGTQRDYLDHPDVIGWTREGDGVHADSGLATLMSDGPGGSKWMEVGKNNAGEVWYDITGNQTNTVTINKDGWGQFHVSGGSVSIYVQQ

SEQ ID NO: 24449 - protein, 483 aa, Bacillus licheniformis
HHNGTNGTMMQYFEWYLPNDGNHWNRLRSDASNLKDKGITAVWIPPAWKGASQNDVGYGAYDLYDLGEFNQKGTVRTKYGTRNQLQAASTALKSNGIQVYGDVVMNHKGGADATEWVRAVEVNPSNRNQEVSGDYTIEAWTKFDFPGRGNTHSNFKWRWYHFDGVDWDQSRQLQNRIYKFRGKGWDWEVDTENGNYDYLMYADIDMDHPEVVNELRNWGVWYTNTLGLDGFRIDAVKHIKYSFTRDWLTHVRNTTGKNMFAVAEFWKNDIGAIENYLSKTNWNHSVFDVPLHYNLYNASRSGGNYDMRQIFNGTVVQRHPTHAVTFVDNHDSQPEEALESFVEEWFKPLAYALTLTRDQGYPSVFYGDYYGIPTHGVPAMKSKIDPILEARQKYAYGTQRDYLDHPDVIGWTREGDGVHADSGLATLMSDGPGGSKWMEVGKNNAGEVWYDITGNQTNTVTINKDGWGQFHVSGGSVSIYVQQ

SEQ ID NO: 24450 - protein, 483 aa, Bacillus licheniformis
HHNGTNGTMMQYFEWYLPNDGNHWNRLRSDASNLKDKGITAVWIPPAWKGASQNDVGYGAYDLYDLGEFNQKGTVRTKYGTRNQLQAAVTALKSNGIQVYGDVVMNHKGGADATEWVRAVEVNPSNRNQEVSGDYTIEAWTKFDFPGRGNTHSNFKWRWYHFDGVDWDQSRQLQNRIYKFRGKGWDWEVDTENGNYDYLMYADIDMDHPEVVNELRNWGVWYTNTLGLDGFRIDAVKHIKYSFTRDWLTHVRNTTGKNMFAVAEFWKNDIGAIENYLSKTNWNHSVFDVPLHYNLYNASRSGGNYDMRQIVNGTVVQRHPTHAVTFVDNHDSQPEEALESFVEEWFKPLAYALTLTRDQGYPSVFYGDYYGIPTHGVPAMKSKIDPILEARQKYAYGTQRDYLDHPDVIGWTREGDGVHADSGLATLMSDGPGGSKWMEVGKNNAGEVWYDITGNQTNTVTINKDGWGQFHVSGGSVSIYVQQ

SEQ ID NO: 24451 - protein, 483 aa, Bacillus licheniformis
HHNGTNGTMMQYFEWYLPNDGNHWNRLRSDASNLKDKGITAVWIPPAWKGASQNDVGYGAYDLYDLGEFNQKGTVRTKYGTRNQLQAAVTALKSNGIQVYGDVVMNHKGGADATEWVRAVEVNPSNRNQEVSGDYTIEAWTKFDFPGRGNTHSNFKWRWYHFDGVDWDQSRQLQNRIYKFRGKGWDWEVDTENGNYDYLMYADIDMDHPEVVNELRNWGVWYTNTLGLDGFRIDAVKHIKYSFTRDWLTHVRNTTGKNMFAVAEFWKNDIGAIENYLSKTNWNHSVFDVPLHYNLYNASRSGGNYDMRQIFNGTVVQRHPTHAVTFVDNHDSQPFEALESFVEEWFKPLAYALTLTRDQGYPSVFYGDYYGIPTHGVPAMKSKIDPILEARQKYAYGTQRDYLDHPDVIGWTREGDGVHADSGLATLMSDGPGGSKWMEVGKNNAGEVWYDITGNQTNTVTINKDGWGQFHVSGGSVSIYVQQ

SEQ ID NO: 24452 - protein, 483 aa, Bacillus licheniformis
HHNGTNGTMMQYFEWYLPNDGNHWNRLRSDASNLVDKGITAVWIPPAWKGASQNDVGYGAYDLYDLGEFNQKGTVRTKYGTRNQLQAAVTALKSNGIQVYGDVVMNHKGGADATEWVRAVEVNPSNRNQEVSGDYTIEAWTKFDFPGRGNTHSNFKWRWYHFDGVDWDQSRQLQNRIYKFRGKGWDWEVDTENGNYDYLMYADIDMDHPEVVNELRNWGVWYTNTLGLDGFRIDAVKHIKYSFTRDWLTHVRNTTGKNMFAVAEFWKNDIGAIENYLSKTNWNHSVFDVPLHYNLYNASRSGGNYDMRQIFNGTVVQRHPTHAVTFVDNHDSQPEEALESFVEEWFKPLAYALTLTRDQGYPSVFYGDYYGIPTHGVPAMKSKIDPILEARQKYAYGTQRDYLDHPDVIGWTREGDGVHADSGLATLMSDGPGGSKWMEVGKNNAGEVWYDITGNQTNTVTINKDGWGQFHVSGGSVSIYVQQ

SEQ ID NO: 24453 - protein, 483 aa, Bacillus licheniformis
HHNGTNGTMMQYFEWYLPNDGNHWNRLRSDASNLKDKGITAVWIPPAWKGASQNDVGYGAYDLYDLGEFNQKGTVRTKYGTRNQLQAAVTALKSNGIQVYGDVVMNHKGGADATEWVRAVEVNPSNRNQEVSGDYTIEAWTKFDFPGRGNTHSNFKWRWYHFDGVDWDQSRQLQNRIYKFRGKGWDWEVDTENGNYDYLMYADIDMDHPEVVNELRWWGVWYTNTLGLDGFRIDAVKHIKYSFTRDWLTHVRNTTGKNMFAVAEFWKNDIGAIENYLSKTNWNHSVFDVPLHYNLYNASRSGGNYDMRQIFNGTVVQRHPTHAVTFVDNHDSQPEEALESFVEEWFKPLAYALTLTRDQGYPSVFYGDYYGIPTHGVPAMKSKIDPILEARQKYAYGTQRDYLDHPDVIGWTREGDGVHADSGLATLMSDGPGGSKWMEVGKNNAGEVWYDITGNQTNTVTINKDGWGQFHVSGGSVSIYVQQ

SEQ ID NO: 24454 - protein, 483 aa, Bacillus licheniformis
HHNGTNGTMMQYFEWYLPNDGNHWNRLRSDASNLKDKGITAVWIPPAWKGASQNDVGYGAYDLYDLGEFNQKGTVRTKYGTRNQLQAAVTALKSNGIQVYGDVVMNHKGGADATEWVRAVEVNPSNRNQEVSGDYTIEAWTKFDFPGRGNTHSNFKWRWYHFDGVDWDQSRQLQNRIYKFRGKGWDWEVDTENGNYDYLMYADIDMDHPEVVNELRNWGVWYTNTLGLDGFRIDAVKHIKYSFTRDWLTHVRNTTGKNMFAVAEFWKNDIGAIENYLSKTNWNHSVFDVPLHYNLYNASRSGGNYDMRQIFNGTVVQRHPTHAVTFVDNHDSQPEEALESFVEEWFKPLAYALTLTRDQGYPSVFYGDYYGIPTHGVPAMKSKIDPILEARQKYAYGTQRDYLDHPDVIGWTREGDGVHADSGLATLMSDGPGGSKWMEVGKNNAGEVWYDITGNQTVTVTINKDGWGQFHVSGGSVSIYVQQ

SEQ ID NO: 24455 - protein, 483 aa, Bacillus licheniformis
HHNGTNGTMMQYFEWFLPNDGNHWNRLRSDASNLKDKGITAVWIPPAWKGASQNDVGYGAYDLYDLGEFNQKGTVRTKYGTRNQLQAAVTALKSNGIQVYGDVVMNHKGGADATEWVRAVEVNPSNRNQEVSGDYTIEAWTKFDFPGRGNTHSNFKWRWYHFDGVDWDQSRQLQNRIYKFRGKGWDWEVDTENGNYDYLMYADIDMDHPEVVNELRNWGVWYTNTLGLDGFRIDAVKHIKYSFTRDWLTHVRNTTGKNMFAVAEFWKNDIGAIENYLSKTNWNHSVFDVPLHYNLYNASRSGGNYDMRQIFNGTVVQRHPTHAVTFVDNHDSQPEEALESFVEEWFKPLAYALTLTRDQGYPSVFYGDYYGIPTHGVPAMKSKIDPILEARQKYAYGTQRDYLDHPDVIGWTREGDGVHADSGLATLMSDGPGGSKWMEVGKNNAGEVWYDITGNQTNTVTINKDGWGQFHVSGGSVSIYVQQ

SEQ ID NO: 24456 - protein, 483 aa, Bacillus licheniformis
HHNGTNGTMMQYFEWYLPNDGNHWNRLRSDASNLKDKGITAVWIPPAWKGASQNDVGYGAYDLYDLGEFNQKGTVRTKYGTRNQLQAAVTALKSNGIQVYGDVVMNHKGGADATEWVRAVEVNPSNRNQEVSGDYTIEAWTKFDFPGRGNTHSNFKWRWYHFDGVDWDQSRQLQNRIYKFRGKGWDWEVDTENGNYDYLMYADIDMDHPEVVNELRNWGVWYTNTLGLDGFRIDAVKHIKYSFTRDWLTHVRNTTGKNMFAVAEFWKNDIGAIENYLSKTNWNHSVFDVPLHYNLYNASRSGGNYDMRQIFNGTVVQDHPTHAVTFVDNHDSQPEEALESFVEEWFKPLAYALTLTRDQGYPSVFYGDYYGIPTHGVPAMKSKIDPILEARQKYAYGTQRDYLDHPDVIGWTREGDGVHADSGLATLMSDGPGGSKWMEVGKNNAGEVWYDITGNQTNTVTINKDGWGQFHVSGGSVSIYVQQ

SEQ ID NO: 24457 - protein, 483 aa, Bacillus licheniformis
HHNGTNGTMMQYFEWYLPNDGNHWNRLRSDASNLKDKGITAVWIPPAWKGASQNDVGYGAYDLYDLGEFNQKGTVRTKYGTRNQLQAAVTALKSNGIQVYGDVVMNHKGGADATEWVRAVEVNPSNRNQEVSGDYTIEAWTKFDFPGRGNTHSNFKWRWYHFDGVDWDQSRQLQNRIYKFRGKGWDWEVDTENGNYDYLMYADIDMDHPEVVNELRNWGVWYTNTLGLDGFRIDAVKHIKYSFTRDWLTHVRNTTGKNMFAVAEFWKNDIGAIENYLSKTNWNHSVFDVPLHYNLYNASRSGGNYDMRQIFNGTVVQRHPTHAVTFVDNHDSQPEEALESFVEEWFKPLAYALTLTRDQGYPSVFYGDYYGIPTHGVPAMKSKIDPILEARQKYAYGTQRDYLDHPDVIGWTREGDGVHADSGLATLMSDGPGGSKWMEVGKNQAGEVWYDITGNQTNTVTINKDGWGQFHVSGGSVSIYVQQ

SEQ ID NO: 24458 - protein, 483 aa, Bacillus licheniformis
HHNGTNGTMMQYFEWYLPNDGNHWNRLRSDASNLKDKGITAVWIPPAWKGASQNDVGYGAYDLYDLGEFNQKGTVRTKYGTRNQLQAAVTALKSNGIQVYGDVVMNHKGGADATEWVRAVEVNPGNRNQEVSGDYTIEAWTKFDFPGRGNTHSNFKWRWYHFDGVDWDQSRQLQNRIYKFRGKGWDWEVDTENGNYDYLMYADIDMDHPEVVNELRNWGVWYTNTLGLDGFRIDAVKHIKYSFTRDWLTHVRNTTGKNMFAVAEFWKNDIGAIENYLSKTNWNHSVFDVPLHYNLYNASRSGGNYDMRQIFNGTVVQRHPTHAVTFVDNHDSQPEEALESFVEEWFKPLAYALTLTRDQGYPSVFYGDYYGIPTHGVPAMKSKIDPILEARQKYAYGTQRDYLDHPDVIGWTREGDGVHADSGLATLMSDGPGGSKWMEVGKNNAGEVWYDITGNQTNTVTINKDGWGQFHVSGGSVSIYVQQ

SEQ ID NO: 24459 - protein, 483 aa, Bacillus licheniformis
HHNGTNGTMMQYFEWYLPNDGNHWNRLRSDASNLKDGGITAVWIPPAWKGASQNDVGYGAYDLYDLGEFNQKGTVRTKYGTRNQLQAAVTALKSNGIQVYGDVVMNHKGGADATEWVRAVEVNPSNRNQEVSGDYTIEAWTKFDFPGRGNTHSNFKWRWYHFDGVDWDQSRQLQNRIYKFRGKGWDWEVDTENGNYDYLMYADIDMDHPEVVNELRNWGVWYTNTLGLDGFRIDAVKHIKYSFTRDWLTHVRNTTGKNMFAVAEFWKNDIGAIENYLSKTNWNHSVFDVPLHYNLYNASRSGGNYDMRQIFNGTVVQRHPTHAVTFVDNHDSQPEEALESFVEEWFKPLAYALTLTRDQGYPSVFYGDYYGIPTHGVPAMKSKIDPILEARQKYAYGTQRDYLDHPDVIGWTREGDGVHADSGLATLMSDGPGGSKWMEVGKNNAGEVWYDITGNQTNTVTINKDGWGQFHVSGGSVSIYVQQ

SEQ ID NO: 24460 - protein, 483 aa, Bacillus licheniformis
HHNGTNGTMMQYFEWYLPNDGNHWNRLRSDASNLPDKGITAVWIPPAWKGASQNDVGYGAYDLYDLGEFNQKGTVRTKYGTRNQLQAAVTALKSNGIQVYGDVVMNHKGGADATEWVRAVEVNPSNRNQEVSGDYTIEAWTKFDFPGRGNTHSNFKWRWYHFDGVDWDQSRQLQNRIYKFRGKGWDWEVDTENGNYDYLMYADIDMDHPEVVNELRNWGVWYTNTLGLDGFRIDAVKHIKYSFTRDWLTHVRNTTGKNMFAVAEFWKNDIGAIENYLSKTNWNHSVFDVPLHYNLYNASRSGGNYDMRQIFNGTVVQRHPTHAVTFVDNHDSQPEEALESFVEEWFKPLAYALTLTRDQGYPSVFYGDYYGIPTHGVPAMKSKIDPILEARQKYAYGTQRDYLDHPDVIGWTREGDGVHADSGLATLMSDGPGGSKWMEVGKNNAGEVWYDITGNQTNTVTINKDGWGQFHVSGGSVSIYVQQ

SEQ ID NO: 24461 - protein, 483 aa, Bacillus licheniformis
HHNGTNGTMMQYFEWYLPNDGNHWNRLRSDASNLKDKGITAVWIPPAWKGASQNDVGYGAYDLYDLGEFNQKGTVRTKYGTRNQLQAAVTALKMNGIQVYGDVVMNHKGGADATEWVRAVEVNPSNRNQEVSGDYTIEAWTKFDFPGRGNTHSNFKWRWYHFDGVDWDQSRQLQNRIYKFRGKGWDWEVDTENGNYDYLMYADIDMDHPEVVNELRNWGVWYTNTLGLDGFRIDAVKHIKYSFTRDWLTHVRNTTGKNMFAVAEFWKNDIGAIENYLSKTNWNHSVFDVPLHYNLYNASRSGGNYDMRQIFNGTVVQRHPTHAVTFVDNHDSQPEEALESFVEEWFKPLAYALTLTRDQGYPSVFYGDYYGIPTHGVPAMKSKIDPILEARQKYAYGTQRDYLDHPDVIGWTREGDGVHADSGLATLMSDGPGGSKWMEVGKNNAGEVWYDITGNQTNTVTINKDGWGQFHVSGGSVSIYVQQ

SEQ ID NO: 24462 - protein, 483 aa, Bacillus licheniformis
HHNGTNGTMMQYFEWYLPNDGNHWNRLRSDASNLKDKGITAVWIPPAWKGASQNDVGYGAYDLYDLGEFNQKGTVRTKYGTRNQLQAAVTALKSNGIQVYGDVVMNHKGGADATEWVRAVEVNPSNRNQEVSGDYTIEAWTKFDFPGRGNTHSNFKWRWYHFDGVDWDQSRQLQNRIYKFRGKGWDWEVDTENGNYDYLMYADIDMDHPEVVNELRNWGVWYTNTLGLDGFRIDAVKHIKYSFTRDWLTHVRNTTGKNMFAVAEFWKNDIGAIENYLSKTNWNHSVFDVPLHYNLYNASRSGGNYDMRQIFNGTVVQRHPTHAVTFVDNHDSQPEEALESFVEEWFKPLAYALTLTRDQGYPSVFYGDYYGIPTHGVPAMKSKIDPILEARQKYAYGTQRDYLDHPDVIGWTREGDGVHADSGLATTMSDGPGGSKWMEVGKNNAGEVWYDITGNQTNTVTINKDGWGQFHVSGGSVSIYVQQ

SEQ ID NO: 24463 - protein, 483 aa, Bacillus licheniformis
HHNGTNGTMMQYFEWYLPNDGNHWNRLRSDASNLKDVGITAVWIPPAWKGASQNDVGYGAYDLYDLGEFNQKGTVRTKYGTRNQLQAAVTALKSNGIQVYGDVVMNHKGGADATEWVRAVEVNPSNRNQEVSGDYTIEAWTKFDFPGRGNTHSNFKWRWYHFDGVDWDQSRQLQNRIYKFRGKGWDWEVDTENGNYDYLMYADIDMDHPEVVNELRNWGVWYTNTLGLDGFRIDAVKHIKYSFTRDWLTHVRNTTGKNMFAVAEFWKNDIGAIENYLSKTNWNHSVFDVPLHYNLYNASRSGGNYDMRQIFNGTVVQRHPTHAVTFVDNHDSQPEEALESFVEEWFKPLAYALTLTRDQGYPSVFYGDYYGIPTHGVPAMKSKIDPILEARQKYAYGTQRDYLDHPDVIGWTREGDGVHADSGLATLMSDGPGGSKWMEVGKNNAGEVWYDITGNQTNTVTINKDGWGQFHVSGGSVSIYVQQ

SEQ ID NO: 24464 - protein, 483 aa, Bacillus licheniformis
HHIGTNGTMMQYFEWYLPNDGNHWNRLRSDASNLKDKGITAVWIPPAWKGASQNDVGYGAYDLYDLGEFNQKGTVRTKYGTRNQLQAAVTALKSNGIQVYGDVVMNHKGGADATEWVRAVEVNPSNRNQEVSGDYTIEAWTKFDFPGRGNTHSNFKWRWYHFDGVDWDQSRQLQNRIYKFRGKGWDWEVDTENGNYDYLMYADIDMDHPEVVNELRNWGVWYTNTLGLDGFRIDAVKHIKYSFTRDWLTHVRNTTGKNMFAVAEFWKNDIGAIENYLSKTNWNHSVFDVPLHYNLYNASRSGGNYDMRQIFNGTVVQRHPTHAVTFVDNHDSQPEEALESFVEEWFKPLAYALILTRDQGYPSVFYGDYYGIPTHGVPAMKSKIDPILEARQKYAYGTQRDYLDHPDVIGWTREGDGVHADSGLATLMSDGPGGSKWMEVGKNNAGEVWYDITGNQTNTVTINKDGWGQFHVSGGSVSIYVQQ

SEQ ID NO: 24465 - protein, 483 aa, Bacillus licheniformis
HHNGTNGTMMQYFEWYLPNDGNHWNRLRSDASNLKDKGITAVWIPPAWKGASQNDVGYGAYDLYDLGEFNQKGTVRTKYGTRNQLQAAVTALKSNGIQVYGDVVMNHKGGADATEWVRAVEVNPSNRNQEVSGDYTIEAWTKFDFPGRGNTHSNFKWRWYHFDGVDWDQSRQLQNRIYKFRGKGWDWEVDTENGNYDYLMYADIDMDHPEVVNELRNWGVWYTNTLGLDGFRIDAVKHIKYSFTRDWLTHVRNTTGKNMFAVAEFWKNDIGAIENYLSKTNWNHSVFDVPLHYNLYNASRSGGNYDMRQIFNGTVVQRHPTHAVTFVDNHDSQPEEALESFVEEWFKPLAYALCLTRDQGYPSVFYGDYYGIPTHGVPAMKSKIDPILEARQKYAYGTQRDYLDHPDVIGWTREGDGVHADSGLATLMSDGPGGSKWMEVGKNNAGEVWYDITGNQTNTVTINKDGWGQFHVSGGSVSIYVQQ

SEQ ID NO: 24466 - protein, 483 aa, Bacillus licheniformis
HHNGTNGTMMQYFEWYLPNDGNHWNRLRSDASNLKDKGITAVWIPPAWKGASQNDVGYGAYDLYDLGEFNQKGTVRTKYGTRNQLQAAVTALKSNGIQVYGDVVMNHKGGADATEWVRAVEVNPSNRNQEVSGDYTIEAWTKFDFPGRGNTHSNFKWRWYHFDGVDWDQSRQLQNRIYKFRGKGWDWEVDTENGNYDYLMYADIDMDHPEVVNELRNWGVWYTNTLGLDGFRIDAVKHIKYSFTRDWLTHVRNTTGKNMFAVAEFWKNDIGAIENYLSKTNWNHSVFDVPLHYNLYNASRSGGNYDMRHIFNGTVVQRHPTHAVTFVDNHDSQPEEALESFVEEWFKPLAYALTLTRDQGYPSVFYGDYYGIPTHGVPAMKSKIDPILEARQKYAYGTQRDYLDHPDVIGWTREGDGVHADSGLATLMSDGPGGSKWMEVGKNNAGEVWYDITGNQTNTVTINKDGWGQFHVSGGSVSIYVQQ

SEQ ID NO: 24467 - protein, 483 aa, Bacillus licheniformis
HHNGTNGTMMQYFEWYLPNDGNHWNRLRSDASNLKDKGITAVWIPPAWKGASQNDVGYGAYDLYDLGEFNQKGTVRTKYGTRNQLQAAVTALKSNGIQVYGDVVMNHKGGADATEWVRAVEVNPSNRNQEVSGDYTIEAWTKFDFPGRGNTHSNFKWRWYHFDGVDWDQSRQLQNRIYKFRGKGWDWEVDTENGNYDYLMYADIDMDHPEVVNELRNWGVWYTNTLGLDGFRIDAVKHIKYSFTRDWLTHVRNTTGKNMFAVAEFWKNDIGAIENYLSKTNWNHSVFDVPLHYNLYNASRSGGNYDMRQIFNGTVVQRHPGHAVTFVDNHDSQPEEALESFVEEWFKPLAYALTLTRDQGYPSVFYGDYYGIPTHGVPAMKSKIDPILEARQKYAYGTQRDYLDHPDVIGWTREGDGVHADSGLATLMSDGPGGSKWMEVGKNNAGEVWYDITGNQTNTVTINKDGWGQFHVSGGSVSIYVQQ

SEQ ID NO: 24468 - protein, 483 aa, Bacillus licheniformis
HHNGTNGTMMQYFEWYLPNDGNHWNRLRSDASNLKDKGITAVWIPPAWKGASQNDVGYGAYDLYDLGEFNQKGTVRTKYGTRNQLQAAVTALKSNGIQVYGDVVMNHKGGADATEWVRAVEVNPSNRNQEVSGDYTIEAWTKFDFPGRGNTHSNFKWRWYHFDGVDWDQSRQLQNRIYKFRGKGWDWEVDTENGNYDYLMYADIDMDHPEVVNELRNWGVWYTNTLGLDGFRIDAVKHIKYSFTRDWLTHVRNTTGKNMFAVAEFWKNDIGAIENYLSKTNWNHSVFDVPLHYNLYNASRSGGNYDMRQIFNGTVVQRHPTHAVTFVDNHDSQPIEALESFVEEWFKPLAYALTLTRDQGYPSVFYGDYYGIPTHGVPAMKSKIDPILEARQKYAYGTQRDYLDHPDVIGWTREGDGVHADSGLATLMSDGPGGSKWMEVGKNNAGEVWYDITGNQTNTVTINKDGWGQFHVSGGSVSIYVQQ

SEQ ID NO: 24469 - protein, 483 aa, Bacillus licheniformis
HHNGTNGTMMQYFEWYLPNDGNHWNRLRSDASNLKDKGITAVWIPPAWKGASQNDVGYGAYDLYDLGEFNQKGTVRTKYGTRNQLQAAVTALKDNGIQVYGDVVMNHKGGADATEWVRAVEVNPENRNQEVSGDYTIEAWTKFDFPGRGNTHSNFKWRWYHFDGVDWDQSRQLQNRIYKFRGKGWDWEVDTENGNYDYLMYADIDMDHPEVVNELRNWGVWYTNTLGLDGFRIDAVKHIKYSFTRDWLTHVRNTTGKNMFAVAEFWKNDIGAIENYLSKTNWNHSVFDVPLHYNLYNASRSGGNYDMRQIFNGTVVQRHPTHAVTFVDNHDSQPEEALESFVEEWFKPLAYALTLTRDQGYPSVFYGDYYGIPTHGVPAMKSKIDPILEARQKYAYGTQRDYLDHPDVIGWTREGDGVHADSGLATLMSDGPGGSKWMEVGKNNAGEVWYDITGNQTNTVTINKDGWGQFHVSGGSVSIYVQQ

SEQ ID NO: 24470 - protein, 483 aa, Bacillus licheniformis
HHNGTNGTMMQYFEWYLPNDGNHWNRLRSDASNLKDKGITAVWIPPAWKGASQNDVGYGAYDLYDLGEFNQKGTVRTKYGTRNQLQAAVTALKSNGIQVYGDVVMNHKGGADATEWVRAVEVNPSNRNQEVSGDYTIEAWTKFDFPGRGNTHSNFKWRWYHFDGVDWDQSRQLQNRIYKFRGKGWDWEVDTENGNYDYLMYADIDMDHPEVVNELRNWGVWYTNTLGLDGFRIDAVKHIKYSFTRDWLTHVRNTTGKNMFAVAEFWKNDIGAIENYLSKTNWNHSVFDVPLHYNLYNASRSGGNYDMRQIFNGTVVQRHPTHAVTFVDNHDSQPEEALESFVTEWFKPLAYALTLTRDQGYPSVFYGDYYGIPTHGVPAMKSKIDPILEARQKYAYGTQRDYLDHPDVIGWTREGDGVHADSGLATLMSDGPGGSKWMEVGKNNAGEVWYDITGNQTNTVTINKDGWGQFHVSGGSVSIYVQQ

SEQ ID NO: 24471 - protein, 483 aa, Bacillus licheniformis
HHNGTNGTMMQYFEWYLPNDGNHWNRLRSDASNLKAKGITAVWIPPAWKGASQNDVGYGAYDLYDLGEFNQKGTVRTKYGTRNQLQAAVTALKSNGIQVYGDVVMNHKGGADATEWVRAVEVNPSNRNQEVSGDYTIEAWTKFDFPGRGNTHSNFKWRWYHFDGVDWDQSRQLQNRIYKFRGKGWDWEVDTENGNYDYLMYADIDMDHPEVVNELRNWGVWYTNTLGLDGFRIDAVKHIKYSFTRDWLTHVRNTTGKNMFAVAEFWKNDIGAIENYLSKTNWNHSVFDVPLHYNLYNASRSGGNYDMRQIFNGTVVQRHPTHAVTFVDNHDSQPEEALESFVEEWFKPLAYALTLTRDQGYPSVFYGDYYGIPTHGVPAMKSKIDPILEARQKYAYGTQRDYLDHPDVIGWTREGDGVHADSGLATLMSDGPGGSKWMEVGKNNAGEVWYDITGNQTNTVTINKDGWGQFHVSGGSVSIYVQQ

SEQ ID NO: 24472 - protein, 483 aa, Bacillus licheniformis
HHNGTNGTMMQYFEWYLPNDGNHWNRLRSDASNLKDKGITAVWIPPAWKGASQNDVGYGAYDLYDLGEFNQKGTVRTKYGTRNQLQAAVTALKSNGIQVYGDVVMNHKGGADATEWVRAVEVNPSNRNQEVSGDYTIEAWTKFDFPGRGNTHSNFKWRWYHFDGVDWDQSRQLQNRIYKFRGKGWDWEVDTENGNYDYLMYADIDMDHPEVVNELRNWGVWYTNTLGLDGFRIDAVKHIKYSFTRDWLTHVRNTTGKNMFAVAEFWKNDIGAIENYLSKTNWNHSVFDVPLHYNLYNASRSGGNYDMRQIFNGTVVQRHPTHAVTFVDNHDSQPEEALESFVSEWFKPLAYALTLTRDQGYPSVFYGDYYGIPTHGVPAMKSKIDPILEARQKYAYGTQRDYLDHPDVIGWTREGDGVHADSGLATLMSDGPGGSKWMEVGKNNAGEVWYDITGNQTNTVTINKDGWGQFHVSGGSVSIYVQQ

SEQ ID NO: 24473 - protein, 483 aa, Bacillus licheniformis
HHNGTNGTMMQYFEWYLPNDGNHWNRLRSDASNLKDKGITAVWIPPAWKGASQNDVGYGAYDLYDLGEFNQKGTVRTKYGTRNQLQAAVTALKSNGIQVYGDVVMNHKGGADATEWVRAVEVNPSNRNQEVSGDYTIEAWTKFDFPGRGNTHSNFKWRWYHFDGVDWDQSRQLQNRIYKFRGKGWDWEVDTENGNYDYLMYADIDMDHPEVVNELRNWGVWYTNTLGLDGFRIDAVKHIKYSFTRDWLTHVRNTTGKNMFAVAEFWKNDIGAIENYLSKTNWNHSVFDVPLHYNLYNASRSGGNYDMRQIFNGTVVQCHPTHAVTFVDNHDSQPEEALESFVEEWFKPLAYALTLTRDQGYPSVFYGDYYGIPTHGVPAMKSKIDPILEARQKYAYGTQRDYLDHPDVIGWTREGDGVHADSGLATLMSDGPGGSKWMEVGKNNAGEVWYDITGNQTNTVTINKDGWGQFHVSGGSVSIYVQQ

SEQ ID NO: 24474 - protein, 483 aa, Bacillus licheniformis
HHNGTNGTMMQYFEWYLPNDGNHWNRLRSDASNLKDKGITAVWIPPAWKGASQNDVGYGAYDLYDLGEFNQKGTVRTKYGTRNQLQAAVTALKSNGIQVYGDVVMNHKGGADATEWVRAVEVNPSNRNQEVSGDYTIEAWTKFDFPGRGNTHSNFKWRWYHFDGVDWDQSRQLQNRIYKFRGKGWDWEVDTENGNYDYLMYADIDMDHPEVVNELRNWGVWYTNTLGLDGFRIDAVKHIKYSFTRDWLTHVRNTTGKNMFAVAEFWKNDIGAIENYLSKTNWNHSVFDVPLHYNLYNASRSGGNYDMRQIFNGTVVQRHPTHAVTFVDNHDSQPEEALESFVEEWFKPLAYALTLTRDQGYPSVFYGDYYGIPTHGVPAMKSKIDPILEARQKYAYGTQRDYLDHPDVIGWTREGDGVHADSGLATLMSDGPGGSKWMEVGKNNAGEVWYDITGNVTNTVTINKDGWGQFHVSGGSVSIYVQQ

SEQ ID NO: 24475 - protein, 483 aa, Bacillus licheniformis
HHNGTNGTMMQYFEWYLPNDGNHWNRLRSDASNLKDKGITAVWIPPAWKGASQNDVGYGAYDLYDLGEFNQKGTVRTKYGTRNQLQAAVTALKSNGIQVYGDVVMNHKGGADATEWVRAVEVNPSNRNQEVSGDYTIEAWTKFDFPGRGNTHSNFKWRWYHFDGVDWDQSRQLQNRIYKFRGKGWDWEVDTENGNYDYLMYADIDMDHPEVVNELRNWGVWYTNTLGLDGFRIDAVKHIKYSFTRDWLTHVRNTTGKNMFAVAEFWKNDIGAIENYLSKTNWNHSVFDVPLHYNLYNASRSGGNYDMRQIFNGTVVQRHPTHAVTFVDNHDSQPEEALESFVEEWFKPLAYALTLTRDQGYPSVFYGDYYGIPTHGVPAMKSKIDPILEARQKYAYGTQRDYLDHPDVIGWTREGDGVHADSGLATGMSDGPGGSKWMEVGKNNAGEVWYDITGNQTNTVTINKDGWGQFHVSGGSVSIYVQQ

SEQ ID NO: 24476 - protein, 483 aa, Bacillus licheniformis
HHNGTNGTMMQYFEWYLPNDGNHWNRLRSDASNLKDKGITAVWIPPAWKGASQNDVGYGAYDLYDLGEFNQKGTVRTKYGTRNQLQAAVTALKSNGIQVYGDVVMNHKGGADATEWVRAVEVNPSNRNQEVSGDYTIEAWTKFDFPGRGNTHSNFKWRWYHFDGVDWDQSRQLQNRIYKFRGKGWDWEVDTENGNYDYLMYADIDMDHPEVVNELRNWGVWYTNTLGLDGFRIDAVKHIKYSFTRDWLTHVRNTTGKNMFAVAEFWKNDIGAIENYLSKTNWNHSVFDVPLHYNLYNASRSGGNYDMRWIFNGTVVQRHPTHAVTFVDNHDSQPEEALESFVEEWFKPLAYALTLTRDQGYPSVFYGDYYGIPTHGVPAMKSKIDPILEARQKYAYGTQRDYLDHPDVIGWTREGDGVHADSGLATLMSDGPGGSKWMEVGKNNAGEVWYDITGNQTNTVTINKDGWGQFHVSGGSVSIYVQQ

SEQ ID NO: 24477 - protein, 483 aa, Bacillus licheniformis
HHNGTNGTMMQYFEWYLPNDGNHWNRLRSDASNLKDKGITAVWIPPAWKGASQNDVGYGAYDLYDLGEFNQKGTVRTKYGTRNQLQAAVTALKSNGIQVYGDVVMNHKGGADATEWVRAVEVNPSNRNQEVSGDYTIEAWTKFDFPGRGNTHSNFKWRWYHFDGVDWDQSRQLQNRIYKFRGKGWDWEVDTENGNYDYLMYADIDMDHPEVVNELRNWGVWYTNTLGLDGFRIDAVKHIKYSFTRDWLTHVRNTTGKNMFAVAEFWKNDIGAIENYLIKTNWNHSVFDVPLHYNLYNASRSGGNYDMRQIFNGTVVQRHPTHAVTFVDNHDSQPEEALESFVEEWFKPLAYALTLTRDQGYPSVFYGDYYGIPTHGVPAMKSKIDPILEARQKYAYGTQRDYLDHPDVIGWTREGDGVHADSGLATLMSDGPGGSKWMEVGKNNAGEVWYDITGNQTNTVTINKDGWGQFHVSGGSVSIYVQQ

SEQ ID NO: 24478 - protein, 483 aa, Bacillus licheniformis
HHNGTNGTMMQYFEWYLPNDGNHWNRLRSDASNLKDKGITAVWIPPAWKGASQNDVGYGAYDLYDLGEFNQKGTVRTKYGTRNQLQAAVTALKSNGIQVYGDVVMNHKGGADATEWVRAVEVNPSNRNQEVSGDYTIEAWTKFDFPGRGNTHSNFKWRWYHFDGVDWDQSRQLQNRIYKFRGKGWDWEVDTENGNYDYLMYADIDMDHPEVVNELRNWGVWYTNTLGLDGFRIDAVKHIKYSFTRDWLTHVRNTTGKNMFAVAEFWKNDIGAIENYLSKTNWNHSVFDVPLHYNLYNASRSGGNYDMRQIFNGTVVQRHPTHAVTFVDNHDSQPEEALESFVEEWFKPLAYALTLTRDQGYPSVFYGDYYGIPTHGVPAMKSKIDPILEARQKYAYGTQRDYLDHPDVIGWTREGDGVHADSGLATLMSDGPGGSKWMEVGKNNAGKVWYDITGNQTNTVTINKDGWGQFHVSGGSVSIYVQQ

SEQ ID NO: 24479 - protein, 483 aa, Bacillus licheniformis
HHNGTNGTMMQYFEWYLPNDGNHWNRLRSDASNLKDKGITAVWIPPAWKGASQNDVGYGAYDLYDLGEFNQKGTVRTKYGTRNQLQAAVTALKSNGIQVYGDVVMNHKGGADATEWVRAVEVNPSNRNQEVSGDYTIEAWTKFDFPGRGNTHSNFKWRWYHFDGVDWDQSRQLQNRIYKFRGKGWDWEVDTENGNYDYLMYADIDMDHPEVVNELRNWGVWYTNTLGLDGFRIDAVKHIKYSFTRDWLTHVRNTTGKNMFAVAEFWKNDIGAIENYLSKTNWNHSVFDVPLHYNLYNASRSGGNYDMRQIFNGTVVQRHPTHAVTFVDNHDSQPEEALESFVEEWFKPLAYALTLTRDQGYPSVFYGDYYGIPTHGVPAMKSKIDPILEARQKYAYGTQRDYLDHPDVIGWTREGDGVHADSGLATLMSDGPGGSKWMEVGKNNAGEVWYDITGNQTQTVTINKDGWGQFHVSGGSVSIYVQQ

SEQ ID NO: 24480 - protein, 483 aa, Bacillus licheniformis
HHNGTNGTMMQYFEWYLPNDGNHWNRLRSDASNLKDKGITAVWIPPAWKGASQNDVGYGAYDLYDLGEFNQKGTVRTKYGTRNQLQAAVTALKSNGIQVYGDVVMNHKGGADATEWVRAVEVNPQNRNQEVSGDYTIEAWTKFDFPGRGNTHSNFKWRWYHFDGVDWDQSRQLQNRIYKFRGKGWDWEVDTENGNYDYLMYADIDMDHPEVVNELRNWGVWYTNTLGLDGFRIDAVKHIKYSFTRDWLTHVRNTTGKNMFAVAEFWKNDIGAIENYLSKTNWNHSVFDVPLHYNLYNASRSGGNYDMRQIFNGTVVQRHPTHAVTFVDNHDSQPEEALESFVEEWFKPLAYALTLTRDQGYPSVFYGDYYGIPTHGVPAMKSKIDPILEARQKYAYGTQRDYLDHPDVIGWTREGDGVHADSGLATLMSDGPGGSKWMEVGKNNAGEVWYDITGNQTNTVTINKDGWGQFHVSGGSVSIYVQQ

SEQ ID NO: 24481 - protein, 483 aa, Bacillus licheniformis
HHNGTNGTMMQYFEWYLPNDGNHWNRLRSDASNLKDKGITAVWIPPAWKGASQNDVGYGAYDLYDLGEFNQKGTVRTKYGTRNQLQAAMTALKSNGIQVYGDVVMNHKGGADATEWVRAVEVNPSNRNQEVSGDYTIEAWTKFDFPGRGNTHSNFKWRWYHFDGVDWDQSRQLQNRIYKFRGKGWDWEVDTENGNYDYLMYADIDMDHPEVVNELRNWGVWYTNTLGLDGFRIDAVKHIKYSFTRDWLTHVRNTTGKNMFAVAEFWKNDIGAIENYLSKTNWNHSVFDVPLHYNLYNASRSGGNYDMRQIFNGTVVQRHPTHAVTFVDNHDSQPEEALESFVEEWFKPLAYALTLTRDQGYPSVFYGDYYGIPTHGVPAMKSKIDPILEARQKYAYGTQRDYLDHPDVIGWTREGDGVHADSGLATLMSDGPGGSKWMEVGKNNAGEVWYDITGNQTNTVTINKDGWGQFHVSGGSVSIYVQQ

SEQ ID NO: 24482 - protein, 483 aa, Bacillus licheniformis
HHNGTNGTMMQYFEWYLPNDGNHWNRLRSDASNLKDKGITAVWIPPAWKGASQNDVGYGAYDLYDLGEFNQKGTVRTKYGTRNQLQAAVTALKSNGIQVYGDVVMNHKGGADATEWVRAVEVNPSNRNQEVSGDYTIEAWTKFDFPGRGNTHSNFKWRWYHFDGVDWDQSRQLQNRIYKFRGKGWDWEVDTENGNYDYLMYADIDMDHPEVVNELRNWGVWYTNTLGLDGFRIDAVKHIKYSFTRDWLTHVRNTTGKNMFAVAEFWKNDIGAIENYLSKTNWNHSVFDVPLHYNLYNASRSGGNYDMRQIFNGTVVQRHPTHAVTFVDNHDSQPEEALESFVEEWFKPLAYALTLTRDQGYPSVFYGDYYGIPTHGVPAMKSKIDPILEARQKYAYGTQRDYLDHPDVIGWTREGDGVHADSGLATLMSDGPGGSKWMEVGKNNAGEVWYDITGNQTTTVTINKDGWGQFHVSGGSVSIYVQQ

SEQ ID NO: 24483 - protein, 483 aa, Bacillus licheniformis
HHNGTNGTMMQYFEWYLPNDGNHWNRLRIDASNLKDKGITAVWIPPAWKGASQNDVGYGAYDLYDLGEFNQKGTVRTKYGTRNQLQAAVTALKSNGIQVYGDVVMNHKGGADATEWVRAVEVNPSNRNQEVSGDYTIEAWTKFDFPGRGNTHSNFKWRWYHFDGVDWDQSRQLQNRIYKFRGKGWDWEVDTENGNYDYLMYADIDMDHPEVVNELRNWGVWYTNTLGLDGFRIDAVKHIKYSFTRDWLTHVRNTTGKNMFAVAEFWKNDIGAIENYLSKTNWNHSVFDVPLHYNLYNASRSGGNYDMRQIFNGTVVQRHPTHAVTFVDNHDSQPEEALESFVEEWFKPLAYALTLTRDQGYPSVFYGDYYGIPTHGVPAMKSKIDPILEARQKYAYGTQRDYLDHPDVIGWTREGDGVHADSGLATLMSDGPGGSKWMEVGKNNAGEVWYDITGNQTNTVTINKDGWGQFHVSGGSVSIYVQQ

SEQ ID NO: 24484 - protein, 483 aa, Bacillus licheniformis
HHNGTNGTMMQYFEWYLPNDGNHWNRLRSDASNLKDAGITAVWIPPAWKGASQNDVGYGAYDLYDLGEFNQKGTVRTKYGTRNQLQAAVTALKSNGIQVYGDVVMNHKGGADATEWVRAVEVNPSNRNQEVSGDYTIEAWTKFDFPGRGNTHSNFKWRWYHFDGVDWDQSRQLQNRIYKFRGKGWDWEVDTENGNYDYLMYADIDMDHPEVVNELRNWGVWYTNTLGLDGFRIDAVKHIKYSFTRDWLTHVRNTTGKNMFAVAEFWKNDIGAIENYLSKTNWNHSVFDVPLHYNLYNASRSGGNYDMRQIFNGTVVQRHPTHAVTFVDNHDSQPEEALESFVEEWFKPLAYALTLTRDQGYPSVFYGDYYGIPTHGVPAMKSKIDPILEARQKYAYGTQRDYLDHPDVIGWTREGDGVHADSGLATLMSDGPGGSKWMEVGKNNAGEVWYDITGNQTNTVTINKDGWGQFHVSGGSVSIYVQQ

SEQ ID NO: 24485 - protein, 483 aa, Bacillus licheniformis
HHNGTNGTMMQYFEWYLPNDGNHWNRLRSDASNLKDKGITAVWIPPAWKGASQNDVGYGAYDLYDLGEFNQKGTVRTKYGTRNQLQAAVTALKSNGIQVYGDVVMNHKGGADATEWVRAVEVNPSNRNQEVSGDYTIEAWTKFDFPGRGNTHSNFKWRWYHFDGVDWDQSRQLQNRIYKFRGKGWDWEVDTENGNYDYLMYADIDMDHPEVVNELRNWGVWYTNTLGLDGFRIDAVKHIKYSFTRDWLTHVRNTTGKNMFAVAEFWKNDIGAIENYLSKTNWNHSVFDVPLHYNLYNASRSGGNYDMRQIFNGTVVQRHPTHAVTFVDNHDSQPEEALESFVEEWFKPLAYALTLTRDQGYPSVFYGDYYGIPTHGVPAMKSKIDPILEARQKYAYGTQRDYLDHPDVIGWTREGDGVHADSGLATNMSDGPGGSKWMEVGKNNAGEVWYDITGNQTNTVTINKDGWGQFHVSGGSVSIYVQQ

SEQ ID NO: 24486 - protein, 483 aa, Bacillus licheniformis
HHNGTNGTMMQYFEWYLPNDGNHWNRLRSDASNLKDMGITAVWIPPAWKGASQNDVGYGAYDLYDLGEFNQKGTVRTKYGTRNQLQAAVTALKSNGIQVYGDVVMNHKGGADATEWVRAVEVNPSNRNQEVSGDYTIEAWTKFDFPGRGNTHSNFKWRWYHFDGVDWDQSRQLQNRIYKFRGKGWDWEVDTENGNYDYLMYADIDMDHPEVVNELRNWGVWYTNTLGLDGFRIDAVKHIKYSFTRDWLTHVRNTTGKNMFAVAEFWKNDIGAIENYLSKTNWNHSVFDVPLHYNLYNASRSGGNYDMRQIFNGTVVQRHPTHAVTFVDNHDSQPEEALESFVEEWFKPLAYALTLTRDQGYPSVFYGDYYGIPTHGVPAMKSKIDPILEARQKYAYGTQRDYLDHPDVIGWTREGDGVHADSGLATLMSDGPGGSKWMEVGKNNAGEVWYDITGNQTNTVTINKDGWGQFHVSGGSVSIYVQQ

SEQ ID NO: 24487 - protein, 483 aa, Bacillus licheniformis
HHNGTNGTMMQYFEWYLPNDGNHWNRLRSDASNLKDKGITAVWIPPAWKGASQNDVGYGAYDLYDLGEFNQKGTVRTKYGTRNQLQAAVTALKSNGIQVYGDVVMNHKGGADATEWVRAVEVNPSNRNQEVSGDYTIEAWTKFDFPGRGNTHSNFKWRWYHFDGVDWDQSRQLQNRIYKFRGKGWDWEVDTENGNYDYLMYADIDMDHPEVVNELREWGVWYTNTLGLDGFRIDAVKHIKYSFTRDWLTHVRNTTGKNMFAVAEFWKNDIGAIENYLSKTNWNHSVFDVPLHYNLYNASRSGGNYDMRQIFNGTVVQRHPTHAVTFVDNHDSQPEEALESFVEEWFKPLAYALTLTRDQGYPSVFYGDYYGIPTHGVPAMKSKIDPILEARQKYAYGTQRDYLDHPDVIGWTREGDGVHADSGLATLMSDGPGGSKWMEVGKNNAGEVWYDITGNQTNTVTINKDGWGQFHVSGGSVSIYVQQ

SEQ ID NO: 24488 - protein, 483 aa, Bacillus licheniformis
HHNGTNGTMMQYFEWYLPNDGNHWNRLRSDASNLKDKGITAVWIPPAWKGASQNDVGYGAYDLYDLGEFNQKGTVRTKYGTRNQLQAAVTALKSNGIQVYGDVVMNHKGGADATEWVRAVEVNPSNRNQEVSGDYTIEAWTKFDFPGRGNTHSNFKWRWYHFDGVDWDQSRQLQNRIYKFRGKGWDWEVDTENGNYDYLMYADIDMDHPEVVNELRNWGVWYTNTLGLDGFRIDAVKHIKYSFTRDWLTHVRNTTGKNMFAVAEFWKNDIGAIENYLSKTNWNHSVFDVPLHYNLYNASYSGGNYDMRQIFNGTVVQRHPTHAVTFVDNHDSQPEEALESFVEEWFKPLAYALTLTRDQGYPSVFYGDYYGIPTHGVPAMKSKIDPILEARQKYAYGTQRDYLDHPDVIGWTREGDGVHADSGLATLMSDGPGGSKWMEVGKNNAGEVWYDITGNQTNTVTINKDGWGQFHVSGGSVSIYVQQ

SEQ ID NO: 24489 - protein, 483 aa, Bacillus licheniformis
HHNGTNGTMMQYFEWYLPNDGNHWNRLRSDASNLKDKGITAVWIPPAWKGASQNDVGYGAYDLYDLGEFNQKGTVRTKYGTRNQLQAAVTALKSNGIQVYGDVVMNHKGGADATEWVRAVEVNPSNRNQEVSGDYTIEAWTKFDFPGRGNTHSNFKWRWYHFDGVDWDQSRQLQNRIYKFRGKGWDWEVDTENGNYDYLMYADIDMDHPEVVNELRNWGVWYTNTLGLDGFRIDAVKHIKYSFTRDWLTHVRNTTGKNMFAVAEFWKNDIGAIENYLSKTNWNHSVFDVPLHYNLYNASRSGGNYDMRQIFNGTVVQRHPTHAVTFVDNHDSQPEEALESFVEEWFKPLAYALTLTRVQGYPSVFYGDYYGIPTHGVPAMKSKIDPILEARQKYAYGTQRDYLDHPDVIGWTREGDGVHADSGLATLMSDGPGGSKWMEVGKNNAGEVWYDITGNQTNTVTINKDGWGQFHVSGGSVSIYVQQ

SEQ ID NO: 24490 - protein, 483 aa, Bacillus licheniformis
HHNGTNGTMMQYFEWYLPNDGNHWNRLRSDASNLKDKGITAVWIPPAWKGASQNDVGYGAYDLYDLGEFNQKGTVRTKYGTREQLQAAVTALKSNGIQVYGDVVMNHKGGADATEWVRAVEVNPSNRNQEVSGDYTIEAWTKFDFPGRGNTHSNFKWRWYHFDGVDWDQSRQLQNRIYKFRGKEWDWEVDTENGNYDYLMYADIDMDHPEVVNELRRWGVWYTRTLGLDGFRIDAVKHIKYSFTRDWLTHVRNTTGKNMFAVAEFWKNDIGAIENYLSKTNWNHSVFDVPLHYNLYNASRSGGNYDMRQIFNGTVVQRHPTHAVTFVDNHDSQPEEALESFVEEWFKPLAYALTLTRDQGYPSVFYGDYYGIPTHGVPAMKSKIDPILEARQKYAYGTQRDYLDHPDVIGWTREGDGVHADSGLATLMSDGPGGSKWMEVGKNNAGEVWYDITGNQTNTVTINKDGWGQFHVSGGSVSIYVQQ

SEQ ID NO: 24491 - protein, 483 aa, Bacillus licheniformis
HHNGTNGTMMQYFEWYLPNDGNHWNRLRSDASNLKDKGITAVWIPPAWKGASQNDVGYGAYDLYDLGEFNQKGTVRTKYGTRNQLQAAVTALKSNGIQVYGDVVMNHKGGADATEWVRAVEVNPSNRNQEVSGDYTIEAWTKFDFPGRGNTHSNFKWRWYHFDGVDWDQSRQLQNRIYKFRGKGWDWEVDTENGNYDYLMYADIDMDHPEVVNELRNWGVWYTNTLGLDGFRIDAVKHIKYSFTRDWLTHVRNTTGKNMFAVAEFWKNDIGAIENYLSKTNWNHSVFDVPLHYNLYNASRSGGNYDMRQIFNGTVVQRHPTHAVTFVDNHDSQPQEALESFVEEWFKPLAYALTLTRDQGYPSVFYGDYYGIPTHGVPAMKSKIDPILEARQKYAYGTQRDYLDHPDVIGWTREGDGVHADSGLATLMSDGPGGSKWMEVGKNNAGEVWYDITGNQTNTVTINKDGWGQFHVSGGSVSIYVQQ

SEQ ID NO: 24492 - protein, 483 aa, Bacillus licheniformis
HHNGTNGTMMQYFEWYLPNDGNHWNRLRSDASNLKDKGITAVWIPPAWKGASQNDVGYGAYDLYDLGEFNQKGTVRTKYGTRNQLQAAVTALKSNGIQVYGDVVMNHKGGADATEWVRAVEVNPSNRNQEVSGDYTIEAWTKFDFPGRGNTHSNFKWRWYHFDGVDWDQSRQLQNRIYKFRGKGWDWEVDTENGNYDYLMYADIDMDHPEVVNELRNWGVWYTNTLGLDGFRIDAVKHIKYSFTRDWLTHVRNTTGKNMFAVAEFWKNDIGAIENYLSKTNWNHSVFDVPLHYNLYNASRSGGNYDMRNIFNGTVVQRHPTHAVTFVDNHDSQPEEALESFVEEWFKPLAYALTLTRDQGYPSVFYGDYYGIPTHGVPAMKSKIDPILEARQKYAYGTQRDYLDHPDVIGWTREGDGVHADSGLATLMSDGPGGSKWMEVGKNNAGEVWYDITGNQTNTVTINKDGWGQFHVSGGSVSIYVQQ

SEQ ID NO: 24493 - protein, 483 aa, Bacillus licheniformis
HHNGTNGTMMQYFEWYLPNDGNHWNRLRSDASNLKDKGITAVWIPPAWKGASQNDVGYGAYDLYDLGEFNQKGTVRTKYGTRNQLQAAVTALKSNGIQVYGDVVMNHKGGADATEWVRAVEVNPSNRNQEVSGDYTIEAWTKFDFPGRGNTHSNFKWRWYHFDGVDWDQSRQLQNRIYKFRGKGWDWEVDTENGNYDYLMYADIDMDHPEVVNELRNWGVWYTNTLGLDGFRIDAVKHIKYSFTRDWLTHVRNTTGKNMFAVAEFWKNDIGAIENYLSKTNWNHSVFDVPLHYNLYNASRSGGNYDMRQIFNGTVVQRHPTHAVTFVDNHDSQPEEALESFVEEWFKPLAYALTLTRNQGYPSVFYGDYYGIPTHGVPAMKSKIDPILEARQKYAYGTQRDYLDHPDVIGWTREGDGVHADSGLATLMSDGPGGSKWMEVGKNNAGEVWYDITGNQTNTVTINKDGWGQFHVSGGSVSIYVQQ

SEQ ID NO: 24494 - protein, 483 aa, Bacillus licheniformis
HHNGTNGTMMQYFEWYLPNDGNHWNRLRSDASNLKDKGITAVWIPPAWKGASQNDVGYGAYDLYDLGEFNQKGTVRTKYGTRNQLQAAVTALKSNGIQVYGDVVMNHKGGADATEWVRAVEVNPSNRNQEVSGDYTIEAWTKFDFPGRGNTHSNFKWRWYHFDGVDWDQSRQLQNRIYKFRGKGWDWEVDTENGNYDYLMYADIDMDHPEVVNELRNWGVWYTNTLGLDGFRIDAVKHIKYSFTRDWLTHVRNTTGKNMFAVAEFWKNDIGAIENYLSKTNWNHSVFDVPLHYNLYNASRSGGNYDMRQIFNGTVVQRHPTHAVTFVDNHDSQPEEALESFVEEWFKPLAYALTLTRDQGYPSVFYGDYYGIPTHGVPAMKSKIDPILEARQKYAYGTQRDYLDHPDVIGWTREGDGVHADSGLATLMSDGPGGSKWMEVGKNNAGWVWYDITGNQTNTVTINKDGWGQFHVSGGSVSIYVQQ

SEQ ID NO: 24495 - protein, 483 aa, Bacillus licheniformis
HHNGTNGTMMQYFEWYLPNDGNHWNRLRSDASNLKDKGITAVWIPPAWKGASQNDVGYGAYDLYDLGEFNQKGTVRTKYGTRNQLQAAATALKSNGIQVYGDVVMNHKGGADATEWVRAVEVNPSNRNQEVSGDYTIEAWTKFDFPGRGNTHSNFKWRWYHFDGVDWDQSRQLQNRIYKFRGKGWDWEVDTENGNYDYLMYADIDMDHPEVVNELRNWGVWYTNTLGLDGFRIDAVKHIKYSFTRDWLTHVRNTTGKNMFAVAEFWKNDIGAIENYLSKTNWNHSVFDVPLHYNLYNASRSGGNYDMRQIFNGTVVQRHPTHAVTFVDNHDSQPEEALESFVEEWFKPLAYALTLTRDQGYPSVFYGDYYGIPTHGVPAMKSKIDPILEARQKYAYGTQRDYLDHPDVIGWTREGDGVHADSGLATLMSDGPGGSKWMEVGKNNAGEVWYDITGNQTNTVTINKDGWGQFHVSGGSVSIYVQQ

SEQ ID NO: 24496 - protein, 483 aa, Bacillus licheniformis
HHNGTNGTMMQYFEWYLPNDGNHWNRLRSDASNLKDKGITAVWIPPAWKGASQNDVGYGAYDLYDLGEFNQKGTVRTKYGTRNQLQRAVTALKSNGIQVYGDVVMNHKGGADATEWVRAVEVNPSNRNQEVSGDYTIEAWTKFDFPGRGNTHSNFKWRWYHFDGVDWDQSRQLQNRIYKFRGKEWDWEVDTENGNYDYLMYADIDMDHPEVVNELRNWGVWYTRTLGLDGFRIDAVKHIKYSFTRDWLTHVRNTTGKNMFAVAEFWKNDIGAIENYLSKTNWNHSVFDVPLHYNLYNASRSGGNYDMRKIFNGTVVQRHPTHAVTFVDNHDSQPEEALESFVEEWFKPLAYALTLTRDQGYPSVFYGDYYGIPTHGVPAMKSKIDPILEARQKYAYGTQRDYLDHPDVIGWTREGDGKHADSGLATLMSDGPGGSKWMEVGKNNAGEVWYDITGNQTNTVTINKDGWGQFHVSGGSVSIYVQQ

SEQ ID NO: 24497 - protein, 483 aa, Bacillus licheniformis
HHNGTNGTMMQYFEWYLPNDGNHWNRLRSDASNLKDFGITAVWIPPAWKGASQNDVGYGAYDLYDLGEFNQKGTVRTKYGTRNQLQAAVTALKSNGIQVYGDVVMNHKGGADATEWVRAVEVNPSNRNQEVSGDYTIEAWTKFDFPGRGNTHSNFKWRWYHFDGVDWDQSRQLQNRIYKFRGKGWDWEVDTENGNYDYLMYADIDMDHPEVVNELRNWGVWYTNTLGLDGFRIDAVKHIKYSFTRDWLTHVRNTTGKNMFAVAEFWKNDIGAIENYLSKTNWNHSVFDVPLHYNLYNASRSGGNYDMRQIFNGTVVQRHPTHAVTFVDNHDSQPEEALESFVEEWFKPLAYALTLTRDQGYPSVFYGDYYGIPTHGVPAMKSKIDPILEARQKYAYGTQRDYLDHPDVIGWTREGDGVHADSGLATLMSDGPGGSKWMEVGKNNAGEVWYDITGNQTNTVTINKDGWGQFHVSGGSVSIYVQQ

SEQ ID NO: 24498 - protein, 483 aa, Bacillus licheniformis
HHNGTNGTMMQYFEWYLPNDGNHWNRLRSDASNLKDKGITAVWIPPAWKGASQNDVGYGAYDLYDLGEFNQKGTVRTKYGTRRQLQAAVTALKSNGIQVYGDVVMNHKGGADATEWVRAVEVNPSNRNQEVSGDYTIEAWTKFDFPGRGNTHSNFKWRWYHFDGVDWDQSRQLQNRIYKFRGKGWDWEVDTENGNYDYLMYADIDMDHPEVVNELRNWGVWYTNTLGLDGFRIDAVKHIKYSFTRDWLTHVRNTTGKNMFAVAEFWKNDIGAIENYLSKTNWNHSVFDVPLHYNLYNASRSGGNYDMRQIFNGTVVQRHPTHAVTFVDNHDSQPEEALESFVEEWFKPLAYALTLTRDQGYPSVFYGDYYGIPTHGVPAMKSKIDPILEARQKYAYGTQRDYLDHPDVIGWTREGDGVHADSGLATLMSDGPGGSKWMEVGKNNAGEVWYDITGNQTNTVTINKDGWGQFHVSGGSVSIYVQQ

SEQ ID NO: 24499 - protein, 483 aa, Bacillus licheniformis
HHNGTNGTMMQYFEWYLPNDGNHWNRLRSDASNLKDKGITAVWIPPAWKGASQNDVGYGAYDLYDLGEFNQKGTVRTKYGTRNQLQAAVTALKSNGIQVYGDVVMNHKGGADATEWVRAVEVNPSNRNQEVSGDYTIEAWTKFDFPGRGNTHSNFKWRWYHFDGVDWDQSRQLQNRIYKFRGKGWDWEVDTENGNYDYLMYADIDMDHPEVVNELRNWGVWYTNTLGLDGFRIDAVKHIKYSFTRDWLTHVRNTTGKNMFAVAEFWKNDIGAIENYLSKTNWNHSVFDVPLHYNLYNASRSGGNYDMRQIFNGTVVQRHPTHAVTFVDNHDSQPEEALESFVEEWFKPLAYALTLTRDQGYPSVFYGDYYGIPTHGVPAMKSKIDPILEARQKYAYGTQRDYLDHPDVIGWTREGDGVHADSGLATLMSDGPGGSKWMEVGKNNAGEVWYDITGNQTETVTINKDGWGQFHVSGGSVSIYVQQ

SEQ ID NO: 24500 - protein, 483 aa, Bacillus subtilis
HHNGTNGTMMQYFEWYLPNDGNHWNRLRSDASNLKDKGITAVWIPPAWKGASQNDVGYGAYDLYDLGEFNQKGTVRTKYGTRNQLQAAVTALKSNGIQVYGDVVMNHKGGADATEWVRAVEVNPSNRNQEVSGDYTIEAWTKFDFPGRGNTHSNFKWRWYHFDGVDWDQSRQLQNRIYKFRGKQWDWEVDTENGNYDYLMYADIDMDHPEVVNELRNWGVWYTNTLGLDGFRIDAVKHIKYSFTRDWLTHVRNTTGKNMFAVAEFWKNDIGAIENYLSKTNWNHSVFDVPLHYNLYNASRSGGNYDMRQIFNGTVVQRHPTHAVTFVDNHDSQPEEALESFVEEWFKPLAYALTLTRDQGYPSVFYGDYYGIPTHGVPAMKSKIDPILEARQKYAYGTQRDYLDHPDVIGWTREGDGVHADSGLATLMSDGPGGSKWMEVGKNNAGEVWYDITGNQTNTVTINKDGWGQFHVSGGSVSIYVQQ

SEQ ID NO: 24501 - protein, 483 aa, Bacillus licheniformis
HHNGTNGTMMQYFEWYLPNDGNHWNRLRSDASNLKDKGITAVWIPPAWKGASQNDVGYGAYDLYDLGEFNQKGTVRTKYGTRNQLQAAVTALKSNGIQVYGDVVMNHKGGADATEWVRAVEVNPSNRNQEVSGDYTIEAWTKFDFPGRGNTHSNFKWRWYHFDGVDWDQSRQLQNRIYKFRGKGWDWEVDTENGNYDYLMYADIDMDHPEVVNELRNWGVWYTNTLGLDGFRIDAVKHIKYSFTRDWLTHVRNTTGKNMFAVAEFWKNDIGAIENYLDKTNWNHSVFDVPLHYNLYNASRSGGNYDMRQIFNGTVVQRHPTHAVTFVDNHDSQPEEALESFVEEWFKPLAYALTLTRDQGYPSVFYGDYYGIPTHGVPAMKSKIDPILEARQKYAYGTQRDYLDHPDVIGWTREGDGVHADSGLATLMSDGPGGSKWMEVGKNNAGEVWYDITGNQTNTVTINKDGWGQFHVSGGSVSIYVQQ

SEQ ID NO: 24502 - protein, 483 aa, Bacillus licheniformis
HHNGTNGTMMQYFEWYLPNDGNHWNRLRSDASNLKDKGITAVWIPPAWKGASQNDVGYGAYDLYDLGEFNQKGTVRTKYGTRNQLQAAVTALKSNGIQVYGDVVMNHKGGADATEWVRAVEVNPSNRNQEVSGDYTIEAWTKFDFPGRGNTHSNFKWRWYHFDGVDWDQSRQLQNRIYKFRGKGWDWEVDTENGNYDYLMYADIDMDHPEVVNELRNWGVWYTNTLGLDGFRIDAVKHIKYSFTRDWLTHVRNTTGKNMFAVAEFWKNDIGAIENYLSKTNWNHSVFDVPLHYNLYNASRSGGNYDMRQIFNGTVVQRHPTHAVTFVDNHDSQPEEALESFVEEWFKPLAYALTLTRDQGYPSVFYGDYYGIPTHGVPAMKSKIDPILEARQKYAYGTQRDYLDHPDVIGWTREGDGVHADSGLATEMSDGPGGSKWMEVGKNNAGEVWYDITGNQTNTVTINKDGWGQFHVSGGSVSIYVQQ

SEQ ID NO: 24503 - protein, 483 aa, Bacillus licheniformis
HHNGTNGTMMQYFEWYLPNDGNHWNRLRSDASNLKDKGITAVWIPPAWKGASQNDVGYGAYDLYDLGEFNQKGTVRTKYGTRNQLQAAVTALKSNGIQVYGDVVMNHKGGADATEWVRAVEVNPSNRNQEVSGDYTIEAWTKFDFPGRGNTHSNFKWRWYHFDGVDWDQSRQLQNRIYKFRGKGWDWEVDTENGNYDYLMYADIDMDHPEVVNELRNWGDWYTNTLGLDGFRIDAVKHIKYSFTRDWLTHVRNTTGKNMFAVAEFWKNDIGAIENYLSKTNWNHSVFDVPLHYNLYNASRSGGNYDMRQIFNGTVVQRHPTHAVTFVDNHDSQPEEALESFVEEWFKPLAYALTLTRDQGYPSVFYGDYYGIPTHGVPAMKSKIDPILEARQKYAYGTQRDYLDHPDVIGWTREGDGVHADSGLATLMSDGPGGSKWMEVGKNNAGEVWYDITGNQTNTVTINKDGWGQFHVSGGSVSIYVQQ

SEQ ID NO: 24504 - protein, 483 aa, Bacillus licheniformis
HHNGTNGTMMQYFEWYLPNDGNHWNRLRSDASNLKDKGITAVWIPPAWKGASQNDVGYGAYDLYDLGEFNQKGTVRTKYGTRNQLQAAVTALKSNGIQVYGDVVMNHKGGADATEWVRAVEVNPSNRNQEVSGDYTIEAWTKFDFPGRGNTHSNFKWRWYHFDGVDWDQSRQLQNRIYKFRGKGWDWEVDTENGNYDYLMYADIDMDHPEVVNELRNWGVWYTNTLGLDGFRIDAVKHIKYSFTRDWLTHVRNTTGKNMFAVAEFWKNDIGAIENYLSKTNWNHSVFDVPLHYNLYNASRSGGNYDMRQIFNGTVVQRHPTHAVTFVDNHDSQPEEALESFVEEWFKPLAYALTLTRDQGYPSVFYGDYYGIPTHGVPAMKSKIDPILEARQKYAYGTQRDYLDHPDVIGWTREGDGVHADSGLATLMSDGPGGSKWMEVGKNLAGEVWYDITGNQTNTVTINKDGWGQFHVSGGSVSIYVQQ

SEQ ID NO: 24505 - protein, 483 aa, Bacillus licheniformis
HHNGTNGTMMQYFEWYLPNDGNHWNRLRSDASNLKDKGITAVWIPPAWKGASQNDVGYGAYDLYDLGEFNQKGTVRTKYGTRNQLQAAVEALKSNGIQVYGDVVMNHKGGADATEWVRAVEVNPSNRNQEVSGDYTIEAWTKFDFPGRGNTHSNFKWRWYHFDGVDWDQSRQLQNRIYKFRGKGWDWEVDTENGNYDYLMYADIDMDHPEVVNELRNWGVWYTNTLGLDGFRIDAVKHIKYSFTRDWLTHVRNTTGKNMFAVAEFWKNDIGAIENYLSKTNWNHSVFDVPLHYNLYNASRSGGNYDMRQIFNGTVVQRHPTHAVTFVDNHDSQPEEALESFVEEWFKPLAYALTLTRDQGYPSVFYGDYYGIPTHGVPAMKSKIDPILEARQKYAYGTQRDYLDHPDVIGWTREGDGVHADSGLATLMSDGPGGSKWMEVGKNNAGEVWYDITGNQTNTVTINKDGWGQFHVSGGSVSIYVQQ

SEQ ID NO: 24506 - protein, 483 aa, Bacillus licheniformis
HHNGTNGTMMQYFEWYLPNDGNHWNRLRVDASNLKDKGITAVWIPPAWKGASQNDVGYGAYDLYDLGEFNQKGTVRTKYGTRNQLQAAVTALKSNGIQVYGDVVMNHKGGADATEWVRAVEVNPSNRNQEVSGDYTIEAWTKFDFPGRGNTHSNFKWRWYHFDGVDWDQSRQLQNRIYKFRGKGWDWEVDTENGNYDYLMYADIDMDHPEVVNELRNWGVWYTNTLGLDGFRIDAVKHIKYSFTRDWLTHVRNTTGKNMFAVAEFWKNDIGAIENYLSKTNWNHSVFDVPLHYNLYNASRSGGNYDMRQIFNGTVVQRHPTHAVTFVDNHDSQPEEALESFVEEWFKPLAYALTLTRDQGYPSVFYGDYYGIPTHGVPAMKSKIDPILEARQKYAYGTQRDYLDHPDVIGWTREGDGVHADSGLATLMSDGPGGSKWMEVGKNNAGEVWYDITGNQTNTVTINKDGWGQFHVSGGSVSIYVQQ

SEQ ID NO: 24507 - protein, 483 aa, Bacillus licheniformis
HHNGTNGTMMQYFEWYLPNDGNHWNRLRSDASNLKDKGITAVWIPPAWKGASQNDVGYGAYDLYDLGEFNQKGTVRTKYGTRNQLQAAVTALKSNGIQVYGDVVMNHKGGADATEWVRAVEVNPSNRNQEVSGDYTIEAWTKFDFPGRGNTHSNFKWRWYHFDGVDWDQSRQLQNRIYKFRGKGWDWEVDTENGNYDYLMYADIDMDHPEVVNELRNWGVWYTNTLGLDGFRIDAVKHIKYSFTRDWLTHVRNTTGKNMFAVAEFWKNDIGAIENYLSKTNWNHSVFDVPLHYNLYNASRSGGNYDMRQIFNGTVVQRHPTHAVTFVDNHDSQPEEALESFVEEWFKPLAYALTLTRDQGYPSVFYGDYYGIPTHGVPAMKSKIDPILEARQKYAYGTQRDYLDHPDVIGWTREGDGVHADSGLATMMSDGPGGSKWMEVGKNNAGEVWYDITGNQTNTVTINKDGWGQFHVSGGSVSIYVQQ

SEQ ID NO: 24508 - protein, 483 aa, Bacillus licheniformis
HHNGTNGTMMQYFEWYLPNDGNHWNRLRSDASNLKDKGITAVWIPPAWKGASQNDVGYGAYDLYDLGEFNQKGTVRTKYGTRNQLQAAVTALKSNGIQVYGDVVMNHKGGADATEWVRAVEVNPSNRNQEVSGDYTIEAWTKFDFPGRGNTHSNFKWRWYHFDGVDWDQSRQLQNRIYKFRGKGWDWEVDTENGNYDYLMYADIDMDHPEVVNELRNWGVWYTNTLGLDGFRIDAVKHIKYSFTRDWLTHVRNTTGKNMFAVAEFWKNDIGAIENYLSKTNWNHSVFDVPLHYNLYNASRSGGNYDMRQIFNGTVVQGHPTHAVTFVDNHDSQPEEALESFVEEWFKPLAYALTLTRDQGYPSVFYGDYYGIPTHGVPAMKSKIDPILEARQKYAYGTQRDYLDHPDVIGWTREGDGVHADSGLATLMSDGPGGSKWMEVGKNNAGEVWYDITGNQTNTVTINKDGWGQFHVSGGSVSIYVQQ

SEQ ID NO: 24509 - protein, 483 aa, Bacillus licheniformis
HHNGTNGTMMQYFEWYLPNDGNHWNRLRPDASNLKDKGITAVWIPPAWKGASQNDVGYGAYDLYDLGEFNQKGTVRTKYGTRNQLQAAVTALKSNGIQVYGDVVMNHKGGADATEWVRAVEVNPSNRNQEVSGDYTIEAWTKFDFPGRGNTHSNFKWRWYHFDGVDWDQSRQLQNRIYKFRGKGWDWEVDTENGNYDYLMYADIDMDHPEVVNELRNWGVWYTNTLGLDGFRIDAVKHIKYSFTRDWLTHVRNTTGKNMFAVAEFWKNDIGAIENYLSKTNWNHSVFDVPLHYNLYNASRSGGNYDMRQIFNGTVVQRHPTHAVTFVDNHDSQPEEALESFVEEWFKPLAYALTLTRDQGYPSVFYGDYYGIPTHGVPAMKSKIDPILEARQKYAYGTQRDYLDHPDVIGWTREGDGVHADSGLATLMSDGPGGSKWMEVGKNNAGEVWYDITGNQTNTVTINKDGWGQFHVSGGSVSIYVQQ

SEQ ID NO: 24510 - protein, 483 aa, Bacillus licheniformis
HHNGTNGTMMQYFEWYLPNDGNHWNRLRSDASNLKDKGITAVWIPPAWKGASQNDVGYGAYDLYDLGEFNQKGTVRTKYGTRNQLKAAVTALKSNGIQVYGDVVMNHKGGADATEWVRAVEVNPSNRNQEVSGDYTIEAWTKFDFPGRGNTHSNFKWRWYHFDGVDWDQSRQLQNRIYKFRGKGWDWEVDTENGNYDYLMYADIDMDHPEVVNELRNWGVWYTNTLGLDGFRIDAVKHIKYSFTRDWLTHVRNTTGKNMFAVAEFWKNDIGAIENYLSKTNWNHSVFDVPLHYNLYNASRSGGNYDMRQIFNGTVVQRHPTHAVTFVDNHDSQPEEALESFVEEWFKPLAYALTLTRDQGYPSVFYGDYYGIPTHGVPAMKSKIDPILEARQKYAYGTQRDYLDHPDVIGWTREGDGVHADSGLATLMSDGPGGSKWMEVGKNNAGEVWYDITGNQTNTVTINKDGWGQFHVSGGSVSIYVQQ

SEQ ID NO: 24511 - protein, 483 aa, Bacillus licheniformis
HHNGTNGTMMQYFEWYLPNDGNHWNRLRSDASNLKDKGITAVWIPPAWKGASQNDVGYGAYDLYDLGEFNQKGTVRTKYGTRNQLQAAVTALKSNGIQVYGDVVMNHKGGADATEWVRAVEVNPSNRNQEVSGDYTIEAWTKFDFPGRGNTHSNFKWRWYHFDGVDWDQSRQLQNRIYKFRGKGWDWEVDTENGNYDYLMYADIDMDHPEVVNELRNWGVWYTNTLGLDGFRIDAVKHIKYSFTRDWLTHVRNTTGKNMFAVAEFWKNDIGAIENYLSKTNWNHSVFDVPLHYNLYNASRSGGNYDMRQIFNGTVVQRHPTHAVTFVDNHDSQPEEALESFVEEWFKPLAYALTLTRDQGYPSVFYGDYYGIPTHGVPAMKSKIDPILEARQKYAYGTQRDYLDHPDVIGWTREGDGVHADSGLATQMSDGPGGSKWMEVGKNNAGEVWYDITGNQTNTVTINKDGWGQFHVSGGSVSIYVQQ

SEQ ID NO: 24512 - protein, 483 aa, Bacillus licheniformis
HHNGTNGTMMQYFEWYLPNDGNHWNRLRSDASNLKDKGITAVWIPPAWKGASQNDVGYGAYDLYDLGEFNQKGTVRTKYGTRNQLQAAVTALKSNGIQVYGDVVMNHKGGADATEWVRAVEVNPSNRNQEVSGDYTIEAWTKFDFPGRGNTHSNFKWRWYHFDGVDWDQSRQLQNRIYKFRGKGWDWEVDTENGNYDYLMYADIDMDHPEVVNELRNWGVWYTNTLGLDGFRIDAVKHIKYSFTRDWLTHVRNTTGKNMFAVAEFWKNDIGAIENYLSKTNWNHSVFDVPLHYNLYNASRSGGNYDMRQIFNGTVVQRHPTHAVTFVDNHDSQPMEALESFVEEWFKPLAYALTLTRDQGYPSVFYGDYYGIPTHGVPAMKSKIDPILEARQKYAYGTQRDYLDHPDVIGWTREGDGVHADSGLATLMSDGPGGSKWMEVGKNNAGEVWYDITGNQTNTVTINKDGWGQFHVSGGSVSIYVQQ

SEQ ID NO: 24513 - protein, 483 aa, Bacillus licheniformis
HHNGTNGTMMQYFEWYLPNDGNHWNRLRSDASNLKDKGITAVWIPPAWKGASQNDVGYGAYDLYDLGEFNQKGTVRTKYGTRNQLQAAVTALKSNGIQVYGDVVMNHKGGADATEWVRAVEVNPSNRNQEVSGDYTIEAWTKFDFPGRGNTHSNFKWRWYHFDGVDWDQSRQLQNRIYKFRGKGWDWEVDGENGNYDYLMYADIDMDHPEVVNELRNWGVWYTNTLGLDGFRIDAVKHIKYSFTRDWLTHVRNTTGKNMFAVAEFWKNDIGAIENYLSKTNWNHSVFDVPLHYNLYNASRSGGNYDMRQIFNGTVVQRHPTHAVTFVDNHDSQPEEALESFVEEWFKPLAYALTLTRDQGYPSVFYGDYYGIPTHGVPAMKSKIDPILEARQKYAYGTQRDYLDHPDVIGWTREGDGVHADSGLATLMSDGPGGSKWMEVGKNNAGEVWYDITGNQTNTVTINKDGWGQFHVSGGSVSIYVQQ

SEQ ID NO: 24514 - protein, 483 aa, Bacillus subtilis
HHNGTNGTMMQYFEWYLPNDGNHWNRLRSDASNLKDKGITAVWIPPAWKGASQNDVGYGAYDLYDLGEFNQKGTVRTKYGTRNQLQAAVTALKSNGIQVYGDVVMNHKGGADATEWVRAVEVNPSNRNQEVSGDYTIEAWTKFDFPGRGNTHSNFKWRWYHFDGVDWDQSRQLQNRIYKFRGKGWDWEVDTENGNYDYLMYADIDMDHPEVVNELRNWGVWYTNTLGLDGFRIDAVKHIKYSFTRDWLTHVRNTTGKNMFAVAEFWKNDIGAIENYLSKTNWNHSVFDVPLHYNLYNASRSGGNYDMRQIFNGTVVQRHPTHAVTFVDNHDSQPEEALESFVEEWFKPLAYALTLTRDQGYPSVFYGDYYGIPTHGVPAMKSKIDPILEARQKYAYGTQRDYLDHPDVIGWTREGDGVHADSGLATLMSDGPGGSKWMEVGKNNAGEVWYDITGNQTNTVTINKDGWGQFHVSGGSVSIYVQK

SEQ ID NO: 24515 - protein, 483 aa, Bacillus licheniformis
HHNGTNGTMMQYFEWYLPNDGNHWNRLRSDASNLKDKGITAVWIPPAWKGASQNDVGYGAYDLYDLGEFNQKGTVRTKYGTRNQLQAAVTALKSNGIQVYGDVVMNHKGGADATEWVRAVEVNPSNRNQEVSGDYTIEAWTKFDFPGRGNTHSNFKWRWYHFDGVDWDQSRQLQNRIYKFRGKEWDWEVDTENGNYDYLMYADIDMDHPEVVNELRNWGVWYTNTLGLDGFRIDAVKHIKYSFTRDWLTHVRNTTGKNMFAVAEFWKNDIGAIENYLSKTNWNHSVFDVPLHYNLYNASRSGGNYDMRKIFNGTVVQRHPTHAVTFVDNHDSQPEEALESFVEEWFKPLAYALTLTRDQGYPSVFYGDYYGIPTHGVPAMKSKIDPILEARQKYAYGTQRDYLDHPDVIGWTREGDGVHADSGLATLMSDGPGGSKWMEVGKNNAGEVWYDITGNQTNEVTINKDGWGQFHVSGGSVSIYVQQ

SEQ ID NO: 24516 - protein, 483 aa, Bacillus licheniformis
HHNGTNGTMMQYFEWYLPNDGNHWNRLRSDASNLKDKGITAVWIPPAWKGASQNDVGYGAYDLYDLGEFNQKGTVRTKYGTRNQLQAAVTALKANGIQVYGDVVMNHKGGADATEWVRAVEVNPSNRNQEVSGDYTIEAWTKFDFPGRGNTHSNFKWRWYHFDGVDWDQSRQLQNRIYKFRGKGWDWEVDTENGNYDYLMYADIDMDHPEVVNELRNWGVWYTNTLGLDGFRIDAVKHIKYSFTRDWLTHVRNTTGKNMFAVAEFWKNDIGAIENYLSKTNWNHSVFDVPLHYNLYNASRSGGNYDMRQIFNGTVVQRHPTHAVTFVDNHDSQPEEALESFVEEWFKPLAYALTLTRDQGYPSVFYGDYYGIPTHGVPAMKSKIDPILEARQKYAYGTQRDYLDHPDVIGWTREGDGVHADSGLATLMSDGPGGSKWMEVGKNNAGEVWYDITGNQTNTVTINKDGWGQFHVSGGSVSIYVQQ

SEQ ID NO: 24517 - protein, 483 aa, Bacillus licheniformis
HHNGTNGTMMQYFEWYLPNDGNHWNRLRSDASNLKDKGITAVWIPPAWKGASQNDVGYGAYDLYDLGEFNQKGTVRTKYGTRNQLQAAVTALKSNGIQVYGDVVMNHKGGADATEWVRAVEVNPSNRNQEVSGDYTIEAWTKFDFPGRGNTHSNFKWRWYHFDGVDWDQSRQLQNRIYKFRGKGWDWEVDTENGNYDYLMYADIDMDHPEVVNELRNWGVWYTNTLGLDGFRIDAVKHIKYSFTRDWLTHVRNTTGKNMFAVAEFWKNDIGAIENYLSKTNWNHSVFDVPLHYNLYNASRSGGNYDMRQIFNGTVVQRHPTHAVTFVDNHDSQPEEALESFVGEWFKPLAYALTLTRDQGYPSVFYGDYYGIPTHGVPAMKSKIDPILEARQKYAYGTQRDYLDHPDVIGWTREGDGVHADSGLATLMSDGPGGSKWMEVGKNNAGEVWYDITGNQTNTVTINKDGWGQFHVSGGSVSIYVQQ

SEQ ID NO: 24518 - protein, 483 aa, Bacillus licheniformis
HHNGTNGTMMQYFEWYLPNDGNHWNRLRSDASNLKDKGITAVWIPPAWKGASQNDVGYGAYDLYDLGEFNQKGTVRTKYGTRNQLQAAVIALKSNGIQVYGDVVMNHKGGADATEWVRAVEVNPSNRNQEVSGDYTIEAWTKFDFPGRGNTHSNFKWRWYHFDGVDWDQSRQLQNRIYKFRGKGWDWEVDTENGNYDYLMYADIDMDHPEVVNELRNWGVWYTNTLGLDGFRIDAVKHIKYSFTRDWLTHVRNTTGKNMFAVAEFWKNDIGAIENYLSKTNWNHSVFDVPLHYNLYNASRSGGNYDMRQIFNGTVVQRHPTHAVTFVDNHDSQPEEALESFVEEWFKPLAYALTLTRDQGYPSVFYGDYYGIPTHGVPAMKSKIDPILEARQKYAYGTQRDYLDHPDVIGWTREGDGVHADSGLATLMSDGPGGSKWMEVGKNNAGEVWYDITGNQTNTVTINKDGWGQFHVSGGSVSIYVQQ

SEQ ID NO: 24519 - protein, 483 aa, Bacillus licheniformis
HHNGTNGTMMQYFEWYLPNDGNHWNRLRSDASNLKDKGITAVWIPPAWKGASQNDVGYGAYDLYDLGEFNQKGTVRTKYGTRNQLQAAVTALKSNGIQVYGDVVMNHKGGADATEWVRAVEVNPSNRNQEVSGDYTIEAWTKFDFPGRGNTHSNFKWRWYHFDGVDWDQSRQLQNRIYKFRGKGWDWEVDTENGNYDYLMYADIDMDHPEVVNELRNWGVWYTNTLGLDGFRIDAVKHIKYSFTRDWLTHVRNTTGKNMFAVAEFWKNDIGAIENYLSKTNWNHSVFDVPLHYNLYNASRSGGNYDMRQIFNGTVVQRHPTHAVTFVDNHDSQPEEALESFVEEWFKPLAYALTLTRDQGYPSVFYGDYYGIPTHGVPAMKSKIDPILEARQKYAYGTQRDYLDHPDVIGWTREGDGVHADSGLATLMSDGPGGSKWMEVGKNNAGEVWYDITGNQKNTVTINKDGWGQFHVSGGSVSIYVQQ

SEQ ID NO: 24520 - protein, 483 aa, Bacillus licheniformis
HHNGTNGTMMQYFEWYLPNDGNHWNRLRSDASNLKDKGITAVWIPPAWKGASQNDVGYGAYDLYDLGEFNQKGTVRTKYGTRNQLQAAVTALKSNGIQVYGDVVMNHKGGADATEWVRAVEVNPSNRNQEVSGDYTIEAWTKFDFPGRGNTHSNFKWRWYHFDGVDWDQSRQLQNRIYKFRGKGWDWEVDTENGNYDYLMYADIDMDHPEVVNELRNWGVWYTNTLGLDGFRIDAVKHIKYSFTRDWLTHVRNTTGKHMFAVAEFWKNDIGAIENYLSKTNWNHSVFDVPLHYNLYNASRSGGNYDMRQIFNGTVVQRHPTHAVTFVDNHDSQPEEALESFVEEWFKPLAYALTLTRDQGYPSVFYGDYYGIPTHGVPAMKSKIDPILEARQKYAYGTQRDYLDHPDVIGWTREGDGVHADSGLATLMSDGPGGSKWMEVGKNNAGEVWYDITGNQTNTVTINKDGWGQFHVSGGSVSIYVQQ

SEQ ID NO: 24521 - protein, 483 aa, Bacillus licheniformis
HHNGTNGTMMQYFEWYLPNDGNHWNRLRSDASNLKDKGITAVWIPPAWKGASQNDVGYGAYDLYDLGEFNQKGTVRTKYGTRNQLQAAVTALKSNGIQVYGDVVMNHKGGADATEWVRAVEVNPSNRNQEVSGDYTIEAWTKFDFPGRGNTHSNFKWRWYHFDGVDWDQSRQLQNRIYKFRGKGWDWEVDTENGNYDYLMYADIDMDHPEVVNELRCWGVWYTNTLGLDGFRIDAVKHIKYSFTRDWLTHVRNTTGKNMFAVAEFWKNDIGAIENYLSKTNWNHSVFDVPLHYNLYNASRSGGNYDMRQIFNGTVVQRHPTHAVTFVDNHDSQPEEALESFVEEWFKPLAYALTLTRDQGYPSVFYGDYYGIPTHGVPAMKSKIDPILEARQKYAYGTQRDYLDHPDVIGWTREGDGVHADSGLATLMSDGPGGSKWMEVGKNNAGEVWYDITGNQTNTVTINKDGWGQFHVSGGSVSIYVQQ

SEQ ID NO: 24522 - protein, 483 aa, Bacillus licheniformis
HHNGTNGTMMQYFEWYLPNDGNHWNRLRSDASNLKKKGITAVWIPPAWKGASQNDVGYGAYDLYDLGEFNQKGTVRTKYGTRNQLQAAVTALKSNGIQVYGDVVMNHKGGADATEWVRAVEVNPSNRNQEVSGDYTIEAWTKFDFPGRGNTHSNFKWRWYHFDGVDWDQSRQLQNRIYKFRGKGWDWEVDTENGNYDYLMYADIDMDHPEVVNELRNWGVWYTNTLGLDGFRIDAVKHIKYSFTRDWLTHVRNTTGKNMFAVAEFWKNDIGAIENYLSKTNWNHSVFDVPLHYNLYNASRSGGNYDMRQIFNGTVVQRHPTHAVTFVDNHDSQPEEALESFVEEWFKPLAYALTLTRDQGYPSVFYGDYYGIPTHGVPAMKSKIDPILEARQKYAYGTQRDYLDHPDVIGWTREGDGVHADSGLATLMSDGPGGSKWMEVGKNNAGEVWYDITGNQTNTVTINKDGWGQFHVSGGSVSIYVQQ

SEQ ID NO: 24523 - protein, 483 aa, Bacillus licheniformis
HHNGTNGTMMQYFEWYLPNDGNHWNRLRSDASNLKSKGITAVWIPPAWKGASQNDVGYGAYDLYDLGEFNQKGTVRTKYGTRNQLQAAVTALKSNGIQVYGDVVMNHKGGADATEWVRAVEVNPSNRNQEVSGDYTIEAWTKFDFPGRGNTHSNFKWRWYHFDGVDWDQSRQLQNRIYKFRGKGWDWEVDTENGNYDYLMYADIDMDHPEVVNELRNWGVWYTNTLGLDGFRIDAVKHIKYSFTRDWLTHVRNTTGKNMFAVAEFWKNDIGAIENYLSKTNWNHSVFDVPLHYNLYNASRSGGNYDMRQIFNGTVVQRHPTHAVTFVDNHDSQPEEALESFVEEWFKPLAYALTLTRDQGYPSVFYGDYYGIPTHGVPAMKSKIDPILEARQKYAYGTQRDYLDHPDVIGWTREGDGVHADSGLATLMSDGPGGSKWMEVGKNNAGEVWYDITGNQTNTVTINKDGWGQFHVSGGSVSIYVQQ

SEQ ID NO: 24524 - protein, 483 aa, Bacillus licheniformis
HHNGTNGTMMQYFEWYLPNDGNHWNRLRSDASNLCDKGITAVWIPPAWKGASQNDVGYGAYDLYDLGEFNQKGTVRTKYGTRNQLQAAVTALKSNGIQVYGDVVMNHKGGADATEWVRAVEVNPSNRNQEVSGDYTIEAWTKFDFPGRGNTHSNFKWRWYHFDGVDWDQSRQLQNRIYKFRGKGWDWEVDTENGNYDYLMYADIDMDHPEVVNELRNWGVWYTNTLGLDGFRIDAVKHIKYSFTRDWLTHVRNTTGKNMFAVAEFWKNDIGAIENYLSKTNWNHSVFDVPLHYNLYNASRSGGNYDMRQIFNGTVVQRHPTHAVTFVDNHDSQPEEALESFVEEWFKPLAYALTLTRDQGYPSVFYGDYYGIPTHGVPAMKSKIDPILEARQKYAYGTQRDYLDHPDVIGWTREGDGVHADSGLATLMSDGPGGSKWMEVGKNNAGEVWYDITGNQTNTVTINKDGWGQFHVSGGSVSIYVQQ

SEQ ID NO: 24525 - protein, 483 aa, Bacillus licheniformis
HHNGTNGTMMQYFEWYLPNDGNHWNRLRSDASNLKDKGITAVWIPPAWKGASQNDVGYGAYDLYDLGEFNQKGTVRTKYGTRNQLQAAVTALKSNGIQVYGDVVMNHKGGADATEWVRAVEVNPSNRNQEVSGDYTIEAWTKFDFPGRGNTHSNFKWRWYHFDGVDWDQSRQLQNRIYKFRGKGWDWEVDTENGNYDYLMYADIDMDHPEVVNELRNWGVWYTNTLGLDGFRIDAVKHIKYSFTRDWLTHVRNTTGKNMFAVAEFWKNDIGAIENYLSKTNWNHSVFDVPLHYNLYNASRSGGNYDMRQIFNGTVVQRHPTHAVTFVDNHDSQPEEALESFVEEWFKPLAYALLLTRDQGYPSVFYGDYYGIPTHGVPAMKSKIDPILEARQKYAYGTQRDYLDHPDVIGWTREGDGVHADSGLATLMSDGPGGSKWMEVGKNNAGEVWYDITGNQTNTVTINKDGWGQFHVSGGSVSIYVQQ

SEQ ID NO: 24526 - protein, 483 aa, Bacillus licheniformis
HHNGTNGTMMQYFEWYLPNDGNHWNRLRQDASNLKDKGITAVWIPPAWKGASQNDVGYGAYDLYDLGEFNQKGTVRTKYGTRNQLQAAVTALKSNGIQVYGDVVMNHKGGADATEWVRAVEVNPSNRNQEVSGDYTIEAWTKFDFPGRGNTHSNFKWRWYHFDGVDWDQSRQLQNRIYKFRGKGWDWEVDTENGNYDYLMYADIDMDHPEVVNELRNWGVWYTNTLGLDGFRIDAVKHIKYSFTRDWLTHVRNTTGKNMFAVAEFWKNDIGAIENYLSKTNWNHSVFDVPLHYNLYNASRSGGNYDMRQIFNGTVVQRHPTHAVTFVDNHDSQPEEALESFVEEWFKPLAYALTLTRDQGYPSVFYGDYYGIPTHGVPAMKSKIDPILEARQKYAYGTQRDYLDHPDVIGWTREGDGVHADSGLATLMSDGPGGSKWMEVGKNNAGEVWYDITGNQTNTVTINKDGWGQFHVSGGSVSIYVQQ

SEQ ID NO: 24527 - protein, 483 aa, Bacillus licheniformis
HHNGTNGTMMQYFEWYLPNDGNHWNRLRSDASNLKDKGITAVWIPPAWKGASQNDVGYGAYDLYDLGEFNQKGTVRTKYGTRNQLQAAVTALKSNGIQVYGDVVMNHKGGADATEWVRAVEVNPSNRNQEVSGDYTIEAWTKFDFPGRGNTHSNFKWRWYHFDGVDWDQSRQLQNRIYKFRGKGWDWEVDTENGNYDYLMYADIDMDHPEVVNELRNWGVWYTNTLGLDGFRIDAVKHIKYSFTRDWLTHVRNTTGKNMFAVAEFWKNDIGAIENYLSKTNWNHSVFDVPLHYNLYNASRSGGNYDMRQIFNGTVVQRHPTHAVTFVDNHDSQPEEALESFVEEWFKPLAYALTLTRDQGYPSVFYGDYYGIPTHGVPAMKSKIDPILEARQKYAYGTQRDYLDHPDVIGWTREGDGVHADSGLATLMSDGPGGSKWMEVGKNWAGEVWYDITGNQTNTVTINKDGWGQFHVSGGSVSIYVQQ

SEQ ID NO: 24528 - protein, 483 aa, Bacillus licheniformis
HHNGTNGTMMQYFEWYLPNDGNHWNRLRSDASNLKDKGITAVWIPPAWKGASQNDVGYGAYDLYDLGEFNQKGTVRTKYGTRNQLQAAVTALKSNGIQVYGDVVMNHKGGADATEWVRAVEVNPSNRNQEVSGDYTIEAWTKFDFPGRGNTHSNFKWRWYHFDGVDWDQSRQLQNRIYKFRGKGWDWEVDTENGNYDYLMYADIDMDHPEVVNELRKWGVWYTNTLGLDGFRIDAVKHIKYSFTRDWLTHVRNTTGKNMFAVAEFWKNDIGAIENYLSKTNWNHSVFDVPLHYNLYNASRSGGNYDMRQIFNGTVVQRHPTHAVTFVDNHDSQPEEALESFVEEWFKPLAYALTLTRDQGYPSVFYGDYYGIPTHGVPAMKSKIDPILEARQKYAYGTQRDYLDHPDVIGWTREGDGVHADSGLATLMSDGPGGSKWMEVGKNNAGEVWYDITGNQTNTVTINKDGWGQFHVSGGSVSIYVQQ

SEQ ID NO: 24529 - protein, 483 aa, Bacillus licheniformis
HHNGTNGTMMQYFEWYLPNDGNHWNRLRSDASNLKDKGITAVWIPPAWKGASQNDVGYGAYDLYDLGEFNQKGTVRTKYGTRNQLQAAVTALKSNGIQVYGDVVMNHKGGADATEWVRAVEVNPSNRNQEVSGDYTIEAWTKFDFPGRGNTHSNFKWRWYHFDGVDWDQSRQLQNRIYKFRGKGWDWEVDTENGNYDYLMYADIDMDHPEVVNELRNWGVWYTNTLGLDGFRIDAVKHIKYSFTRDWLTHVRNTTGKNMFAVAEFWKNDIGAIENYLSKTNWNHSVFDVPLHYNLYNASRSGGNYDMRQIFNGTVVQRHPTHAVTFVDNHDSQPEEALESFVEEWFKPLAYALTLTRDQGYPSVFYGDYYGIPTHGVPAMKSKIDPILEARQKYAYGTQRDYLDHPDVIGWTREGDGVHADSGLATVMSDGPGGSKWMEVGKNNAGEVWYDITGNQTNTVTINKDGWGQFHVSGGSVSIYVQQ

SEQ ID NO: 24530 - protein, 483 aa, Bacillus licheniformis
HHNGTNGTMMQYFEWYLPNDGNHWNRLRSDASNLKDKGITAVWIPPAWKGASQNDVGYGAYDLYDLGEFNQKGTVRTKYGTRNQLQAAVTALKENGIQVYGDVVMNHKGGADATEWVRAVEVNPSNRNQEVSGDYTIEAWTKFDFPGRGNTHSNFKWRWYHFDGVDWDQSRQLQNRIYKFRGKGWDWEVDTENGNYDYLMYADIDMDHPEVVNELRNWGVWYTNTLGLDGFRIDAVKHIKYSFTRDWLTHVRNTTGKNMFAVAEFWKNDIGAIENYLSKTNWNHSVFDVPLHYNLYNASRSGGNYDMRQIFNGTVVQRHPTHAVTFVDNHDSQPEEALESFVEEWFKPLAYALTLTRDQGYPSVFYGDYYGIPTHGVPAMKSKIDPILEARQKYAYGTQRDYLDHPDVIGWTREGDGVHADSGLATLMSDGPGGSKWMEVGKNNAGEVWYDITGNQTNTVTINKDGWGQFHVSGGSVSIYVQQ

SEQ ID NO: 24531 - protein, 483 aa, Bacillus licheniformis
HHNGTNGTMMQYFEWYLPNDGNHWNRLRSDASNLKDKGITAVWIPPAWKGASQNDVGYGAYDLYDLGEFNQKGTVRTKYGTRNQLQAAVTALKSNGIQVYGDVVMNHKGGADATEWVRAVEVNPSNRNQEVSGDYTIEAWTKFDFPGRGNTHSNFKWRWYHFDGVDWDQSRQLQNRIYKFRGKGWDWEVDTENGNYDYLMYADIDMDHPEVVNELRNWGVWYTNTLGLDGFRIDAVKHIKYSFTRDWLTHVRNTTGKNMFAVAEFWKNDIGAIENYLSKTNWNHSVFDVPLHYNLYNASISGGNYDMRQIFNGTVVQRHPTHAVTFVDNHDSQPEEALESFVEEWFKPLAYALTLTRDQGYPSVFYGDYYGIPTHGVPAMKSKIDPILEARQKYAYGTQRDYLDHPDVIGWTREGDGVHADSGLATLMSDGPGGSKWMEVGKNNAGEVWYDITGNQTNTVTINKDGWGQFHVSGGSVSIYVQQ

SEQ ID NO: 24532 - protein, 483 aa, Bacillus subtilis
HHNGTNGTMMQYFEWYLPNDGNHWNRLRSDASNLKDKGITAVWIPPAWKGASQNDVGYGAYDLYDLGEFNQKGTVRTKYGTRNQLQAAVTALKSNGIQVYGDVVMNHKGGADATEWVRAVEVNPSNRNQEVSGDYTIEAWTKFDFPGRGNTHSNFKWRWYHFDGVDWDQSRQLQNRIYKFRGKEWDWEVDTENGNYDYLMYADIDMDHPEVVNELRNWGVWYTNTLGLDGFRIDAVKHIKYSFTRDWLTHVRNTTGKNMFAVAEFWKNDIGAIENYLSKTNWNHSVFDVPLHYNLYNASRSGGNYDMRQIFNGTVVQRHPTHAVTFVDNHDSQPEEALESFVEEWFKPLAYALTLTRDQGYPSVFYGDYYGIPTHGVPAMKSKIDPILEARQKYAYGTQRDYLDHPDVIGWTREGDGVHADSGLATLMSDGPGGSKWMEVGKNNAGEVWYDITGNQTNTVTINKDGWGQFHVSGGSVSIYVQQ

SEQ ID NO: 24533 - protein, 483 aa, Bacillus licheniformis
HHNGTNGTMMQYFEWYLPNDGNHWNRLRSDASNLKDKGITAVWIPPAWKGASQNDVGYGAYDLYDLGEFNQKGTVRTKYGTRNQLQAAVTALKSNGIQVYGDVVMNHKGGADATEWVRAVEVNPSNRNQEVSGDYTIEAWTKFDFPGRGNTHSNFKWRWYHFDGVDWDQSRQLQNRIYKFRGKGWDWEVDTENGNYDYLMYADIDMDHPEVVNELRYWGVWYTNTLGLDGFRIDAVKHIKYSFTRDWLTHVRNTTGKNMFAVAEFWKNDIGAIENYLSKTNWNHSVFDVPLHYNLYNASRSGGNYDMRQIFNGTVVQRHPTHAVTFVDNHDSQPEEALESFVEEWFKPLAYALTLTRDQGYPSVFYGDYYGIPTHGVPAMKSKIDPILEARQKYAYGTQRDYLDHPDVIGWTREGDGVHADSGLATLMSDGPGGSKWMEVGKNNAGEVWYDITGNQTNTVTINKDGWGQFHVSGGSVSIYVQQ

SEQ ID NO: 24534 - protein, 483 aa, Bacillus licheniformis
HHNGTNGTMMQYFEWYLPNDGNHWNRLRSDASNLKDKGITAVWIPPAWKGASQNDVGYGAYDLYDLGEFNQKGTVRTKYGTRNQLQAAVTALKSNGIQVYGDVVMNHKGGADATEWVRAVEVNPSNRNQEVSGDYTIEAWTKFDFPGRGNTHSNFKWRWYHFDGVDWDQSRQLQNRIYKFRGKEWDWEVDTENGNYDYLMYADIDMDHPEVVNELRNWGVWYTNTLGLDGFRIDAVKHIKYSFTRDWLTHVRNTTGKNMFAVAEFWKNDIGAIENYLSKTNWNHSVFDVPLHYNLYNASRSGGNYDMRQIFNGTVVQRHPTHAVTFVDNHDSQPEEALESFVEEWFKPLAYALTLTRDQGYPSVFYGDYYGIPTHGVPAMKSKIDPILEARQKYAYGTQRDYMDHPDVIGWTREGDGVHADSGLATLMSDGPGGSKWMEVGKNNAGEVWYDITGNQTNTVTINKDGWGQFHVSGGSVSIYVQQ

SEQ ID NO: 24535 - protein, 483 aa, Bacillus licheniformis
HHNGTNGTMMQYFEWYLPNDGNHWNRLRSDASNLKDKGITAVWIPPAWKGASQNDVGYGAYDLYDLGEFNQKGTVRTKYGTRNQLQAAVTALKSNGIQVYGDVVMNHKGGADATEWVRAVEVNPSNRNQEVSGDYTIEAWTKFDFPGRGNTHSNFKWRWYHFDGVDWDQSRQLQNRIYKFRGKGWDWEVDTENGNYDYLMYADIDMDHPEVVNELRNWGVWYTNTLGLDGFRIDAVKHIKYSFTRDWLTHVRNTTGKNMFAVAEFWKNDIGAIENYLSKTNWNHSVFDVPLHYNLYNASRSGGNYDMRQIFNGTVVQRHPTHAVTFVDNHDSQPEEALESFVEEWFKPLAYALTLTRDQGYPSVFYGDYYGIPTHGVPAMKSKIDPILEARQKYAYGTQRDYLDHPDVIGWTREGDGVHADSGLATLMSDGPGGSKWMEVGKNNAGEVWYDITGNQYNTVTINKDGWGQFHVSGGSVSIYVQQ

SEQ ID NO: 24536 - protein, 483 aa, Bacillus licheniformis
HHNGTNGTMMQYFEWYLPNDGNHWNRLRSDASNLKDKGITAVWIPPAWKGASQNDVGYGAYDLYDLGEFNQKGTVRTKYGTRNQLQAAVSALKSNGIQVYGDVVMNHKGGADATEWVRAVEVNPSNRNQEVSGDYTIEAWTKFDFPGRGNTHSNFKWRWYHFDGVDWDQSRQLQNRIYKFRGKGWDWEVDTENGNYDYLMYADIDMDHPEVVNELRNWGVWYTNTLGLDGFRIDAVKHIKYSFTRDWLTHVRNTTGKNMFAVAEFWKNDIGAIENYLSKTNWNHSVFDVPLHYNLYNASRSGGNYDMRQIFNGTVVQRHPTHAVTFVDNHDSQPEEALESFVEEWFKPLAYALTLTRDQGYPSVFYGDYYGIPTHGVPAMKSKIDPILEARQKYAYGTQRDYLDHPDVIGWTREGDGVHADSGLATLMSDGPGGSKWMEVGKNNAGEVWYDITGNQTNTVTINKDGWGQFHVSGGSVSIYVQQ

SEQ ID NO: 24537 - protein, 483 aa, Bacillus licheniformis
HHNGTNGTMMQYFEWYLPNDGNHWNRLRSDASNLKDKGITAVWIPPAWKGASQNDVGYGAYDLYDLGEFNQKGTVRTKYGTRNQLQAAVTALKSNGIQVYGDVVMNHKGGADATEWVRAVEVNPFNRNQEVSGDYTIEAWTKFDFPGRGNTHSNFKWRWYHFDGVDWDQSRQLQNRIYKFRGKGWDWEVDTENGNYDYLMYADIDMDHPEVVNELRNWGVWYTNTLGLDGFRIDAVKHIKYSFTRDWLTHVRNTTGKNMFAVAEFWKNDIGAIENYLSKTNWNHSVFDVPLHYNLYNASRSGGNYDMRQIFNGTVVQRHPTHAVTFVDNHDSQPEEALESFVEEWFKPLAYALTLTRDQGYPSVFYGDYYGIPTHGVPAMKSKIDPILEARQKYAYGTQRDYLDHPDVIGWTREGDGVHADSGLATLMSDGPGGSKWMEVGKNNAGEVWYDITGNQTNTVTINKDGWGQFHVSGGSVSIYVQQ

SEQ ID NO: 24538 - protein, 483 aa, Bacillus licheniformis
HHNGTNGTMMQYFEWYLPNDGNHWNRLRSDASNLKDKGITAVWIPPAWKGASQNDVGYGAYDLYDLGEFNQKGTVRTKYGTRNQLQAAVTALKSNGIQVYGDVVMNHKGGADATEWVRAVEVNPSNRNQEVSGDYTIEAWTKFDFPGRGNTHSNFKWRWYHFDGVDWDQSRQLQNRIYKFRGKGWDWEVDTENGNYDYLMYADIDMDHPEVVNELRNWGVWYTNTLGLDGFRIDAVKHIKYSFTRDWLTHVRNTTGKNMFAVAEFWKNDIGAIENYLSKTNWNHSVFDVPLHYNLYNASRSGGNYDMRQIFNGTVVQRHPTHAVTFVDNHDSQPEEALESFVEEWFKPLAYALTLTRDQGYPSVFYGDYYGIPTHGVPAMKSKIDPILEARQKYAYGTQRDYLDHPDVIGWTREGDGVHADSGLATLMSDGPGGSKWMEVGKNNAGLVWYDITGNQTNTVTINKDGWGQFHVSGGSVSIYVQQ

SEQ ID NO: 24539 - protein, 483 aa, Bacillus licheniformis
HHNGTNGTMMQYFEWYLPNDGNHWNRLRSDASNLKDKGITAVWIPPAWKGASQNDVGYGAYDLYDLGEFNQKGTVRTKYGTRNQLQAAGTALKSNGIQVYGDVVMNHKGGADATEWVRAVEVNPSNRNQEVSGDYTIEAWTKFDFPGRGNTHSNFKWRWYHFDGVDWDQSRQLQNRIYKFRGKGWDWEVDTENGNYDYLMYADIDMDHPEVVNELRNWGVWYTNTLGLDGFRIDAVKHIKYSFTRDWLTHVRNTTGKNMFAVAEFWKNDIGAIENYLSKTNWNHSVFDVPLHYNLYNASRSGGNYDMRQIFNGTVVQRHPTHAVTFVDNHDSQPEEALESFVEEWFKPLAYALTLTRDQGYPSVFYGDYYGIPTHGVPAMKSKIDPILEARQKYAYGTQRDYLDHPDVIGWTREGDGVHADSGLATLMSDGPGGSKWMEVGKNNAGEVWYDITGNQTNTVTINKDGWGQFHVSGGSVSIYVQQ

SEQ ID NO: 24540 - protein, 483 aa, Bacillus licheniformis
HHNGTNGTMMQYFEWYLPNDGNHWNRLRSDASNLKDKGITAVWIPPAWKGASQNDVGYGAYDLYDLGEFNQKGTVRTKYGTRNQLQAAVTALKSNGIQVYGDVVMNHKGGADATEWVRAVEVNPSNRNQEVSGDYTIEAWTKFDFPGRGNTHSNFKWRWYHFDGVDWDQSRQLQNRIYKFRGKGWDWEVDTENGNYDYLMYADIDMDHPEVVNELRNWGVWYTNTLGLDGFRIDAVKHIKYSFTRDWLTHVRNTTGKNMFAVAEFWKNDIGAIENYLSKTNWNHSVFDVPLHYNLYNASRSGGNYDMRRIFNGTVVQRHPTHAVTFVDNHDSQPEEALESFVEEWFKPLAYALTLTRDQGYPSVFYGDYYGIPTHGVPAMKSKIDPILEARQKYAYGTQRDYLDHPDVIGWTREGDGVHADSGLATLMSDGPGGSKWMEVGKNNAGEVWYDITGNQTNTVTINKDGWGQFHVSGGSVSIYVQQ

SEQ ID NO: 24541 - protein, 483 aa, Bacillus licheniformis
HHNGTNGTMMQYFEWYLPNDGNHWNRLRSDASNLDDKGITAVWIPPAWKGASQNDVGYGAYDLYDLGEFNQKGTVRTKYGTRNQLQAAVTALKSNGIQVYGDVVMNHKGGADATEWVRAVEVNPSNRNQEVSGDYTIEAWTKFDFPGRGNTHSNFKWRWYHFDGVDWDQSRQLQNRIYKFRGKGWDWEVDTENGNYDYLMYADIDMDHPEVVNELRNWGVWYTNTLGLDGFRIDAVKHIKYSFTRDWLTHVRNTTGKNMFAVAEFWKNDIGAIENYLSKTNWNHSVFDVPLHYNLYNASRSGGNYDMRQIFNGTVVQRHPTHAVTFVDNHDSQPEEALESFVEEWFKPLAYALTLTRDQGYPSVFYGDYYGIPTHGVPAMKSKIDPILEARQKYAYGTQRDYLDHPDVIGWTREGDGVHADSGLATLMSDGPGGSKWMEVGKNNAGEVWYDITGNQTNTVTINKDGWGQFHVSGGSVSIYVQQ

SEQ ID NO: 24542 - protein, 483 aa, Bacillus licheniformis
HHNGTNGTMMQYFEWYLPNDGNHWNRLRSDASNLKDPGITAVWIPPAWKGASQNDVGYGAYDLYDLGEFNQKGTVRTKYGTRNQLQAAVTALKSNGIQVYGDVVMNHKGGADATEWVRAVEVNPSNRNQEVSGDYTIEAWTKFDFPGRGNTHSNFKWRWYHFDGVDWDQSRQLQNRIYKFRGKGWDWEVDTENGNYDYLMYADIDMDHPEVVNELRNWGVWYTNTLGLDGFRIDAVKHIKYSFTRDWLTHVRNTTGKNMFAVAEFWKNDIGAIENYLSKTNWNHSVFDVPLHYNLYNASRSGGNYDMRQIFNGTVVQRHPTHAVTFVDNHDSQPEEALESFVEEWFKPLAYALTLTRDQGYPSVFYGDYYGIPTHGVPAMKSKIDPILEARQKYAYGTQRDYLDHPDVIGWTREGDGVHADSGLATLMSDGPGGSKWMEVGKNNAGEVWYDITGNQTNTVTINKDGWGQFHVSGGSVSIYVQQ

SEQ ID NO: 24543 - protein, 483 aa, Bacillus licheniformis
HHNGTNGTMMQYFEWYLPNDGNHWNRLRYDASNLKDKGITAVWIPPAWKGASQNDVGYGAYDLYDLGEFNQKGTVRTKYGTRNQLQAAVTALKSNGIQVYGDVVMNHKGGADATEWVRAVEVNPSNRNQEVSGDYTIEAWTKFDFPGRGNTHSNFKWRWYHFDGVDWDQSRQLQNRIYKFRGKGWDWEVDTENGNYDYLMYADIDMDHPEVVNELRNWGVWYTNTLGLDGFRIDAVKHIKYSFTRDWLTHVRNTTGKNMFAVAEFWKNDIGAIENYLSKTNWNHSVFDVPLHYNLYNASRSGGNYDMRQIFNGTVVQRHPTHAVTFVDNHDSQPEEALESFVEEWFKPLAYALTLTRDQGYPSVFYGDYYGIPTHGVPAMKSKIDPILEARQKYAYGTQRDYLDHPDVIGWTREGDGVHADSGLATLMSDGPGGSKWMEVGKNNAGEVWYDITGNQTNTVTINKDGWGQFHVSGGSVSIYVQQ

SEQ ID NO: 24544 - protein, 483 aa, Bacillus licheniformis
HHNGTNGTMMQYFEWYLPNDGNHWNRLRSDASNLKDKGITAVWIPPAWKGASQNDVGYGAYDLYDLGEFNQKGTVRTKYGTRNQLQAAVTALKSNGIQVYGDVVMNHKGGADATEWVRAVEVNPSNRNQEVSGDYTIEAWTKFDFPGRGNTHSNFKWRWYHFDGVDWDQSRQLQNRIYKFRGKGWDWEVDTENGNYDYLMYADIDMDHPEVVNELRNWGVWYTNTLGLDGFRIDAVKHIKYSFTRDWLTHVRNTTGKNMFAVAEFWKNDIGAIENYLSKTNWNHSVFDVPLHYNLYNASRSGGNYDMRQIFNGTVVQRHPTHAVTFVDNHDSQPEEALESFVDEWFKPLAYALTLTRDQGYPSVFYGDYYGIPTHGVPAMKSKIDPILEARQKYAYGTQRDYLDHPDVIGWTREGDGVHADSGLATLMSDGPGGSKWMEVGKNNAGEVWYDITGNQTNTVTINKDGWGQFHVSGGSVSIYVQQ

SEQ ID NO: 24545 - protein, 483 aa, Bacillus subtilis
HHNGTNGTMMQYFEWYLPNDGNHWNRLRSDASNLKDKGITAVWIPPAWKGASQNDVGYGAYDLYDLGEFNQKGTVRTKYGTRNQLQAAVTALKSNGIQVYGDVVMNHKGGADATEWVRAVEVNPSNRNQEVSGDYTIEAWTKFDFPGRGNTHSNFKWRWYHFDGVDWDQSRQLQNRIYKFRGKGWDWEVDTENGNYDYLMYADIDMDHPEVVNELRNWGVWYTNTLGLDGFRIDAVKHIKYSFTRDWLTHVRNTTGKNMFAVAEFWKNDIGAIENYLSKTNWNHSVFDVPLHYNLYNASRSGGNYDMRQIFNGTVVQRHPTHAVTFVDNHDSQPEEALESFVEEWFKPLAYALTLTRDQGYPSVFYGDYYGIPTHGVPAMKSKIDPILEARQKYAYGTQRDYLDHPDVIGWTREGDGVHADSGLATLMSDGPGGAKWMEVGKNNAGEVWYDITGNQTNTVTINKDGWGQFHVSGGSVSIYVQQ

SEQ ID NO: 24546 - protein, 483 aa, Bacillus subtilis
HHNGTNGTMMQYFEWYLPNDGNHWNRLRSDASNLKDKGITAVWIPPAWKGASQNDVGYGAYDLYDLGEFNQKGTVRTKYGTRNQLQAAVTALKSNGIQVYGDVVMNHKGGADATEWVRAVEVNPSNRNQEVSGDYTIEAWTKFDFPGRGNTHSNFKWRWYHFDGVDWDQSRQLQNRIYKFRGKGWDWEVDTENGNYDYLMYADIDMDHPEVVNELRNWGVWYTNTLGLDGFRIDAVKHIKYSFTRDWLTHVRNTTGKNMFAVAEFWKNDIGAIENYLSKTNWNHSVFDVPLHYNLYNASRSGGNYDMRQIFNGTVVQRHPTHAVTFVDNHDSQPEEALESFVEEWFKPLAYALTLTRDQGYPSVFYGDYYGIPTHGVPAMKSKIDPILEARQKYAYGTQRDYLDHPDVIGWTREGDGVHANSGLATLMSDGPGGSKWMDVGKNNAGEVWYDITGNQTNTVTINKDGWGQFHVNGGSASIYIQQ

SEQ ID NO: 24547 - protein, 483 aa, Bacillus licheniformis
HHNGTNGTMMQYFEWYLPNDGNHWNRLRSDASNLKDKGITAVWIPPAWKGASQNDVGYGAYDLYDLGEFNQKGTVRTKYGTRNQLQAAVTALKSNGIQVYGDVVMNHKGGADATEWVRAVEVNPSNRNQEVSGDYTIEAWTKFDFPGRGNTHSNFKWRWYHFDGVDWDQSRQLQNRIYKFRGKGWDWEVDTENGNYDYLMYADIDMDHPEVVNELRNWGVWYTNTLGLDGFRIDAVKHIKYSFTRDWLTHVRNTTGKNMFAVAEFWKNDIGAIENYLSKTNWNHSVFDVPLHYNLYNASVSGGNYDMRQIFNGTVVQRHPTHAVTFVDNHDSQPEEALESFVEEWFKPLAYALTLTRDQGYPSVFYGDYYGIPTHGVPAMKSKIDPILEARQKYAYGTQRDYLDHPDVIGWTREGDGVHADSGLATLMSDGPGGSKWMEVGKNNAGEVWYDITGNQTNTVTINKDGWGQFHVSGGSVSIYVQQ

SEQ ID NO: 24548 - protein, 483 aa, Bacillus licheniformis
HHNGTNGTMMQYFEWYLPNDGNHWNRLRSDASNLKDKGITAVWIPPAWKGASQNDVGYGAYDLYDLGEFNQKGTVRTKYGTRNQLQAAVTALKSNGIQVYGDVVMNHKGGADATEWVRAVEVNPSNRNQEVSGDYTIEAWTKFDFPGRGNTHSNFKWRWYHFDGVDWDQSRQLQNRIYKFRGKGWDWEVDTENGNYDYLMYADIDMDHPEVVNELRNWGVWYTNTLGLDGFRIDAVKHIKYSFTRDWLTHVRNTTGKNMFAVAEFWKNDIGAIENYLSKTNWNHSVFDVPLHYNLYNASRSGGNYDMRQIFNGTVVQRHPTHAVTFVDNHDSQPEEALESFVEEWFKPLAYALTLTRDQGYPSVFYGDYYGIPTHGVPAMKSKIDPILEARQKYAYGTQRDYLDHPDVIGWTREGDGVHADSGLATLMSDGPGGSKWMEVGKNNAGEVWYDITGNQTNTVTINKDGWGQFHVSGGSVSICVQQ

SEQ ID NO: 24549 - protein, 483 aa, Bacillus licheniformis
HHNGTNGTMMQYFEWYLPNDGNHWNRLRSDASNLKDKGITAVWIPPAWKGASQNDVGYGAYDLYDLGEFNQKGTVRTKYGTRNQLQAAVTALKSNGIQVYGDVVMNHKGGADATEWVRAVEVNPSNRNQEVSGDYTIEAWTKFDFPGRGNTHSNFKWRWYHFDGVDWDQSRQLQNRIYKFRGKGWDWEVDTENGNYDYLMYADIDMDHPEVVNELRNWGVWYTNTLGLDGFRIDAVKHIKYSFTRDWLTHVRNTTGKNMFAVAEFWKNDIGAIENYLSKTNWNHSVFDVPLHYNLYNASRSGGNYDMRQIFNGTVVQRHPTHAVTFVDNHDSQPEEALESFVEEWFKPLAYALTLTRDQGYPSVFYGDYYGIPTHGVPAMKSKIDPILEARQKYAYGTQRDYLDHPDVIGWTREGFGVHADSGLATLMSDGPGGSKWMEVGKNNAGEVWYDITGNQTNTVTINKDGWGQFHVSGGSVSIYVQQ

SEQ ID NO: 24550 - protein, 483 aa, Bacillus licheniformis
HHNGTNGTMMQYFEWYLPNDGNHWNRLRSDASNLKDKGITAVWIPPAWKGASQNDVGYGAYDLYDLGEFNQKGTVRTKYGTRNQLQAAVTALKSNGIQVYGDVVMNHKGGADATEWVRAVEVNPSNRNQEVSGDYTIEAWTKFDFPGRGNTHSAFKWRWYHFDGVDWDQSRQLQNRIYKFRGKGWDWEVDTENGNYDYLMYADIDMDHPEVVNELRNWGVWYTNTLGLDGFRIDAVKHIKYSFTRDWLTHVRNTTGKNMFAVAEFWKNDIGAIENYLSKTNWNHSVFDVPLHYNLYNASRSGGNYDMRQIFNGTVVQRHPTHAVTFVDNHDSQPEEALESFVEEWFKPLAYALTLTRDQGYPSVFYGDYYGIPTHGVPAMKSKIDPILEARQKYAYGTQRDYLDHPDVIGWTREGDGVHADSGLATLMSDGPGGSKWMEVGKNNAGEVWYDITGNQTNTVTINKDGWGQFHVSGGSVSIYVQQ

SEQ ID NO: 24551 - protein, 483 aa, Bacillus licheniformis
HHNGTNGTMMQYFEWYLPNDGNHWNRLRSDASNLKDKGITAVWIPPAWKGASQNDVGYGAYDLYDLGEFNQKGTVRTKYGTRNQLQAAVTALKSNGIQVYGDVVMNHKGGADATEWVRAVEVNPSNRNQEVSGDYTIEAWTKFDFPGRGNTHSNFKWRWYHFDGVDWDQSRQLQNRIYKFRGKGWDWEVDTENGNYDYLMYADIDMDHPEVVNELRNWGVWYTNTLGLDGFRIDAVKHIKYSFTRDWLTHVRNTTGKNMFAVAEFWKNDIGAIENYLSKTNWNHSVFDVPLHYNLYNASRSGGNYDMRQIFNGTVVQRHPTHAVTFVDNHDSQPEEALESFVEEWFKPLAYALTLTRDQGYPSVFYGDYYGIPTHGVPAMKSKIDPILEARQKYAYGTQRDYLDHPDVIGWTREGDGVHADSGLATLMSDGPGGSKWMEVGKNNAGVVWYDITGNQTNTVTINKDGWGQFHVSGGSVSIYVQQ

SEQ ID NO: 24552 - protein, 483 aa, Bacillus licheniformis
HHNGTNGTMMQYFEWYLPNDGNHWNRLRSDASNLKVKGITAVWIPPAWKGASQNDVGYGAYDLYDLGEFNQKGTVRTKYGTRNQLQAAVTALKSNGIQVYGDVVMNHKGGADATEWVRAVEVNPSNRNQEVSGDYTIEAWTKFDFPGRGNTHSNFKWRWYHFDGVDWDQSRQLQNRIYKFRGKGWDWEVDTENGNYDYLMYADIDMDHPEVVNELRNWGVWYTNTLGLDGFRIDAVKHIKYSFTRDWLTHVRNTTGKNMFAVAEFWKNDIGAIENYLSKTNWNHSVFDVPLHYNLYNASRSGGNYDMRQIFNGTVVQRHPTHAVTFVDNHDSQPEEALESFVEEWFKPLAYALTLTRDQGYPSVFYGDYYGIPTHGVPAMKSKIDPILEARQKYAYGTQRDYLDHPDVIGWTREGDGVHADSGLATLMSDGPGGSKWMEVGKNNAGEVWYDITGNQTNTVTINKDGWGQFHVSGGSVSIYVQQ

SEQ ID NO: 24553 - protein, 483 aa, Bacillus licheniformis
HHNGTNGTMMQYFEWYLPNDGNHWNRLRSDASNLKDKGITAVWIPPAWKGASQNDVGYGAYDLYDLGEFNQKGTVRTKYGTRNQLQAAVTALKSNGIQVYGDVVMNHKGGADATEWVRAVEVNPSNRNQEVSGDYTIEAWTKFDFPGRGNTHSNFKWRWYHFDGVDWDQSRQLQNRIYKFRGKGWDWEVDTENGNYDYLMYADIDMDHPEVVNELRNWGVWYTNTLGLDGFRIDAVKHIKYSFTRDWLTHVRNTTGKNMFAVAEFWKNDIGAIENYLSKTNWNHSVFDVPLHYNLYNASRSGGNYDMRQIFNGTVVQRHPTHAVTFVDNHDSQPEEALESFVEEWFKPLAYALTLTRDQGYPSVFYGDYYGIPTHGVPAMKSKIDPILEARQKYAYGTQRDYLDHPDVIGWTREGDGVHADSGLATSMSDGPGGSKWMEVGKNNAGEVWYDITGNQTNTVTINKDGWGQFHVSGGSVSIYVQQ

SEQ ID NO: 24554 - protein, 483 aa, Bacillus licheniformis
HHNGTNGTMMQYFEWYLPNDGNHWNRLRSDASNLKDKGITAVWIPPAWKGASQNDVGYGAYDLYDLGEFNQKGTVRTKYGTRNQLQAAVTALKSNGIQVYGDVVMNHKGGADATEWVRAVEVNPSNRNQEVSGDYTIEAWTKFDFPGRGNTHSNFKWRWYHFDGVDWDQSRQLQNRIYKFRGKEWDWEVDTENGNYDYLMYADYDMDHPEVVNELRNWGVWYTNTLGLDGFRIDAVKHIKYSFTRDWLTHVRNTTGKNMFAVAEFWKNDIGAIENYLSKTNWNHSVFDVPLHYNLYNASRSGGNYDMRQIFNGTVVQRHPTHAVTFVDNHDSQPEEALESFVEEWFKPLAYALTLTRDQGYPSVFYGDYYGIPTHGVPAMKSKIDPILEARQKYAYGTQRDYMDHPDVIGWTREGDGVHADSGLATLMSDGPGGSKWMEVGKNNAGEVWYDITGNQTNTVTINKDGWGQFHVSGGSVSIYVQQ

SEQ ID NO: 24555 - protein, 483 aa, Bacillus licheniformis
HHNGTNGTMMQYFEWYLPNDGNHWNRLRSDASNLKDKGITAVWIPPAWKGASQNDVGYGAYDLYDLGEFNQKGTVRTKYGTRNQLQAAVTALKSNGIQVYGDVVMNHKGGADATEWVRAVEVNPSNRNQEVSGDYTIEAWTKFDFPGRGNTHSNFKWRWYHFDGVDWDQSRQLQNRIYKFRGKGWDWEVDTENGNYDYLMYADIDMDHPEVVNELRNWGVWYTNTLGLDGFRIDAVKHIKYSFTRDWLTHVRNTTGKNMFAVAEFWKNDIGAIENYLSKTNWNHSVFDVPLHYNLYNASRSGGNYDMRQIFNGTVVQRHPTHAVTFVDNHDSQPEEALESFVEEWFKPLAYALTLTRDQGYPSVFYGDYYGIPTHGVPAMKSKIDPILEARQKYAYGTQRDYLDHPDVIGWTREGDGVHADSGLATAMSDGPGGSKWMEVGKNNAGEVWYDITGNQTNTVTINKDGWGQFHVSGGSVSIYVQQ

SEQ ID NO: 24556 - protein, 483 aa, Bacillus licheniformis
HHNGTNGTMMQYFEWYLPNDGNHWHRLRSDASNLKDKGITAVWIPPAWKGASQNDVGYGAYDLYDLGEFNQKGTVRTKYGTRNQLQAAVTALKSNGIQVYGDVVMNHKGGADATEWVRAVEVNPSNRNQEVSGDYTIEAWTKFDFPGRGNTHSNFKWRWYHFDGVDWDQSRQLQNRIYKFRGKEWDWEVDTENGNYDYLMYADIDMDHPEVVNELRNWGVWYTNTLGLDGFRIDAVKHIKYSFTRDWLTHVRNTTGKNMFAVAEFWKNDIGAIENYLSKTNWNHSVFDVPLHYNLYNASRSGGNYDMRQIFNGTVVQRHPTHAVTFVDNHDSQPEEALESFVEEWFKPLAYALTLTRDQGYPSVFYGDYYGIPTHGVPAMKSKIDPILEARQKYAYGTQRDYLDHPDVIGWTREGDGVHADSGLATLMSDGPGGSKWMEVGKNNAGEVWYDITGNQTNTVTINKDGWGQFHVSGGSVSIWVQQ

SEQ ID NO: 24557 - protein, 483 aa, Bacillus licheniformis
HHNGTNGTMMQYFEWYLPNDGNHWNRLRSDASNLKDKGITAVWIPPAWKGASQNDVGYGAYDLYDLGEFNQKGTVRTKYGTRNQLQAAVTALKSNGIQVYGDVVMNHKGGADATEWVRAVEVNPSNRNQEVSGDYTIEAWTKFDFPGRGNTHSNFKWRWYHFDGVDWDQSRQLQNRIYKFRGKGWDWEVDTENGNYDYLMYADIDMDHPEVVNELRNWGVWYTNTLGLDGFRIDAVKHIKYSFTRDWLTHVRNTTGKNMFAVAEFWKNDIGAIENYLSKTNWNHSVFDVPLHYNLYNASRSGGNYDMRQIFNGTVVQRHPTHAVTFVDNHDSQPEEALESFVEEWFKPLAYALTLTRDQGYPSVFYGDYYGIPTHGVPAMKSKIDPILEARQKYAYGTQRDYLDHPDVIGWTREGDGVHADSGLATLMSDGPGGSKWMEVGKNNAGEVWYDITGNQTNTVTINKDGWTQFHVSGGSVSIYVQQ

SEQ ID NO: 24558 - protein, 483 aa, Bacillus licheniformis
HHNGTNGTMMQYFEWYLPNDGNHWNRLRSDASNLKDKGITAVWIPPAWKGASQNDVGYGAYDLYDLGEFNQKGTVRTKYGTRNQLQAAVTALKSNGIQVYGDVVMNHKGGADATEWVRAVEVNPSNRNQEVSGDYTIEAWTKFDFPGRGNTHSNFKWRWYHFDGVDWDQSRQLQNRIYKFRGKGWDWEVDTENGNYDYLMYADIDMDHPEVVNELRNWGVWYTNTLGLDGFRIDAVKHIKYSFTRDWLTHVRNTTGKNMFAVAEFWKNDIGAIENYLSKTNWNHSVFDVPLHYNLYNASRSGGNYDMRQIFNGTVVQNHPTHAVTFVDNHDSQPEEALESFVEEWFKPLAYALTLTRDQGYPSVFYGDYYGIPTHGVPAMKSKIDPILEARQKYAYGTQRDYLDHPDVIGWTREGDGVHADSGLATLMSDGPGGSKWMEVGKNNAGEVWYDITGNQTNTVTINKDGWGQFHVSGGSVSIYVQQ

SEQ ID NO: 24559 - protein, 483 aa, Bacillus licheniformis
HHNGTNGTMMQYFEWYLPNDGNHWNRLRSDASNLKDKGITAVWIPPAWKGASQNDVGYGAYDLYDLGEFNQKGTVRTKYGTRNQLQAAVTALKSNGIQVYGDVVMNHKGGADATEWVRAVEVNPSNRNQEVSGDYTIEAWTKFDFPGRGNTHSNFKWRWYHFDGVDWDQSRQLQNRIYKFRGKGWDWEVDTENGNYDYLMYADIDMDHPEVVNELRSWGVWYTNTLGLDGFRIDAVKHIKYSFTRDWLTHVRNTTGKNMFAVAEFWKNDIGAIENYLSKTNWNHSVFDVPLHYNLYNASRSGGNYDMRQIFNGTVVQRHPTHAVTFVDNHDSQPEEALESFVEEWFKPLAYALTLTRDQGYPSVFYGDYYGIPTHGVPAMKSKIDPILEARQKYAYGTQRDYLDHPDVIGWTREGDGVHADSGLATLMSDGPGGSKWMEVGKNNAGEVWYDITGNQTNTVTINKDGWGQFHVSGGSVSIYVQQ

SEQ ID NO: 24560 - protein, 483 aa, Bacillus licheniformis
HHNGTNGTMMQYFEWYLPNDGNHWNRLRSDASNLKEKGITAVWIPPAWKGASQNDVGYGAYDLYDLGEFNQKGTVRTKYGTRNQLQAAVTALKSNGIQVYGDVVMNHKGGADATEWVRAVEVNPSNRNQEVSGDYTIEAWTKFDFPGRGNTHSNFKWRWYHFDGVDWDQSRQLQNRIYKFRGKGWDWEVDTENGNYDYLMYADIDMDHPEVVNELRNWGVWYTNTLGLDGFRIDAVKHIKYSFTRDWLTHVRNTTGKNMFAVAEFWKNDIGAIENYLSKTNWNHSVFDVPLHYNLYNASRSGGNYDMRQIFNGTVVQRHPTHAVTFVDNHDSQPEEALESFVEEWFKPLAYALTLTRDQGYPSVFYGDYYGIPTHGVPAMKSKIDPILEARQKYAYGTQRDYLDHPDVIGWTREGDGVHADSGLATLMSDGPGGSKWMEVGKNNAGEVWYDITGNQTNTVTINKDGWGQFHVSGGSVSIYVQQ

SEQ ID NO: 24561 - protein, 483 aa, Bacillus licheniformis
HHNGTNGTMMQYFEWYLPNDGNHWNRLRSDASNLKDKGITAVWIPPAWKGASQNDVGYGAYDLYDLGEFNQKGTVRTKYGTRNQLQAAVTALKSNGIQVYGDVVMNHKGGADATEWVAAVEVNPSNRNQEVSGDYTIEAWTKFDFPGRGNTHSNFKWRWYHFDGVDWDQSRQLQNRIYKFRGKGWDWEVDTENGNYDYLMYADIDMDHPEVVNELRNWGVWYTNTLGLDGFRIDAVKHIKYSFTRDWLTHVRNTTGKNMFAVAEFWKNDIGAIENYLSKTNWNHSVFDVPLHYNLYNASRSGGNYDMRQIFNGTVVQRHPTHAVTFVDNHDSQPEEALESFVEEWFKPLAYALTLTRDQGYPSVFYGDYYGIPTHGVPAMKSKIDPILEARQKYAYGTQRDYLDHPDVIGWTREGDGVHADSGLATLMSDGPGGSKWMEVGKNNAGEVWYDITGNQTNTVTINKDGWGQFHVSGGSVSIYVQQ

SEQ ID NO: 24562 - protein, 483 aa, Bacillus licheniformis
HHNGTNGTMMQYFEWYLPNDGNHWNRLRSDASNLQDKGITAVWIPPAWKGASQNDVGYGAYDLYDLGEFNQKGTVRTKYGTRNQLQAAVTALKSNGIQVYGDVVMNHKGGADATEWVRAVEVNPSNRNQEVSGDYTIEAWTKFDFPGRGNTHSNFKWRWYHFDGVDWDQSRQLQNRIYKFRGKGWDWEVDTENGNYDYLMYADIDMDHPEVVNELRNWGVWYTNTLGLDGFRIDAVKHIKYSFTRDWLTHVRNTTGKNMFAVAEFWKNDIGAIENYLSKTNWNHSVFDVPLHYNLYNASRSGGNYDMRQIFNGTVVQRHPTHAVTFVDNHDSQPEEALESFVEEWFKPLAYALTLTRDQGYPSVFYGDYYGIPTHGVPAMKSKIDPILEARQKYAYGTQRDYLDHPDVIGWTREGDGVHADSGLATLMSDGPGGSKWMEVGKNNAGEVWYDITGNQTNTVTINKDGWGQFHVSGGSVSIYVQQ

SEQ ID NO: 24563 - protein, 483 aa, Bacillus licheniformis
HHNGTNGTMMQYFEWYLPNDGNHWNRLRSDASNLKDKGITAVWIPPAWKGASQNDVGYGAYDLYDLGEFNQKGTVRTKYGTRNQLQAAVTALKSNGIQVYGDVVMNHKGGADATEWVRAVEVNPSNRNQEVSGDYTIEAWTKFDFPGRGNTHSNFKWRWYHFDGVDWDQSRQLQNRIYKFRGKGWDWEVDTENGNYDYLMYADIDMDHPEVVNELRNWGVWYTNTLGLDGFRIDAVKHIKYSFTRDWLTHVRNTTGKNMFAVAEFWKNDIGAIENYLSKTNWNHSVFDVPLHYNLYNASRSGGNYDMREIFNGTVVQRHPTHAVTFVDNHDSQPEEALESFVEEWFKPLAYALTLTRDQGYPSVFYGDYYGIPTHGVPAMKSKIDPILEARQKYAYGTQRDYLDHPDVIGWTREGDGVHADSGLATLMSDGPGGSKWMEVGKNNAGEVWYDITGNQTNTVTINKDGWGQFHVSGGSVSIYVQQ

SEQ ID NO: 24564 - protein, 483 aa, Bacillus licheniformis
HHNGTNGTMMQYFEWYLPNDGNHWNRLRSDASNLKDKGITAVWIPPAWKGASQNDVGYGAYDLYDLGEFNQKGTVRTKYGTRNQLQAAVTALKSNGIQVYGDVVMNHKGGADATEWVRAVEVNPSNRNQEVSGDYTIEAWTKFDFPGRGNTHSNFKWRWYHFDGVDWDQSRQLQNRIYKFRGKGWDWEVDTENGNYDYLMYADIDMDHPEVVNELRNWGVWYTNTLGLDGFRIDAVKHIKYSFTRDWLTHVRNTTGKNMFAVAEFWKNDIGAIENYLSKTNWNHSVFDVPLHYNLYNASRSGGNYDMQQIFNGTVVQRHPTHAVTFVDNHDSQPEEALESFVEEWFKPLAYALTLTRDQGYPSVFYGDYYGIPTHGVPAMKSKIDPILEARQKYAYGTQRDYLDHPDVIGWTREGDGVHADSGLATLMSDGPGGSKWMEVGKNNAGEVWYDITGNQTNTVTINKDGWGQFHVSGGSVSIYVQQ

SEQ ID NO: 24565 - protein, 483 aa, Bacillus licheniformis
HHNGTNGTMMQYFEWYLPNDGNHWNRLRSDASNLKDKGITAVWIPPAWKGASQNDVGYGAYDLYDLGEFNQKGTVRTKYGTRNQLQAAVTALKSNGIQVYGDVVMNHKGGADATEWVRAVEVNPSNRNQEVSGDYTIEAWTKFDFPGRGNTHSNFKWRWYHFDGVDWDQSRQLQNRIYKFRGKGWDWEVDTENGNYDYLMYADIDMDHPEVVNELRNWGVWYTNTLGLDGFRIDAVKHIKYSFTRDWLTHVRNTTGKNMFAVAEFWKNDIGAIENYLSKTNWNHSVFDVPLHYNLYNASRSGGNYDMRQIFNGTVVQRHPTHAVTFVDNHDSQPEEALESFVEEWFKPLAYALVLTRDQGYPSVFYGDYYGIPTHGVPAMKSKIDPILEARQKYAYGTQRDYLDHPDVIGWTREGDGVHADSGLATLMSDGPGGSKWMEVGKNNAGEVWYDITGNQTNTVTINKDGWGQFHVSGGSVSIYVQQ

SEQ ID NO: 24566 - protein, 483 aa, Bacillus licheniformis
HHNGTNGTMMQYFEWYLPNDGNHWNRLRSDASNLKDKGITAVWIPPAWKGASQNDVGYGAYDLYDLGEFNQKGTVRTKYGTRNQLQAAVTALKSNGIQVYGDVVMNHKGGADATEWVRAVEVNPSNRNQEVSGDYTIEAWTKFDFPGRGNTHSNFKWRWYHFDGVDWDQSRQLQNRIYKFRGKGWDWEVDTENGNYDYLMYADIDMDHPEVVNELRNWGVWYTNTLGLDGFRIDAVKHIKYSFTRDWLTHVRNTTGKNMFAVAEFWKNDIGAIENYLSKTNWNHSVFDVPLHYNLYNASRSGGNYDMRQIFNGTVVQRHPTHAVTFVDNHDSQPEEALESFVEEWFKPLAYALTLTRDQGYPSVFYGDYYGIPTHGVPAMKSKIDPILEARQKYAYGTQRDYLDHPDVIGWTREGDGVHADSGLATLMSDGPGGSKWMEVGKNNAGEVWYDITGNQINTVTINKDGWGQFHVSGGSVSIYVQQ

SEQ ID NO: 24567 - protein, 483 aa, Bacillus licheniformis
HHNGTNGTMMQYFEWYLPNDGNHWNRLRSDASNLKDKGITAVWIPPAWKGASQNDVGYGAYDLYDLGEFNQKGTVRTKYGTRNQLQAAVTALKSNGIQVYGDVVMNHKGGADATEWVRAVEVNPSNRNQEVSGDYTIEAWTKFDFPGRGNTHSNFKWRWYHFDGVDWDQSRQLQNRIYKFRGKGWDWEVDTENGNYDYLMYADIDMDHPEVVNELRNWGVWYTNTLGLDGFRIDAVKHIKYSFTRDWLTHVRNTTGKNMFAVAEFWKNDIGAIENYLSKTNWNHSVFDVPLHYNLYNASHSGGNYDMRQIFNGTVVQRHPTHAVTFVDNHDSQPEEALESFVEEWFKPLAYALTLTRDQGYPSVFYGDYYGIPTHGVPAMKSKIDPILEARQKYAYGTQRDYLDHPDVIGWTREGDGVHADSGLATLMSDGPGGSKWMEVGKNNAGEVWYDITGNQTNTVTINKDGWGQFHVSGGSVSIYVQQ

SEQ ID NO: 24568 - protein, 483 aa, Bacillus licheniformis
HHNGTNGTMMQYFEWYLPNDGNHWNRLRSDASNLKDKGITAVWIPPAWKGASQNDVGYGAYDLYDLGEFNQKGTVRTKYGTRNQLQAAVTALKSNGIQVYGDVVMNHKGGADATEWVRAVEVNPSNRNQEVSGDYTIEAWTKFDFPGRGNTHSNFKWRWYHFDGVDWDQSRQLQNRIYKFRGKGWDWEVDTENGNYDYLMYADIDMDHPEVVNELRNWGVWYTNTLGLDGFRIDAVKHIKYSFTRDWLTHVRNTTGKNMFAVAEFWKNDIGAIENYLSKTNWNHSVFDVPLHYNLYNASRSGGNYDMRQIFNGTVVQRHPTHAVTFVDNHDSQPEEALESFVEEWFKPLAYALTLTRDQGYPSVFYGDYYGIPTHGVPAMKSKIDPILEARQKYAYGTQRDYLDHPDVIGWTREGDGVHADSGLATWMSDGPGGSKWMEVGKNNAGEVWYDITGNQTNTVTINKDGWGQFHVSGGSVSIYVQQ

SEQ ID NO: 24569 - protein, 483 aa, Bacillus licheniformis
HHNGTNGTMMQYFEWYLPNDGNHWNRLRSDASNLKDKGITAVWIPPAWKGASQNDVGYGAYDLYDLGEFNQKGTVRTKYGTRNQLQAAVTALKSNGIQVYGDVVMNHKGGADATEWVRAVEVNPSNRNQEVSGDYTIEAWTKFDFPGRGNTHSNFKWRWYHFDGVDWDQSRQLQNRIYKFRGKGWDWEVDTENGNYDYLMYADIDMDHPEVVNELRNWGVWYTNTLGLDGFRIDAVKHIKYSFTRDWLTHVRNTTGKNMFAVAEFWKNDIGAIENYLRKTNWNHSVFDVPLHYNLYNASRSGGNYDMRQIFNGTVVQRHPTHAVTFVDNHDSQPEEALESFVEEWFKPLAYALTLTRDQGYPSVFYGDYYGIPTHGVPAMKSKIDPILEARQKYAYGTQRDYLDHPDVIGWTREGDGVHADSGLATLMSDGPGGSKWMEVGKNNAGEVWYDITGNQTNTVTINKDGWGQFHVSGGSVSIYVQQ

SEQ ID NO: 24570 - protein, 483 aa, Bacillus licheniformis
HHNGTNGTMMQYFEWYLPNDGNHWNRLRSDASNLKDKGITAVWIPPAWKGASQNDVGYGAYDLYDLGEFNQKGTVRTKYGTRNQLQAAVTALKSNGIQVYGDVVMNHKGGADATEWVRAVEVNPSNRNQEVSGDYTIEAWTKFDFPGRGNTHSNFKWRWYHFDGVDWDQSRQLQNRIYKFRGKGWDWEVDTENGNYDYLMYADIDMDHPEVVNELRNWGVWYTNTLGLDGFRIDAVKHIKYSFTRDWLTHVRNTTGKNMFAVAEFWKNDIGAIENYLSKTNWNHSVFDVPLHYNLYNASRSGGNYDMRQIFNGTVVQRHPTHAVTFVDNHDSQPEEALESFVEEWFKPLAYALTLTRDQGYPSVFYGDYYGIPTHGVPAMKSKIDPILEARQKYAYGTQRDYLDHPDVIGWTREGDGVHADSGLATLMSDGPGGSKWMEVGKNNAGEVWYDITGNQVNTVTINKDGWGQFHVSGGSVSIYVQQ

SEQ ID NO: 24571 - protein, 483 aa, Bacillus licheniformis
HHNGTNGTMMQYFEWYLPNDGNHWNRLRSDASNLKDKGITAVWIPPAWKGASQNDVGYGAYDLYDLGEFNQKGTVRTKYGTRNQLQAAVTALKSNGIQVYGDVVMNHKGGADATEWVRAVEVNPSNRNQEVSGDYTIEAWTKFDFPGRGNTHSNFKWRWYHFDGVDWDQSRQLQNRIYKFRGKGWDWEVDTENGNYDYLMYADIDMDHPEVVNELRNWGVWYTNTLGLDGFRIDAVKHIKYSFTRDWLTHVRNTTGKNMFAVAEFWKNDIGAIENYLSKTNWNHSVFDVPLHYNLYNASRSGGNYDMRQIFNGTVVQRHPTHAVTFVDNHDSQPEEALESFVEEWFKPLAYALTLTRDQGYPSVFYGDYYGIPTHGVPAMKSKIDPILEARQKYAYGTQRDYLDHPDVIGWTREGDGVHADSGLATLMSDGPGGSKWMEVGKNPAGEVWYDITGNQTNTVTINKDGWGQFHVSGGSVSIYVQQ

SEQ ID NO: 24572 - protein, 483 aa, Bacillus licheniformis
HHNGTNGTMMQYFEWYLPNDGNHWNRLRSDASNLKDKGITAVWIPPAWKGASQNDVGYGAYDLYDLGEFNQKGTVRTKYGTRNQLQAAVTALKSNGIQVYGDVVMNHKGGADATEWVRAVEVNPSNRNQEVSGDYTIEAWTKFDFPGRGNTHSNFKWRWYHFDGVDWDQSRQLQNRIYKFRGKGWDWEVDTENGNYDYLMYADIDMDHPEVVNELRNWGVWYTNTLGLDGFRIDAVKHIKYSFTRDWLTHVRNTTGKNMFAVAEFWKNDIGAIENYLSKTNWNHSVFDVPLHYNLYNASRSGGNYDMRQIFNGTVVQRHPTHAVTFVDNHDSQPEEALESFVEEWFKPLAYALTLTRDQGYPSVFYGDYYGIPTHGVPAMKSKIDPILEARQKYAYGTQRDYHDHPDVIGWTREGDGVHADSGLATLMSDGPGGSKWMEVGKNNAGEVWYDITGNQTNTVTINKDGWGQFHVSGGSVSIYVQQ

SEQ ID NO: 24573 - protein, 483 aa, Bacillus licheniformis
HHNGTNGTMMQYFEWYLPNDGNHWNRLRSDASNLKDKGITAVWIPPAWKGASQNDVGYGAYDLYDLGEFNQKGTVRTKYGTRNQLQAAVTALKSNGIQVYGDVVMNHKGGADATEWVRAVEVNPSNRNQEVSGDYTIEAWTKFDFPGRGNTHSNFKWRWYHFDGVDWDQSRQLQNRIYKFRGKEWDWEVDTENGNYDYLMYADIDMDHPEVVNELRNWGVWYTNTLGLDGFRIDAVKHIKYSFTRDWLTHVRNTTGKNMFAVAEFWKNDIGAIENYLSKTNWNHSVFDVPLHYNLYNASRSGGNYDMRKIFKGTVVQRHPTHAVTFVDNHDSQPEEALESFVEEWFKPLAYALTLTRDQGYPSVFYGDYYGIPTHGVPAMKSKIDPILEARQKYAYGTQRDYLDHPDVIGWTREGDGVHADSGLATLMSDGPGGSKWMEVGKNNAGEVWRDITGNQTNTVTINKDGWGQFHVSGGSVSIYVQQ

SEQ ID NO: 24574 - protein, 483 aa, Bacillus licheniformis
HHNGTNGTMMQYFEWYLPNDGNHWNRLRSDASNLKDKGITAVWIPPAWKGASQNDVGYGAYDLYDLGEFNQKGTVRTKYGTRNQLQAAVTALKSNGIQVYGDVVMNHKGGADATEWVRAVEVNPSNRNQEVSGDYTIEAWTKFDFPGRGNTHSNFKWRWYHFDGVDWDQSRQLQNRIYKFRGKGWDWEVDTENGNYDYLMYADIDMDHPEVVNELRNWGVWYTNTLGLDGFRIDAVKHIKYSFTRDWLTHVRNTTGKNMFAVAEFWKNDIGAIENYLSKTNWNHSVFDVPLHYNLYNASRSGGNYDMRQIFNGTVVQYHPTHAVTFVDNHDSQPEEALESFVEEWFKPLAYALTLTRDQGYPSVFYGDYYGIPTHGVPAMKSKIDPILEARQKYAYGTQRDYLDHPDVIGWTREGDGVHADSGLATLMSDGPGGSKWMEVGKNNAGEVWYDITGNQTNTVTINKDGWGQFHVSGGSVSIYVQQ

SEQ ID NO: 24575 - protein, 483 aa, Bacillus licheniformis
HHNGTNGTMMQYFEWYLPNDGNHWNRLRSDASNLKDKGITAVWIPPAWKGASQNDVGYGAYDLYDLGEFNQKGTVRTKYGTRNQLQAAVTALKSNGIQVYGDVVMNHKGGADATEWVRAVEVNPSNRNQEVSGDYTIEAWTKFDFPGRGNTHSNFKWRWYHFDGVDWDQSRQLQNRIYKFRGKGWDWEVDTENGNYDYLMYADIDMDHPEVVNELRNWGVWYTNTLGLDGFRIDAVKHIKYSFTRDWLTHVRNTTGKNMFAVAEFWKNDIGAIENYLSKTNWNHSVFDVPLHYNLYNASRSGGNYDMRQIFNGTVVQRHPTHAVTFVDNHDSQPEEALESFVMEWFKPLAYALTLTRDQGYPSVFYGDYYGIPTHGVPAMKSKIDPILEARQKYAYGTQRDYLDHPDVIGWTREGDGVHADSGLATLMSDGPGGSKWMEVGKNNAGEVWYDITGNQTNTVTINKDGWGQFHVSGGSVSIYVQQ

SEQ ID NO: 24576 - protein, 483 aa, Bacillus licheniformis
HHNGTNGTMMQYFEWYLPNDGNHWNRLRSDASNLKDKGITAVWIPPAWKGASQNDVGYGAYDLYDLGEFNQKGTVRTKYGTRNQLQAAVTALKSNGIQVYGDVVMNHKGGADATEWVRAVEVNPSNRNQEVSGDYTIEAWTKFDFPGRGNTHSNFKWRWYHFDGVDWDQSRQLQNRIYKFRGKGWDWEVDTENGNYDYLMYADIDMDHPEVVNELRNWGVWYTNTLGLDGFRIDAVKHIKYSFTRDWLTHVRNCTGKNMFAVAEFWKNDIGAIENYLSKTNWNHSVFDVPLHYNLYNASRSGGNYDMRQIFNGTVVQRHPTHAVTFVDNHDSQPEEALESFVEEWFKPLAYALTLTRDQGYPSVFYGDYYGIPTHGVPAMKSKIDPILEARQKYAYGTQRDYLDHPDVIGWTREGDGVHADSGLATLMSDGPGGSKWMEVGKNNAGEVWYDITGNQTNTVTINKDGWGQFHVSGGSVSIYVQQ

SEQ ID NO: 24577 - protein, 483 aa, Bacillus licheniformis
HHNGTNGTMMQYFEWYLPNDGNHWNRLRSDASNLKDKGITAVWIPPAWKGASQNDVGYGAYDLYDLGEFNQKGTVRTKYGTRNQLQAAVTALKSNGIQVYGDVVMNHKGGADATEWVRAVEVNPLNRNQEVSGDYTIEAWTKFDFPGRGNTHSNFKWRWYHFDGVDWDQSRQLQNRIYKFRGKGWDWEVDTENGNYDYLMYADIDMDHPEVVNELRNWGVWYTNTLGLDGFRIDAVKHIKYSFTRDWLTHVRNTTGKNMFAVAEFWKNDIGAIENYLSKTNWNHSVFDVPLHYNLYNASRSGGNYDMRQIFNGTVVQRHPTHAVTFVDNHDSQPEEALESFVEEWFKPLAYALTLTRDQGYPSVFYGDYYGIPTHGVPAMKSKIDPILEARQKYAYGTQRDYLDHPDVIGWTREGDGVHADSGLATLMSDGPGGSKWMEVGKNNAGEVWYDITGNQTNTVTINKDGWGQFHVSGGSVSIYVQQ

SEQ ID NO: 24578 - protein, 483 aa, Bacillus licheniformis
HHNGTNGTMMQYFEWYLPNDGNHWNRLRSDASNLKDKGITAVWIPPAWKGASQNDVGYGAYDLYDLGEFNQKGTVRTKYGTRNQLQAAVTALKSNGIQVYGDVVMNHKGGADATEWVRAVEVNPSNRNQEVSGDYTIEAWTKFDFPGRGNTHSNFKWRWYHFDGVDWDQSRQLQNRIYKFRGKGWDWEVDTENGNYDYLMYADIDMDHPEVVNELRNWGVWYTNTLGLDGFRIDAVKHIKYSFTRDWLTHVRNTTGKNMFAVAEFWKNDIGAIENYLSKTNWNHSVFDVPLHYNLYNASRSGGNYDMRQIFNGTVVQRHPTHAVTFVDNHDSQPEEALESFVEEWFKPLAYALTLTRDQGYPSVFYGDYYGIPTHGVPAMKSKIDPILEARQKYAYGTQRDYLDHPDVIGWTREGDGVHADSGLATDMSDGPGGSKWMEVGKNNAGEVWYDITGNQTNTVTINKDGWGQFHVSGGSVSIYVQQ

SEQ ID NO: 24579 - protein, 483 aa, Bacillus licheniformis
HHNGTNGTMMQYFEWYLPNDGNHWNRLRGDASNLKDKGITAVWIPPAWKGASQNDVGYGAYDLYDLGEFNQKGTVRTKYGTRNQLQAAVTALKSNGIQVYGDVVMNHKGGADATEWVRAVEVNPSNRNQEVSGDYTIEAWTKFDFPGRGNTHSNFKWRWYHFDGVDWDQSRQLQNRIYKFRGKGWDWEVDTENGNYDYLMYADIDMDHPEVVNELRNWGVWYTNTLGLDGFRIDAVKHIKYSFTRDWLTHVRNTTGKNMFAVAEFWKNDIGAIENYLSKTNWNHSVFDVPLHYNLYNASRSGGNYDMRQIFNGTVVQRHPTHAVTFVDNHDSQPEEALESFVEEWFKPLAYALTLTRDQGYPSVFYGDYYGIPTHGVPAMKSKIDPILEARQKYAYGTQRDYLDHPDVIGWTREGDGVHADSGLATLMSDGPGGSKWMEVGKNNAGEVWYDITGNQTNTVTINKDGWGQFHVSGGSVSIYVQQ

SEQ ID NO: 24580 - protein, 485 aa, Bacillus subtilis
HHNGTNGTMMQYFEWYLPNDGNHWNRLRSDASNLKDKGITAVWIPPAWKGASQNDVGYGAYDLYDLGEFNQKGTVRTKYGTRNQLQAAVTALKSNGIQVYGDVVMNHKGGADATEWVRAVEVNPSNRNQEVSGDYTIEAWTKFDFPGRGNTHSNFKWRWYHFDGVDWDQSRQLQNRIYKFRGDGKGWDWEVDTENGNYDYLMYADIDMDHPEVVNELRNWGVWYTNTLGLDGFRIDAVKHIKYSFTRDWLTHVRNTTGKNMFAVAEFWKNDIGAIENYLSKTNWNHSVFDVPLHYNLYNASRSGGNYDMRQIFNGTVVQRHPTHAVTFVDNHDSQPEEALESFVEEWFKPLAYALTLTRDQGYPSVFYGDYYGIPTHGVPAMKSKIDPILEARQKYAYGTQRDYLDHPDVIGWTREGDGVHADSGLATLMSDGPGGSKWMEVGKNNAGEVWYDITGNQTNTVTINKDGWGQFHVSGGSVSIYVQQ

SEQ ID NO: 24581 - protein, 483 aa, Bacillus licheniformis
HHNGTNGTMMQYFEWYLPNDGNHWNRLRSDASNLKDKGITAVWIPPAWKGASQNDVGYGAYDLYDLGEFNQKGTVRTKYGTRNQLQAAVMALKSNGIQVYGDVVMNHKGGADATEWVRAVEVNPSNRNQEVSGDYTIEAWTKFDFPGRGNTHSNFKWRWYHFDGVDWDQSRQLQNRIYKFRGKGWDWEVDTENGNYDYLMYADIDMDHPEVVNELRNWGVWYTNTLGLDGFRIDAVKHIKYSFTRDWLTHVRNTTGKNMFAVAEFWKNDIGAIENYLSKTNWNHSVFDVPLHYNLYNASRSGGNYDMRQIFNGTVVQRHPTHAVTFVDNHDSQPEEALESFVEEWFKPLAYALTLTRDQGYPSVFYGDYYGIPTHGVPAMKSKIDPILEARQKYAYGTQRDYLDHPDVIGWTREGDGVHADSGLATLMSDGPGGSKWMEVGKNNAGEVWYDITGNQTNTVTINKDGWGQFHVSGGSVSIYVQQ

SEQ ID NO: 24582 - protein, 483 aa, Bacillus licheniformis
HHNGTNGTMMQYFEWYLPNDGNHWNRLRSDASNLKDKGITAVWIPPAWKGASQNDVGYGAYDLYDLGEFNQKGTVRTKYGTRNQLQAAVTALKSNGIQVYGDVVMNHKGGADATEWVRAVEVNPSNRNQEVSGDYTIEAWTKFDFPGRGNTHSNFKWRWYHFDGVDWDQSRQLQNRIYKFRGKGWDWEVDTENGNYDYLMYADIDMDHPEVVNELRNWGVWYTNTLGLDGFRIDAVKHIKYSFTRDWLTHVRNTTGKNMFAVAEFWKNDFGAIENYLSKTNWNHSVFDVPLHYNLYNASRSGGNYDMRQIFNGTVVQRHPTHAVTFVDNHDSQPEEALESFVEEWFKPLAYALTLTRDQGYPSVFYGDYYGIPTHGVPAMKSKIDPILEARQKYAYGTQRDYLDHPDVIGWTREGDGVHADSGLATLMSDGPGGSKWMEVGKNNAGEVWYDITGNQTNTVTINKDGWGQFHVSGGSVSIYVQQ

SEQ ID NO: 24583 - protein, 483 aa, Bacillus licheniformis
HHNGTNGTMMQYFEWYLPNDGNHWNRLRSDASNLKDKGITAVWIPPAWKGASQNDVGYGAYDLYDLGEFNQKGTVRTKYGTRNQLQAAVTALKSNGIQVYGDVVMNHKGGADATEWVRAVEVNPSNRNQEVSGDYTIEAWTKFDFPGRGNTHSNFKWRWYHFDGVDWDQSRQLQNRIYKFRGKGWDWEVDTENGNYDYLMYADIDMDHPEVVNELRNWGVWYTNTLGLDGFRIDAVKHIKYSFTRDWLTHVRNTTGKNMFAVAEFWKNDIGAIENYLSKTNWNHSVFDVPLHYNLYNASRSGGNYDMRQIFNGTVVQRHPTHAVTFVDNHDSQPEEALESFVEEWFKPLAYALTLTRDQGYPSVFYGDYYGIPTHGVPAMKSKIDPILEARQKYAYGTQRDYLDHPDVIGWTREGDGVHADSGLATLMSDGPGGSKWMEVGKNFAGEVWYDITGNQTNTVTINKDGWGQFHVSGGSVSIYVQQ

SEQ ID NO: 24584 - protein, 483 aa, Bacillus licheniformis
HHNGTNGTMMQYFEWYLPNDGNHWNRLRSDASNLKDKGITAVWIPPAWKGASQNDVGYGAYDLYDLGEFNQKGTVRTKYGTRNQLQAAVTALKSNGIQVYGDVVMNHKGGADATEWVRAVEVNPSNRNQEVSGDYTIEAWTKFDFPGRGNTHSNFKWRWYHFDGVDWDQSRQLQNRIYKFRGKGWDWEVDTENGNYDYLMYADIDMDHPEVVNELRNWGVWYTNTLGLDGFRIDAVKHIKYSFTRDWLTHVRNTTGKNMFAVAEFWKNDIGAIENYLSKTNWNHSVFDVPLHYNLYNASRSGGNYDMRQIFNGTVVQRHPTHAVTFVDNHDSQPEEALESFVEEWFKPLAYALTLTRDQGYPSVFYGDYYGIPTHGVPAMKSKIDPILEARQKYAYGTQRDYLDHPDVIGWTREGDGVHADSGLATLMSDGPGGSKWMEVGKNNAGAVWYDITGNQTNTVTINKDGWGQFHVSGGSVSIYVQQ

SEQ ID NO: 24585 - protein, 483 aa, Bacillus licheniformis
HHNGTNGTMMQYFEWYLPNDGNHWNRLRSDASNLKDKGITAVWIPPAWKGASQNDVGYGAYDLYDLGEFNQKGTVRTKYGTRNQLQAAVTALKSNGIQVYGDVVMNHKGGADATEWVRAVEVNPSNRNQEVSGDYTIEAWTKFDFPGRGNTHSNFKWRWYHFDGVDWDQSRQLQNRIYKFRGKGWDWEVDTENGNYDYLMYADIDMDHPEVVNELRHWGVWYTNTLGLDGFRIDAVKHIKYSFTRDWLTHVRNTTGKNMFAVAEFWKNDIGAIENYLSKTNWNHSVFDVPLHYNLYNASRSGGNYDMRQIFNGTVVQRHPTHAVTFVDNHDSQPEEALESFVEEWFKPLAYALTLTRDQGYPSVFYGDYYGIPTHGVPAMKSKIDPILEARQKYAYGTQRDYLDHPDVIGWTREGDGVHADSGLATLMSDGPGGSKWMEVGKNNAGEVWYDITGNQTNTVTINKDGWGQFHVSGGSVSIYVQQ

SEQ ID NO: 24586 - protein, 483 aa, Bacillus licheniformis
HHNGTNGTMMQYFEWYLPNDGNHWNRLRSDASNLKDKGITAVWIPPAWKGASQNDVGYGAYDLYDLGEFNQKGTVRTKYGTRNQLQAARTALKSNGIQVYGDVVMNHKGGADATEWVRAVEVNPSNRNQEVSGDYTIEAWTKFDFPGRGNTHSNFKWRWYHFDGVDWDQSRQLQNRIYKFRGKGWDWEVDTENGNYDYLMYADIDMDHPEVVNELRNWGVWYTNTLGLDGFRIDAVKHIKYSFTRDWLTHVRNTTGKNMFAVAEFWKNDIGAIENYLSKTNWNHSVFDVPLHYNLYNASRSGGNYDMRQIFNGTVVQRHPTHAVTFVDNHDSQPEEALESFVEEWFKPLAYALTLTRDQGYPSVFYGDYYGIPTHGVPAMKSKIDPILEARQKYAYGTQRDYLDHPDVIGWTREGDGVHADSGLATLMSDGPGGSKWMEVGKNNAGEVWYDITGNQTNTVTINKDGWGQFHVSGGSVSIYVQQ

SEQ ID NO: 24587 - protein, 483 aa, Bacillus licheniformis
HHNGTNGTMMQYFEWYLPNDGNHWNRLRSDASNLKDKGITAVWIPPAWKGASQNDVGYGAYDLYDLGEFNQKGTVRTKYGTRNQLQAAVTALKSNGIQVYGDVVMNHKGGADATEWVRAVEVNPSNRNQEVSGDYTIEAWTKFDFPGRGNTHSNFKWRWYHFDGVDWDQSRQLQNRIYKFRGKGWDWEVDVENGNYDYLMYADIDMDHPEVVNELRNWGVWYTNTLGLDGFRIDAVKHIKYSFTRDWLTHVRNTTGKNMFAVAEFWKNDIGAIENYLSKTNWNHSVFDVPLHYNLYNASRSGGNYDMRQIFNGTVVQRHPTHAVTFVDNHDSQPEEALESFVEEWFKPLAYALTLTRDQGYPSVFYGDYYGIPTHGVPAMKSKIDPILEARQKYAYGTQRDYLDHPDVIGWTREGDGVHADSGLATLMSDGPGGSKWMEVGKNNAGEVWYDITGNQTNTVTINKDGWGQFHVSGGSVSIYVQQ

SEQ ID NO: 24588 - protein, 483 aa, Bacillus licheniformis
HHNGTNGTMMQYFEWYLPNDGNHWNRLRSDASNLKDKGITAVWIPPAWKGASQNDVGYGAYDLYDLGEFNQKGTVRTKYGTRNQLQAAVTALKSNGIQVYGDVVMNHKGGADATEWVRAVEVNPSNRNQEVSGDYTIEAWTKFDFPGRGNTHSNFKWRWYHFDGVDWDQSRQLQNRIYKFRGKGWDWEVDTENGNYDYLMYADIDMDHPEVVNELRNWGVWYTNTLGLDGFRIDAVKHIKYSFTRDWLTHVRNTTGKNMFAVAEFWKNDIGAIENYLVKTNWNHSVFDVPLHYNLYNASRSGGNYDMRQIFNGTVVQRHPTHAVTFVDNHDSQPEEALESFVEEWFKPLAYALTLTRDQGYPSVFYGDYYGIPTHGVPAMKSKIDPILEARQKYAYGTQRDYLDHPDVIGWTREGDGVHADSGLATLMSDGPGGSKWMEVGKNNAGEVWYDITGNQTNTVTINKDGWGQFHVSGGSVSIYVQQ

SEQ ID NO: 24589 - protein, 483 aa, Bacillus licheniformis
HHNGTNGTMMQYFEWYLPNDGNHWNRLRSDASNLKDKGITAVWIPPAWKGASQNDVGYGAYDLYDLGEFNQKGTVRTKYGTRNQLQAAVTALKSNGIQVYGDVVMNHKGGADATEWVRAVEVNPSNRNQEVSGDYTIEAWTKFDFPGRGNTHSNFKWRWYHFDGVDWDQSRQLQNRIYKFRGKGWDWEVDTENGNYDYLMYADIDMDHPEVVNELRNWGVWYTNTLGLDGFRIDAVKHIKYSFTRDWLTHVRNTTGKNMFAVAEFWKNDIGAIENYLFKTNWNHSVFDVPLHYNLYNASRSGGNYDMRQIFNGTVVQRHPTHAVTFVDNHDSQPEEALESFVEEWFKPLAYALTLTRDQGYPSVFYGDYYGIPTHGVPAMKSKIDPILEARQKYAYGTQRDYLDHPDVIGWTREGDGVHADSGLATLMSDGPGGSKWMEVGKNNAGEVWYDITGNQTNTVTINKDGWGQFHVSGGSVSIYVQQ

SEQ ID NO: 24590 - protein, 483 aa, Bacillus licheniformis
HHNGTNGTMMQYFEWYLPNDGNHWNRLRSDASNLKDKGITAVWIPPAWKGASQNDVGYGAYDLYDLGEFNQKGTVRTKYGTRNQLQAAVTALKSNGIQVYGDVVMNHKGGADATEWVRAVEVNPSNRNQEVSGDYTIEAWTKFDFPGRGNTHSNFKWRWYHFDGVDWDQSRQLQNKIYKFRGKGWDWEVDTENGNYDYLMYADYDMDHPEVVNELRNWGVWYTNTLGLDGFRIDAVKHIKYSFTRDWLTHVRNTTGKNMFAVAEFWKNDIGAIENYLSKTNWNHSVFDVPLHYNLYNASRSGGNYDMRQIFNGTVVQRHPTHAVTFVDNHDSQPEEALESFVEEWFKPLAYALTLTRDQGYPSVFYGDYYGIPTHGVPAMKSKIDPILEARQKYAYGTQRDYLDHPDVIGWTREGDGVHADSGLATLMSDGPGGSKWMEVGKNNAGEVWYDITGNQTGTVTINKDGWGQFHVSGGSVSIYVQQ

SEQ ID NO: 24591 - protein, 483 aa, Bacillus licheniformis
HHNGTNGTMMQYFEWYLPNDGNHWNRLRSDASNLKIKGITAVWIPPAWKGASQNDVGYGAYDLYDLGEFNQKGTVRTKYGTRNQLQAAVTALKSNGIQVYGDVVMNHKGGADATEWVRAVEVNPSNRNQEVSGDYTIEAWTKFDFPGRGNTHSNFKWRWYHFDGVDWDQSRQLQNRIYKFRGKGWDWEVDTENGNYDYLMYADIDMDHPEVVNELRNWGVWYTNTLGLDGFRIDAVKHIKYSFTRDWLTHVRNTTGKNMFAVAEFWKNDIGAIENYLSKTNWNHSVFDVPLHYNLYNASRSGGNYDMRQIFNGTVVQRHPTHAVTFVDNHDSQPEEALESFVEEWFKPLAYALTLTRDQGYPSVFYGDYYGIPTHGVPAMKSKIDPILEARQKYAYGTQRDYLDHPDVIGWTREGDGVHADSGLATLMSDGPGGSKWMEVGKNNAGEVWYDITGNQTNTVTINKDGWGQFHVSGGSVSIYVQQ

SEQ ID NO: 24592 - protein, 483 aa, Bacillus licheniformis
HHNGTNGTMMQYFEWYLPNDGNHWNRLRSDASNLKDKGITAVWIPPAWKGASQNDVGYGAYDLYDLGEFNQKGTVRTKYGTRNQLQAAVFALKSNGIQVYGDVVMNHKGGADATEWVRAVEVNPSNRNQEVSGDYTIEAWTKFDFPGRGNTHSNFKWRWYHFDGVDWDQSRQLQNRIYKFRGKGWDWEVDTENGNYDYLMYADIDMDHPEVVNELRNWGVWYTNTLGLDGFRIDAVKHIKYSFTRDWLTHVRNTTGKNMFAVAEFWKNDIGAIENYLSKTNWNHSVFDVPLHYNLYNASRSGGNYDMRQIFNGTVVQRHPTHAVTFVDNHDSQPEEALESFVEEWFKPLAYALTLTRDQGYPSVFYGDYYGIPTHGVPAMKSKIDPILEARQKYAYGTQRDYLDHPDVIGWTREGDGVHADSGLATLMSDGPGGSKWMEVGKNNAGEVWYDITGNQTNTVTINKDGWGQFHVSGGSVSIYVQQ

SEQ ID NO: 24593 - protein, 483 aa, Bacillus licheniformis
HHNGTNGTMMQYFEWYLPNDGNHWNRLRSDASNLKDKGITAVWIPPAWKGASQNDVGYGAYDLYDLGEFNQKGTVRTKYGTRNQLQAAVTALKSNGIQVYGDVVMNHKGGADATEWVRAVEVNPSNRNQEVSGDYTIEAWTKFDFPGRGNTHSNFKWRWYHFDGVDWDQSRQLQNRIYKFRGKGWDWEVDTENGNYDYLMYADIDMDHPEVVNELRNWGVWYTNTLGLDGFRIDAVKHIKYSFTRDWLTHVRNTTGKNMFAVAEFWKNDIGAIENYLSKTNWNHSVFDVPLHYNLYNASRSGGNYDMRQIFNGTVVQRHPTHAVTFVDNHDSQPEEALESFVEEWFKPLAYALTLTRDQGYPSVFYGDYYGIPTHGVPAMKSKIDPILEARQKSAYGTQRDYLDHPDVIGWTREGDGVHADSGLATLMSDGPGGSKWMEVGKNNAGEVWYDITGNQTNTVTINKDGWGQFHVSGGSVSIYVQQ

SEQ ID NO: 24594 - protein, 483 aa, Bacillus licheniformis
HHNGTNGTMMQYFEWYLPNDGNHWNRLRSDASNLKDKGITAVWIPPAWKGASQNDVGYGAYDLYDLGEFNQKGTVRTKYGTRNQLQAAVTALKSNGIQVYGDVVMNHKGGADATEWVRAVEVNPSNRNQEVSGDYTIEAWTKFDFPGRGNTHSNFKWRWYHFDGVDWDQSRQLQNRIYKFRGKGWDWEVDTENGNYDYLMYADIDMDHPEVVNELRNWGVWYTNTLGLDGFRIDAVKHIKYSFTRDWLTHVRNTTGKNMFAVAEFWKNDIGAIENYLSKTNWNHSVFDVPLHYNLYNASQSGGNYDMRQIFNGTVVQRHPTHAVTFVDNHDSQPEEALESFVEEWFKPLAYALTLTRDQGYPSVFYGDYYGIPTHGVPAMKSKIDPILEARQKYAYGTQRDYLDHPDVIGWTREGDGVHADSGLATLMSDGPGGSKWMEVGKNNAGEVWYDITGNQTNTVTINKDGWGQFHVSGGSVSIYVQQ

SEQ ID NO: 24595 - protein, 483 aa, Bacillus licheniformis
HHNGTNGTMMQYFEWYLPNDGNHWHRLRSDASNLKDKGITAVWIPPAWKGASQNDVGYGAYDLYDLGEFNQKGTVRTKYGTRNQLQAAVTALKSNGIQVYGDVVMNHKGGADATEWVRAVEVNPSNRNQEVSGDYTIEAWTKFDFPGRGNTHSNFKWRWYHFDGVDWDQSRQLQNRIYKFRGKEWDWEVDTENGNYDYLMYADYDMDHPEVVNELRNWGVWYTNTLGLDGFRIDAVKHIKYSFTRDWLTHVRNTTGKNMFAVAEFWKNDIGAIENYLSKTNWNHSVFDVPLHYNLYNASRSGGNYDMRQIFNGTVVQRHPTHAVTFVDNHDSQPEEALESFVEEWFKPLAYALTLTRDQGYPSVFYGDYYGIPTHGVPAMKSKIDPILEARQKYAYGTQRDYLDHPDVIGWTREGDGVHADSGLATLMSDGPGGSKWMEVGKNNAGEVWYDITGNQTGTVTINKDGWGQFHVSGGSVSIYVQQ

SEQ ID NO: 24596 - protein, 483 aa, Bacillus licheniformis
HHNGTNGTMMQYFEWYLPNDGNHWNRLRSDASNLKDKGITAVWIPPAWKGASQNDVGYGAYDLYDLGEFNQKGTVRTKYGTREQLQAAVTALKSNGIQVYGDVVMNHKGGADATEWVRAVEVNPSNRNQEVSGDYTIEAWTKFDFPGRGNTHSNFKWRWYHFDGVDWDQSRQLQNRIYKFRGKGWDWEVDTENGNYDYLMYADIDMDHPEVVNELRNWGVWYTNTLGLDGFRIDAVKHIKYSFTRDWLTHVRNTTGKNMFAVAEFWKNDIGAIENYLSKTNWNHSVFDVPLHYNLYNASRSGGNYDMRQIFNGTVVQRHPTHAVTFVDNHDSQPEEALESFVEEWFKPLAYALTLTRDQGYPSVFYGDYYGIPTHGVPAMKSKIDPILEARQKYAYGTQRDYLDHPDVIGWTREGDGVHADSGLATLMSDGPGGSKWMEVGKNNAGEVWYDITGNQTNTVTINKDGWGQFHVSGGSVSIYVQQ

SEQ ID NO: 24597 - protein, 483 aa, Bacillus licheniformis
HHNGTNGTMMQYFEWYLPNDGNHWNRLRSDASNLKDKGITAVWIPPAWKGASQNDVGYGAYDLYDLGEFNQKGTVRTKYGTRNQLQAAVTALKSNGIQVYGDVVMNHKGGADATEWVRAVEVNPANRNQEVSGDYTIEAWTKFDFPGRGNTHSNFKWRWYHFDGVDWDQSRQLQNRIYKFRGKGWDWEVDTENGNYDYLMYADIDMDHPEVVNELRNWGVWYTNTLGLDGFRIDAVKHIKYSFTRDWLTHVRNTTGKNMFAVAEFWKNDIGAIENYLSKTNWNHSVFDVPLHYNLYNASRSGGNYDMRQIFNGTVVQRHPTHAVTFVDNHDSQPEEALESFVEEWFKPLAYALTLTRDQGYPSVFYGDYYGIPTHGVPAMKSKIDPILEARQKYAYGTQRDYLDHPDVIGWTREGDGVHADSGLATLMSDGPGGSKWMEVGKNNAGEVWYDITGNQTNTVTINKDGWGQFHVSGGSVSIYVQQ

SEQ ID NO: 24598 - protein, 483 aa, Bacillus licheniformis
HHNGTNGTMMQYFEWYLPNDGNHWNRLRSDASNLKDKGITAVWIPPAWKGASQNDVGYGAYDLYDLGEFNQKGTVRTKYGTRNQLQAAVTALKSNGIQVYGDVVMNHKGGADATEWVRAVEVNPSNRNQEVSGDYTIEAWTKFDFPGRGNTHSNFKWRWYHFDGVDWDQSRQLQNRIYKFRGKGWDWEVDTENGNYDYLMYADIDMDHPEVVNELRNWGVWYTNTLGLDGFRIDAVKHIKYSFTRDWLTHVRNTTGKNMFAVAEFWKNDIGAIENYLSKTNWNHSVFDVPLHYNLYNASRSGGNYDMRQIFNGTVVQAHPTHAVTFVDNHDSQPEEALESFVEEWFKPLAYALTLTRDQGYPSVFYGDYYGIPTHGVPAMKSKIDPILEARQKYAYGTQRDYLDHPDVIGWTREGDGVHADSGLATLMSDGPGGSKWMEVGKNNAGEVWYDITGNQTNTVTINKDGWGQFHVSGGSVSIYVQQ

SEQ ID NO: 24599 - protein, 483 aa, Bacillus licheniformis
HHNGTNGTMMQYFEWYLPNDGNHWNRLRSDASNLKDKGITAVWIPPAWKGASQNDVGYGAYDLYDLGEFNQKGTVRTKYGTRNQLQAAVTALKSNGIQVYGDVVMNHKGGADATEWVRAVEVNPSNRNQEVSGDYTIEAWTKFDFPGRGNTHSNFKWRWYHFDGVDWDQSRQLQNRIYKFRGKGWDWEVDTENGNYDYLMYADIDMDHPEVVNELRNWGVWYTNTLGLDGFRIDAVKHIKYSFTRDWLTHVRNTTGKNMFAVAEFWKNDIGAIENYLSKTNWNHSVFDVPLHYNLYNASRSGGNYDMRQIFNGTVVQRHPTHAVTFVDNHDSQPEEALESFVEEWFKPLAYALTLTRDQGYPSVFYGDYYGIPTHGVPAMKSKIDPILEARQKYAYGTQRDYLDHPDVIGWTREGDGVHADSGLATLMSDGPGGSKWMEVGKNNAGYVWYDITGNQTNTVTINKDGWGQFHVSGGSVSIYVQQ

SEQ ID NO: 24600 - protein, 483 aa, Bacillus subtilis
HHNGTNGTMMQYFEWYLPNDGNHWNRLRSDASNLKDKGITAVWIPPAWKGASQNDVGYGAYDLYDLGEFNQKGTVRTKYGTRNQLQAAVTALKSNGIQVYGDVVMNHKGGADATEWVRAVEVNPSNRNQEVSGDYTIEAWTKFDFPGRGNTHSNFKWRWYHFDGVDWDQSRQLQNRIYKFRGKGWDWEVDTENGNYDYLMYADLDMDHPEVVNELRNWGVWYTNTLGLDGFRIDAVKHIKYSFTRDWLTHVRNTTGKNMFAVAEFWKNDIGAIENYLSKTNWNHSVFDVPLHYNLYNASRSGGNYDMRQIFNGTVVQRHPTHAVTFVDNHDSQPEEALESFVEEWFKPLAYALTLTRDQGYPSVFYGDYYGIPTHGVPAMKSKIDPILEARQKYAYGTQRDYLDHPDVIGWTREGDGVHADSGLATLMSDGPGGSKWMEVGKNNAGEVWYDITGNQTNTVTINKDGWGQFHVSGGSVSIYVQQ

SEQ ID NO: 24601 - protein, 483 aa, Bacillus licheniformis
HHNGTNGTMMQYFEWYLPNDGNHWNRLRSDASNLKDKGITAVWIPPAWKGASQNDVGYGAYDLYDLGEFNQKGTVRTKYGTRNQLQDAVTALKSNGIQVYGDVVMNHKGGADATEWVRAVEVNPSNRNQEVSGDYTIEAWTKFDFPGRGNTHSNFKWRWYHFDGVDWDQSRQLQNRIYKFRGKEWDWEVDTENGNYDYLMYADIDMDHPEVVNELRNWGVWYTNTLGLDGFRIDAVKHIKYSFTRDWLTHVRNTTGKNMFAVAEFWKNDIGAIENYLSKTNWNHSVFDVPLHYNLYNASRSGGNYDMRKIFEGTVVQRHPTHAVTFVDNHDSQPEEALESFVEEWFKPLAYALTLTRDQGYPSVFYGDYYGIPTHGVPAMKSKIDPILEARQKYAYGTQRDYLDHPDVIGWTREGDGKHADSGLATLMSDGPGGSKWMEVGKNNAGEVWYDITGNQTNTVTINKDGWGQFHVSGGSVSIYVQQ

SEQ ID NO: 24602 - protein, 482 aa, Synthetic construct
HHNGTNGTMMQYFEWYLPNDGNHWNRLRSDASNLKDKGISAVWIPPAWKGASQNDVGYGAYDLYDLGEFNQKGTIRTKYGTRNQLQAAVNALKSNGIQVYGDVVMNHKGGADATEDVTAVEVDPADRNRVISGEHLIKAWTHFHFPGRGSTYSDFKWHWYHFDGTDWDESRKLNRIYKFQGKAWDWEVSNEFGNYDYLMYADIDMDHPEVVNELRNWGVWYTNTLGLDGFRIDAVKHIKYSFTRDWINHVRSATGKNMFAVAEFWKNDLGAIENYLNKTNWNHSVFDVPLHYNLYNASKSGGNYDMRQIFNGTVVQRHPMHAVTFVDNHDSQPEEALESFVEEWFKPLAYALTLTREQGYPSVFYGDYYGIPTHGVPAMKSKIDPILEARQKYAYGRQNDYLDHHNIIGWTREGNTAHPNSGLATIMSDGAGGNKWMFVGRNKAGQVWTDITGNRAGTVTINADGWGNFSVNGGSVSIWVNK

SEQ ID NO: 24603 - protein, 482 aa, Bacillus licheniformis
HNGTNGTMMQYFEWYLPNDGNHWNRLRSDASNLKDKGITAVWIPPAWKGASQNDVGYGAYDLYDLGEFNQKGTVRTKYGTRNQLQAAVTALKSNGIQVYGDVVMNHKGGADATEWVRAVEVNPSNRNQEVSGDYTIEAWTKFDFPGRGNTHSNFKWRWYHFDGVDWDQSRQLQNRIYKFRGKGWDWEVDTENGNYDYLMYADIDMDHPEVVNELRNWGVWYTNTLGLDGFRIDAVKHIKYSFTRDWLTHVRNTTGKNMFAVAEFWKNDIGAIENYLSKTNWNHSVFDVPLHYNLYNASRSGGNYDMRQIFNGTVVQRHPTHAVTFVDNHDSQPEEALESFVEEWFKPLAYALTLTRDQGYPSVFYGDYYGIPTHGVPAMKSKIDPILEARQKYAYGTQRDYLDHPDVIGWTREGDGVHADSGLATLMSDGPGGSKWMEVGKNNAGEVWYDITGNQTNTVTINKDGWGQFHVSGGSVSIYVQQ

SEQ ID NO: 24604 - protein, 490 aa, Bacillus sp.
ANTAPINETMMQYFEWDLPNDGTLWTKVKNEAANLSSLGITALWLPPAYKGTSQSDVGYGVYDLYDLGEFNQKGTIRTKYGTKTQYIQAIQAAKAAGMQVYADVVFNHKAGADGTEFVDAVEVDPSNRNQETSGTYQIQAWTKFDFPGRGNTYSSFKWRWYHFDGTDWDESRKLNRIYKFRSTGKAWDWEVDTENGNYDYLMFADLDMDHPEVVTELKNWGTWYVNTTNIDGFRLDAVKHIKYSFFPDWLTYVRNQTGKNLFAVGEFWSYDVNKLHNYITKTNGSMSLFDAPLHNNFYTASKSSGYFDMRYLLNNTLMKDQPSLAVTLVDNHDTQPGQSLQSWVEPWFKPLAYAFILTRQEGYPCVFYGDYYGIPKYNIPGLKSKIDPLLIARRDYAYGTQRDYIDHQDIIGWTREGIDTKPNSGLAALITDGPGGSKWMYVGKKHAGKVFYDLTGNRSDTVTINADGWGEFKVNGGSVSIWVAKTSNVT

SEQ ID NO: 24605 - protein, 481 aa, Synthetic construct
SVPVNGTMMQYFEWYLPDDGTLWTKVANNAQSLANLGITALWLPPAYKGTSSSDVGYGVYDLYDLGEFNQKGTVRTKYGTKTQYIQAIQAAHTAGMQVYADVVFNHKGGADATEDVTAVEVDPADRNRVISGEHLIKAWTHFHFPGRGSTYSDFKWHWYHFDGTDWDESRKLNRIYKFQGKAWDWEVSNEFGNYDYLMYADIDMDHPEVVSELKNWGKWYVTTTNIDGFRLDAVKHIKYSFFPDWLSYVRTQTQKPLFAVGEFWSYDISKLHNYITKTNGSMSLFDAPLHNNFYIASKSGGYFDMRTLLNNTLMKDQPTLAVTLVDNHDTEPGQSLQSWVEPWFKPLAYAFILTRQEGYPCVFYGDYYGIPKYNIPALKSKLDPLLIARRDYAYGTQHDYIDSADIIGWTREGVAEKANSGLAALITDGPGGSKWMYVGKQHAGKTFYDLTGNRSDTVTINADGWGEFKVNGGSVSIWVPK

SEQ ID NO: 24606 - protein, 484 aa, Synthetic construct
SVPVNGTMMQYFEWYLPDDGTLWTKVANNAQSLANLGITALWLPPAYKGTSSSDVGYGVYDLYDLGEFNQKGTVRTKYGTKTQYIQAIQAAHTAGMQVYADVVFNHKGGADATEMVRAVEVNPNNRNQEVTGEYTIEAWTRFDFPGRGNTHSSFKWRWYHFDGVDWDQSRRLNNRIYKFRGHGKAWDWEVDTENGNYDYLMYADIDMDHPEVVSELKNWGKWYVTTTNIDGFRLDAVKHIKYSFFPDWLSYVRTQTQKPLFAVGEFWSYDISKLHNYITKTNGSMSLFDAPLHNNFYIASKSGGYFDMRTLLNNTLMKDQPTLAVTLVDNHDTEPGQSLQSWVEPWFKPLAYAFILTRQEGYPCVFYGDYYGIPKYNIPALKSKLDPLLIARRDYAYGTQHDYIDSADIIGWTREGVAEKANSGLAALITDGPGGSKWMYVGKQHAGKTFYDLTGNRSDTVTINADGWGEFKVNGGSVSIWVPK

SEQ ID NO: 24607 - protein, 484 aa, Synthetic construct
SVPVNGTMMQYFEWYLPDDGTLWTKVANNAQSLANLGITALWLPPAYKGTSSSDVGYGVYDLYDLGEFNQKGTVRTKYGTKTQYIQAIQAAHTAGMQVYADVVFNHKGGADFTERVQAVEVNPQNRNQEVSGTYQIEAWTGFNFPGRGNQHSSFKWRWYHFDGTDWDQSRQLANRIYKFRGDGKAWDWEVDTENGNYDYLMYADVDMDHPEVVSELKNWGKWYVTTTNIDGFRLDAVKHIKYSFFPDWLSYVRTQTQKPLFAVGEFWSYDISKLHNYITKTNGSMSLFDAPLHNNFYIASKSGGYFDMRTLLNNTLMKDQPTLAVTLVDNHDTEPGQSLQSWVEPWFKPLAYAFILTRQEGYPCVFYGDYYGIPKYNIPALKSKLDPLLIARRDYAYGTQHDYIDSADIIGWTREGVAEKANSGLAALITDGPGGSKWMYVGKQHAGKTFYDLTGNRSDTVTINADGWGEFKVNGGSVSIWVPK

SEQ ID NO: 24608 - protein, 480 aa, Bacillus sp.
APINETMMQYFEWDLPNDGTLWTKVKNEAANLSSLGITALWLPPAYKGTSQSDVGYGVYDLYDLGEFNQKGTIRTKYGTKTQYIQAIQAAKAAGMQVYADVVFNHKAGADGTEFVDAVEVDPSNRNQEVSGTYQIEAWTKFDFPGRGNTYSSFKWRWYHFDGTDWDESRKLNRIYKFRGKAWDWEVDTENGNYDYLMFADLDMDHPEVVTELKNWGTWYVNTTNIDGFRLDAVKHIKFSFMRDWLTYVRNQTGKNLFAVGEFWSYDVNKLHNYITKTNGSMSLFDAPLHNNFYTASKSSGYFDMRYLLNNTLMKDQPSLAVTLVDNHDTQPGQSLQSWVEPWFKPLAYAFILTRQEGYPCVFYGDYYGIPSDGVPGLKSKIDPLLIARRDYAYGTQRDYIDHQDIIGWTREGIDTKPNSGLAALITDGPGGSKWMYVGKKHAGKVFYDLTGNRSDTVTINADGWGEFKVNGGSVSIWVAK

SEQ ID NO: 24609 - protein, 480 aa, Synthetic construct
APVNGTMMQYFEWDLPNDGTLWTKVKNEAANLSSLGITALWLPPAYKGTSQSDVGYGVYDLYDLGEFNQKGTVRTKYGTKDQYIQAIQAAKAAGMQVYADVVFNHKGGADATEDVTAVEVDPADRNRVISGEHLIKAWTHFHFPGRGSTYSDFKWHWYHFDGTDWDESRKLNRIYKFQGKAWDWEVSNEFGNYDYLMYADIDMDHPEVVTELKNWGKWYVNTTNVDGFRLDAVKHIKYSFFPDWLASVRSQTGKNLFAVGEFWSYDVNKLHNYITKTNGTMSLFDAPLHNNFYTASKSSGYFDMRYLLNNTLMKDQPVLAVTLVDNHDTQPGQSLQSWVEPWFKPLAYAFILTRQEGYPCVFYGDYYGIPKYNIPGLKSKIDPLLIARRDYAYGTQRDYIDHQDIIGWTREGIDSKPNSGLAALITDGPGGSKWMYVGKKHAGKVFYDLTGNRSDTVTINADGWGEFKVNGGSVSIWVAK

SEQ ID NO: 24610 - protein, 480 aa, Bacillus sp.
APINETMMQYFEWDLPNDGTLWTKVKNEAANLSSLGITALWLPPAYKGTSQSDVGYGVYDLYDLGEFNQKGTIRTKYGTKTQYIQAIQAAKAAGMQVYADVVFNHKAGADGTEFVDAVEVDPSNRNQEVSGTYQIEAWTKFDFPGRGNTYSSFKWRWYHFDGTDWDESRKLNRIYKFRGKAWDWEVDTENGNYDYLMFADLDMDHPEVVTELKNWGTWYVNTTNIDGFRLDAVKHIKFSFMRDWLTYVRNQTGKNLFAVGEFWSYDVNKLHNYITKTNGSMSLFDAPLHNNFYTASKSSGYFDMRYLLNNTLMKDQPSLAVTLVDNHDTQPGEALESFVQGWFKPLAYAFILTRQEGYPCVFYGDYYGIPKYNIPGLKSKIDPLLIARRDYAYGTQRDYIDHQDIIGWTREGIDTKPNSGLAALITDGPGGSKWMYVGKKHAGKVFYDLTGNRSDTVTINADGWGEFKVNGGSVSIWVAK

SEQ ID NO: 24611 - protein, 480 aa, Bacillus sp.
APINETMMQYFEWDLPNDGTLWTKVKNEAANLSSLGITALWLPPAYKGTSQSDVGYGVYDLYDLGEFNQKGTIRTKYGTKTQYIQAIQAAKAAGMQVYADVVFNHKAGADQTEFVDAVEVDPSNRNQETSGTYQIQAWTKFDFPGRGNTYSSFKWRWYHFDGTDWDESRKLNRIYKFRGKAWDWEVDTENGNYDYLMFADLDMDHPEVVTELKNWGTWYVNTTNIDGFRLDAVKHIKFSFMRDWLTYVRNQTGKNLFAVGEFWSYDVNKLHNYITKTNGSMSLFDAPLHNNFYTASKSSGYFDMRYLLNNTLMKDQPSLAVTLVDNHDTQPGEALESFVQGWFKPLAYAFILTRQEGYPCVFYGDYYGIPKYNIPGLKSKIDPLLIARRDYAYGTQRDYIDHQDIIGWTREGIDTKPNSGLAALITDGPGGSKWMYVGKKHAGKVFYDLTGNRSDTVTINADGWGEFKVNGGSVSIWVAK

SEQ ID NO: 24612 - protein, 482 aa, Synthetic construct
APVNGTMMQYFEWDLPNDGTLWTKVKNEASSLSALGITALWLPPAYKGTSQADVGYGVYDLYDLGEFNQKGTIRTKYGTKTQYLQAIQAAKSAGMQVYADVVFNHKAGADATEWVDAVEVNPSNRNQEVSGTYKIQAWTKFDFPGRGNTYSSFKWRWYHFDGTDWDQSRQLNRIYKFRGTGKAWDWEVDTENGNYDYLMFADLDMDHPEVVAELKNWGKWYVNTTNVDGFRLDAVKHIKYSFFPDWLSYVRNQTGKNLFAVGEFWGYDVNKLHNYITKTNGAMSLFDAPLHNNFYIASKSSGYFDMRYLLNNTLMKDQPALAVTLVDNHDTQPGQSLQSWVEPWFKPLAYAFILTRQEGYPCVFYGDYYGIPKYNIPGLKSKIDPLLIARRDYAYGTQRDYIDHQDIIGWTREGIDAKPNSGLAALITDGPGGSKWMYVGKRHAGKVFYDLTGNRSDTVTINADGWGEFKVNGGSVSIWVAK

SEQ ID NO: 24613 - protein, 483 aa, Synthetic construct
APVNGTMMQYFEWDLPNDGTLWTKVKNEAANLSSLGITALWLPPAYKGTSQSDVGYGVYDLYDLGEFNQKGTIRTKYGTKTQYIQAIQAAKAAGMQVYADVVFNHKGGADATEMVRAVEVNPNNRNQEVSGEYTIEAWTKFDFPGRGNTHSNFKWRWYHFDGVDWDQSRKLNNRIYKFRGDGKGWDWEVDTENGNYDYLMYADIDMDHPEVVAELKNWGKWYVNTTNVDGFRLDAVKHIKYSFFPDWLSYVRNQTGKNLFAVGEFWSYDVNKLHNYITKTNGTMSLFDAPLHNNFYIASKSSGYFDMRYLLNNTLMKDQPALAVTLVDNHDTQPGQSLQSWVEPWFKPLAYAFILTRQEGYPCVFYGDYYGIPKYNIPGLKSKIDPLLIARRDYAYGTQRDYIDHPDIIGWTREGIDAKPNSGLAALITDGPGGSKWMYVGKKHAGKVFYDLTGNRSDTVTINADGWGQFKVNGGSVSIWVAK

SEQ ID NO: 24614 - protein, 483 aa, Synthetic construct
APVNGTMMQYFEWDLPNDGTLWTKVKNEAANLSSLGITALWLPPAYKGTSQSDVGYGVYDLYDLGEFNQKGTIRTKYGTKTQYIQAIQAAKAAGMQVYADVVFNHKGGADATENVLAVEVNPNNRNQEISGDYTIEAWTKFDFPGRGNTYSDFKWRWYHFDGVDWDQSRQFQNRIYKFRGDGKAWDWEVDSENGNYDYLMYADVDMDHPEVVAELKNWGKWYVNTTNVDGFRLDAVKHIKYSFFPDWLSYVRNQTGKNLFAVGEFWSYDVNKLHNYITKTNGTMSLFDAPLHNNFYIASKSSGYFDMRYLLNNTLMKDQPALAVTLVDNHDTQPGQSLQSWVEPWFKPLAYAFILTRQEGYPCVFYGDYYGIPKYNIPGLKSKIDPLLIARRDYAYGTQRDYIDHPDIIGWTREGIDAKPNSGLAALITDGPGGSKWMYVGKKHAGKVFYDLTGNRSDTVTINADGWGQFKVNGGSVSIWVAK

SEQ ID NO: 24615 - protein, 483 aa, Synthetic construct
APVNGTMMQYFEWDLPNDGTLWTKVKNEAANLSSLGITALWLPPAYKGTSQSDVGYGVYDLYDLGEFNQKGTVRTKYGTKDQYIQAIQAAKAAGMQVYADVVFNHKGGADFTERVQAVEVNPQNRNQEVSGTYQIEAWTGFNFPGRGNQHSSFKWRWYHFDGTDWDQSRQLANRIYKFRGDGKAWDWEVDTENGNYDYLMYADVDMDHPEVVTELKNWGKWYVNTTNVDGFRLDAVKHIKYSFFPDWLASVRSQTGKNLFAVGEFWSYDVNKLHNYITKTNGTMSLFDAPLHNNFYTASKSSGYFDMRYLLNNTLMKDQPVLAVTLVDNHDTQPGQSLQSWVEPWFKPLAYAFILTRQEGYPCVFYGDYYGIPKYNIPGLKSKIDPLLIARRDYAYGTQRDYIDHQDIIGWTREGIDSKPNSGLAALITDGPGGSKWMYVGKKHAGKVFYDLTGNRSDTVTINADGWGEFKVNGGSVSIWVAK

SEQ ID NO: 24616 - protein, 483 aa, Synthetic construct
APVNGTMMQYFEWDLPNDGTLWTKVKNEAANLSSLGITALWLPPAYKGTSQSDVGYGVYDLYDLGEFNQKGTVRTKYGTKDQYIQAIQAAKAAGMQVYADVVFNHKGGADATEMVRAVEVNPNNRNQEVTGEYTIEAWTRFDFPGRGNTHSSFKWRWYHFDGVDWDQSRRLNNRIYKFRGHGKAWDWEVDTENGNYDYLMYADIDMDHPEVVTELKNWGKWYVNTTNVDGFRLDAVKHIKYSFFPDWLASVRSQTGKNLFAVGEFWSYDVNKLHNYITKTNGTMSLFDAPLHNNFYTASKSSGYFDMRYLLNNTLMKDQPVLAVTLVDNHDTQPGQSLQSWVEPWFKPLAYAFILTRQEGYPCVFYGDYYGIPKYNIPGLKSKIDPLLIARRDYAYGTQRDYIDHQDIIGWTREGIDSKPNSGLAALITDGPGGSKWMYVGKKHAGKVFYDLTGNRSDTVTINADGWGEFKVNGGSVSIWVAK

SEQ ID NO: 24617 - protein, 513 aa, Bacillus sp.
KKIFPWILSLLLLFLFIAPFSIQTEKVRAGSVPVNGTMMQYFEWYLPDDGTLWTKVANNAQSLANLGITALWLPPAYKGTSSSDVGYGVYDLYDLGEFNQKGTVRTKYGTKTQYIQAIQAAHTAGMQVYADVVFNHKAGADGTELVDAVEVNPSDRNQEISGTYQIQAWTKFDFPGRGNTYSSFKWRWYHFDGTDWDESRKLNRIYKFRGTGKAWDWEVDTENGNYDYLMYADLDMDHPEVVSELKNWGKWYVTTTNIDGFRLDAVKHIKYSFFPDWLSYVRTQTQKPLFAVGEFWSYDISKLHNYITKTNGSMSLFDAPLHNNFYIASKSGGYFDMRTLLNNTLMKDQPTLAVTLVDNHDTEPGQSLQSWVEPWFKPLAYAFILTRQEGYPCVFYGDYYGIPKYNIPALKSKLDPLLIARRDYAYGTQHDYIDSADIIGWTREGVAEKANSGLAALITDGPGGSKWMYVGKQHAGKTFYDLTGNRSDTVTINADGWGEFKVNGGSVSIWVPK

SEQ ID NO: 24618 - protein, 512 aa, Bacillus sp. TS-23
APINETMMQYFEWDLPNDGTLWTKVKNEAANLSSLGITALWLPPAYKGTSQSDVGYGVYDLYDLGEFNQKGTIRTKYGTKTQYIQAIQAAKAAGMQVYADVVFNHKAGADGTEFVDAVEVDPSNRNQETSGTYQIQAWTKFDFPGRGNTYSSFKWRWYHFDGTDWDESRKLNQRIYKFRSKAWDWEVDTENGNYDYLMFADLDMDHPEVVTELKNWGTWYVNTTNIDGFRLDAVKHIKYSFFPDWLTYVRNQTGKNLFAVGEFWSYDVNKLHNYITKTNGSMSLFDAPLHNNFYTASKSSGYFDMRYLLNNTLMKDQPSLAVTLVDNHDTQPGQSLQSWVEPWFKPLAYAFILTRQEGYPCVFYGDYYGIPKYNIPGLKSKIDPLLIARRDYAYGTQRDYIDHQDIIGWTREGIDTKPNSGLAALITDGPGGSKWMYVGKKHAGKVFYDLTGNRSDTVTINADGWGEFKVNGGSVSIWVAKTSNVTFTVNNATTTSGQNVYVVANIPELGNW

SEQ ID NO: 24619 - protein, 513 aa, Bacillus sp. TS-23
APINETMMQYFEWDLPNDGTLWTKVKNEAANLSSLGITALWLPPAYKGTSQSDVGYGVYDLYDLGEFNQKGTIRTKYGTKTQYIQAIQAAKAAGMQVYADVVFNHKAGADGTEFVDAVEVDPSNRNQETSGTYQIQAWTKFDFPGRGNTYSSFKWRWYHFDGTDWDESRKLNRIYKFRSTGKAWDWEVDTENGNYDYLMFADLDMDHPEVVTELKNWGTWYVETTNIDGFRLDAVKHIKYSFFPDWLTYVRNQTGKNLFAVGEFWSYDVNKLHNYITKTRGSMSLFDAPLHNNFYTASKSSGYFDMRYLLNNTLMKDQPSLAVTLVDNHDTQPGQSLQSWVEPWFKPLAYAFILTRQEGYPCVFYGDYYGIPKYNIPGLKSKIDPLLIARRDYAYGTQRDYIDHQDIIGWTREGIDTKPNSGLAALITDGPGGSKWMYVGKKHAGKVFYDLTGNRSDTVTINADGWGEFKVNGGSVSIWVAKTSNVTFTVNNATTTSGQNVYVVANIPELGNW

SEQ ID NO: 24620 - protein, 511 aa, Bacillus sp. TS-23
APINETMMQYFEWDLPNDGTLWTKVKNEAANLSSLGITALWLPPAYKGTSQSDVGYGVYDLYDLGEFNQKGTIRTKYGTKTQYIQAIQAAKAAGMQVYADVVFNHKAGADGTEFVDAVEVDPSNRNQETSGTYQIQAWTKFDFPGRGNTYSSFKWRWYHFDGTDWDESRKLNRIYKFRGKAWDWEVDTENGNYDYLMFADLDMDHPEVVTELKNWGTWYVNTTNIDGFRLDAVKHIKYSFFPDWLTYVRNQTGKNLFAVGEFWSYDVNKLHNYITKTNGSMSLFDAPLHNNFYTASKSSGYFDMRYLLNNTLLKDQPSLAVTLVDNHDTQPGQSLQSWVEPWFKPLAYAFILTRQEGYPCVFYGDYYGIPKYNIPGLKSKIDPLLIARRDYAYGTQRDYIDHQDIIGWTREGIDTKPNSGLAALITDGPGGSKWMYVGKKHAGKVFYDLTGNRSDTVTINADGWGEFKVNGGSVSIWVAKTSNVTFTVNNATTTSGQNVYVVANIPELGNW

SEQ ID NO: 24621 - protein, 513 aa, Bacillus sp. TS-23
APINETMMQYFEWDLPNDGTLWTKVKNEAANLSSLGITALWLPPAYKGTSQSDVGYGVYDLYDLGEFNQKGTIRTKYGTKTQYIQAIQAAKAAGMQVYADVVFNHKAGADGTEFVDAVEVDPSNRNQETSGTYQIQAWTKFDFPGRGNTYSSFKWRWYHFDGTDWDESRKLNRIYKFRSTGKAWDWEVDTENGNYDYLMFADLDMDHPEVVTELKNWGTWYVNTTNIDGFRLDAVKHIKYSFFPDWLTYVRNQTGKNLFAVGEFWSYDVEKLHNYITKTNGSMSLFDAPLHNNFYTASKSSGYFDMRYLLNNTLMKDQPSLAVTLVDNHDTQPGQSLQSWVEPWFKPLAYAFILTRQEGYPCVFYGDYYGIPKYNIPGLKSKIDPLLIARRDYAYGTQRDYIDHQDIIGWTREGIDTKPNSGLAALITDGPGGSKWMYVGKKHAGKVFYDLTGNRSDTVTINADGWGEFKVNGGSVSIWVAKTSNVTFTVNNATTTSGQNVYVVANIPELGNW

SEQ ID NO: 24622 - protein, 511 aa, Bacillus sp. TS-23
APINETMMQYFEWDLPNDGTLWTKVKNEAANLSSLGITALWLPPAWKGTSQSDVGYGVYDLYDLGEFNQKGTIRTKYGTKTQYIQAIQAAKAAGMQVYADVVFNHKAGADGTEFVDAVEVDPSNRNQETSGTYQIQAWTKFDFPGRGNTYSSFKWRWYHFDGTDWDESRKLNRIYKFRGKAWDWEVDTENGNYDYLMFADLDMDHPEVVTELKNWGTWYVNTTNIDGFRLDAVKHIKYSFFPDWLTYVRNQTGKNLFAVGEFWSYDVNKLHNYITKTNGSMSLFDAPLHNNFYTASKSSGYFDMRYLLNNTLMKDQPSLAVTLVDNHDTQPGQSLQSWVEPWFKPLAYAFILTRQEGYPCVFYGDYYGIPKYNIPGLKSKIDPLLIARRDYAYGTQRDYIDHQDIIGWTREGIDTKPNSGLAALITDGPGGSKWMYVGKKHAGKVFYDLTGNRSDTVTINADGWGEFKVNGGSVSIWVAKTSNVTFTVNNATTTSGQNVYVVANIPELGNW

SEQ ID NO: 24623 - protein, 513 aa, Bacillus sp. TS-23
APINETMMQYFEWDLPNDGTLWTKVKNEAANLSSLGITALWLPPAYKGTSQSDVGYGVYDLYDLGEFNQKGTIRTKYGTKTQYIQAIQAAKAAGMQVYADVVFNHKAGADGTEFVDAVEVDPSNRNQETSGTYQIQAWTKFDFPGRGNTYSSFKWRWYHFDGTDWDESRKLNRIYKFRSTGKAWDWEVDTENGNYDYLMFADLDMDHPEVVTELKNWGTWYVNTTNIDGFRLDAVKHIKYSFFPDWLTYVRNQTGKNLFAVGEFWSYDVRKLHNYITKTRGSMSLFDAPLHNNFYTASKSSGYFDMRYLLNNTLMKDQPSLAVTLVDNHDTQPGQSLQSWVEPWFKPLAYAFILTRQEGYPCVFYGDYYGIPKYNIPGLKSKIDPLLIARRDYAYGTQRDYIDHQDIIGWTREGIDTKPNSGLAALITDGPGGSKWMYVGKKHAGKVFYDLTGNRSDTVTINADGWGEFKVNGGSVSIWVAKTSNVTFTVNNATTTSGQNVYVVANIPELGNW

SEQ ID NO: 24624 - protein, 513 aa, Bacillus sp. TS-23
APINETMMQYFEWDLPNDGTLWTKVKNEAANLSSLGITALWLPPAYKGTSQSDVGYGVYDLYDLGEFNQKGTIRTKYGTKTQYIQAIQAAKAAGMQVYADVVFNHKAGADGTEFVDAVEVDPSNRNQETSGTYQIQAWTKFDFPGRGNTYSSFKWRWYHFDGTDWDESRKLNRIYKFRSTGKAWDWEVDTENGNYDYLMFADLDMDHPEVVTELKNWGTWYVNTTNIDGFRLDAVKHIKYSFFPDWLTYVRNQTGKNLFAVGEFWSYDVNKLHNYITKTNGSMSLFDAPLHNNFYTASKSSGYFDMRYLLNNTLMKDQPSLAVTLVDNHDTQPGQSLQSWVEPWFKPLAYAFILTREEGYPCVFYGDYYGIPKYNIPGLKSKIDPLLIARRDYAYGTQRDYIDHQDIIGWTREGIDTKPNSGLAALITDGPGGSKWMYVGKKHAGKVFYDLTGNRSDTVTINADGWGEFKVNGGSVSIWVAKTSNVTFTVNNATTTSGQNVYVVANIPELGNW

SEQ ID NO: 24625 - protein, 512 aa, Bacillus sp. TS-23
APINETMMQYFEWDLPNDGTLWTKVKNEAANLSSLGITALWLPPAYKGTSQSDVGYGVYDLYDLGEFNQKGTIRTKYGTKTQYIQAIQAAKAAGMQVYADVVFNHKAGADGTEFVDAVEVDPSNRNQETSGTYQIQAWTKFDFPGRGNTYSSFKWRWYHFDGTDWDESRKLNLRIYKFSGKAWDWEVDTENGNYDYLMFADLDMDHPEVVTELKNWGTWYVNTTNIDGFRLDAVKHIKYSFFPDWLTYVRNQTGKNLFAVGEFWSYDVNKLHNYITKTNGSMSLFDAPLHNNFYTASKSSGYFDMRYLLNNTLMKDQPSLAVTLVDNHDTQPGQSLQSWVEPWFKPLAYAFILTRQEGYPCVFYGDYYGIPKYNIPGLKSKIDPLLIARRDYAYGTQRDYIDHQDIIGWTREGIDTKPNSGLAALITDGPGGSKWMYVGKKHAGKVFYDLTGNRSDTVTINADGWGEFKVNGGSVSIWVAKTSNVTFTVNNATTTSGQNVYVVANIPELGNW

SEQ ID NO: 24626 - protein, 513 aa, Bacillus sp. TS-23
APINETMMQYFEWDLPNDGTLWTKVKNEAANLSSLGITALWLPPAYKGTSQSDVGYGVYDLYDLGEFNQKGTIRTKYGTKTQYIQAIQAAKAAGMQVYADVVFNHKAGADGTEFVDAVEVDPSNRNQETSGTYQIQAWTKFDFPGRGNTYSSFKWRWYHFDGTDWDESRKLNRIYKFRSTGKAWDWEVDTENGNYDYLMFADLDMDHPEVVTELKNWGTWYVRTTNIDGFRLDAVKHIKYSFFPDWLTYVRNQTGKNLFAVGEFWSYDVNKLHNYITKTEGSMSLFDAPLHNNFYTASKSSGYFDMRYLLNNTLMKDQPSLAVTLVDNHDTQPGQSLQSWVEPWFKPLAYAFILTRQEGYPCVFYGDYYGIPKYNIPGLKSKIDPLLIARRDYAYGTQRDYIDHQDIIGWTREGIDTKPNSGLAALITDGPGGSKWMYVGKKHAGKVFYDLTGNRSDTVTINADGWGEFKVNGGSVSIWVAKTSNVTFTVNNATTTSGQNVYVVANIPELGNW

SEQ ID NO: 24627 - protein, 513 aa, Bacillus sp. TS-23
APINETMMQYFEWDLPNDGTLWTKVKNEAANLSSLGITALWLPPAYKGTSQSDVGYGVYDLYDLGEFNQKGTIRTKYGTKTQYIQAIQAAKAAGMQVYADVVFNHKAGADGTEFVDAVEVDPSNRNQETSGTYQIQAWTKFDFPGRGNTYSSFKWRWYHFDGTDWDESRKLNRIYKFRSTGKAWDWEVDTENGNYDYLMFADLDMDHPEVVTELKNWGTWYVNTTNIDGFRLDAVKHIKYSFFPDWLTYVRNQTGKNLFAVGEFWSYDVNKLHNYITKTNGSMSLFDAPLHNNFYTASKSSGYFDMQYLLNNTLMKDQPSLAVTLVDNHDTQPGQSLQSWVEPWFKPLAYAFILTRQEGYPCVFYGDYYGIPKYNIPGLKSKIDPLLIARRDYAYGTQRDYIDHQDIIGWTREGIDTKPNSGLAALITDGPGGSKWMYVGKKHAGKVFYDLTGNRSDTVTINADGWGEFKVNGGSVSIWVAKTSNVTFTVNNATTTSGQNVYVVANIPELGNW

SEQ ID NO: 24628 - protein, 511 aa, Bacillus sp. TS-23
APINETMMQYFEWDLPNDGTLWTKVKNEAANLSSLGITALWLPPAYKGTSQSDVGYGVYDLYDLGEFNQKGTIRTKYGTKTQYIQAIQAAKAAGMQVYADVVFNHKAGADGTEFVDAVEVDPSNRNQETSGTYQIQAWTKFDFPGRGNTYSSFKWRWYHFDGTDWDESRKLNRIYKFRGKAWDWEVDTENGNYDYLMFADYDMDHPEVVTELKNWGTWYVNTTNIDGFRLDAVKHIKYSFFPDWLTYVRNQTGKNLFAVGEFWSYDVNKLHNYITKTNGSMSLFDAPLHNNFYTASKSSGYFDMRYLLNNTLMKDQPSLAVTLVDNHDTQPGQSLQSWVEPWFKPLAYAFILTRQEGYPCVFYGDYYGIPKYNIPGLKSKIDPLLIARRDYAYGTQRDYIDHQDIIGWTREGIDTKPNSGLAALITDGPGGSKWMYVGKKHAGKVFYDLTGNRSDTVTINADGWGEFKVNGGSVSIWVAKTSNVTFTVNNATTTSGQNVYVVANIPELGNW

SEQ ID NO: 24629 - protein, 511 aa, Bacillus sp.
APINETMMQYFEWDLPNDGTLWTKVKNEAANLSSLGITALWLPPAYKGTSQSDVGYGVYDLYDLGEFNQKGTIRTKYGTKTQYIQAIQAAKAAGMQVYADVVFNHKAGADGTEFVDAVEVDPSNRNQETSGTYQIQAWTKFDFPGRGNTYSSFKWRWYHFDGTDWDESRKLNRIYKFTGKAWDWEVDTENGNYDYLMFADLDMDHPEVVTELKNWGTWYVNTTNIDGFRLDAVKHIKFQFFPDWLTYVRNQTGKNLFAVGEYWSYDVNKLHNYITKTNGSMSLFDAPLHNNFYTASKSSGYFDMRYLLNNTLMKDQPSLAVTLVDNHDTQPGQSLQSWVEPWFKPLAYAFILTRQEGYPCVFYGDYYGIPKYNIPGLKSKIDPLLIARRDYAYGTQRDYIDHQDIIGWTREGIDTKPNSGLAALITDGPGGSKWMYVGKKHAGKVFYDLTGNRSDTVTINADGWGEFKVNKGSVSIWVAKTSNVTFTVNNATTTSGQNVYVVANIPELGNW

SEQ ID NO: 24630 - protein, 513 aa, Bacillus sp. TS-23
APINETMMQYFEWDLPNDGTLWTKVKNEAANLSSLGITALWLPPAYKGTSQSDVGYGVYDLYDLGEFNQKGTIRTKYGTKTQYIRAIQAAKAAGMQVYADVVFNHKAGADGTEFVDAVEVDPSNRNQETSGTYQIQAWTKFDFPGRGNTYSSFKWRWYHFDGTDWDESRKLNRIYKFRSTGKAWDWEVDTENGNYDYLMFADLDMDHPEVVTELKNWGTWYVNTTNIDGFRLDAVKHIKYSFFPDWLTYVRNQTGKNLFAVGEFWSYDVNKLHNYITKTEGSMSLFDAPLHNNFYTASKSSGYFDMRYLLNNTLMKDQPSLAVTLVDNHDTQPGQSLQSWVEPWFKPLAYAFILTRQEGYPCVFYGDYYGIPKYNIPGLKSKIDPLLIARRDYAYGTQRDYIDHQDIIGWTREGIDTKPNSGLAALITDGPGGSKWMYVGKKHAGKVFYDLTGNRSDTVTINADGWGEFKVNGGSVSIWVAKTSNVTFTVNNATTTSGQNVYVVANIPELGNW

SEQ ID NO: 24631 - protein, 513 aa, Bacillus sp. TS-23
APINETMMQYFEWDLPNDGTLWTKVKNEAANLSSLGITALWLPPAYKGTSQSDVGYGVYDLYDLGEFNQKGTIRTKYGTKTQYIQAIQAAKAAGMQVYADVVFNHKAGADGTEFVDAVEVDPSNRNQETSGTYQIQAWTKFDFPGRGNTYSSFKWRWYHFDGTDWDESRKLNRIYKFRSTGKAWDWEVDTENGNYDYLMFADLDMDHPEVVTELKNWGTWYVRTTNIDGFRLDAVKHIKYSFFPDWLTYVRNQTGKNLFAVGEFWSYDVNKLHNYITKTNGSMSLFDAPLHNNFYTASKSSGYFDMRYLLNNTLMKDQPSLAVTLVDNHDTQPGQSLQSWVEPWFKPLAYAFILTRQEGYPCVFYGDYYGIPKYNIPGLKSKIDPLLIARRDYAYGTQRDYIDHQDIIGWTREGIDTKPNSGLAALITDGPGGSKWMYVGKKHAGKVFYDLTGNRSDTVTINADGWGEFKVNGGSVSIWVAKTSNVTFTVNNATTTSGQNVYVVANIPELGNW

SEQ ID NO: 24632 - protein, 513 aa, Bacillus sp. TS-23
APINETMMQYFEWDLPNDGTLWTKVKNEAANLSSLGITALWLPPAYKGTSQSDVGYGVYDLYDLGEFNQKGTIRTKYGTKTQYIRAIQAAKAAGMQVYADVVFNHKAGADGTEFVDAVEVDPSNRNQETSGTYQIQAWTKFDFPGRGNTYSSFKWRWYHFDGTDWDESRKLNRIYKFRSTGKAWDWEVDTENGNYDYLMFADLDMDHPEVVTELKNWGTWYVNTTNIDGFRLDAVKHIKYSFFPDWLTYVRNQTGKNLFAVGEFWSYDVNKLHNYITKTNGSMSLFDAPLHNNFYTASKSSGYFDMRYLLNNTLMKDQPSLAVTLVDNHDTQPGQSLQSWVEPWFKPLAYAFILTRQEGYPCVFYGDYYGIPKYNIPGLKSKIDPLLIARRDYAYGTQRDYIDHQDIIGWTREGIDTKPNSGLAALITDGPGGSKWMYVGKKHAGKVFYDLTGNRSDTVTINADGWGEFKVNGGSVSIWVAKTSNVTFTVNNATTTSGQNVYVVANIPELGNW

SEQ ID NO: 24633 - protein, 511 aa, Bacillus sp. TS-23
APINETMMQYFEWDLPNDGTLWTKVKNEAANLSSLGITALWLPPAYKGTSQSDVGYGVYDLYDLGEFNQKGTIRTKYGTKTQYIQAIQAAKAAGMQVYADVVFNHKAGADGTEFVDAVEVDPSNRNQETSGTYQIQAWTKFDFPGRGNTYSSFKWRWYHFDGTDWDESRKLNRIYKFRTKAWDWEVDTENGNYDYLMFADLDMDHPEVVTELKNWGTWYVNTTNIDGFRLDAVKHIKYSFFPDWLTYVRNQTGKNLFAVGEFWSYDVNKLHNYITKTNGSMSLFDAPLHNNFYTASKSSGYFDMRYLLNNTLMKDQPSLAVTLVDNHDTQPGQSLQSWVEPWFKPLAYAFILTRQEGYPCVFYGDYYGIPKYNIPGLKSKIDPLLIARRDYAYGTQRDYIDHQDIIGWTREGIDTKPNSGLAALITDGPGGSKWMYVGKKHAGKVFYDLTGNRSDTVTINADGWGEFKVNGGSVSIWVAKTSNVTFTVNNATTTSGQNVYVVANIPELGNW

SEQ ID NO: 24634 - protein, 512 aa, Bacillus sp. TS-23
APINETMMQYFEWDLPNDGTLWTKVKNEAANLSSLGITALWLPPAYKGTSQSDVGYGVYDLYDLGEFNQKGTIRTKYGTKTQYIQAIQAAKAAGMQVYADVVFNHKAGADGTEFVDAVEVDPSNRNQETSGTYQIQAWTKFDFPGRGNTYSSFKWRWYHFDGTDWDEQSRKLNRIYKFTGKAWDWEVDTENGNYDYLMFADLDMDHPEVVTELKNWGTWYVNTTNIDGFRLDAVKHIKYSFFPDWLTYVRNQTGKNLFAVGEFWSYDVNKLHNYITKTNGSMSLFDAPLHNNFYTASKSSGYFDMRYLLNNTLMKDQPSLAVTLVDNHDTQPGQSLQSWVEPWFKPLAYAFILTRQEGYPCVFYGDYYGIPKYNIPGLKSKIDPLLIARRDYAYGTQRDYIDHQDIIGWTREGIDTKPNSGLAALITDGPGGSKWMYVGKKHAGKVFYDLTGNRSDTVTINADGWGEFKVNGGSVSIWVAKTSNVTFTVNNATTTSGQNVYVVANIPELGNW

SEQ ID NO: 24635 - protein, 512 aa, Bacillus sp. TS-23
APINETMMQYFEWDLPNDGTLWTKVKNEAANLSSLGITALWLPPAYKGTSQSDVGYGVYDLYDLGEFNQKGTIRTKYGTKTQYIQAIQAAKAAGMQVYADVVFNHKAGADGTEFVDAVEVDPSNRNQETSGTYQIQAWTKFDFPGRGNTYSSFKWRWYHFDGTDWDEQSRKLNRIYKFRSKAWDWEVDTENGNYDYLMFADLDMDHPEVVTELKNWGTWYVNTTNIDGFRLDAVKHIKYSFFPDWLTYVRNQTGKNLFAVGEFWSYDVNKLHNYITKTNGSMSLFDAPLHNNFYTASKSSGYFDMRYLLNNTLMKDQPSLAVTLVDNHDTQPGQSLQSWVEPWFKPLAYAFILTRQEGYPCVFYGDYYGIPKYNIPGLKSKIDPLLIARRDYAYGTQRDYIDHQDIIGWTREGIDTKPNSGLAALITDGPGGSKWMYVGKKHAGKVFYDLTGNRSDTVTINADGWGEFKVNGGSVSIWVAKTSNVTFTVNNATTTSGQNVYVVANIPELGNW

SEQ ID NO: 24636 - protein, 511 aa, Bacillus sp. TS-23
APINETMMQYFEWDLPNDGTLWTKVKNEAANLSSLGITALWLPPAYKGTSQSDVGYGVYDLYDLGEFNQKGTIRTKYGTKTQYIQAIQAAKAAGMQVYADVVFNHKAGADGTEFVDAVEVDPSNRNQETSGTYQIQAWTKFDFPGRGNTYSSFKWRWYHFDGTDWDESRKLNRIYKFRGKAWDWEVDTENGNYDYLMFADFDMDHPEVVTELKNWGTWYVNTTNIDGFRLDAVKHIKYSFFPDWLTYVRNQTGKNLFAVGEFWSYDVNKLHNYITKTNGSMSLFDAPLHNNFYTASKSSGYFDMRYLLNNTLMKDQPSLAVTLVDNHDTQPGQSLQSWVEPWFKPLAYAFILTRQEGYPCVFYGDYYGIPKYNIPGLKSKIDPLLIARRDYAYGTQRDYIDHQDIIGWTREGIDTKPNSGLAALITDGPGGSKWMYVGKKHAGKVFYDLTGNRSDTVTINADGWGEFKVNGGSVSIWVAKTSNVTFTVNNATTTSGQNVYVVANIPELGNW

SEQ ID NO: 24637 - protein, 512 aa, Bacillus sp. TS-23
APINETMMQYFEWDLPNDGTLWTKVKNEAANLSSLGITALWLPPAYKGTSQSDVGYGVYDLYDLGEFNQKGTIRTKYGTKTQYIQAIQAAKAAGMQVYADVVFNHKAGADGTEFVDAVEVDPSNRNQETSGTYQIQAWTKFDFPGRGNTYSSFKWRWYHFDGTDWDESRKLNARIYKFTGKAWDWEVDTENGNYDYLMFADLDMDHPEVVTELKNWGTWYVNTTNIDGFRLDAVKHIKYSFFPDWLTYVRNQTGKNLFAVGEFWSYDVNKLHNYITKTNGSMSLFDAPLHNNFYTASKSSGYFDMRYLLNNTLMKDQPSLAVTLVDNHDTQPGQSLQSWVEPWFKPLAYAFILTRQEGYPCVFYGDYYGIPKYNIPGLKSKIDPLLIARRDYAYGTQRDYIDHQDIIGWTREGIDTKPNSGLAALITDGPGGSKWMYVGKKHAGKVFYDLTGNRSDTVTINADGWGEFKVNGGSVSIWVAKTSNVTFTVNNATTTSGQNVYVVANIPELGNW

SEQ ID NO: 24638 - protein, 513 aa, Bacillus sp. TS-23
APINETMMQYFEWDLPNDGTLWTKVKNEAANLSSLGITALWLPPAYKGTSQSDVGYGVYDLYDLGEFNQKGTIRTKYGTKTQYIQAIQAAKAAGMQVYADVVFNHKAGADGTEFVDAVEVDPSNRNQETSGTYQIQAWTKFDFPGRGNTYSSFKWRWYHFDGTDWDESRKLNRIYKFRSTGKAWDWEVDTENGNYDYLLFADLDMDHPEVVTELKNWGTWYVNTTNIDGFRLDAVKHIKYSFFPDWLTYVRNQTGKNLFAVGEFWSYDVNKLHNYITKTNGSMSLFDAPLHNNFYTASKSSGYFDMRYLLNNTLMKDQPSLAVTLVDNHDTQPGQSLQSWVEPWFKPLAYAFILTRQEGYPCVFYGDYYGIPKYNIPGLKSKIDPLLIARRDYAYGTQRDYIDHQDIIGWTREGIDTKPNSGLAALITDGPGGSKWMYVGKKHAGKVFYDLTGNRSDTVTINADGWGEFKVNGGSVSIWVAKTSNVTFTVNNATTTSGQNVYVVANIPELGNW

SEQ ID NO: 24639 - protein, 513 aa, Bacillus sp. TS-23
APINETMMQYFEWDLPNDGTLWTKVKNEAANLSSLGITALWLPPAYKGTSQSDVGYGVYDLYDLGEFNQKGTIRTKYGTKTQYIRAIQAAKAAGMQVYADVVFNHKAGADGTEFVDAVEVDPSNRNQETSGTYQIQAWTKFDFPGRGNTYSSFKWRWYHFDGTDWDESRKLNRIYKFRSTGKAWDWEVDTENGNYDYLMFADLDMDHPEVVTELKNWGTWYVNTTNIDGFRLDAVKHIKYSFFPDWLTYVRNQTGKNLFAVGEFWSYDVNKLHNYITKTRGSMSLFDAPLHNNFYTASKSSGYFDMRYLLNNTLMKDQPSLAVTLVDNHDTQPGQSLQSWVEPWFKPLAYAFILTRQEGYPCVFYGDYYGIPKYNIPGLKSKIDPLLIARRDYAYGTQRDYIDHQDIIGWTREGIDTKPNSGLAALITDGPGGSKWMYVGKKHAGKVFYDLTGNRSDTVTINADGWGEFKVNGGSVSIWVAKTSNVTFTVNNATTTSGQNVYVVANIPELGNW

SEQ ID NO: 24640 - protein, 513 aa, Bacillus sp.
APVNGTMMQYFEWDLPNDGTLWTKVKNEASSLSSLGITALWLPPAYKGTSQGDVGYGVYDLYDLGEFNQKGTIRTKYGTKTQYLQAIQAAKSAGMQVYADVVFNHKAGADSTEWVDAVEVNPSNRNQETSGTYQIQAWTKFDFPGRGNTYSSFKWRWYHFDGTDWDESRKLNRIYKFRGTGKAWDWEVDTENGNYDYLMFADLDMDHPEVVTELKNWGTWYVNTTNVDGFRLDAVKHIKYSFFPDWLTHVRSQTRKNLFAVGEFWSYDVNKLHNYITKTSGTMSLFDAPLHNNFYTASKSSGYFDMRYLLNNTLMKDQPSLAVTLVDNHDTQPGQSLQSWVEPWFKPLAYAFILTRQEGYPCVFYGDYYGIPKYNIPGLKSKIDPLLIARRDYAYGTQRDYIDHQDIIGWTREGIDSKPNSGLAALITDGPGGSKWMYVGKKHAGKVFYDLTGNRSDTVTINADGWGEFKVNGGSVSIWVAKTSQVTFTVNNATTISGQNVYVVGNIPELGNW

SEQ ID NO: 24641 - protein, 513 aa, Bacillus sp. TS-23
APINETMMQYFEWDLPNDGTLWTKVKNEAANLSSLGITALWLPPAYKGTSQSDVGYGVYDLYDLGEFNQKGTIRTKYGTKTQYIQAIQAAKAAGMQVYADVVFNHKAGADGTEFVDAVEVDPSNRNQETSGTYQIQAWTKFDFPGRGNTYSSFKWRWYHFDGTDWDESRKLNRIYKFRSTGKAWDWEVDTENGNYDYLMFADLDMDHPEVVTELKNWGTWYVETTNIDGFRLDAVKHIKYSFFPDWLTYVRNQTGKNLFAVGEFWSYDVNKLHNYITKTNGSMSLFDAPLHNNFYTASKSSGYFDMRYLLNNTLMKDQPSLAVTLVDNHDTQPGQSLQSWVEPWFKPLAYAFILTRQEGYPCVFYGDYYGIPKYNIPGLKSKIDPLLIARRDYAYGTQRDYIDHQDIIGWTREGIDTKPNSGLAALITDGPGGSKWMYVGKKHAGKVFYDLTGNRSDTVTINADGWGEFKVNGGSVSIWVAKTSNVTFTVNNATTTSGQNVYVVANIPELGNW

SEQ ID NO: 24642 - protein, 511 aa, Bacillus sp. TS-23
APINETMMQYFEWDLPNDGTLWTKVKNEAANLSSLGITALWLPPAYKGTSQSDVGYGVYDLYDLGEFNQKGTIRTKYGTKTQYIQAIQAAKAAGMQVYADVVFNHKAGADGTEFVDAVEVDPSNRNQETSGTYQIQAWTKFDFPGRGNTYSSFKWRWYHFDGTDWDESRKLNRIYKFTGKAWDWEVDTENGNYDYLMFADLDMDHPEVVTELKNWGTWYVNTTNIDGFRLDAVKHIKYSFFPDWLTYVRNQTGKNLFAVGEFWSYDVNKLHNYITKTNGSMSLFDAPLHNNFYTASKSSGYFDMRYLLNNTLMKDQPSLAVTLVDNHDTQPGQSLQSWVEPWFKPLAYAFILTRQEGYPCVFYGDYYGIPKYNIPGLKSKIDPLLIARRDYAYGTQRDYIDHQDIIGWTREGIDTKPNSGLAALITDGPGGSKWMYVGKKHAGKVFYDLTGNRSDTVTINADGWGEFKVNGGSVSIWVAKTSNVTFTVNNATTTSGQNVYVVANIPELGNW

SEQ ID NO: 24643 - protein, 512 aa, Bacillus sp. TS-23
APINETMMQYFEWDLPNDGTLWTKVKNEAANLSSLGITALWLPPAYKGTSQSDVGYGVYDLYDLGEFNQKGTIRTKYGTKTQYIQAIQAAKAAGMQVYADVVFNHKAGADGTEFVDAVEVDPSNRNQETSGTYQIQAWTKFDFPGRGNTYSSFKWRWYHFDGTDWDESRKLNARIYKFSGKAWDWEVDTENGNYDYLMFADLDMDHPEVVTELKNWGTWYVNTTNIDGFRLDAVKHIKYSFFPDWLTYVRNQTGKNLFAVGEFWSYDVNKLHNYITKTNGSMSLFDAPLHNNFYTASKSSGYFDMRYLLNNTLMKDQPSLAVTLVDNHDTQPGQSLQSWVEPWFKPLAYAFILTRQEGYPCVFYGDYYGIPKYNIPGLKSKIDPLLIARRDYAYGTQRDYIDHQDIIGWTREGIDTKPNSGLAALITDGPGGSKWMYVGKKHAGKVFYDLTGNRSDTVTINADGWGEFKVNGGSVSIWVAKTSNVTFTVNNATTTSGQNVYVVANIPELGNW

SEQ ID NO: 24644 - protein, 512 aa, Bacillus sp. TS-23
APINETMMQYFEWDLPNDGTLWTKVKNEAANLSSLGITALWLPPAYKGTSQSDVGYGVYDLYDLGEFNQKGTIRTKYGTKTQYIQAIQAAKAAGMQVYADVVFNHKAGADGTEFVDAVEVDPSNRNQETSGTYQIQAWTKFDFPGRGNTYSSFKWRWYHFDGTDWDEQSRKLNRIYKFSGKAWDWEVDTENGNYDYLMFADLDMDHPEVVTELKNWGTWYVNTTNIDGFRLDAVKHIKYSFFPDWLTYVRNQTGKNLFAVGEFWSYDVNKLHNYITKTNGSMSLFDAPLHNNFYTASKSSGYFDMRYLLNNTLMKDQPSLAVTLVDNHDTQPGQSLQSWVEPWFKPLAYAFILTRQEGYPCVFYGDYYGIPKYNIPGLKSKIDPLLIARRDYAYGTQRDYIDHQDIIGWTREGIDTKPNSGLAALITDGPGGSKWMYVGKKHAGKVFYDLTGNRSDTVTINADGWGEFKVNGGSVSIWVAKTSNVTFTVNNATTTSGQNVYVVANIPELGNW

SEQ ID NO: 24645 - protein, 513 aa, Bacillus sp. TS-23
APINETMMQYFEWDLPNDGTLWTKVKNEAANLSSLGITALWLPPAYKGTSQSDVGYGVYDLYDLGEFNQKGTIRTKYGTKTQYIQAIQAAKAAGMRVYADVVFNHKAGADGTEFVDAVEVDPSNRNQETSGTYQIQAWTKFDFPGRGNTYSSFKWRWYHFDGTDWDESRKLNRIYKFRSTGKAWDWEVDTENGNYDYLMFADLDMDHPEVVTELKNWGTWYVNTTNIDGFRLDAVKHIKYSFFPDWLTYVRNQTGKNLFAVGEFWSYDVNKLHNYITKTNGSMSLFDAPLHNNFYTASKSSGYFDMRYLLNNTLMKDQPSLAVTLVDNHDTQPGQSLQSWVEPWFKPLAYAFILTRQEGYPCVFYGDYYGIPKYNIPGLKSKIDPLLIARRDYAYGTQRDYIDHQDIIGWTREGIDTKPNSGLAALITDGPGGSKWMYVGKKHAGKVFYDLTGNRSDTVTINADGWGEFKVNGGSVSIWVAKTSNVTFTVNNATTTSGQNVYVVANIPELGNW

SEQ ID NO: 24646 - protein, 512 aa, Bacillus sp. TS-23
APINETMMQYFEWDLPNDGTLWTKVKNEAANLSSLGITALWLPPAYKGTSQSDVGYGVYDLYDLGEFNQKGTIRTKYGTKTQYIQAIQAAKAAGMQVYADVVFNHKAGADGTEFVDAVEVDPSNRNQETSGTYQIQAWTKFDFPGRGNTYSSFKWRWYHFDGTDWDESRKLNNRIYKFRSKAWDWEVDTENGNYDYLMFADLDMDHPEVVTELKNWGTWYVNTTNIDGFRLDAVKHIKYSFFPDWLTYVRNQTGKNLFAVGEFWSYDVNKLHNYITKTNGSMSLFDAPLHNNFYTASKSSGYFDMRYLLNNTLMKDQPSLAVTLVDNHDTQPGQSLQSWVEPWFKPLAYAFILTRQEGYPCVFYGDYYGIPKYNIPGLKSKIDPLLIARRDYAYGTQRDYIDHQDIIGWTREGIDTKPNSGLAALITDGPGGSKWMYVGKKHAGKVFYDLTGNRSDTVTINADGWGEFKVNGGSVSIWVAKTSNVTFTVNNATTTSGQNVYVVANIPELGNW

SEQ ID NO: 24647 - protein, 511 aa, Bacillus sp. TS-23
APINETMMQYFEWDLPNDGTLWTKVKNEAANLSSLGITALWLPPAYKGTSQSDVGYGVYDLYDLGEFNQKGTIRTKYGTKTQYIQAIQAAKAAGMQVYADVVFNHKAGADGTEFVDAVEVDPSNRNQETSGTYQIQAWTKFDFPGRGNTYSSFKWRWYHFDGTDWDESRKLNRIYKFSGKAWDWEVDTENGNYDYLMFADLDMDHPEVVTELKNWGTWYVNTTNIDGFRLDAVKHIKYSFFPDWLTYVRNQTGKNLFAVGEFWSYDVNKLHNYITKTNGSMSLFDAPLHNNFYTASKSSGYFDMRYLLNNTLMKDQPSLAVTLVDNHDTQPGQSLQSWVEPWFKPLAYAFILTRQEGYPCVFYGDYYGIPKYNIPGLKSKIDPLLIARRDYAYGTQRDYIDHQDIIGWTREGIDTKPNSGLAALITDGPGGSKWMYVGKKHAGKVFYDLTGNRSDTVTINADGWGEFKVNGGSVSIWVAKTSNVTFTVNNATTTSGQNVYVVANIPELGNW

SEQ ID NO: 24648 - protein, 513 aa, Bacillus sp. TS-23
APINETMMQYFEWDLPNDGTLWTKVKNEAANLSSLGITALWLPPAYKGTSQSDVGYGVYDLYDLGEFNQKGTIRTKYGTKTQYIQAIQAAKAAGMQVYADVVFNHKAGADGTEFVDAVEVDPSNRNQETSGTYQIQAWTKFDFPGRGNTYSSFKWRWYHFDGTDWDESRKLNRIYKFRSTGKAWDWEVDTENGNYDYLMFADLDMDHPEVVTELKNWGTWYVNTTNIDGFRLDAVKHIKYQFFPDWLTYVRNQTGKNLFAVGEFWSYDVNKLHNYITKTNGSMSLFDAPLHNNFYTASKSSGYFDMRYLLNNTLMKDQPSLAVTLVDNHDTQPGQSLQSWVEPWFKPLAYAFILTRQEGYPCVFYGDYYGIPKYNIPGLKSKIDPLLIARRDYAYGTQRDYIDHQDIIGWTREGIDTKPNSGLAALITDGPGGSKWMYVGKKHAGKVFYDLTGNRSDTVTINADGWGEFKVNGGSVSIWVAKTSNVTFTVNNATTTSGQNVYVVANIPELGNW

SEQ ID NO: 24649 - protein, 511 aa, Bacillus sp. TS-23
APINETMMQYFEWDLPNDGTLWTKVKNEAANLSSLGITALWLPPAYKGTSQSDVGYGVYDLYDLGEFNQKGTIRTKYGTKTQYIQAIQAAKAAGMQVYADVVFNHKAGADGTEFVDAVEVDPSNRNQETSGTYQIQAWTKFDFPGRGNTYSSFKWRWYHFDGTDWDESRKLNRIYKFRSKAWDWEVDTENGNYDYLMFADLDMDHPEVVTELKNWGTWYVNTTNIDGFRLDAVKHIKYSFFPDWLTYVRNQTGKNLFAVGEFWSYDVNKLHNYITKTNGSMSLFDAPLHNNFYTASKSSGYFDMRYLLNNTLMKDQPSLAVTLVDNHDTQPGQSLQSWVEPWFKPLAYAFILTRQEGYPCVFYGDYYGIPKYNIPGLKSKIDPLLIARRDYAYGTQRDYIDHQDIIGWTREGIDTKPNSGLAALITDGPGGSKWMYVGKKHAGKVFYDLTGNRSDTVTINADGWGEFKVNGGSVSIWVAKTSNVTFTVNNATTTSGQNVYVVANIPELGNW

SEQ ID NO: 24650 - protein, 513 aa, Bacillus sp. TS-23
APINETMMQYFEWDLPNDGTLWTKVKNEAANLSSLGITALWLPPAYKGTSQSDVGYGVYDLYDLGEFNQKGTIRTKYGTKTQYIEAIQAAKAAGMQVYADVVFNHKAGADGTEFVDAVEVDPSNRNQETSGTYQIQAWTKFDFPGRGNTYSSFKWRWYHFDGTDWDESRKLNRIYKFRSTGKAWDWEVDTENGNYDYLMFADLDMDHPEVVTELKNWGTWYVNTTNIDGFRLDAVKHIKYSFFPDWLTYVRNQTGKNLFAVGEFWSYDVNKLHNYITKTNGSMSLFDAPLHNNFYTASKSSGYFDMRYLLNNTLMKDQPSLAVTLVDNHDTQPGQSLQSWVEPWFKPLAYAFILTRQEGYPCVFYGDYYGIPKYNIPGLKSKIDPLLIARRDYAYGTQRDYIDHQDIIGWTREGIDTKPNSGLAALITDGPGGSKWMYVGKKHAGKVFYDLTGNRSDTVTINADGWGEFKVNGGSVSIWVAKTSNVTFTVNNATTTSGQNVYVVANIPELGNW

SEQ ID NO: 24651 - protein, 512 aa, Bacillus sp. TS-23
APINETMMQYFEWDLPNDGTLWTKVKNEAANLSSLGITALWLPPAYKGTSQSDVGYGVYDLYDLGEFNQKGTIRTKYGTKTQYIQAIQAAKAAGMQVYADVVFNHKAGADGTEFVDAVEVDPSNRNQETSGTYQIQAWTKFDFPGRGNTYSSFKWRWYHFDGTDWDESRKLNNRIYKFSGKAWDWEVDTENGNYDYLMFADLDMDHPEVVTELKNWGTWYVNTTNIDGFRLDAVKHIKYSFFPDWLTYVRNQTGKNLFAVGEFWSYDVNKLHNYITKTNGSMSLFDAPLHNNFYTASKSSGYFDMRYLLNNTLMKDQPSLAVTLVDNHDTQPGQSLQSWVEPWFKPLAYAFILTRQEGYPCVFYGDYYGIPKYNIPGLKSKIDPLLIARRDYAYGTQRDYIDHQDIIGWTREGIDTKPNSGLAALITDGPGGSKWMYVGKKHAGKVFYDLTGNRSDTVTINADGWGEFKVNGGSVSIWVAKTSNVTFTVNNATTTSGQNVYVVANIPELGNW

SEQ ID NO: 24652 - protein, 513 aa, Bacillus sp. TS-23
APINETMMQYFEWDLPNDGTLWTKVKNEAANLSSLGITALWLPPAYKGTSQSDVGYGVYDLYDLGEFNQKGTIRTKYGTKTQYIQAIQAAKAAGMQVYADVVFNHKAGADGTEFVDAVEVDPSNRNQETSGTYQIQAWTKFDFPGRGNTYSSFKWRWYHFDGTDWDESRKLNRIYKFRSTGKAWDWEVDTENGNYDYLMFADLDMDHPEVVTELKNWGTWYVNTTNIDGFRLDAVKHIKYSFFPDWLTYVRNQTGKNLFAVGEFWSYDVEKLHNYITKTEGSMSLFDAPLHNNFYTASKSSGYFDMRYLLNNTLMKDQPSLAVTLVDNHDTQPGQSLQSWVEPWFKPLAYAFILTRQEGYPCVFYGDYYGIPKYNIPGLKSKIDPLLIARRDYAYGTQRDYIDHQDIIGWTREGIDTKPNSGLAALITDGPGGSKWMYVGKKHAGKVFYDLTGNRSDTVTINADGWGEFKVNGGSVSIWVAKTSNVTFTVNNATTTSGQNVYVVANIPELGNW

SEQ ID NO: 24653 - protein, 512 aa, Bacillus sp. TS-23
APINETMMQYFEWDLPNDGTLWTKVKNEAANLSSLGITALWLPPAYKGTSQSDVGYGVYDLYDLGEFNQKGTIRTKYGTKTQYIQAIQAAKAAGMQVYADVVFNHKAGADGTEFVDAVEVDPSNRNQETSGTYQIQAWTKFDFPGRGNTYSSFKWRWYHFDGTDWDESRKLNLRIYKFRSKAWDWEVDTENGNYDYLMFADLDMDHPEVVTELKNWGTWYVNTTNIDGFRLDAVKHIKYSFFPDWLTYVRNQTGKNLFAVGEFWSYDVNKLHNYITKTNGSMSLFDAPLHNNFYTASKSSGYFDMRYLLNNTLMKDQPSLAVTLVDNHDTQPGQSLQSWVEPWFKPLAYAFILTRQEGYPCVFYGDYYGIPKYNIPGLKSKIDPLLIARRDYAYGTQRDYIDHQDIIGWTREGIDTKPNSGLAALITDGPGGSKWMYVGKKHAGKVFYDLTGNRSDTVTINADGWGEFKVNGGSVSIWVAKTSNVTFTVNNATTTSGQNVYVVANIPELGNW

SEQ ID NO: 24654 - protein, 513 aa, Bacillus sp. TS-23
APINETMMQYFEWDLPNDGTLWTKVKNEAANLSSLGITALWLPPAYKGTSQSDVGYGVYDLYDLGEFNQKGTIRTKYGTKTQYIQAIQAAKAAGMQVYADVVFNHKAGADGTEFVDAVEVDPSNRNQETSGTYQIQAWTKFDFPGRGNTYSSFKWRWYHFDGTDWDESRKLNRIYKFRSTGKAWDWEVDTENGNYDYLMFADLDMDHPEVVTELKNWGTWYVNTTNIDGFRLDAVKHIKYSFFPDWLTYVRNQTGKNLFAVGEFWSYDVNKLHNYITKTNGSMSLFDAPLHNNFYTASKSSGYFDMRYLLNNTLMKDRPSLAVTLVDNHDTQPGQSLQSWVEPWFKPLAYAFILTRQEGYPCVFYGDYYGIPKYNIPGLKSKIDPLLIARRDYAYGTQRDYIDHQDIIGWTREGIDTKPNSGLAALITDGPGGSKWMYVGKKHAGKVFYDLTGNRSDTVTINADGWGEFKVNGGSVSIWVAKTSNVTFTVNNATTTSGQNVYVVANIPELGNW

SEQ ID NO: 24655 - protein, 512 aa, Bacillus sp. TS-23
APINETMMQYFEWDLPNDGTLWTKVKNEAANLSSLGITALWLPPAYKGTSQSDVGYGVYDLYDLGEFNQKGTIRTKYGTKTQYIQAIQAAKAAGMQVYADVVFNHKAGADGTEFVDAVEVDPSNRNQETSGTYQIQAWTKFDFPGRGNTYSSFKWRWYHFDGTDWDESRKLNLRIYKFTGKAWDWEVDTENGNYDYLMFADLDMDHPEVVTELKNWGTWYVNTTNIDGFRLDAVKHIKYSFFPDWLTYVRNQTGKNLFAVGEFWSYDVNKLHNYITKTNGSMSLFDAPLHNNFYTASKSSGYFDMRYLLNNTLMKDQPSLAVTLVDNHDTQPGQSLQSWVEPWFKPLAYAFILTRQEGYPCVFYGDYYGIPKYNIPGLKSKIDPLLIARRDYAYGTQRDYIDHQDIIGWTREGIDTKPNSGLAALITDGPGGSKWMYVGKKHAGKVFYDLTGNRSDTVTINADGWGEFKVNGGSVSIWVAKTSNVTFTVNNATTTSGQNVYVVANIPELGNW

SEQ ID NO: 24656 - protein, 512 aa, Bacillus sp. TS-23
APINETMMQYFEWDLPNDGTLWTKVKNEAANLSSLGITALWLPPAYKGTSQSDVGYGVYDLYDLGEFNQKGTIRTKYGTKTQYIQAIQAAKAAGMQVYADVVFNHKAGADGTEFVDAVEVDPSNRNQETSGTYQIQAWTKFDFPGRGNTYSSFKWRWYHFDGTDWDESRKLNQRIYKFSGKAWDWEVDTENGNYDYLMFADLDMDHPEVVTELKNWGTWYVNTTNIDGFRLDAVKHIKYSFFPDWLTYVRNQTGKNLFAVGEFWSYDVNKLHNYITKTNGSMSLFDAPLHNNFYTASKSSGYFDMRYLLNNTLMKDQPSLAVTLVDNHDTQPGQSLQSWVEPWFKPLAYAFILTRQEGYPCVFYGDYYGIPKYNIPGLKSKIDPLLIARRDYAYGTQRDYIDHQDIIGWTREGIDTKPNSGLAALITDGPGGSKWMYVGKKHAGKVFYDLTGNRSDTVTINADGWGEFKVNGGSVSIWVAKTSNVTFTVNNATTTSGQNVYVVANIPELGNW

SEQ ID NO: 24657 - protein, 513 aa, Bacillus sp. TS-23
APINETMMQYFEWDLPNDGTLWTKVKNEAANLSSLGITALWLPPAYKGTSQSDVGYGVYDLYDLGEFNQKGTIRTKYGTKTQYIQAIQAAKAAGMQVYADVVFNHKAGADGTEFVDAVEVDPSNRNQETSGTYQIQAWTKFDFPGRGNTYSSFKWRWYHFDGTDWDESRKLNRIYKFRSTGKAWDWEVDTENGNYDYLMFADLDMDHPEVVTELKNWGTWYVNTTNIDGFRLDAVKHIKYSFFPDWLTYVRNQTGKNLFAVGEFWSYDVEKLHNYITKTRGSMSLFDAPLHNNFYTASKSSGYFDMRYLLNNTLMKDQPSLAVTLVDNHDTQPGQSLQSWVEPWFKPLAYAFILTRQEGYPCVFYGDYYGIPKYNIPGLKSKIDPLLIARRDYAYGTQRDYIDHQDIIGWTREGIDTKPNSGLAALITDGPGGSKWMYVGKKHAGKVFYDLTGNRSDTVTINADGWGEFKVNGGSVSIWVAKTSNVTFTVNNATTTSGQNVYVVANIPELGNW

SEQ ID NO: 24658 - protein, 511 aa, Bacillus sp. TS-23
APINETMMQYFEWDLPNDGTLWTKVKNEAANLSSLGITALWLPPAYKGTSQSDVGYGVYDLYDLGEFNQKGTIRTKYGTKTQYIQAIQAAKAAGMQVYADVVFNHKAGADGTEFVDAVEVDPSNRNQETSGTYQIQAWTKFDFPGRGNTYSSFKWRWYHFDGTDWDESRKLNRIYKFRGKAWDWEVDTENGNYDYLMFADLDMDHPEVVTELKNWGTWYVNTTNIDGFRLDAVKHIKYSFFPDWLTYVRNQTGKNLFAVGEFWSYDVNKLHNYITKTNGSMSLFDAPLHNNFYTASKSSGYFDMQYLLNNTLMKDQPSLAVTLVDNHDTQPGQSLQSWVEPWFKPLAYAFILTRQEGYPCVFYGDYYGIPKYNIPGLKSKIDPLLIARRDYAYGTQRDYIDHQDIIGWTREGIDTKPNSGLAALITDGPGGSKWMYVGKKHAGKVFYDLTGNRSDTVTINADGWGEFKVNGGSVSIWVAKTSNVTFTVNNATTTSGQNVYVVANIPELGNW

SEQ ID NO: 24659 - protein, 512 aa, Bacillus sp. TS-23
APINETMMQYFEWDLPNDGTLWTKVKNEAANLSSLGITALWLPPAYKGTSQSDVGYGVYDLYDLGEFNQKGTIRTKYGTKTQYIQAIQAAKAAGMQVYADVVFNHKAGADGTEFVDAVEVDPSNRNQETSGTYQIQAWTKFDFPGRGNTYSSFKWRWYHFDGTDWDESRKLNQRIYKFTGKAWDWEVDTENGNYDYLMFADLDMDHPEVVTELKNWGTWYVNTTNIDGFRLDAVKHIKYSFFPDWLTYVRNQTGKNLFAVGEFWSYDVNKLHNYITKTNGSMSLFDAPLHNNFYTASKSSGYFDMRYLLNNTLMKDQPSLAVTLVDNHDTQPGQSLQSWVEPWFKPLAYAFILTRQEGYPCVFYGDYYGIPKYNIPGLKSKIDPLLIARRDYAYGTQRDYIDHQDIIGWTREGIDTKPNSGLAALITDGPGGSKWMYVGKKHAGKVFYDLTGNRSDTVTINADGWGEFKVNGGSVSIWVAKTSNVTFTVNNATTTSGQNVYVVANIPELGNW

SEQ ID NO: 24660 - protein, 513 aa, Bacillus sp. TS-23
APINETMMQYFEWDLPNDGTLWTKVKNEAANLSSLGITALWLPPAYKGTSQSDVGYGVYDLYDLGEFNQKGTIRTKYGTKTQYIEAIQAAKAAGMQVYADVVFNHKAGADGTEFVDAVEVDPSNRNQETSGTYQIQAWTKFDFPGRGNTYSSFKWRWYHFDGTDWDESRKLNRIYKFRSTGKAWDWEVDTENGNYDYLMFADLDMDHPEVVTELKNWGTWYVNTTNIDGFRLDAVKHIKYSFFPDWLTYVRNQTGKNLFAVGEFWSYDVNKLHNYITKTEGSMSLFDAPLHNNFYTASKSSGYFDMRYLLNNTLMKDQPSLAVTLVDNHDTQPGQSLQSWVEPWFKPLAYAFILTRQEGYPCVFYGDYYGIPKYNIPGLKSKIDPLLIARRDYAYGTQRDYIDHQDIIGWTREGIDTKPNSGLAALITDGPGGSKWMYVGKKHAGKVFYDLTGNRSDTVTINADGWGEFKVNGGSVSIWVAKTSNVTFTVNNATTTSGQNVYVVANIPELGNW

SEQ ID NO: 24661 - protein, 513 aa, Bacillus sp. TS-23
APINETMMQYFEWDLPNDGTLWTKVKNEAANLSSLGITALWLPPAYKGTSQSDVGYGVYDLYDLGEFNQKGTIRTKYGTKTQYIEAIQAAKAAGMQVYADVVFNHKAGADGTEFVDAVEVDPSNRNQETSGTYQIQAWTKFDFPGRGNTYSSFKWRWYHFDGTDWDESRKLNRIYKFRSTGKAWDWEVDTENGNYDYLMFADLDMDHPEVVTELKNWGTWYVNTTNIDGFRLDAVKHIKYSFFPDWLTYVRNQTGKNLFAVGEFWSYDVNKLHNYITKTRGSMSLFDAPLHNNFYTASKSSGYFDMRYLLNNTLMKDQPSLAVTLVDNHDTQPGQSLQSWVEPWFKPLAYAFILTRQEGYPCVFYGDYYGIPKYNIPGLKSKIDPLLIARRDYAYGTQRDYIDHQDIIGWTREGIDTKPNSGLAALITDGPGGSKWMYVGKKHAGKVFYDLTGNRSDTVTINADGWGEFKVNGGSVSIWVAKTSNVTFTVNNATTTSGQNVYVVANIPELGNW

SEQ ID NO: 24662 - protein, 513 aa, Bacillus sp. TS-23
APINETMMQYFEWDLPNDGTLWTKVKNEAANLSSLGITALWLPPAYKGTSQSDVGYGVYDLYDLGEFNQKGTIRTKYGTKTQYIQAIQAAKAAGMQVYADVVFNHKAGADGTEFVDAVEVDPSNRNQETSGTYQIQAWTKFDFPGRGNTYSSFKWRWYHFDGTDWDESRKLNRIYKFRSTGKAWDWEVDTENGNYDYLMFADLDMDHPEVVTELKNWGTWYVNTTNIDGFRLDAVKHIKYSFFPDWLTYVRNQTGKNLFAVGEFWSYDVRKLHNYITKTEGSMSLFDAPLHNNFYTASKSSGYFDMRYLLNNTLMKDQPSLAVTLVDNHDTQPGQSLQSWVEPWFKPLAYAFILTRQEGYPCVFYGDYYGIPKYNIPGLKSKIDPLLIARRDYAYGTQRDYIDHQDIIGWTREGIDTKPNSGLAALITDGPGGSKWMYVGKKHAGKVFYDLTGNRSDTVTINADGWGEFKVNGGSVSIWVAKTSNVTFTVNNATTTSGQNVYVVANIPELGNW

SEQ ID NO: 24663 - protein, 512 aa, Bacillus sp. TS-23
APINETMMQYFEWDLPNDGTLWTKVKNEAANLSSLGITALWLPPAYKGTSQSDVGYGVYDLYDLGEFNQKGTIRTKYGTKTQYIQAIQAAKAAGMQVYADVVFNHKAGADGTEFVDAVEVDPSNRNQETSGTYQIQAWTKFDFPGRGNTYSSFKWRWYHFDGTDWDESRKLNARIYKFRSKAWDWEVDTENGNYDYLMFADLDMDHPEVVTELKNWGTWYVNTTNIDGFRLDAVKHIKYSFFPDWLTYVRNQTGKNLFAVGEFWSYDVNKLHNYITKTNGSMSLFDAPLHNNFYTASKSSGYFDMRYLLNNTLMKDQPSLAVTLVDNHDTQPGQSLQSWVEPWFKPLAYAFILTRQEGYPCVFYGDYYGIPKYNIPGLKSKIDPLLIARRDYAYGTQRDYIDHQDIIGWTREGIDTKPNSGLAALITDGPGGSKWMYVGKKHAGKVFYDLTGNRSDTVTINADGWGEFKVNGGSVSIWVAKTSNVTFTVNNATTTSGQNVYVVANIPELGNW

SEQ ID NO: 24664 - protein, 512 aa, Bacillus sp. TS-23
APINETMMQYFEWDLPNDGTLWTKVKNEAANLSSLGITALWLPPAYKGTSQSDVGYGVYDLYDLGEFNQKGTIRTKYGTKTQYIQAIQAAKAAGMQVYADVVFNHKAGADGTEFVDAVEVDPSNRNQETSGTYQIQAWTKFDFPGRGNTYSSFKWRWYHFDGTDWDESRKLNNRIYKFTGKAWDWEVDTENGNYDYLMFADLDMDHPEVVTELKNWGTWYVNTTNIDGFRLDAVKHIKYSFFPDWLTYVRNQTGKNLFAVGEFWSYDVNKLHNYITKTNGSMSLFDAPLHNNFYTASKSSGYFDMRYLLNNTLMKDQPSLAVTLVDNHDTQPGQSLQSWVEPWFKPLAYAFILTRQEGYPCVFYGDYYGIPKYNIPGLKSKIDPLLIARRDYAYGTQRDYIDHQDIIGWTREGIDTKPNSGLAALITDGPGGSKWMYVGKKHAGKVFYDLTGNRSDTVTINADGWGEFKVNGGSVSIWVAKTSNVTFTVNNATTTSGQNVYVVANIPELGNW

SEQ ID NO: 24665 - protein, 513 aa, Bacillus sp. TS-23
APINETMMQYFEWDLPNDGTLWTKVKNEAANLSSLGITALWLPPAYKGTSQSDVGYGVYDLYDLGEFNQKGTIRTKYGTKTQYIQAIQAAKAAGMQVYADVVFNHKAGADGTEFVDAVEVDPSNRNQETSGTYQIQAWTKFDFPGRGNTYSSFKWRWYHFDGTDWDESRKLNRIYKFRSTGKAWDWEVDTENGNYDYLMFADLDMDHPEVVTELKNWGTWYVRTTNIDGFRLDAVKHIKYSFFPDWLTYVRNQTGKNLFAVGEFWSYDVNKLHNYITKTRGSMSLFDAPLHNNFYTASKSSGYFDMRYLLNNTLMKDQPSLAVTLVDNHDTQPGQSLQSWVEPWFKPLAYAFILTRQEGYPCVFYGDYYGIPKYNIPGLKSKIDPLLIARRDYAYGTQRDYIDHQDIIGWTREGIDTKPNSGLAALITDGPGGSKWMYVGKKHAGKVFYDLTGNRSDTVTINADGWGEFKVNGGSVSIWVAKTSNVTFTVNNATTTSGQNVYVVANIPELGNW

SEQ ID NO: 24666 - protein, 513 aa, Bacillus sp. TS-23
APINETMMQYFEWDLPNDGTLWTKVKNEAANLSSLGITALWLPPAYKGTSQSDVGYGVYDLYDLGEFNQKGTIRTKYGTKTQYIQAIQAAKAAGMQVYADVVFNHKAGADGTEFVDAVEVDPSNRNQETSGTYQIQAWTKFDFPGRGNTYSSFKWRWYHFDGTDWDESRKLNRIYKFRSTGKAWDWEVDTENGNYDYLMFADLDMDHPEVVTELKNWGTWYVETTNIDGFRLDAVKHIKYSFFPDWLTYVRNQTGKNLFAVGEFWSYDVNKLHNYITKTEGSMSLFDAPLHNNFYTASKSSGYFDMRYLLNNTLMKDQPSLAVTLVDNHDTQPGQSLQSWVEPWFKPLAYAFILTRQEGYPCVFYGDYYGIPKYNIPGLKSKIDPLLIARRDYAYGTQRDYIDHQDIIGWTREGIDTKPNSGLAALITDGPGGSKWMYVGKKHAGKVFYDLTGNRSDTVTINADGWGEFKVNGGSVSIWVAKTSNVTFTVNNATTTSGQNVYVVANIPELGNW

SEQ ID NO: 24667 - protein, 513 aa, Bacillus sp. TS-23
APINETMMQYFEWDLPNDGTLWTKVKNEAANLSSLGITALWLPPAYKGTSQSDVGYGVYDLYDLGEFNQKGTIRTKYGTKTQYIQAIQAAKAAGMQVYADVVFNHKAGADGTEFVDAVEVDPSNRNQETSGTYQIQAWTKFDFPGRGNTYSSFKWRWYHFDGTDWDESRKLNRIYKFRSTGKAWDWEVDTENGNYDYLMFADLDMDHPEVVTELKNWGTWYVNTTNIDGFRLDAVKHIKYSFFPDWLTYVRNQTGKNLFAVGEFWSYDVRKLHNYITKTNGSMSLFDAPLHNNFYTASKSSGYFDMRYLLNNTLMKDQPSLAVTLVDNHDTQPGQSLQSWVEPWFKPLAYAFILTRQEGYPCVFYGDYYGIPKYNIPGLKSKIDPLLIARRDYAYGTQRDYIDHQDIIGWTREGIDTKPNSGLAALITDGPGGSKWMYVGKKHAGKVFYDLTGNRSDTVTINADGWGEFKVNGGSVSIWVAKTSNVTFTVNNATTTSGQNVYVVANIPELGNW

SEQ ID NO: 24668 - protein, 487 aa, Bacillus sp. TS-23
APINETMMQYFEWDLPNDGTLWTKVKNEAANLSSLGITALWLPPAYKGTSQSDVGYGVYDLYDLGEFNQKGTIRTKYGTKTQYIEAIQAAKAAGMQVYADVVFNHKAGADGTEFVDAVEVDPSNRNQETSGTYQIQAWTKFDFPGRGNTYSSFKWRWYHFDGTDWDESRKLNRIYKFRSTGKAWDWEVDTENGNYDYLMFADLDMDHPEVVTELKNWGTWYVNTTNIDGFRLDAVKHIKYSFFPDWLTYVRNQTGKNLFAVGEFWSYDVEKLHNYITKTRGSMSLFDAPLHNNFYTASKSSGYFDMRYLLNNTLMKDQPSLAVTLVDNHDTQPGQSLQSWVEPWFKPLAYAFILTRQEGYPCVFYGDYYGIPKYNIPGLKSKIDPLLIARRDYAYGTQRDYIDHQDIIGWTREGIDTKPNSGLAALITDGPGGSKWMYVGKKHAGKVFYDLTGNRSDTVTINADGWGEFKVNGGSVSIWVAKTSNVT

SEQ ID NO: 24669 - protein, 487 aa, Bacillus sp. TS-23
APINETMMQYFEWDLPNDGTLWTKVKNEAANLSSLGITALWLPPAYKGTSQSDVGYGVYDLYDLGEFNQKGTIRTKYGTKTQYIQAIQAAKAAGMQVYADVVFNHKAGADGTEFVDAVEVDPSNRNQETSGTYQIQAWTKFDFPGRGNTYSSFKWRWYHFDGTDWDESRKLNRIYKFRSTGKAWDWEVDTENGNYDYLMFADLDMDHPEVVTELKNWGTWYVETTNIDGFRLDAVKHIKYSFFPDWLTYVRNQTGKNLFAVGEFWSYDVEKLHNYITKTNGSMSLFDAPLHNNFYTASKSSGYFDMRYLLNNTLMKDQPSLAVTLVDNHDTQPGQSLQSWVEPWFKPLAYAFILTRQEGYPCVFYGDYYGIPKYNIPGLKSKIDPLLIARRDYAYGTQRDYIDHQDIIGWTREGIDTKPNSGLAALITDGPGGSKWMYVGKKHAGKVFYDLTGNRSDTVTINADGWGEFKVNGGSVSIWVAKTSNVT

SEQ ID NO: 24670 - protein, 485 aa, Bacillus sp. TS-23
APINETMMQYFEWDLPNDGTLWTKVKNEAANLSSLGITALWLPPAWKGTSQSDVGYGAYDLYDLGEFNQKGTIRTKYGTKTQYIQAIQAAKAAGMQVYADVVFNHKAGADGTEFVDAVEVDPSNRNQETSGTYQIQAWTKFDFPGRGNTYSSFKWRWYHFDGTDWDESRKLNRIYKFTGKAWDWEVDTENGNYDYLMFADYDMDHPEVVTELKNWGTWYVNTTNIDGFRLDAVKHIKYSFFPDWLTYVRNQTGKNLFAVGEFWSYDVNKLHNYITKTNGSMSLFDAPLHNNFYTASKSSGYFDMRYLLNNTLMKDQPSLAVTLVDNHDTQPGQSLQSWVEPWFKPLAYAFILTRQEGYPCVFYGDYYGIPKYNIPGLKSKIDPLLEARRDYAYGTQRDYIDHQDIIGWTREGIDTKPNSGLAALITDGPGGSKWMYVGKKHAGKVFYDLTGNRSDTVTINADGWGEFKVNGGSVSIWVAKTSNVT

SEQ ID NO: 24671 - protein, 487 aa, Bacillus sp. TS-23
APINETMMQYFEWDLPNDGTLWTKVKNEAANLSSLGITALWLPPAYKGTSQSDVGYGVYDLYDLGEFNQKGTIRTKYGTKTQYIQAIQAAKAAGMQVYADVVFNHKAGADGTEFVDAVEVDPSNRNQETSGTYQIQAWTKFDFPGRGNTYSSFKWRWYHFDGTDWDESRKLNRIYKFRSTGKAWDWEVDTENGNYDYLMFADLDMDHPEVVTELKNWGTWYVETTNIDGFRLDAVKHIKYSFFPDWLTYVRNQTGKNLFAVGEFWSYDVRKLHNYITKTRGSMSLFDAPLHNNFYTASKSSGYFDMRYLLNNTLMKDQPSLAVTLVDNHDTQPGQSLQSWVEPWFKPLAYAFILTRQEGYPCVFYGDYYGIPKYNIPGLKSKIDPLLIARRDYAYGTQRDYIDHQDIIGWTREGIDTKPNSGLAALITDGPGGSKWMYVGKKHAGKVFYDLTGNRSDTVTINADGWGEFKVNGGSVSIWVAKTSNVT

SEQ ID NO: 24672 - protein, 487 aa, Bacillus sp. TS-23
APVNGTMMQYFEWDLPNDGTLWTKVKNEASSLSALGITALWLPPAYKGTSQADVGYGVYDLYDLGEFNQKGTIRTKYGTKTQYLQAIQAAKSAGMQVYADVVFNHKAGADSTEWVDAVEVNPSNRNQETSGTYQIQAWTKFDFPGRGNTYSSFKWRWYHFDGTDWDESRKLNRIYKFRGTGKAWDWEVDTENGNYDYLMFADLDMDHPEVVAELKNWGKWYVNTTNVDGFRLDAVKHIKYSFFPDWLSYVRNQTGKNLFAVGEFWGYDVNKLHNYITKTNGAMSLFDAPLHNNFYIASKSSGYFDMRYLLNNTLMKDQPALAVTLVDNHDTQPGQSLQSWVEPWFKPLAYAFILTRQEGYPCVFYGDYYGIPKYNIPGLKSKIDPLLIARRDYAYGTQRDYIDHQDIIGWTREGIDAKPNSGLAALITDGPGGSKWMYVGKRHAGKVFYDLTGNRSDTVTINADGWGEFKVNGGSVSIWVAKTSNVT

SEQ ID NO: 24673 - protein, 485 aa, Bacillus sp. TS-23
APINETMMQYFEWDLPNDGTLWTKVKNEAANLSSLGITALWLPPAWKGTSQSDVGYGVYDLYDLGEFNQKGTIRTKYGTKTQYIQAIQAAKAAGMQVYADVVFNHKAGADGTEFVDAVEVDPSNRNQETSGTYQIQAWTKFDFPGRGNTYSSFKWRWYHFDGTDWDESRKLNRIYKFRGKAWDWEVDTENGNYDYLMFADYDMDHPEVVTELKNWGTWYVNTTNIDGFRLDAVKHIKYSFFPDWLTYVRNQTGKNLFAVGEFWSYDVNKLHNYITKTNGSMSLFDAPLHNNFYTASKSSGYFDMRYLLNNTLMKDQPSLAVTLVDNHDTQPGQSLQSWVEPWFKPLAYAFILTRQEGYPCVFYGDYYGIPKYNIPGLKSKIDPLLIARRDYAYGTQRDYIDHQDIIGWTREGIDTKPNSGLAALITDGPGGSKWMYVGKKHAGKVFYDLTGNRSDTVTINADGWGEFKVNGGSVSIWVAKTSNVT

SEQ ID NO: 24674 - protein, 487 aa, Bacillus sp. TS-23
APINETMMQYFEWDLPNDGTLWTKVKNEAANLSSLGITALWLPPAYKGTSQSDVGYGVYDLYDLGEFNQKGTIRTKYGTKTQYIRAIQAAKAAGMQVYADVVFNHKAGADGTEFVDAVEVDPSNRNQETSGTYQIQAWTKFDFPGRGNTYSSFKWRWYHFDGTDWDESRKLNRIYKFRSTGKAWDWEVDTENGNYDYLMFADLDMDHPEVVTELKNWGTWYVRTTNIDGFRLDAVKHIKYSFFPDWLTYVRNQTGKNLFAVGEFWSYDVNKLHNYITKTRGSMSLFDAPLHNNFYTASKSSGYFDMRYLLNNTLMKDQPSLAVTLVDNHDTQPGQSLQSWVEPWFKPLAYAFILTRQEGYPCVFYGDYYGIPKYNIPGLKSKIDPLLIARRDYAYGTQRDYIDHQDIIGWTREGIDTKPNSGLAALITDGPGGSKWMYVGKKHAGKVFYDLTGNRSDTVTINADGWGEFKVNGGSVSIWVAKTSNVT

SEQ ID NO: 24675 - protein, 487 aa, Bacillus sp. TS-23
APINETMMQYFEWDLPNDGTLWTKVKNEAANLSSLGITALWLPPAYKGTSQSDVGYGVYDLYDLGEFNQKGTIRTKYGTKTQYIEAIQAAKAAGMQVYADVVFNHKAGADGTEFVDAVEVDPSNRNQETSGTYQIQAWTKFDFPGRGNTYSSFKWRWYHFDGTDWDESRKLNRIYKFRSTGKAWDWEVDTENGNYDYLMFADLDMDHPEVVTELKNWGTWYVNTTNIDGFRLDAVKHIKYSFFPDWLTYVRNQTGKNLFAVGEFWSYDVRKLHNYITKTEGSMSLFDAPLHNNFYTASKSSGYFDMRYLLNNTLMKDQPSLAVTLVDNHDTQPGQSLQSWVEPWFKPLAYAFILTRQEGYPCVFYGDYYGIPKYNIPGLKSKIDPLLIARRDYAYGTQRDYIDHQDIIGWTREGIDTKPNSGLAALITDGPGGSKWMYVGKKHAGKVFYDLTGNRSDTVTINADGWGEFKVNGGSVSIWVAKTSNVT

SEQ ID NO: 24676 - protein, 487 aa, Bacillus sp. TS-23
APINETMMQYFEWDLPNDGTLWTKVKNEAANLSSLGITALWLPPAYKGTSQSDVGYGVYDLYDLGEFNQKGTIRTKYGTKTQYIQAIQAAKAAGMQVYADVVFNHKAGADGTEFVDAVEVDPSNRNQETSGTYQIQAWTKFDFPGRGNTYSSFKWRWYHFDGTDWDESRKLNRIYKFRSTGKAWDWEVDTENGNYDYLMFADLDMDHPEVVTELKNWGTWYVETTNIDGFRLDAVKHIKYSFFPDWLTYVRNQTGKNLFAVGEFWSYDVRKLHNYITKTEGSMSLFDAPLHNNFYTASKSSGYFDMRYLLNNTLMKDQPSLAVTLVDNHDTQPGQSLQSWVEPWFKPLAYAFILTRQEGYPCVFYGDYYGIPKYNIPGLKSKIDPLLIARRDYAYGTQRDYIDHQDIIGWTREGIDTKPNSGLAALITDGPGGSKWMYVGKKHAGKVFYDLTGNRSDTVTINADGWGEFKVNGGSVSIWVAKTSNVT

SEQ ID NO: 24677 - protein, 487 aa, Bacillus sp. TS-23
APINETMMQYFEWDLPNDGTLWTKVKNEAANLSSLGITALWLPPAYKGTSQSDVGYGVYDLYDLGEFNQKGTIRTKYGTKTQYIEAIQAAKAAGMQVYADVVFNHKAGADGTEFVDAVEVDPSNRNQETSGTYQIQAWTKFDFPGRGNTYSSFKWRWYHFDGTDWDESRKLNRIYKFRSTGKAWDWEVDTENGNYDYLMFADLDMDHPEVVTELKNWGTWYVETTNIDGFRLDAVKHIKYSFFPDWLTYVRNQTGKNLFAVGEFWSYDVNKLHNYITKTNGSMSLFDAPLHNNFYTASKSSGYFDMRYLLNNTLMKDQPSLAVTLVDNHDTQPGQSLQSWVEPWFKPLAYAFILTRQEGYPCVFYGDYYGIPKYNIPGLKSKIDPLLIARRDYAYGTQRDYIDHQDIIGWTREGIDTKPNSGLAALITDGPGGSKWMYVGKKHAGKVFYDLTGNRSDTVTINADGWGEFKVNGGSVSIWVAKTSNVT

SEQ ID NO: 24678 - protein, 487 aa, Bacillus sp. TS-23
APINETMMQYFEWDLPNDGTLWTKVKNEAANLSSLGITALWLPPAYKGTSQSDVGYGVYDLYDLGEFNQKGTIRTKYGTKTQYIQAIQAAKAAGMQVYADVVFNHKAGADGTEFVDAVEVDPSNRNQETSGTYQIQAWTKFDFPGRGNTYSSFKWRWYHFDGTDWDESRKLNRIYKFRSTGKAWDWEVDTENGNYDYLMFADLDMDHPEVVTELKNWGTWYVRTTNIDGFRLDAVKHIKYSFFPDWLTYVRNQTGKNLFAVGEFWSYDVEKLHNYITKTNGSMSLFDAPLHNNFYTASKSSGYFDMRYLLNNTLMKDQPSLAVTLVDNHDTQPGQSLQSWVEPWFKPLAYAFILTRQEGYPCVFYGDYYGIPKYNIPGLKSKIDPLLIARRDYAYGTQRDYIDHQDIIGWTREGIDTKPNSGLAALITDGPGGSKWMYVGKKHAGKVFYDLTGNRSDTVTINADGWGEFKVNGGSVSIWVAKTSNVT

SEQ ID NO: 24679 - protein, 487 aa, Bacillus sp. TS-23
APINETMMQYFEWDLPNDGTLWTKVKNEAANLSSLGITALWLPPAYKGTSQSDVGYGVYDLYDLGEFNQKGTIRTKYGTKTQYIQAIQAAKAAGMQVYADVVFNHKAGADGTEFVDAVEVDPSNRNQETSGTYQIQAWTKFDFPGRGNTYSSFKWRWYHFDGTDWDESRKLNRIYKFRSTGKAWDWEVDTENGNYDYLMFADLDMDHPEVVTELKNWGTWYVRTTNIDGFRLDAVKHIKYSFFPDWLTYVRNQTGKNLFAVGEFWSYDVRKLHNYITKTNGSMSLFDAPLHNNFYTASKSSGYFDMRYLLNNTLMKDQPSLAVTLVDNHDTQPGQSLQSWVEPWFKPLAYAFILTRQEGYPCVFYGDYYGIPKYNIPGLKSKIDPLLIARRDYAYGTQRDYIDHQDIIGWTREGIDTKPNSGLAALITDGPGGSKWMYVGKKHAGKVFYDLTGNRSDTVTINADGWGEFKVNGGSVSIWVAKTSNVT

SEQ ID NO: 24680 - protein, 487 aa, Bacillus sp. TS-23
APINETMMQYFEWDLPNDGTLWTKVKNEAANLSSLGITALWLPPAYKGTSQSDVGYGVYDLYDLGEFNQKGTIRTKYGTKTQYIEAIQAAKAAGMQVYADVVFNHKAGADGTEFVDAVEVDPSNRNQETSGTYQIQAWTKFDFPGRGNTYSSFKWRWYHFDGTDWDESRKLNRIYKFRSTGKAWDWEVDTENGNYDYLMFADLDMDHPEVVTELKNWGTWYVRTTNIDGFRLDAVKHIKYSFFPDWLTYVRNQTGKNLFAVGEFWSYDVNKLHNYITKTEGSMSLFDAPLHNNFYTASKSSGYFDMRYLLNNTLMKDQPSLAVTLVDNHDTQPGQSLQSWVEPWFKPLAYAFILTRQEGYPCVFYGDYYGIPKYNIPGLKSKIDPLLIARRDYAYGTQRDYIDHQDIIGWTREGIDTKPNSGLAALITDGPGGSKWMYVGKKHAGKVFYDLTGNRSDTVTINADGWGEFKVNGGSVSIWVAKTSNVT

SEQ ID NO: 24681 - protein, 487 aa, Bacillus sp. TS-23
APINETMMQYFEWDLPNDGTLWTKVKNEAANLSSLGITALWLPPAYKGTSQSDVGYGVYDLYDLGEFNQKGTIRTKYGTKTQYIEAIQAAKAAGMQVYADVVFNHKAGADGTEFVDAVEVDPSNRNQETSGTYQIQAWTKFDFPGRGNTYSSFKWRWYHFDGTDWDESRKLNRIYKFRSTGKAWDWEVDTENGNYDYLMFADLDMDHPEVVTELKNWGTWYVRTTNIDGFRLDAVKHIKYSFFPDWLTYVRNQTGKNLFAVGEFWSYDVNKLHNYITKTRGSMSLFDAPLHNNFYTASKSSGYFDMRYLLNNTLMKDQPSLAVTLVDNHDTQPGQSLQSWVEPWFKPLAYAFILTRQEGYPCVFYGDYYGIPKYNIPGLKSKIDPLLIARRDYAYGTQRDYIDHQDIIGWTREGIDTKPNSGLAALITDGPGGSKWMYVGKKHAGKVFYDLTGNRSDTVTINADGWGEFKVNGGSVSIWVAKTSNVT

SEQ ID NO: 24682 - protein, 487 aa, Bacillus sp. TS-23
APINETMMQYFEWDLPNDGTLWTKVKNEAANLSSLGITALWLPPAYKGTSQSDVGYGVYDLYDLGEFNQKGTIRTKYGTKTQYIQAIQAAKAAGMQVYADVVFNHKAGADGTEFVDAVEVDPSNRNQETSGTYQIQAWTKFDFPGRGNTYSSFKWRWYHFDGTDWDESRKLNRIYKFRSTGKAWDWEVDTENGNYDYLMFADLDMDHPEVVTELKNWGTWYVETTNIDGFRLDAVKHIKYSFFPDWLTYVRNQTGKNLFAVGEFWSYDVEKLHNYITKTEGSMSLFDAPLHNNFYTASKSSGYFDMRYLLNNTLMKDQPSLAVTLVDNHDTQPGQSLQSWVEPWFKPLAYAFILTRQEGYPCVFYGDYYGIPKYNIPGLKSKIDPLLIARRDYAYGTQRDYIDHQDIIGWTREGIDTKPNSGLAALITDGPGGSKWMYVGKKHAGKVFYDLTGNRSDTVTINADGWGEFKVNGGSVSIWVAKTSNVT

SEQ ID NO: 24683 - protein, 487 aa, Bacillus sp. TS-23
APINETMMQYFEWDLPNDGTLWTKVKNEAANLSSLGITALWLPPAYKGTSQSDVGYGVYDLYDLGEFNQKGTIRTKYGTKTQYIRAIQAAKAAGMQVYADVVFNHKAGADGTEFVDAVEVDPSNRNQETSGTYQIQAWTKFDFPGRGNTYSSFKWRWYHFDGTDWDESRKLNRIYKFRSTGKAWDWEVDTENGNYDYLMFADLDMDHPEVVTELKNWGTWYVRTTNIDGFRLDAVKHIKYSFFPDWLTYVRNQTGKNLFAVGEFWSYDVNKLHNYITKTNGSMSLFDAPLHNNFYTASKSSGYFDMRYLLNNTLMKDQPSLAVTLVDNHDTQPGQSLQSWVEPWFKPLAYAFILTRQEGYPCVFYGDYYGIPKYNIPGLKSKIDPLLIARRDYAYGTQRDYIDHQDIIGWTREGIDTKPNSGLAALITDGPGGSKWMYVGKKHAGKVFYDLTGNRSDTVTINADGWGEFKVNGGSVSIWVAKTSNVT

SEQ ID NO: 24684 - protein, 487 aa, Bacillus sp. TS-23
APINETMMQYFEWDLPNDGTLWTKVKNEAANLSSLGITALWLPPAYKGTSQSDVGYGVYDLYDLGEFNQKGTIRTKYGTKTQYIRAIQAAKAAGMQVYADVVFNHKAGADGTEFVDAVEVDPSNRNQETSGTYQIQAWTKFDFPGRGNTYSSFKWRWYHFDGTDWDESRKLNRIYKFRSTGKAWDWEVDTENGNYDYLMFADLDMDHPEVVTELKNWGTWYVNTTNIDGFRLDAVKHIKYSFFPDWLTYVRNQTGKNLFAVGEFWSYDVEKLHNYITKTEGSMSLFDAPLHNNFYTASKSSGYFDMRYLLNNTLMKDQPSLAVTLVDNHDTQPGQSLQSWVEPWFKPLAYAFILTRQEGYPCVFYGDYYGIPKYNIPGLKSKIDPLLIARRDYAYGTQRDYIDHQDIIGWTREGIDTKPNSGLAALITDGPGGSKWMYVGKKHAGKVFYDLTGNRSDTVTINADGWGEFKVNGGSVSIWVAKTSNVT

SEQ ID NO: 24685 - protein, 485 aa, Bacillus sp. TS-23
APINETMMQYFEWDLPNDGTLWTKVKNEAANLSSLGITALWLPPAWKGTSQSDVGYGVYDLYDLGEFNQKGTIRTKYGTKTQYIQAIQAAKAAGMQVYADVVFNHKAGADGTEFVDAVEVDPSNRNQETSGTYQIQAWTKFDFPGRGNTYSSFKWRWYHFDGTDWDESRKLNRIYKFRSKAWDWEVDTENGNYDYLMFADLDMDHPEVVTELKNWGTWYVNTTNIDGFRLDAVKHIKYSFFPDWLTYVRNQTGKNLFAVGEFWSYDVNKLHNYITKTNGSMSLFDAPLHNNFYTASKSSGYFDMRYLLNNTLMKDQPSLAVTLVDNHDTQPGQSLQSWVEPWFKPLAYAFILTRQEGYPCVFYGDYYGIPKYNIPGLKSKIDPLLIARRDYAYGTQRDYIDHQDIIGWTREGIDTKPNSGLAALITDGPGGSKWMYVGKKHAGKVFYDLTGNRSDTVTINADGWGEFKVNGGSVSIWVAKTSNVT

SEQ ID NO: 24686 - protein, 485 aa, Bacillus sp. TS-23
APINETMMQYFEWDLPNDGTLWTKVKNEAANLSSLGITALWLPPAYKGTSQSDVGYGVYDLYDLGEFNQKGTIRTKYGTKTQYIQAIQAAKAAGMQVYADVVFNHKAGADGTEFVDAVEVDPSNRNQETSGTYQIQAWTKFDFPGRGNTYSSFKWRWYHFDGTDWDESRKLNRIYKFRSKAWDWEVDTENGNYDYLMFADFDMDHPEVVTELKNWGTWYVNTTNIDGFRLDAVKHIKYSFFPDWLTYVRNQTGKNLFAVGEFWSYDVNKLHNYITKTNGSMSLFDAPLHNNFYTASKSSGYFDMRYLLNNTLMKDQPSLAVTLVDNHDTQPGQSLQSWVEPWFKPLAYAFILTRQEGYPCVFYGDYYGIPKYNIPGLKSKIDPLLIARRDYAYGTQRDYIDHQDIIGWTREGIDTKPNSGLAALITDGPGGSKWMYVGKKHAGKVFYDLTGNRSDTVTINADGWGEFKVNGGSVSIWVAKTSNVT

SEQ ID NO: 24687 - protein, 485 aa, Bacillus sp. TS-23
APINETMMQYFEWDLPNDGTLWTKVKNEAANLSSLGITALWLPPAYKGTSQSDVGYGVYDLYDLGEFNQKGTIRTKYGTKTQYIQAIQAAKAAGMQVYADVVFNHKAGADGTEFVDAVEVDPSNRNQETSGTYQIQAWTKFDFPGRGNTYSSFKWRWYHFDGTDWDESRKLNRIYKFRSKAWDWEVDTENGNYDYLMFADYDMDHPEVVTELKNWGTWYVNTTNIDGFRLDAVKHIKYSFFPDWLTYVRNQTGKNLFAVGEFWSYDVNKLHNYITKTNGSMSLFDAPLHNNFYTASKSSGYFDMRYLLNNTLMKDQPSLAVTLVDNHDTQPGQSLQSWVEPWFKPLAYAFILTRQEGYPCVFYGDYYGIPKYNIPGLKSKIDPLLIARRDYAYGTQRDYIDHQDIIGWTREGIDTKPNSGLAALITDGPGGSKWMYVGKKHAGKVFYDLTGNRSDTVTINADGWGEFKVNGGSVSIWVAKTSNVT

SEQ ID NO: 24688 - protein, 485 aa, Bacillus sp. TS-23
APINETMMQYFEWDLPNDGTLWTKVKNEAANLSSLGITALWLPPAWKGTSQSDVGYGAYDLYDLGEFNQKGTIRTKYGTKTQYIQAIQAAKAAGMQVYADVVFNHKAGADGTEFVDAVEVDPSNRNQETSGTYQIQAWTKFDFPGRGNTYSSFKWRWYHFDGTDWDESRKLNRIYKFRGKAWDWEVDTENGNYDYLMFADYDMDHPEVVTELKNWGTWYVNTTNIDGFRLDAVKHIKYSFFPDWLTYVRNQTGKNLFAVGEFWSYDVNKLHNYITKTNGSMSLFDAPLHNNFYTASKSSGYFDMRYLLNNTLMKDQPSLAVTLVDNHDTQPGQSLQSWVEPWFKPLAYAFILTRQEGYPCVFYGDYYGIPKYNIPGLKSKIDPLLEARRDYAYGTQRDYIDHQDIIGWTREGIDTKPNSGLAALITDGPGGSKWMYVGKKHAGKVFYDLTGNRSDTVTINADGWGEFKVNGGSVSIWVAKTSNVT

SEQ ID NO: 24689 - protein, 487 aa, Bacillus sp. TS-23
APINETMMQYFEWDLPNDGTLWTKVKNEAANLSSLGITALWLPPAYKGTSQSDVGYGVYDLYDLGEFNQKGTIRTKYGTKTQYIRAIQAAKAAGMQVYADVVFNHKAGADGTEFVDAVEVDPSNRNQETSGTYQIQAWTKFDFPGRGNTYSSFKWRWYHFDGTDWDESRKLNRIYKFRSTGKAWDWEVDTENGNYDYLMFADLDMDHPEVVTELKNWGTWYVETTNIDGFRLDAVKHIKYSFFPDWLTYVRNQTGKNLFAVGEFWSYDVNKLHNYITKTNGSMSLFDAPLHNNFYTASKSSGYFDMRYLLNNTLMKDQPSLAVTLVDNHDTQPGQSLQSWVEPWFKPLAYAFILTRQEGYPCVFYGDYYGIPKYNIPGLKSKIDPLLIARRDYAYGTQRDYIDHQDIIGWTREGIDTKPNSGLAALITDGPGGSKWMYVGKKHAGKVFYDLTGNRSDTVTINADGWGEFKVNGGSVSIWVAKTSNVT

SEQ ID NO: 24690 - protein, 485 aa, Bacillus sp. TS-23
APINETMMQYFEWDLPNDGTLWTKVKNEAANLSSLGITALWLPPAYKGTSQSDVGYGVYDLYDLGEFNQKGTIRTKYGTKTQYIQAIQAAKAAGMQVYADVVFNHKAGADGTEFVDAVEVDPSNRNQETSGTYQIQAWTKFDFPGRGNTYSSFKWRWYHFDGTDWDESRKLNRIYKFRSKAWDWEVDTENGNYDYLMFADLDMDHPEVVTELKNWGTWYVNTTNIDGFRLDAVKHIKYSFFPDWLTYVRNQTGKNLFAVGEFWSYDVNKLHNYITKTNGSMSLFDAPLHNNFYTASKSSGYFDMRYLLNNTLLKDQPSLAVTLVDNHDTQPGQSLQSWVEPWFKPLAYAFILTRQEGYPCVFYGDYYGIPKYNIPGLKSKIDPLLIARRDYAYGTQRDYIDHQDIIGWTREGIDTKPNSGLAALITDGPGGSKWMYVGKKHAGKVFYDLTGNRSDTVTINADGWGEFKVNGGSVSIWVAKTSNVT

SEQ ID NO: 24691 - protein, 487 aa, Bacillus sp. TS-23
APINETMMQYFEWDLPNDGTLWTKVKNEAANLSSLGITALWLPPAYKGTSQSDVGYGVYDLYDLGEFNQKGTIRTKYGTKTQYIEAIQAAKAAGMQVYADVVFNHKAGADGTEFVDAVEVDPSNRNQETSGTYQIQAWTKFDFPGRGNTYSSFKWRWYHFDGTDWDESRKLNRIYKFRSTGKAWDWEVDTENGNYDYLMFADLDMDHPEVVTELKNWGTWYVETTNIDGFRLDAVKHIKYSFFPDWLTYVRNQTGKNLFAVGEFWSYDVNKLHNYITKTRGSMSLFDAPLHNNFYTASKSSGYFDMRYLLNNTLMKDQPSLAVTLVDNHDTQPGQSLQSWVEPWFKPLAYAFILTRQEGYPCVFYGDYYGIPKYNIPGLKSKIDPLLIARRDYAYGTQRDYIDHQDIIGWTREGIDTKPNSGLAALITDGPGGSKWMYVGKKHAGKVFYDLTGNRSDTVTINADGWGEFKVNGGSVSIWVAKTSNVT

SEQ ID NO: 24692 - protein, 487 aa, Bacillus sp. TS-23
APINETMMQYFEWDLPNDGTLWTKVKNEAANLSSLGITALWLPPAYKGTSQSDVGYGVYDLYDLGEFNQKGTIRTKYGTKTQYIRAIQAAKAAGMQVYADVVFNHKAGADGTEFVDAVEVDPSNRNQETSGTYQIQAWTKFDFPGRGNTYSSFKWRWYHFDGTDWDESRKLNRIYKFRSTGKAWDWEVDTENGNYDYLMFADLDMDHPEVVTELKNWGTWYVETTNIDGFRLDAVKHIKYSFFPDWLTYVRNQTGKNLFAVGEFWSYDVNKLHNYITKTEGSMSLFDAPLHNNFYTASKSSGYFDMRYLLNNTLMKDQPSLAVTLVDNHDTQPGQSLQSWVEPWFKPLAYAFILTRQEGYPCVFYGDYYGIPKYNIPGLKSKIDPLLIARRDYAYGTQRDYIDHQDIIGWTREGIDTKPNSGLAALITDGPGGSKWMYVGKKHAGKVFYDLTGNRSDTVTINADGWGEFKVNGGSVSIWVAKTSNVT

SEQ ID NO: 24693 - protein, 485 aa, Bacillus sp. TS-23
APINETMMQYFEWDLPNDGTLWTKVKNEAANLSSLGITALWLPPAYKGTSQSDVGYGVYDLYDLGEFNQKGTIRTKYGTKTQYIQAIQAAKAAGMQVYADVVFNHKAGADGTEFVDAVEVDPSNRNQETSGTYQIQAWTKFDFPGRGNTYSSFKWRWYHFDGTDWDESRKLNRIYKFRSKAWDWEVDTENGNYDYLMFADLDMDHPEVVTELKNWGTWYVNTTNIDGFRLDAVKHIKYSFFPDWLTYVRNQTGKNLFAVGEFWSYDVNKLHNYITKTNGSMSLFDAPLHNNFYTASKSSGYFDMQYLLNNTLMKDQPSLAVTLVDNHDTQPGQSLQSWVEPWFKPLAYAFILTRQEGYPCVFYGDYYGIPKYNIPGLKSKIDPLLIARRDYAYGTQRDYIDHQDIIGWTREGIDTKPNSGLAALITDGPGGSKWMYVGKKHAGKVFYDLTGNRSDTVTINADGWGEFKVNGGSVSIWVAKTSNVT

SEQ ID NO: 24694 - protein, 487 aa, Bacillus sp. TS-23
APINETMMQYFEWDLPNDGTLWTKVKNEAANLSSLGITALWLPPAYKGTSQSDVGYGVYDLYDLGEFNQKGTIRTKYGTKTQYIQAIQAAKAAGMQVYADVVFNHKAGADGTEFVDAVEVDPSNRNQETSGTYQIQAWTKFDFPGRGNTYSSFKWRWYHFDGTDWDESRKLNRIYKFRSTGKAWDWEVDTENGNYDYLMFADLDMDHPEVVTELKNWGTWYVRTTNIDGFRLDAVKHIKYSFFPDWLTYVRNQTGKNLFAVGEFWSYDVEKLHNYITKTEGSMSLFDAPLHNNFYTASKSSGYFDMRYLLNNTLMKDQPSLAVTLVDNHDTQPGQSLQSWVEPWFKPLAYAFILTRQEGYPCVFYGDYYGIPKYNIPGLKSKIDPLLIARRDYAYGTQRDYIDHQDIIGWTREGIDTKPNSGLAALITDGPGGSKWMYVGKKHAGKVFYDLTGNRSDTVTINADGWGEFKVNGGSVSIWVAKTSNVT

SEQ ID NO: 24695 - protein, 487 aa, Bacillus sp. TS-23
APINETMMQYFEWDLPNDGTLWTKVKNEAANLSSLGITALWLPPAYKGTSQSDVGYGVYDLYDLGEFNQKGTIRTKYGTKTQYIQAIQAAKAAGMQVYADVVFNHKAGADGTEFVDAVEVDPSNRNQETSGTYQIQAWTKFDFPGRGNTYSSFKWRWYHFDGTDWDESRKLNRIYKFRSTGKAWDWEVDTENGNYDYLMFADLDMDHPEVVTELKNWGTWYVRTTNIDGFRLDAVKHIKYSFFPDWLTYVRNQTGKNLFAVGEFWSYDVRKLHNYITKTRGSMSLFDAPLHNNFYTASKSSGYFDMRYLLNNTLMKDQPSLAVTLVDNHDTQPGQSLQSWVEPWFKPLAYAFILTRQEGYPCVFYGDYYGIPKYNIPGLKSKIDPLLIARRDYAYGTQRDYIDHQDIIGWTREGIDTKPNSGLAALITDGPGGSKWMYVGKKHAGKVFYDLTGNRSDTVTINADGWGEFKVNGGSVSIWVAKTSNVT

SEQ ID NO: 24696 - protein, 487 aa, Bacillus sp. TS-23
APINETMMQYFEWDLPNDGTLWTKVKNEAANLSSLGITALWLPPAYKGTSQSDVGYGVYDLYDLGEFNQKGTIRTKYGTKTQYIRAIQAAKAAGMQVYADVVFNHKAGADGTEFVDAVEVDPSNRNQETSGTYQIQAWTKFDFPGRGNTYSSFKWRWYHFDGTDWDESRKLNRIYKFRSTGKAWDWEVDTENGNYDYLMFADLDMDHPEVVTELKNWGTWYVNTTNIDGFRLDAVKHIKYSFFPDWLTYVRNQTGKNLFAVGEFWSYDVEKLHNYITKTRGSMSLFDAPLHNNFYTASKSSGYFDMRYLLNNTLMKDQPSLAVTLVDNHDTQPGQSLQSWVEPWFKPLAYAFILTRQEGYPCVFYGDYYGIPKYNIPGLKSKIDPLLIARRDYAYGTQRDYIDHQDIIGWTREGIDTKPNSGLAALITDGPGGSKWMYVGKKHAGKVFYDLTGNRSDTVTINADGWGEFKVNGGSVSIWVAKTSNVT

SEQ ID NO: 24697 - protein, 487 aa, Bacillus sp. TS-23
APINETMMQYFEWDLPNDGTLWTKVKNEAANLSSLGITALWLPPAYKGTSQSDVGYGVYDLYDLGEFNQKGTIRTKYGTKTQYIEAIQAAKAAGMQVYADVVFNHKAGADGTEFVDAVEVDPSNRNQETSGTYQIQAWTKFDFPGRGNTYSSFKWRWYHFDGTDWDESRKLNRIYKFRSTGKAWDWEVDTENGNYDYLMFADLDMDHPEVVTELKNWGTWYVETTNIDGFRLDAVKHIKYSFFPDWLTYVRNQTGKNLFAVGEFWSYDVNKLHNYITKTEGSMSLFDAPLHNNFYTASKSSGYFDMRYLLNNTLMKDQPSLAVTLVDNHDTQPGQSLQSWVEPWFKPLAYAFILTRQEGYPCVFYGDYYGIPKYNIPGLKSKIDPLLIARRDYAYGTQRDYIDHQDIIGWTREGIDTKPNSGLAALITDGPGGSKWMYVGKKHAGKVFYDLTGNRSDTVTINADGWGEFKVNGGSVSIWVAKTSNVT

SEQ ID NO: 24698 - protein, 487 aa, Bacillus sp. TS-23
APINETMMQYFEWDLPNDGTLWTKVKNEAANLSSLGITALWLPPAYKGTSQSDVGYGVYDLYDLGEFNQKGTIRTKYGTKTQYIRAIQAAKAAGMQVYADVVFNHKAGADGTEFVDAVEVDPSNRNQETSGTYQIQAWTKFDFPGRGNTYSSFKWRWYHFDGTDWDESRKLNRIYKFRSTGKAWDWEVDTENGNYDYLMFADLDMDHPEVVTELKNWGTWYVNTTNIDGFRLDAVKHIKYSFFPDWLTYVRNQTGKNLFAVGEFWSYDVRKLHNYITKTEGSMSLFDAPLHNNFYTASKSSGYFDMRYLLNNTLMKDQPSLAVTLVDNHDTQPGQSLQSWVEPWFKPLAYAFILTRQEGYPCVFYGDYYGIPKYNIPGLKSKIDPLLIARRDYAYGTQRDYIDHQDIIGWTREGIDTKPNSGLAALITDGPGGSKWMYVGKKHAGKVFYDLTGNRSDTVTINADGWGEFKVNGGSVSIWVAKTSNVT

SEQ ID NO: 24699 - protein, 485 aa, Bacillus sp. TS-23
APINETMMQYFEWDLPNDGTLWTKVKNEAANLSSLGITALWLPPAWKGTSQSDVGYGVYDLYDLGEFNQKGTIRTKYGTKTQYIQAIQAAKAAGMQVYADVVFNHKAGADGTEFVDAVEVDPSNRNQETSGTYQIQAWTKFDFPGRGNTYSSFKWRWYHFDGTDWDESRKLNRIYKFTGKAWDWEVDTENGNYDYLMFADYDMDHPEVVTELKNWGTWYVNTTNIDGFRLDAVKHIKYSFFPDWLTYVRNQTGKNLFAVGEFWSYDVNKLHNYITKTNGSMSLFDAPLHNNFYTASKSSGYFDMRYLLNNTLMKDQPSLAVTLVDNHDTQPGQSLQSWVEPWFKPLAYAFILTRQEGYPCVFYGDYYGIPKYNIPGLKSKIDPLLIARRDYAYGTQRDYIDHQDIIGWTREGIDTKPNSGLAALITDGPGGSKWMYVGKKHAGKVFYDLTGNRSDTVTINADGWGEFKVNGGSVSIWVAKTSNVT

SEQ ID NO: 24700 - protein, 485 aa, Bacillus sp. TS-23
APINETMMQYFEWDLPNDGTLWTKVKNEAANLSSLGITALWLPPAWKGTSQSDVGYGAYDLYDLGEFNQKGTIRTKYGTKTQYIQAIQAAKAAGMQVYADVVFNHKAGADGTEFVDAVEVDPSNRNQETSGTYQIQAWTKFDFPGRGNTYSSFKWRWYHFDGTDWDESRKLNRIYKFSTKAWDWEVDTENGNYDYLMFADYDMDHPEVVTELKNWGTWYVNTTNIDGFRLDAVKHIKYSFFPDWLTYVRNQTGKNLFAVGEFWSYDVNKLHNYITKTNGSMSLFDAPLHNNFYTASKSSGYFDMRYLLNNTLMKDQPSLAVTLVDNHDTQPGQSLQSWVEPWFKPLAYAFILTRQEGYPCVFYGDYYGIPKYNIPGLKSKIDPLLEARRDYAYGTQRDYIDHQDIIGWTREGIDTKPNSGLAALITDGPGGSKWMYVGKKHAGKVFYDLTGNRSDTVTINADGWGEFKVNGGSVSIWVAKTSNVT

SEQ ID NO: 24701 - protein, 485 aa, Bacillus sp. TS-23
APINETMMQYFEWDLPNDGTLWTKVKNEAANLSSLGITALWLPPAWKGTSQSDVGYGVYDLYDLGEFNQKGTIRTKYGTKTQYIQAIQAAKAAGMQVYADVVFNHKAGADGTEFVDAVEVDPSNRNQETSGTYQIQAWTKFDFPGRGNTYSSFKWRWYHFDGTDWDESRKLNRIYKFSTKAWDWEVDTENGNYDYLMFADYDMDHPEVVTELKNWGTWYVNTTNIDGFRLDAVKHIKYSFFPDWLTYVRNQTGKNLFAVGEFWSYDVNKLHNYITKTNGSMSLFDAPLHNNFYTASKSSGYFDMRYLLNNTLMKDQPSLAVTLVDNHDTQPGQSLQSWVEPWFKPLAYAFILTRQEGYPCVFYGDYYGIPKYNIPGLKSKIDPLLIARRDYAYGTQRDYIDHQDIIGWTREGIDTKPNSGLAALITDGPGGSKWMYVGKKHAGKVFYDLTGNRSDTVTINADGWGEFKVNGGSVSIWVAKTSNVT

SEQ ID NO: 24702 - protein, 487 aa, Bacillus sp. TS-23
APINETMMQYFEWDLPNDGTLWTKVKNEAANLSSLGITALWLPPAYKGTSQSDVGYGVYDLYDLGEFNQKGTIRTKYGTKTQYIRAIQAAKAAGMQVYADVVFNHKAGADGTEFVDAVEVDPSNRNQETSGTYQIQAWTKFDFPGRGNTYSSFKWRWYHFDGTDWDESRKLNRIYKFRSTGKAWDWEVDTENGNYDYLMFADLDMDHPEVVTELKNWGTWYVNTTNIDGFRLDAVKHIKYSFFPDWLTYVRNQTGKNLFAVGEFWSYDVEKLHNYITKTNGSMSLFDAPLHNNFYTASKSSGYFDMRYLLNNTLMKDQPSLAVTLVDNHDTQPGQSLQSWVEPWFKPLAYAFILTRQEGYPCVFYGDYYGIPKYNIPGLKSKIDPLLIARRDYAYGTQRDYIDHQDIIGWTREGIDTKPNSGLAALITDGPGGSKWMYVGKKHAGKVFYDLTGNRSDTVTINADGWGEFKVNGGSVSIWVAKTSNVT

SEQ ID NO: 24703 - protein, 487 aa, Bacillus sp. TS-23
APINETMMQYFEWDLPNDGTLWTKVKNEAANLSSLGITALWLPPAYKGTSQSDVGYGVYDLYDLGEFNQKGTIRTKYGTKTQYIEAIQAAKAAGMQVYADVVFNHKAGADGTEFVDAVEVDPSNRNQETSGTYQIQAWTKFDFPGRGNTYSSFKWRWYHFDGTDWDESRKLNRIYKFRSTGKAWDWEVDTENGNYDYLMFADLDMDHPEVVTELKNWGTWYVNTTNIDGFRLDAVKHIKYSFFPDWLTYVRNQTGKNLFAVGEFWSYDVRKLHNYITKTRGSMSLFDAPLHNNFYTASKSSGYFDMRYLLNNTLMKDQPSLAVTLVDNHDTQPGQSLQSWVEPWFKPLAYAFILTRQEGYPCVFYGDYYGIPKYNIPGLKSKIDPLLIARRDYAYGTQRDYIDHQDIIGWTREGIDTKPNSGLAALITDGPGGSKWMYVGKKHAGKVFYDLTGNRSDTVTINADGWGEFKVNGGSVSIWVAKTSNVT

SEQ ID NO: 24704 - protein, 487 aa, Bacillus sp. TS-23
APINETMMQYFEWDLPNDGTLWTKVKNEAANLSSLGITALWLPPAYKGTSQSDVGYGVYDLYDLGEFNQKGTIRTKYGTKTQYIRAIQAAKAAGMQVYADVVFNHKAGADGTEFVDAVEVDPSNRNQETSGTYQIQAWTKFDFPGRGNTYSSFKWRWYHFDGTDWDESRKLNRIYKFRSTGKAWDWEVDTENGNYDYLMFADLDMDHPEVVTELKNWGTWYVNTTNIDGFRLDAVKHIKYSFFPDWLTYVRNQTGKNLFAVGEFWSYDVRKLHNYITKTRGSMSLFDAPLHNNFYTASKSSGYFDMRYLLNNTLMKDQPSLAVTLVDNHDTQPGQSLQSWVEPWFKPLAYAFILTRQEGYPCVFYGDYYGIPKYNIPGLKSKIDPLLIARRDYAYGTQRDYIDHQDIIGWTREGIDTKPNSGLAALITDGPGGSKWMYVGKKHAGKVFYDLTGNRSDTVTINADGWGEFKVNGGSVSIWVAKTSNVT

SEQ ID NO: 24705 - protein, 487 aa, Bacillus sp. TS-23
APINETMMQYFEWDLPNDGTLWTKVKNEAANLSSLGITALWLPPAYKGTSQSDVGYGVYDLYDLGEFNQKGTIRTKYGTKTQYIEAIQAAKAAGMQVYADVVFNHKAGADGTEFVDAVEVDPSNRNQETSGTYQIQAWTKFDFPGRGNTYSSFKWRWYHFDGTDWDESRKLNRIYKFRSTGKAWDWEVDTENGNYDYLMFADLDMDHPEVVTELKNWGTWYVRTTNIDGFRLDAVKHIKYSFFPDWLTYVRNQTGKNLFAVGEFWSYDVNKLHNYITKTNGSMSLFDAPLHNNFYTASKSSGYFDMRYLLNNTLMKDQPSLAVTLVDNHDTQPGQSLQSWVEPWFKPLAYAFILTRQEGYPCVFYGDYYGIPKYNIPGLKSKIDPLLIARRDYAYGTQRDYIDHQDIIGWTREGIDTKPNSGLAALITDGPGGSKWMYVGKKHAGKVFYDLTGNRSDTVTINADGWGEFKVNGGSVSIWVAKTSNVT

SEQ ID NO: 24706 - protein, 485 aa, Bacillus sp. TS-23
APINETMMQYFEWDLPNDGTLWTKVKNEAANLSSLGITALWLPPAWKGTSQSDVGYGAYDLYDLGEFNQKGTIRTKYGTKTQYIQAIQAAKAAGMQVYADVVFNHKAGADGTEFVDAVEVDPSNRNQETSGTYQIQAWTKFDFPGRGNTYSSFKWRWYHFDGTDWDESRKLNRIYKFRSKAWDWEVDTENGNYDYLMFADYDMDHPEVVTELKNWGTWYVNTTNIDGFRLDAVKHIKYSFFPDWLTYVRNQTGKNLFAVGEFWSYDVNKLHNYITKTNGSMSLFDAPLHNNFYTASKSSGYFDMRYLLNNTLMKDQPSLAVTLVDNHDTQPGQSLQSWVEPWFKPLAYAFILTRQEGYPCVFYGDYYGIPKYNIPGLKSKIDPLLIARRDYAYGTQRDYIDHQDIIGWTREGIDTKPNSGLAALITDGPGGSKWMYVGKKHAGKVFYDLTGNRSDTVTINADGWGEFKVNGGSVSIWVAKTSNVT

SEQ ID NO: 24707 - protein, 487 aa, Bacillus sp. TS-23
APINETMMQYFEWDLPNDGTLWTKVKNEAANLSSLGITALWLPPAYKGTSQSDVGYGVYDLYDLGEFNQKGTIRTKYGTKTQYIQAIQAAKAAGMQVYADVVFNHKAGADGTEFVDAVEVDPSNRNQETSGTYQIQAWTKFDFPGRGNTYSSFKWRWYHFDGTDWDESRKLNRIYKFRSTGKAWDWEVDTENGNYDYLMFADLDMDHPEVVTELKNWGTWYVETTNIDGFRLDAVKHIKYSFFPDWLTYVRNQTGKNLFAVGEFWSYDVEKLHNYITKTRGSMSLFDAPLHNNFYTASKSSGYFDMRYLLNNTLMKDQPSLAVTLVDNHDTQPGQSLQSWVEPWFKPLAYAFILTRQEGYPCVFYGDYYGIPKYNIPGLKSKIDPLLIARRDYAYGTQRDYIDHQDIIGWTREGIDTKPNSGLAALITDGPGGSKWMYVGKKHAGKVFYDLTGNRSDTVTINADGWGEFKVNGGSVSIWVAKTSNVT

SEQ ID NO: 24708 - protein, 487 aa, Bacillus sp. TS-23
APINETMMQYFEWDLPNDGTLWTKVKNEAANLSSLGITALWLPPAYKGTSQSDVGYGVYDLYDLGEFNQKGTIRTKYGTKTQYIQAIQAAKAAGMQVYADVVFNHKAGADGTEFVDAVEVDPSNRNQETSGTYQIQAWTKFDFPGRGNTYSSFKWRWYHFDGTDWDESRKLNRIYKFRSTGKAWDWEVDTENGNYDYLMFADLDMDHPEVVTELKNWGTWYVETTNIDGFRLDAVKHIKYSFFPDWLTYVRNQTGKNLFAVGEFWSYDVRKLHNYITKTNGSMSLFDAPLHNNFYTASKSSGYFDMRYLLNNTLMKDQPSLAVTLVDNHDTQPGQSLQSWVEPWFKPLAYAFILTRQEGYPCVFYGDYYGIPKYNIPGLKSKIDPLLIARRDYAYGTQRDYIDHQDIIGWTREGIDTKPNSGLAALITDGPGGSKWMYVGKKHAGKVFYDLTGNRSDTVTINADGWGEFKVNGGSVSIWVAKTSNVT

SEQ ID NO: 24709 - protein, 487 aa, Bacillus sp. TS-23
APINETMMQYFEWDLPNDGTLWTKVKNEAANLSSLGITALWLPPAYKGTSQSDVGYGVYDLYDLGEFNQKGTIRTKYGTKTQYIQAIQAAKAAGMQVYADVVFNHKAGADGTEFVDAVEVDPSNRNQETSGTYQIQAWTKFDFPGRGNTYSSFKWRWYHFDGTDWDESRKLNRIYKFRSTGKAWDWEVDTENGNYDYLMFADLDMDHPEVVTELKNWGTWYVRTTNIDGFRLDAVKHIKYSFFPDWLTYVRNQTGKNLFAVGEFWSYDVRKLHNYITKTEGSMSLFDAPLHNNFYTASKSSGYFDMRYLLNNTLMKDQPSLAVTLVDNHDTQPGQSLQSWVEPWFKPLAYAFILTRQEGYPCVFYGDYYGIPKYNIPGLKSKIDPLLIARRDYAYGTQRDYIDHQDIIGWTREGIDTKPNSGLAALITDGPGGSKWMYVGKKHAGKVFYDLTGNRSDTVTINADGWGEFKVNGGSVSIWVAKTSNVT

SEQ ID NO: 24710 - protein, 487 aa, Bacillus sp. TS-23
APINETMMQYFEWDLPNDGTLWTKVKNEAANLSSLGITALWLPPAYKGTSQSDVGYGVYDLYDLGEFNQKGTIRTKYGTKTQYIRAIQAAKAAGMQVYADVVFNHKAGADGTEFVDAVEVDPSNRNQETSGTYQIQAWTKFDFPGRGNTYSSFKWRWYHFDGTDWDESRKLNRIYKFRSTGKAWDWEVDTENGNYDYLMFADLDMDHPEVVTELKNWGTWYVETTNIDGFRLDAVKHIKYSFFPDWLTYVRNQTGKNLFAVGEFWSYDVNKLHNYITKTRGSMSLFDAPLHNNFYTASKSSGYFDMRYLLNNTLMKDQPSLAVTLVDNHDTQPGQSLQSWVEPWFKPLAYAFILTRQEGYPCVFYGDYYGIPKYNIPGLKSKIDPLLIARRDYAYGTQRDYIDHQDIIGWTREGIDTKPNSGLAALITDGPGGSKWMYVGKKHAGKVFYDLTGNRSDTVTINADGWGEFKVNGGSVSIWVAKTSNVT

SEQ ID NO: 24711 - protein, 487 aa, Bacillus sp. TS-23
APINETMMQYFEWDLPNDGTLWTKVKNEAANLSSLGITALWLPPAYKGTSQSDVGYGVYDLYDLGEFNQKGTIRTKYGTKTQYIEAIQAAKAAGMQVYADVVFNHKAGADGTEFVDAVEVDPSNRNQETSGTYQIQAWTKFDFPGRGNTYSSFKWRWYHFDGTDWDESRKLNRIYKFRSTGKAWDWEVDTENGNYDYLMFADLDMDHPEVVTELKNWGTWYVNTTNIDGFRLDAVKHIKYSFFPDWLTYVRNQTGKNLFAVGEFWSYDVRKLHNYITKTNGSMSLFDAPLHNNFYTASKSSGYFDMRYLLNNTLMKDQPSLAVTLVDNHDTQPGQSLQSWVEPWFKPLAYAFILTRQEGYPCVFYGDYYGIPKYNIPGLKSKIDPLLIARRDYAYGTQRDYIDHQDIIGWTREGIDTKPNSGLAALITDGPGGSKWMYVGKKHAGKVFYDLTGNRSDTVTINADGWGEFKVNGGSVSIWVAKTSNVT

SEQ ID NO: 24712 - protein, 487 aa, Bacillus sp. TS-23
APINETMMQYFEWDLPNDGTLWTKVKNEAANLSSLGITALWLPPAYKGTSQSDVGYGVYDLYDLGEFNQKGTIRTKYGTKTQYIQAIQAAKAAGMQVYADVVFNHKAGADGTEFVDAVEVDPSNRNQETSGTYQIQAWTKFDFPGRGNTYSSFKWRWYHFDGTDWDESRKLNRIYKFRSTGKAWDWEVDTENGNYDYLMFADLDMDHPEVVTELKNWGTWYVRTTNIDGFRLDAVKHIKYSFFPDWLTYVRNQTGKNLFAVGEFWSYDVEKLHNYITKTRGSMSLFDAPLHNNFYTASKSSGYFDMRYLLNNTLMKDQPSLAVTLVDNHDTQPGQSLQSWVEPWFKPLAYAFILTRQEGYPCVFYGDYYGIPKYNIPGLKSKIDPLLIARRDYAYGTQRDYIDHQDIIGWTREGIDTKPNSGLAALITDGPGGSKWMYVGKKHAGKVFYDLTGNRSDTVTINADGWGEFKVNGGSVSIWVAKTSNVT

SEQ ID NO: 24713 - protein, 487 aa, Bacillus sp. TS-23
APINETMMQYFEWDLPNDGTLWTKVKNEAANLSSLGITALWLPPAYKGTSQSDVGYGVYDLYDLGEFNQKGTIRTKYGTKTQYIRAIQAAKAAGMQVYADVVFNHKAGADGTEFVDAVEVDPSNRNQETSGTYQIQAWTKFDFPGRGNTYSSFKWRWYHFDGTDWDESRKLNRIYKFRSTGKAWDWEVDTENGNYDYLMFADLDMDHPEVVTELKNWGTWYVNTTNIDGFRLDAVKHIKYSFFPDWLTYVRNQTGKNLFAVGEFWSYDVRKLHNYITKTNGSMSLFDAPLHNNFYTASKSSGYFDMRYLLNNTLMKDQPSLAVTLVDNHDTQPGQSLQSWVEPWFKPLAYAFILTRQEGYPCVFYGDYYGIPKYNIPGLKSKIDPLLIARRDYAYGTQRDYIDHQDIIGWTREGIDTKPNSGLAALITDGPGGSKWMYVGKKHAGKVFYDLTGNRSDTVTINADGWGEFKVNGGSVSIWVAKTSNVT

SEQ ID NO: 24714 - protein, 487 aa, Bacillus sp. TS-23
APINETMMQYFEWDLPNDGTLWTKVKNEAANLSSLGITALWLPPAYKGTSQSDVGYGVYDLYDLGEFNQKGTIRTKYGTKTQYIEAIQAAKAAGMQVYADVVFNHKAGADGTEFVDAVEVDPSNRNQETSGTYQIQAWTKFDFPGRGNTYSSFKWRWYHFDGTDWDESRKLNRIYKFRSTGKAWDWEVDTENGNYDYLMFADLDMDHPEVVTELKNWGTWYVNTTNIDGFRLDAVKHIKYSFFPDWLTYVRNQTGKNLFAVGEFWSYDVEKLHNYITKTEGSMSLFDAPLHNNFYTASKSSGYFDMRYLLNNTLMKDQPSLAVTLVDNHDTQPGQSLQSWVEPWFKPLAYAFILTRQEGYPCVFYGDYYGIPKYNIPGLKSKIDPLLIARRDYAYGTQRDYIDHQDIIGWTREGIDTKPNSGLAALITDGPGGSKWMYVGKKHAGKVFYDLTGNRSDTVTINADGWGEFKVNGGSVSIWVAKTSNVT

SEQ ID NO: 24715 - protein, 487 aa, Bacillus sp. TS-23
APINETMMQYFEWDLPNDGTLWTKVKNEAANLSSLGITALWLPPAYKGTSQSDVGYGVYDLYDLGEFNQKGTIRTKYGTKTQYIRAIQAAKAAGMQVYADVVFNHKAGADGTEFVDAVEVDPSNRNQETSGTYQIQAWTKFDFPGRGNTYSSFKWRWYHFDGTDWDESRKLNRIYKFRSTGKAWDWEVDTENGNYDYLMFADLDMDHPEVVTELKNWGTWYVRTTNIDGFRLDAVKHIKYSFFPDWLTYVRNQTGKNLFAVGEFWSYDVNKLHNYITKTEGSMSLFDAPLHNNFYTASKSSGYFDMRYLLNNTLMKDQPSLAVTLVDNHDTQPGQSLQSWVEPWFKPLAYAFILTRQEGYPCVFYGDYYGIPKYNIPGLKSKIDPLLIARRDYAYGTQRDYIDHQDIIGWTREGIDTKPNSGLAALITDGPGGSKWMYVGKKHAGKVFYDLTGNRSDTVTINADGWGEFKVNGGSVSIWVAKTSNVT

SEQ ID NO: 24716 - protein, 487 aa, Bacillus sp. TS-23
APINETMMQYFEWDLPNDGTLWTKVKNEAANLSSLGITALWLPPAYKGTSQSDVGYGVYDLYDLGEFNQKGTIRTKYGTKTQYIEAIQAAKAAGMQVYADVVFNHKAGADGTEFVDAVEVDPSNRNQETSGTYQIQAWTKFDFPGRGNTYSSFKWRWYHFDGTDWDESRKLNRIYKFRSTGKAWDWEVDTENGNYDYLMFADLDMDHPEVVTELKNWGTWYVNTTNIDGFRLDAVKHIKYSFFPDWLTYVRNQTGKNLFAVGEFWSYDVEKLHNYITKTNGSMSLFDAPLHNNFYTASKSSGYFDMRYLLNNTLMKDQPSLAVTLVDNHDTQPGQSLQSWVEPWFKPLAYAFILTRQEGYPCVFYGDYYGIPKYNIPGLKSKIDPLLIARRDYAYGTQRDYIDHQDIIGWTREGIDTKPNSGLAALITDGPGGSKWMYVGKKHAGKVFYDLTGNRSDTVTINADGWGEFKVNGGSVSIWVAKTSNVT

SEQ ID NO: 24717 - protein, 483 aa, Bacillus licheniformis
HHNGTNGTMMQYFEWYLPNDGNHWNRLRSDASNLKDKGITAVWIPPAWKGASQNDVGYGAYDLYDLGEFNQKGTVRTKYGTRNQLQAAVTALKSNGIQVYGDVVMNHKGGADAFEWVRAVEVNPSNRNQEVSGDYTIEAWTKFDFPGRGNTHSNFKWRWYHFDGVDWDQSRQLQNRIYKFRGKGWDWEVDTENGNYDYLMYADIDMDHPEVVNELRNWGVWYTNTLGLDGFRIDAVKHIKYSFTRDWLTHVRNTTGKNMFAVAEFWKNDIGAIENYLSKTNWNHSVFDVPLHYNLYNASRSGGNYDMRQIFNGTVVQRHPTHAVTFVDNHDSQPEEALESFVEEWFKPLAYALTLTRDQGYPSVFYGDYYGIPTHGVPAMKSKIDPILEARQKYAYGTQRDYLDHPDVIGWTREGDGVHADSGLATLMSDGPGGSKWMEVGKNNAGEVWYDITGNQTNTVTINKDGWGQFHVSGGSVSIYVQQ

SEQ ID NO: 24718 - protein, 483 aa, Bacillus licheniformis
HHNGTNGTMMQYFEWYLPNCGNHWNRLRSDASNLKDKGITAVWIPPAWKGASQNDVGYGAYDLYDLGEFNQKGTVRTKYGTRNQLQAAVTALKSNGIQVYGDVVMNHKGGADATEWVRAVEVNPSNRNQEVSGDYTIEAWTKFDFPGRGNTHSNFKWRWYHFDGVDWDQSRQLQNRIYKFRGKGWDWEVDTENGNYDYLMYADIDMDHPEVVNELRNWGVWYTNTLGLDGFRIDAVKHIKYSFTRDWLTHVRNTTGKNMFAVAEFWKNDIGAIENYLSKTNWNHSVFDVPLHYNLYNASRSGGNYDMRQIFNGTVVQRHPTHAVTFVDNHDSQPEEALESFVEEWFKPLAYALTLTRDQGYPSVFYGDYYGIPTHGVPAMKSKIDPILEARQKYAYGTQRDYLDHPDVIGWTREGDGVHADSGLATLMSDGPGGSKWMEVGKNNAGEVWYDITGNQTNTVTINKDGWGQFHVSGGSVSIYVQQ

SEQ ID NO: 24719 - protein, 483 aa, Bacillus licheniformis
HHNGTNGTMMQYFEWYLPNFGNHWNRLRSDASNLKDKGITAVWIPPAWKGASQNDVGYGAYDLYDLGEFNQKGTVRTKYGTRNQLQAAVTALKSNGIQVYGDVVMNHKGGADATEWVRAVEVNPSNRNQEVSGDYTIEAWTKFDFPGRGNTHSNFKWRWYHFDGVDWDQSRQLQNRIYKFRGKGWDWEVDTENGNYDYLMYADIDMDHPEVVNELRNWGVWYTNTLGLDGFRIDAVKHIKYSFTRDWLTHVRNTTGKNMFAVAEFWKNDIGAIENYLSKTNWNHSVFDVPLHYNLYNASRSGGNYDMRQIFNGTVVQRHPTHAVTFVDNHDSQPEEALESFVEEWFKPLAYALTLTRDQGYPSVFYGDYYGIPTHGVPAMKSKIDPILEARQKYAYGTQRDYLDHPDVIGWTREGDGVHADSGLATLMSDGPGGSKWMEVGKNNAGEVWYDITGNQTNTVTINKDGWGQFHVSGGSVSIYVQQ

SEQ ID NO: 24720 - protein, 483 aa, Bacillus licheniformis
HHNGTNGTMMQYFEWYLPNDGNHWNRLRSDASNLKDKGITAVWIPPAWKGASQNDVGYGAYDLYDLGEFNQKGTVRTKYGTRNQLQAAVTALKSNGIQVYGDVVMNHKGGADATEWVRAVEVNPSNRNQEVSGDYTIEAWTKFDFPGRGNTHSNFKWRWYHFDGVDWDQSRQLQNRIYKFRGKGWDWEVDTENGNYDYLMYADIDMDHPEVVNELRNWGVWYTNRLGLDGFRIDAVKHIKYSFTRDWLTHVRNTTGKNMFAVAEFWKNDIGAIENYLSKTNWNHSVFDVPLHYNLYNASRSGGNYDMRQIFNGTVVQRHPTHAVTFVDNHDSQPEEALESFVEEWFKPLAYALTLTRDQGYPSVFYGDYYGIPTHGVPAMKSKIDPILEARQKYAYGTQRDYLDHPDVIGWTREGDGVHADSGLATLMSDGPGGSKWMEVGKNNAGEVWYDITGNQTNTVTINKDGWGQFHVSGGSVSIYVQQ

SEQ ID NO: 24721 - protein, 483 aa, Bacillus licheniformis
HHNGTNGTMMQYFEWYLPNDGNHWNRLRSDASNLKDKGITAVWIPPAWKGASQNDVGYGAYDLYDLGEFNQKGTVRTKYGTRNQLQAAVTALKSNGIQVYGDVVMNHKGGADATEWVRAVEVNPSNRNQEVSGDYTIEAWTKFDFPGRGNTHSNFKWRWYHFDGVDWDQSRQLQNRIYKFRGKGWDWEVDTENGNYDYLMYADIDMDHPEVVNELRNWGVWYTNTLGLDGFRIDAVKHIKYSFTRDWLTHVRTTTGKNMFAVAEFWKNDIGAIENYLSKTNWNHSVFDVPLHYNLYNASRSGGNYDMRQIFNGTVVQRHPTHAVTFVDNHDSQPEEALESFVEEWFKPLAYALTLTRDQGYPSVFYGDYYGIPTHGVPAMKSKIDPILEARQKYAYGTQRDYLDHPDVIGWTREGDGVHADSGLATLMSDGPGGSKWMEVGKNNAGEVWYDITGNQTNTVTINKDGWGQFHVSGGSVSIYVQQ

SEQ ID NO: 24722 - protein, 483 aa, Bacillus licheniformis
HHNGTNGTMMQYFEWYLPNDGNHWNRLRSDASNLKDKGITAVWIPPAWKGASQNDVGYGAYDLYDLGEFNQKGTVRTKYGTRNQLQAAVTALKSNGIQVYGDVVMNHKGGADATEWVRAVEVNPSNRNQEVSGDYTIEAWTKFDFPGRGNTHSNFKWRWYHFDGVDWDQSRQLQNRIYKFRGKGWDWEVDTENGNYDYLMYADIDMDHPEVVNELRNWGVWYTNTLGLDGFRIDAVKHIKYSFTRDWLTHVRNTTGKNMFAVAEFWKNDIGAIENYLSKTNWNHSVFDVPLHYNLYNASRSGGNYDMRQIFNGTVVQRHPTHAVTFVDNHDSQPEEALESFVENWFKPLAYALTLTRDQGYPSVFYGDYYGIPTHGVPAMKSKIDPILEARQKYAYGTQRDYLDHPDVIGWTREGDGVHADSGLATLMSDGPGGSKWMEVGKNNAGEVWYDITGNQTNTVTINKDGWGQFHVSGGSVSIYVQQ

SEQ ID NO: 24723 - protein, 483 aa, Bacillus licheniformis
HHNGTNGTMMQYFEWYLPNDGNHWNRLRSDASNLKDKGITAVWIPPAWKGASQNDVGYGAYDLYDLGEFNQKGTVRTKYGTRNQLQAAVTALKSNGIQVYGDVVMNHKGGADATEWVRAVEVNPSNRNQEVSGDYTIEAWTKFDFPGRGNTHSNFKWRWDHFDGVDWDQSRQLQNRIYKFRGKEWDWEVDTENGNYDYLMYADIDMDHPEVVNELRNWGVWYTNTLGLDGFRIDAVKHIKYSFTRDWLTHVRNTTGKNMFAVAEFWKNDIGAIENYLSKTNWNHSVFDVPLHYNLYNASRSGGNYDMRQIFNGTVVQRHPTHAVTFVDNHDSQPEEALESFVEEWFKPLAYALTLTRDQGYPSVFYGDYYGIPTHGVPAMKSKIDPILEARQKYAYGTQRDYLDHPDVIGWTREGDGEHADSGLATLMSDGPGGSKWMEVGKNNAGEVWRDITGNQTNTVTINKDGWGQFHVSGGSVSIYVQQ

SEQ ID NO: 24724 - protein, 483 aa, Bacillus licheniformis
HHNGTNGTMMQYFEWYLMNDGNHWNRLRSDASNLKDKGITAVWIPPAWKGASQNDVGYGAYDLYDLGEFNQKGTVRTKYGTRNQLQAAVTALKSNGIQVYGDVVMNHKGGADATEWVRAVEVNPSNRNQEVSGDYTIEAWTKFDFPGRGNTHSNFKWRWYHFDGVDWDQSRQLQNRIYKFRGKGWDWEVDTENGNYDYLMYADIDMDHPEVVNELRNWGVWYTNTLGLDGFRIDAVKHIKYSFTRDWLTHVRNTTGKNMFAVAEFWKNDIGAIENYLSKTNWNHSVFDVPLHYNLYNASRSGGNYDMRQIFNGTVVQRHPTHAVTFVDNHDSQPEEALESFVEEWFKPLAYALTLTRDQGYPSVFYGDYYGIPTHGVPAMKSKIDPILEARQKYAYGTQRDYLDHPDVIGWTREGDGVHADSGLATLMSDGPGGSKWMEVGKNNAGEVWYDITGNQTNTVTINKDGWGQFHVSGGSVSIYVQQ

SEQ ID NO: 24725 - protein, 483 aa, Bacillus licheniformis
HHNGTNGTMMQYFEWYLPNDGLHWNRLRSDASNLKDKGITAVWIPPAWKGASQNDVGYGAYDLYDLGEFNQKGTVRTKYGTRNQLQAAVTALKSNGIQVYGDVVMNHKGGADATEWVRAVEVNPSNRNQEVSGDYTIEAWTKFDFPGRGNTHSNFKWRWYHFDGVDWDQSRQLQNRIYKFRGKGWDWEVDTENGNYDYLMYADIDMDHPEVVNELRNWGVWYTNTLGLDGFRIDAVKHIKYSFTRDWLTHVRNTTGKNMFAVAEFWKNDIGAIENYLSKTNWNHSVFDVPLHYNLYNASRSGGNYDMRQIFNGTVVQRHPTHAVTFVDNHDSQPEEALESFVEEWFKPLAYALTLTRDQGYPSVFYGDYYGIPTHGVPAMKSKIDPILEARQKYAYGTQRDYLDHPDVIGWTREGDGVHADSGLATLMSDGPGGSKWMEVGKNNAGEVWYDITGNQTNTVTINKDGWGQFHVSGGSVSIYVQQ

SEQ ID NO: 24726 - protein, 483 aa, Bacillus licheniformis
HHNGTNGTMMQYFEWYLPNDGNHWNRLRSDASNLKDKGITAVWIPPAWKGASQNDVGYGAYDLYDLGEFNQKGTVRTKYGTRNQLQAAVTALKSNGIQVYGDVVMNHKGGADATEWVRAVEVNPSNRNQEVSGDYTIEAWTKFDFPGRGNTHSNFKWRWYHFDGVDWDQSRQLQNRIYKFRGKGWDWEVDTENGNYDYLMYADIDMDHPEVVNELRNWGVWYTNTLGLDGFRIDAVKHIKYSFTRDWLTHVRNTTGKNMFAVAEFWKNDIGAIENYLSKTNWNHSVFDVPLHYNLYNASRSGGNYDMRQIFNGTVVQRHPTHAVTFVDNHDSQPEEALESFVEEWFKPLAYALTLTRDQGYPSVFYGDYYGIPTHGVPAMKSKIDPILEAQQKYAYGTQRDYLDHPDVIGWTREGDGVHADSGLATLMSDGPGGSKWMEVGKNNAGEVWYDITGNQTNTVTINKDGWGQFHVSGGSVSIYVQQ

SEQ ID NO: 24727 - protein, 483 aa, Bacillus licheniformis
HHNGPNGTMMQYFEWYLPNDGNHWNRLRSDASNLKDKGITAVWIPPAWKGASQNDVGYGAYDLYDLGEFNQKGTVRTKYGTRNQLQAAVTALKSNGIQVYGDVVMNHKGGADATEWVRAVEVNPSNRNQEVSGDYTIEAWTKFDFPGRGNTHSNFKWRWYHFDGVDWDQSRQLQNRIYKFRGKGWDWEVDTENGNYDYLMYADIDMDHPEVVNELRNWGVWYTNTLGLDGFRIDAVKHIKYSFTRDWLTHVRNTTGKNMFAVAEFWKNDIGAIENYLSKTNWNHSVFDVPLHYNLYNASRSGGNYDMRQIFNGTVVQRHPTHAVTFVDNHDSQPEEALESFVEEWFKPLAYALTLTRDQGYPSVFYGDYYGIPTHGVPAMKSKIDPILEARQKYAYGTQRDYLDHPDVIGWTREGDGVHADSGLATLMSDGPGGSKWMEVGKNNAGEVWYDITGNQTNTVTINKDGWGQFHVSGGSVSIYVQQ

SEQ ID NO: 24728 - protein, 483 aa, Bacillus licheniformis
HHNQTNGTMMQYFEWYLPNDGNHWNRLRSDASNLKDKGITAVWIPPAWKGASQNDVGYGAYDLYDLGEFNQKGTVRTKYGTRNQLQAAVTALKSNGIQVYGDVVMNHKGGADATEWVRAVEVNPSNRNQEVSGDYTIEAWTKFDFPGRGNTHSNFKWRWYHFDGVDWDQSRQLQNRIYKFRGKEWDWEVDTENGNYDYLMYADYDMDHPEVVNELRNWGVWYTNTLGLDGFRIDAVKHIKYSFTRDWLTHVRNTTGKNMFAVAEFWKNDIGAIENYLSKTNWNHSVFDVPLHYNLYNASRSGGNYDMRQIFNGTVVQRHPTHAVTFVDNHDSQPEEALESFVEEWFKPLAYALTLTRDQGYPSVFYGDYYGIPTHGVPAMKSKIDPILEARQKYAYGTQRDYMDHPDVIGWTREGDGVHADSGLATLMSDGPGGSKWMEVGKNNAGEVWYDITGNQTNTVTINKDGWGQFHVSGGSVSIYVQQ

SEQ ID NO: 24729 - protein, 483 aa, Bacillus licheniformis
HHNGTNGTMMQYFEWYLPNDGNHWNRLRSDASNLKDKGITAVWIPPAWKGASQNDVGYGAYDLYDLGEFNQKGTVRTKYGTRNQLQAAVTALKSNGIQVYGDVVMNHKGGADATEWVRAVEVNPSNRNQEVSGDYTIEAWTKFDFPGRGNTHSNFKWRWYHFDGVDWDQSRQLQNRIYKFRGKGWDWEVDTENGNYDYLMYADIDMDHPEVVNELRNWGVWYTNTLGLDGFRIDAVKHIKYSFTRDWLTHVRITTGKNMFAVAEFWKNDIGAIENYLSKTNWNHSVFDVPLHYNLYNASRSGGNYDMRQIFNGTVVQRHPTHAVTFVDNHDSQPEEALESFVEEWFKPLAYALTLTRDQGYPSVFYGDYYGIPTHGVPAMKSKIDPILEARQKYAYGTQRDYLDHPDVIGWTREGDGVHADSGLATLMSDGPGGSKWMEVGKNNAGEVWYDITGNQTNTVTINKDGWGQFHVSGGSVSIYVQQ

SEQ ID NO: 24730 - protein, 483 aa, Bacillus licheniformis
HHNGTNGTMMQYFEWYLPNDGNHWNRLRSDASNLKDKGITAVWIPPAWKGASQNDVGYGAYDLYDLGEFNQKGTVRTKYGTRNQLQAAVTALKSNKIQVYGDVVMNHKGGADATEWVRAVEVNPSNRNQEVSGDYTIEAWTKFDFPGRGNTHSNFKWRWYHFDGVDWDQSRQLQNRIYKFRGKGWDWEVDTENGNYDYLMYADIDMDHPEVVNELRNWGVWYTNTLGLDGFRIDAVKHIKYSFTRDWLTHVRNTTGKNMFAVAEFWKNDIGAIENYLSKTNWNHSVFDVPLHYNLYNASRSGGNYDMRQIFNGTVVQRHPTHAVTFVDNHDSQPEEALESFVEEWFKPLAYALTLTRDQGYPSVFYGDYYGIPTHGVPAMKSKIDPILEARQKYAYGTQRDYLDHPDVIGWTREGDGVHADSGLATLMSDGPGGSKWMEVGKNNAGEVWYDITGNQTNTVTINKDGWGQFHVSGGSVSIYVQQ

SEQ ID NO: 24731 - protein, 483 aa, Bacillus licheniformis
HHNGTNGTMMQYFEWYLPNDGNHWNRLRSDASNLKDKGITAVWIPPAWKGASQNDVGYGAYDLYDLGEFNQKGTVRTKYGTRNQLQAAVTALKSNGIQVYGDVVMNHKGGADATEWVRAVEVNPSNRNQEVSGDMTIEAWTKFDFPGRGNTHSNFKWRWYHFDGVDWDQSRQLQNRIYKFRGKGWDWEVDTENGNYDYLMYADIDMDHPEVVNELRNWGVWYTNTLGLDGFRIDAVKHIKYSFTRDWLTHVRNTTGKNMFAVAEFWKNDIGAIENYLSKTNWNHSVFDVPLHYNLYNASRSGGNYDMRQIFNGTVVQRHPTHAVTFVDNHDSQPEEALESFVEEWFKPLAYALTLTRDQGYPSVFYGDYYGIPTHGVPAMKSKIDPILEARQKYAYGTQRDYLDHPDVIGWTREGDGVHADSGLATLMSDGPGGSKWMEVGKNNAGEVWYDITGNQTNTVTINKDGWGQFHVSGGSVSIYVQQ

SEQ ID NO: 24732 - protein, 483 aa, Bacillus licheniformis
HHNGTNGTMMQYFEWYLPNDGNHWNRLRSDASNLKDKGITAVWIPPAWKGASQNDVGYGAYDLYDLGEFNQKGTVRTKYGTRNQLQAAVTALKSNGIQVYGDVVMNHKGGADATEWVRAVEVNPSNRNQEVSGDYTIEAWTKFDFPGRGNTHSNFKWRWYHFDGVDWDQSRQLQNRIYKFRGMGWDWEVDTENGNYDYLMYADIDMDHPEVVNELRNWGVWYTNTLGLDGFRIDAVKHIKYSFTRDWLTHVRNTTGKNMFAVAEFWKNDIGAIENYLSKTNWNHSVFDVPLHYNLYNASRSGGNYDMRQIFNGTVVQRHPTHAVTFVDNHDSQPEEALESFVEEWFKPLAYALTLTRDQGYPSVFYGDYYGIPTHGVPAMKSKIDPILEARQKYAYGTQRDYLDHPDVIGWTREGDGVHADSGLATLMSDGPGGSKWMEVGKNNAGEVWYDITGNQTNTVTINKDGWGQFHVSGGSVSIYVQQ

SEQ ID NO: 24733 - protein, 483 aa, Bacillus licheniformis
HHNGTNGTMMQYFEWYLPNDGNHWNRLRSDASNLKDKGITAVWIPPAWKGASQNDVGYGAYDLYDLGEFNQKGTVRTKYGTRNQLQAAVTALKSNGIQVYGDVVMNHKGGADATEWVRAVEVNPSNRNQEVSGDYTIEAWTKFDFPGRGNTHSNFKWRWYHFDGVDWDQSRQLQNRIYKFRGKGWDWEVDTENGNYDYLMYADIDMDHPEVVNELRNWGVWYTNTLGLDGFRIDAVKHIKYSFTRDWLTHVRDTTGKNMFAVAEFWKNDIGAIENYLSKTNWNHSVFDVPLHYNLYNASRSGGNYDMRQIFNGTVVQRHPTHAVTFVDNHDSQPEEALESFVEEWFKPLAYALTLTRDQGYPSVFYGDYYGIPTHGVPAMKSKIDPILEARQKYAYGTQRDYLDHPDVIGWTREGDGVHADSGLATLMSDGPGGSKWMEVGKNNAGEVWYDITGNQTNTVTINKDGWGQFHVSGGSVSIYVQQ

SEQ ID NO: 24734 - protein, 483 aa, Bacillus licheniformis
HHNGTNGTMMQYFEWYLPNDGNHWNRLRSDASNLKDKGITAVWIPPAWKGASQNDVGYGAYDLYDLGEFNQKGTVRTKYGTRNQLQAAVTALKSNGIQVYGDVVMNHKGGADATEWVRAVEVNPSNRNQEVSGDYTIEAWTKFDFPGRGNTHSNFKWRWYHFDGVDWDQSRQLQNRIYKFRGKGWDWEVDTENGNYDYLMYADIDMDHPEVVNELRNWGVWYTNTLGLDGFRIDAVKHIKYSFTRDWLTHVRNTTGKNMFAVAEFWKNDIGAIENYLSKTNWNHSVFDVPLHYNLYNASRSGGNYDMRQIFNGTVVQRHPTHAVTFVDNHDSQPEEALESFVEEWFKPLAYALTLTRDQFYPSVFYGDYYGIPTHGVPAMKSKIDPILEARQKYAYGTQRDYLDHPDVIGWTREGDGVHADSGLATLMSDGPGGSKWMEVGKNNAGEVWYDITGNQTNTVTINKDGWGQFHVSGGSVSIYVQQ

SEQ ID NO: 24735 - protein, 483 aa, Bacillus licheniformis
HHNGTNGTMMQYFEWYLPNDGNHWNRLRSDASNLKDKGITAVWIPPAWKGASQNDVGYGAYDLYDLGEFNQKGTVRTKYGTRNQLQAAVTALKSNGIQVYGDVVMNHKGGADATEWVRAVEVNPSNRNQEVSGDYTIEAWTKFDFPGRGNTHSNFKWRWYHFDGVDWDQSRQLQNRIYKFRGKGWDWEVDTENGNYDYLMYADIDMDHPEVVNELRNWGVWYTLTLGLDGFRIDAVKHIKYSFTRDWLTHVRNTTGKNMFAVAEFWKNDIGAIENYLSKTNWNHSVFDVPLHYNLYNASRSGGNYDMRQIFNGTVVQRHPTHAVTFVDNHDSQPEEALESFVEEWFKPLAYALTLTRDQGYPSVFYGDYYGIPTHGVPAMKSKIDPILEARQKYAYGTQRDYLDHPDVIGWTREGDGVHADSGLATLMSDGPGGSKWMEVGKNNAGEVWYDITGNQTNTVTINKDGWGQFHVSGGSVSIYVQQ

SEQ ID NO: 24736 - protein, 483 aa, Bacillus licheniformis
HHNGTNGTMMQYFEWYLPNDGNHWNRLRSDASNLKDKGITAVWIPPAWKGASQNDVGYGAYDLYDLGEFNQKGTVRTKYGTRNQLQAAVTALKSNGIQVYGDVVMNHKGGADATEWVRAVEVNPSNRNQEVSGDYTIEAWTKFDFPGRGNTHSNFKWRWYHFDGVDWDQSRQLQNRIYKFRGKGWDWEVDTENGNYDYLMYADIDMDHPEVVNELRNWGVWYTNTLGLDGFRIDAVKHIKYSFTRDWLTHVRNTTGKNMFAVAEFWKNDIGAIENYLSKTNWNHSVFDVPLHYNLYNASRLGGNYDMRQIFNGTVVQRHPTHAVTFVDNHDSQPEEALESFVEEWFKPLAYALTLTRDQGYPSVFYGDYYGIPTHGVPAMKSKIDPILEARQKYAYGTQRDYLDHPDVIGWTREGDGVHADSGLATLMSDGPGGSKWMEVGKNNAGEVWYDITGNQTNTVTINKDGWGQFHVSGGSVSIYVQQ

SEQ ID NO: 24737 - protein, 483 aa, Bacillus licheniformis
HHNGTNGTMMQYFEWYLPNDGNHWNRLRSDASNLKDKGITAVWIPPAWKGASQNDVGYGAYDLYDLGEFNQKGTVRTKYGTRNQLQAAVTALKSNGIQVYGDVVMNHKGGADATEWVRAVEVNPSNRNQEVSGDYTIEAWTKFDFPGRGNTHSNFKWRWYHFDGVDWDQSRQLQNRIYKFRGKGWDWEVDTENGNYDYLMYADIDMDHPEVVNELRNWGVWYTNTLGLDGFRIDAVKHIKYSFTRDWLTHVRNTTGKNMFAVAEFWKNDIGAIENYLSKTNWNHSVFDVPLHYNLYNASRSGGNYDMRQIFNGTVVQRHPTHAVTFVDNHDSQPEEALESFVEEWFKPLAYALTLTRDQGVPSVFYGDYYGIPTHGVPAMKSKIDPILEARQKYAYGTQRDYLDHPDVIGWTREGDGVHADSGLATLMSDGPGGSKWMEVGKNNAGEVWYDITGNQTNTVTINKDGWGQFHVSGGSVSIYVQQ

SEQ ID NO: 24738 - protein, 483 aa, Bacillus licheniformis
HHNGTNGTMMQYFEWYLPNDGNHWNRLRSDASNLKDKGITAVWIPPAWKGASQNDVGYGAYDLYDLGEFNQKGTVRTKYGTRNQLQAAVTALKSNGIQVYGDVVMNHKGGADATEWVRAVEVNPSNRNQEVSGDYTIEAWTKFDFPGRGNTHSNFKWRWYHFDGVDWDQSRQLQNRIYKFRGKGWDWEVDTENGNYDYLMYADIDMDHPEVVNELRNWGVWYTNTLGLDGFRIDAVKHIKYSFTRDWLTHVRNTTGKNMFAVAEFWKNDIGAIENYLSKTNWNHSVFDVPLHYNLYNASRSTGNYDMRQIFNGTVVQRHPTHAVTFVDNHDSQPEEALESFVEEWFKPLAYALTLTRDQGYPSVFYGDYYGIPTHGVPAMKSKIDPILEARQKYAYGTQRDYLDHPDVIGWTREGDGVHADSGLATLMSDGPGGSKWMEVGKNNAGEVWYDITGNQTNTVTINKDGWGQFHVSGGSVSIYVQQ

SEQ ID NO: 24739 - protein, 483 aa, Bacillus licheniformis
HHNGTNGTMMQYFEWYLPNDGNHWNRLRSDASNLKDKGITAVWIPPAWKGASQNDVGYGAYDLYDLGEFNQKGTVRTKYGTRNQLQAAVTALKSNGIQVYGDVVMNHKGGADATEWVRAVEVNPSNRNQEVSGDYTIEAWTKFDFPGRGNTHSNFKWRWYHFDGVDWDQSRQLQNRIYKFRGKGWDWEVDTENGNYDYLMYADIDMDHPEVVNELRNWGVWYTNTLGLDGFRIDAVKHIKYSFTRDWLTHVRNTTGKNMFAVSEFWKNDIGAIENYLSKTNWNHSVFDVPLHYNLYNASRSGGNYDMRQIFNGTVVQRHPTHAVTFVDNHDSQPEEALESFVEEWFKPLAYALTLTRDQGYPSVFYGDYYGIPTHGVPAMKSKIDPILEARQKYAYGTQRDYLDHPDVIGWTREGDGVHADSGLATLMSDGPGGSKWMEVGKNNAGEVWYDITGNQTNTVTINKDGWGQFHVSGGSVSIYVQQ

SEQ ID NO: 24740 - protein, 483 aa, Bacillus licheniformis
HHNGTNGTMMQYFEWYLPNDGNHWNRLRSDASNLKDKGITAVWIPPAWKGASQNDVGYGAYDLYDLGEFNQKGTVRTKYGTRNQLQAAVTALKSNGIQVYGDVVMNHKGGADATEWVRAVEVNPSNRNQEVSGDYTIEAWTKFDFPGRGNTHSNFKWRWYHFDGVDWDQSRQLQNRIYKFRGKGWDWEVDTENGNYDYLMYADIDMDHPEVVNELRNWGVWYTNTLGLDGFRIDAVKHIKYSFTRDWLTHVRNTTGKNMFAVAEFWKNDIGAIENYLSKTNWNHSVFDVPLHYNLYNASRSRGNYDMRQIFNGTVVQRHPTHAVTFVDNHDSQPEEALESFVEEWFKPLAYALTLTRDQGYPSVFYGDYYGIPTHGVPAMKSKIDPILEARQKYAYGTQRDYLDHPDVIGWTREGDGVHADSGLATLMSDGPGGSKWMEVGKNNAGEVWYDITGNQTNTVTINKDGWGQFHVSGGSVSIYVQQ

SEQ ID NO: 24741 - protein, 483 aa, Bacillus licheniformis
HHNGTNGTMMQYFEWYLPNDGNHWNRLRSDASNLKDKGITAVWIPPAWKGASQNDVGYGAYDLYDLGEFNQKGTVRTKYGTRNQLQAAVTALKSNGIQVYGDVVMNHKGGADATEWVRAVEVNPSNRNQEVSGDYTIEAWTKFDFPGRGNTHSNFKWRWYHFDGVDWDQSRQLQNRIYKFRGKGWDWEVDTENGNYDYLMYADIDMDHPEVVNELRNWGVWYTNTLGLDGFRIDAVKHIKYSFTRDWLTHVRNTTGKNMFAVAEFWKNDIGAIENYLSKTNANHSVFDVPLHYNLYNASRSGGNYDMRQIFNGTVVQRHPTHAVTFVDNHDSQPEEALESFVEEWFKPLAYALTLTRDQGYPSVFYGDYYGIPTHGVPAMKSKIDPILEARQKYAYGTQRDYLDHPDVIGWTREGDGVHADSGLATLMSDGPGGSKWMEVGKNNAGEVWYDITGNQTNTVTINKDGWGQFHVSGGSVSIYVQQ

SEQ ID NO: 24742 - protein, 483 aa, Bacillus licheniformis
HHNGTNGTMMQYFEWYLPNDGNHWNRLRSDASNLKDKGITAVWIPPAWKGASQNDVGYGAYDLYDLGEFNQKGTVRTKYGTRNQLQAAVTALKSNGIQVYGDVVMNHKGGADATEWVRAVEVNPSNRNQEVSGDYTIEAWTKFDFPGRGNTHSNFKWRWYHFDGVDWDQSRQLQNRIYKFRGKGWDWEVDTENGNYDYLMYADIDMDHPEVVNELRNWGVWYTNTLGLDGFRIDAVKHIKYSFTRDWLTHVRNTTGKNMFAVAEFWKNDIGAIENYLSKTNWNHSVFDVPLHYNLYNASRSGGNYDMRQIFNGTVVQRHPTHAVTFVDNHDSQPEEALESFVEEWFKPLAYALTLTRDQGYPSVFYGDYYGIPTHGVPAMKSKIDPILEARQKYAYGTQRDYLDHPDVIGWTREGDGVHADSGLATLMSDGPGGSKWMEVGKNNAGEVLYDITGNQTNTVTINKDGWGQFHVSGGSVSIYVQQ

SEQ ID NO: 24743 - protein, 483 aa, Bacillus licheniformis
HHNGTNGTMMQYFEWYLPNDGNHWNRLRSDASNLKDKGITAVWIPPAWKGASQNDVGYGAYDLYDLGEFNQKGTVRTKYGTRNQLQAAVTMLKSNGIQVYGDVVMNHKGGADATEWVRAVEVNPSNRNQEVSGDYTIEAWTKFDFPGRGNTHSNFKWRWYHFDGVDWDQSRQLQNRIYKFRGKGWDWEVDTENGNYDYLMYADIDMDHPEVVNELRNWGVWYTNTLGLDGFRIDAVKHIKYSFTRDWLTHVRNTTGKNMFAVAEFWKNDIGAIENYLSKTNWNHSVFDVPLHYNLYNASRSGGNYDMRQIFNGTVVQRHPTHAVTFVDNHDSQPEEALESFVEEWFKPLAYALTLTRDQGYPSVFYGDYYGIPTHGVPAMKSKIDPILEARQKYAYGTQRDYLDHPDVIGWTREGDGVHADSGLATLMSDGPGGSKWMEVGKNNAGEVWYDITGNQTNTVTINKDGWGQFHVSGGSVSIYVQQ

SEQ ID NO: 24744 - protein, 483 aa, Bacillus licheniformis
HHNGTNGTMMQYFEWYLPNDGNHWNRLRSDASNLKDKGITAVWIPPAWKGASQNDVGYGAYDLYDLGEFNQKGTVRTKYGTRNQLQAAVTALKSNGIQVYGDVVMNHKGGADATEWVRAVEVNPSNRNQEVSGDYTIEAWTKFDFPGRGNTHSNFKWRWYHFDGVDWDQSRQLQNRIYKFRGKGWDWEVDTENGNYDYLMYADIDMDHPEVVNELRNWGVWYTNTLGLDGFRIDAVKHIKYSFTRDWLTHVRNTTGKNMFAVAEFWKNDIGAIENYLSKTNWNHSVFDVPLHYNLYNASRSGGNYDMRQIFNGTVVQRHPTHAVTFVDNHDSQPEEALESFVEEWFKPLAYALTLTRDQGYPSVFYGDYYGIPTHGVPAMKSKIDPILEARQKYAYGTQRDYLDHPDVIGWTREGDGVHADSGLATLMSDGPGGSKWMEVGKNNAGEVWYDITYNQTNTVTINKDGWGQFHVSGGSVSIYVQQ

SEQ ID NO: 24745 - protein, 483 aa, Bacillus licheniformis
HHNGTNGTMMQYFEWYLPNDGNHWNRLRSDASNLKDKGITAVWIPPAWKGASQNDVGYGAYDLYDLGEFNQKGTVRTKYGTRNQLQAAVTALKSNGIQVYGDVVMNHKGGADATEWVRAVEVNPSNRNQEVSGDYTIEAWTKFDFPGRGNTHSNFKWRWYHFDGVDWDQSRQLQNRIYKFRGKGWDWEVDTENGNYDYLMYADIDMDHPEVVNELRNWGVWYTNTLGLDGFRIDAVKHIKYSFTRDWLTHVRNTTGKNMFAVAEFWKNDIGAIENYLSKTNWNHSVFDVPLHYNLYNASRSGGNYDMRQIFNGTVVQRHPTHAVTFVDNHDSQPEEALESFVEEWFKPLAYALTLTRDQGYPSVFYGDYYGIPTHGVPAMKSKIDPILEARQKYAYGTQRDYLDHPDVIGWTREGDGVHADSGLQTLMSDGPGGSKWMEVGKNNAGEVWYDITGNQTNTVTINKDGWGQFHVSGGSVSIYVQQ

SEQ ID NO: 24746 - protein, 483 aa, Bacillus licheniformis
HHNGTNGTMMQYFEWYLPNDGNHWNRLRSDASNLKDKGITAVWIPPAWKGASQNDVGYGAYDLYDLGEFNQKGTVRTKYGTRNQLQAAVTALKSNGIQVYGDVVMNHKGGADATEWVRAVEVNPSNRNQEVSGDYTIEAWTKFDFPGRGNTHSNFKWRWYHFDGVDWDQSRQLQNRIYKFRGKGWDWEVDTENGNYDYLMYADIDMDHPEVVNELRNWGVWYTNTLGLDGFRIDAVKHIKYSFTRDWLTHVRNTTGKNMFAVAEFWKNDIGAIENYLSKTNWNHSVFDVPLHYNLYNASRTGGNYDMRQIFNGTVVQRHPTHAVTFVDNHDSQPEEALESFVEEWFKPLAYALTLTRDQGYPSVFYGDYYGIPTHGVPAMKSKIDPILEARQKYAYGTQRDYLDHPDVIGWTREGDGVHADSGLATLMSDGPGGSKWMEVGKNNAGEVWYDITGNQTNTVTINKDGWGQFHVSGGSVSIYVQQ

SEQ ID NO: 24747 - protein, 483 aa, Bacillus licheniformis
HHNGTNGTMMQYFEWYLPNDGNHWLRLRSDASNLKDKGITAVWIPPAWKGASQNDVGYGAYDLYDLGEFNQKGTVRTKYGTRNQLQAAVTALKSNGIQVYGDVVMNHKGGADATEWVRAVEVNPSNRNQEVSGDYTIEAWTKFDFPGRGNTHSNFKWRWYHFDGVDWDQSRQLQNRIYKFRGKGWDWEVDTENGNYDYLMYADIDMDHPEVVNELRNWGVWYTNTLGLDGFRIDAVKHIKYSFTRDWLTHVRNTTGKNMFAVAEFWKNDIGAIENYLSKTNWNHSVFDVPLHYNLYNASRSGGNYDMRQIFNGTVVQRHPTHAVTFVDNHDSQPEEALESFVEEWFKPLAYALTLTRDQGYPSVFYGDYYGIPTHGVPAMKSKIDPILEARQKYAYGTQRDYLDHPDVIGWTREGDGVHADSGLATLMSDGPGGSKWMEVGKNNAGEVWYDITGNQTNTVTINKDGWGQFHVSGGSVSIYVQQ

SEQ ID NO: 24748 - protein, 483 aa, Bacillus licheniformis
HHNGTNGTMMQYFEWYLPNDGNHWNRLRSDAWNLKDKGITAVWIPPAWKGASQNDVGYGAYDLYDLGEFNQKGTVRTKYGTRNQLQAAVTALKSNGIQVYGDVVMNHKGGADATEWVRAVEVNPSNRNQEVSGDYTIEAWTKFDFPGRGNTHSNFKWRWYHFDGVDWDQSRQLQNRIYKFRGKGWDWEVDTENGNYDYLMYADIDMDHPEVVNELRNWGVWYTNTLGLDGFRIDAVKHIKYSFTRDWLTHVRNTTGKNMFAVAEFWKNDIGAIENYLSKTNWNHSVFDVPLHYNLYNASRSGGNYDMRQIFNGTVVQRHPTHAVTFVDNHDSQPEEALESFVEEWFKPLAYALTLTRDQGYPSVFYGDYYGIPTHGVPAMKSKIDPILEARQKYAYGTQRDYLDHPDVIGWTREGDGVHADSGLATLMSDGPGGSKWMEVGKNNAGEVWYDITGNQTNTVTINKDGWGQFHVSGGSVSIYVQQ

SEQ ID NO: 24749 - protein, 483 aa, Bacillus licheniformis
HHNGTNGTMMQYFEWYLPNDGNHWNRLRSDASNLKDKGITAVWIPPAWKGASQNDVGYGAYDLYDLGEFNQKGTVRTKYGTRNQLQAAVTALKSNGIQVYGDVVMNHKGGADATEWVRAVEVNPSNRNQEVSGDYTIEAWTKFDFPGRGNTHSNFKWRWYHFDGVDWDQSRQLQNRIYKFRGKGWDWEVDTENGNYDYLMYADIDMDHPEVVNELRNWGVWYTNTLGLDGFRIDAVKHIKYSFTRDWLTHVRNTTGKNMFAVAEFWKNDIGAIENYLSKTNWNHSVFDVPLHYNLYNASRSGGNYDMRQIFNGTVVQRHPTHAVTFVDNHDSQPEEALESFVEEWFKPLAYALTLTRDQGYPSVFYGDYYGIPTHGVPAMKSKIDHILEARQKYAYGTQRDYLDHPDVIGWTREGDGVHADSGLATLMSDGPGGSKWMEVGKNNAGEVWYDITGNQTNTVTINKDGWGQFHVSGGSVSIYVQQ

SEQ ID NO: 24750 - protein, 483 aa, Bacillus licheniformis
HHNGTNGTMMQYFEWYLPNDGNHWNRLRSDASNLKDKGITAVWIPPAWKGASQNDVGYGAYDLYDLGEFNQKGTPRTKYGTRNQLQAAVTALKSNGIQVYGDVVMNHKGGADATEWVRAVEVNPSNRNQEVSGDYTIEAWTKFDFPGRGNTHSNFKWRWYHFDGVDWDQSRQLQNRIYKFRGKGWDWEVDTENGNYDYLMYADIDMDHPEVVNELRNWGVWYTNTLGLDGFRIDAVKHIKYSFTRDWLTHVRNTTGKNMFAVAEFWKNDIGAIENYLSKTNWNHSVFDVPLHYNLYNASRSGGNYDMRQIFNGTVVQRHPTHAVTFVDNHDSQPEEALESFVEEWFKPLAYALTLTRDQGYPSVFYGDYYGIPTHGVPAMKSKIDPILEARQKYAYGTQRDYLDHPDVIGWTREGDGVHADSGLATLMSDGPGGSKWMEVGKNNAGEVWYDITGNQTNTVTINKDGWGQFHVSGGSVSIYVQQ

SEQ ID NO: 24751 - protein, 483 aa, Bacillus licheniformis
HHNGTNGTMMQYFEWYLPNDGNHWNRLRSDASNLKDKGITAVWIPPAWKGASQNDVGYGAYDLYDLGEFNQKGTVRTKYGTRNQLQAAVTALKSNGIQVYGDVVMNHKGGADATEWVRAVEVNPSNRNQEVSGDYTIEAWTKFDFPGRGNTHSNFEWRWYHFDGVDWDQSRQLQNRIYKFRGKGWDWEVDTENGNYDYLMYADIDMDHPEVVNELRNWGVWYTNTLGLDGFRIDAVKHIKYSFTRDWLTHVRNTTGKNMFAVAEFWKNDIGAIENYLSKTNWNHSVFDVPLHYNLYNASRSGGNYDMRQIFNGTVVQRHPTHAVTFVDNHDSQPEEALESFVEEWFKPLAYALTLTRDQGYPSVFYGDYYGIPTHGVPAMKSKIDPILEARQKYAYGTQRDYLDHPDVIGWTREGDGVHADSGLATLMSDGPGGSKWMEVGKNNAGEVWYDITGNQTNTVTINKDGWGQFHVSGGSVSIYVQQ

SEQ ID NO: 24752 - protein, 483 aa, Bacillus licheniformis
HHNQTNGTMMQYFEWYLPNDGNHWNRLRSDASNLKDKGITAVWIPPAWKGASQNDVGYGAYDLYDLGEFNQKGTVRTKYGTRNQLQAAVTALKSNGIQVYGDVVMNHKGGADATEWVRAVEVNPSNRNQEVSGDYTIEAWTKFDFPGRGNTHSNFKWRWYHFDGVDWDQSRQLQNKIYKFRGKGWDWEVDTENGNYDYLMYADYDMDHPEVVNELRNWGVWYTNTLGLDGFRIDAVKHIKYSFTRDWLTHVRNTTGKNMFAVAEFWKNDIGAIENYLSKTNWNHSVFDVPLHYNLYNASRSGGNYDMRQIFNGTVVQRHPTHAVTFVDNHDSQPEEALESFVEEWFKPLAYALTLTRDQGYPSVFYGDYYGIPTHGVPAMKSKIDPILEARQKYAYGTQRDYLDHPDVIGWTREGDGVHADSGLATLMSDGPGGSKWMEVGKNNAGEVWYDITGNQTGTVTINKDGWGQFHVSGGSVSIYVQQ

SEQ ID NO: 24753 - protein, 483 aa, Bacillus licheniformis
HHNGTNGTMMQYFEWYLPNDGNHWNRLRSDASNLKDKGITAVWIPPAWKGASQNDVGYGAYDLYDLGEFNQKGTVRTKYGTRNQLQAAVTALKSNGIQVYGDVVMNHKGGADATEWVRAVEVNPSNRNQEVSGDYTIEAWTKFDFPGRGNTHSNFKWRWYHFDGVDWDQSRQLQNRIYKFRGKGWDWEVDTENGNYDYLMYADIDMDHPEVVNELRNWGVWYTNTLGLDGFRIDAVKHIKYSFTRDWLTHVRNTTGKNMFAVAEFWKNDIGAILNYLSKTNWNHSVFDVPLHYNLYNASRSGGNYDMRQIFNGTVVQRHPTHAVTFVDNHDSQPEEALESFVEEWFKPLAYALTLTRDQGYPSVFYGDYYGIPTHGVPAMKSKIDPILEARQKYAYGTQRDYLDHPDVIGWTREGDGVHADSGLATLMSDGPGGSKWMEVGKNNAGEVWYDITGNQTNTVTINKDGWGQFHVSGGSVSIYVQQ

SEQ ID NO: 24754 - protein, 483 aa, Bacillus licheniformis
HHNGTNGTMMQYFEWYLPNDGNHWNRLRSDASNLKDKGITAVWIPPAWKGASQNDVGYGAYDLYDLGEFNQKGTVRTKYGTRNQLQAAVTALKSNGIQVYGDVVMNHKGGADATEWVRAVEVNPSNRNQEVSGDYTIEAWTKFDFPGRGNTHSNFKWRWYHFDGVDWDQSRQLQNRIYKFRGKGWDWEVDTENGNYDYLMYADIDMDHPEVVNELRNWGVWYTNYLGLDGFRIDAVKHIKYSFTRDWLTHVRNTTGKNMFAVAEFWKNDIGAIENYLSKTNWNHSVFDVPLHYNLYNASRSGGNYDMRQIFNGTVVQRHPTHAVTFVDNHDSQPEEALESFVEEWFKPLAYALTLTRDQGYPSVFYGDYYGIPTHGVPAMKSKIDPILEARQKYAYGTQRDYLDHPDVIGWTREGDGVHADSGLATLMSDGPGGSKWMEVGKNNAGEVWYDITGNQTNTVTINKDGWGQFHVSGGSVSIYVQQ

SEQ ID NO: 24755 - protein, 483 aa, Bacillus licheniformis
HHNGTNGTMMQYFEWYLPNDGNHWNRLRSDASNLKDKGITAVWIPPAWKGASQNDVGYGAYDLYDLGEFNQKGTVRTKYGTRNQLQAAVTALKSNGIQVYGDVVMNHKGGADATEWVRAVEVNPSNRNQEVSGDYTIEAWTKFDFPGRGNTHSNFKWRWYHFDGVDWDQSRQLQNRIYKFRGKGWDWEVDTENGNYDYLMYADIDMDHPEVVNELSNWGVWYTNTLGLDGFRIDAVKHIKYSFTRDWLTHVRNTTGKNMFAVAEFWKNDIGAIENYLSKTNWNHSVFDVPLHYNLYNASRSGGNYDMRQIFNGTVVQRHPTHAVTFVDNHDSQPEEALESFVEEWFKPLAYALTLTRDQGYPSVFYGDYYGIPTHGVPAMKSKIDPILEARQKYAYGTQRDYLDHPDVIGWTREGDGVHADSGLATLMSDGPGGSKWMEVGKNNAGEVWYDITGNQTNTVTINKDGWGQFHVSGGSVSIYVQQ

SEQ ID NO: 24756 - protein, 483 aa, Bacillus licheniformis
HHNGTAGTMMQYFEWYLPNDGNHWNRLRSDASNLKDKGITAVWIPPAWKGASQNDVGYGAYDLYDLGEFNQKGTVRTKYGTRNQLQAAVTALKSNGIQVYGDVVMNHKGGADATEWVRAVEVNPSNRNQEVSGDYTIEAWTKFDFPGRGNTHSNFKWRWYHFDGVDWDQSRQLQNRIYKFRGKGWDWEVDTENGNYDYLMYADIDMDHPEVVNELRNWGVWYTNTLGLDGFRIDAVKHIKYSFTRDWLTHVRNTTGKNMFAVAEFWKNDIGAIENYLSKTNWNHSVFDVPLHYNLYNASRSGGNYDMRQIFNGTVVQRHPTHAVTFVDNHDSQPEEALESFVEEWFKPLAYALTLTRDQGYPSVFYGDYYGIPTHGVPAMKSKIDPILEARQKYAYGTQRDYLDHPDVIGWTREGDGVHADSGLATLMSDGPGGSKWMEVGKNNAGEVWYDITGNQTNTVTINKDGWGQFHVSGGSVSIYVQQ

SEQ ID NO: 24757 - protein, 483 aa, Bacillus licheniformis
HHNGTNGTMMQYFEWYLPNDGNHWNRLRSDASNLKDKGITAVWIPPAWKGASQNDVGYGAYDLYDLGEFNQKGTVRTKYGTRNQLQAAVTALKSNGIQVYGDVVMNHKGGADATEWVRAVEVNPSNRNQEVSGDYTIEAWTKFDFPGRGNTHSNFKWRWYHFDGVDWDQSRQLQNRIYKFRGKGWDWEVDTENGNYDYLMYADIDMDHPEVVNELRNWGVWYTNTLGLDGFRIDAVKHIKYSFTRDWLTHVRNTTGKNMFAVAEFWKNDIGAIENYLSKTNWNHSVFDVPLHYNLYNASRSGGNYDMRQIFNGTVVQRHPTHAVTFVDNHDSQPEEALESFVEEWFKPLAYALTLTRDQGYPSVYYGDYYGIPTHGVPAMKSKIDPILEARQKYAYGTQRDYLDHPDVIGWTREGDGVHADSGLATLMSDGPGGSKWMEVGKNNAGEVWYDITGNQTNTVTINKDGWGQFHVSGGSVSIYVQQ

SEQ ID NO: 24758 - protein, 483 aa, Bacillus licheniformis
HHNGTNGTMMQYFEWYLPNDGNHWNRLRSDASNLKDKGITAVWIPPAWKGASQNDVGYGAYDLYDLGEFNQKGTVRTKYGTRNQLQAAVTALKSNGIQVYGDVVMNHKGGADATEWVRAVEVNPSNRNQEVSGDYTIEAWTRFDFPGRGNTHSNFKWRWYHFDGVDWDQSRQLQNRIYKFRGKGWDWEVDTENGNYDYLMYADIDMDHPEVVNELRNWGVWYTNTLGLDGFRIDAVKHIKYSFTRDWLTHVRNTTGKNMFAVAEFWKNDIGAIENYLSKTNWNHSVFDVPLHYNLYNASRSGGNYDMRQIFNGTVVQRHPTHAVTFVDNHDSQPEEALESFVEEWFKPLAYALTLTRDQGYPSVFYGDYYGIPTHGVPAMKSKIDPILEARQKYAYGTQRDYLDHPDVIGWTREGDGVHADSGLATLMSDGPGGSKWMEVGKNNAGEVWYDITGNQTNTVTINKDGWGQFHVSGGSVSIYVQQ

SEQ ID NO: 24759 - protein, 483 aa, Bacillus licheniformis
HHNGTNGTMMQYFEWYLPNDGNHWNRLRSDASNLKDKGITAVWIPPAWKGASQNDVGYGAYDLYDLGEFNQKGTVRTKYGTRNQLQAAVTALKSNGIQVYGDVVMNHKGGADATEWVRAVEVNPSNRNQEVSGDYTIEAWTKFDFPGRGNTHSNFKWRWYHFDGVDWDQSRQLQNRIYKFRGKGWDWEVDTENGNYDYLMYADIDMDHPEVVNELRNWGVWYTNTLGLDGFRIDAVKHIKYSFTRDWLTHVRNTTGKNMFAVAEFWKNDIGAIENYLSKTNWNHSVFDVPLHYNLYNASRSGGNYDMRQIFNGTVVQRHPTHAVTFVDNHDSQPEEALESFVEEWFKPLAYALTLTRDQGTPSVFYGDYYGIPTHGVPAMKSKIDPILEARQKYAYGTQRDYLDHPDVIGWTREGDGVHADSGLATLMSDGPGGSKWMEVGKNNAGEVWYDITGNQTNTVTINKDGWGQFHVSGGSVSIYVQQ

SEQ ID NO: 24760 - protein, 483 aa, Bacillus licheniformis
HHNGTNGTMMQYFEWYLPNDGNHWNRLRSDASNLKDKGITAVWIPPAWKGASQNDVGYGAYDLYDLGEFNQKGTVRTKYGTRNQLQAAVTALKSNGIQVYGDVVMNHKGGADATEWVRAVEVNPSNRNQEVSGDYTIEAWTKFDFPGRGNTHSNFKWRWYHFDGVDWDQSRQLQNRIYKFRGKGWDWEVDTENGNYDYLMYADIDMDHPEVVNELRNWGVWYTNTLGLDGFRIDAVKHIKYSFTRDWLTHVRNTTGKNMFAVAEFWKNDIGAIENYLSKTNWNHSVFDVPLHYNLYNASRSGGNYDMRQIFNGTVVQRHPTHAVTFVDNHDSQPEEALESFVEEWFKPLAYALTLTRDQGYPSVFYGDYYGIPTHGVPAMKSKIDPILEARQKYSYGTQRDYLDHPDVIGWTREGDGVHADSGLATLMSDGPGGSKWMEVGKNNAGEVWYDITGNQTNTVTINKDGWGQFHVSGGSVSIYVQQ

SEQ ID NO: 24761 - protein, 483 aa, Bacillus licheniformis
HHNGTNGTMMQYFEWYLPNDGNHWNRLRSDASNLKDKGITAVWIPPAWKGASQNDVGYGAYDLYDLGEFNQKGTVRTKYGTRNQLQAAVTALKSNGIQVYGDVVMNHKGGADATEWVRAVEVNPSNRNQEVSGDYTIEAWTKFDFPGRGNTHSNFKWRWYHFDGSDWDQSRQLQNRIYKFRGKGWDWEVDTENGNYDYLMYADIDMDHPEVVNELRNWGVWYTNTLGLDGFRIDAVKHIKYSFTRDWLTHVRNTTGKNMFAVAEFWKNDIGAIENYLSKTNWNHSVFDVPLHYNLYNASRSGGNYDMRQIFNGTVVQRHPTHAVTFVDNHDSQPEEALESFVEEWFKPLAYALTLTRDQGYPSVFYGDYYGIPTHGVPAMKSKIDPILEARQKYAYGTQRDYLDHPDVIGWTREGDGVHADSGLATLMSDGPGGSKWMEVGKNNAGEVWYDITGNQTNTVTINKDGWGQFHVSGGSVSIYVQQ

SEQ ID NO: 24762 - protein, 483 aa, Bacillus licheniformis
HHNGTNGTMMQYFEWYLPNDGNHWNRLRSDASNLKDKGITAVWIPPAWKGASQNDVGYGAYDLYDLGEFNQKGTVRTKYGTRNQLQAAVTALKSNGIQVYGDVVMNHKGGADATEWVRAVEVNPSNREQEVSGDYTIEAWTKFDFPGRGNTHSNFKWRWYHFDGVDWDQSRQLQNRIYKFRGKGWDWEVDTENGNYDYLMYADIDMDHPEVVNELRNWGVWYTNTLGLDGFRIDAVKHIKYSFTRDWLTHVRNTTGKNMFAVAEFWKNDIGAIENYLSKTNWNHSVFDVPLHYNLYNASRSGGNYDMRQIFNGTVVQRHPTHAVTFVDNHDSQPEEALESFVEEWFKPLAYALTLTRDQGYPSVFYGDYYGIPTHGVPAMKSKIDPILEARQKYAYGTQRDYLDHPDVIGWTREGDGVHADSGLATLMSDGPGGSKWMEVGKNNAGEVWYDITGNQTNTVTINKDGWGQFHVSGGSVSIYVQQ

SEQ ID NO: 24763 - protein, 483 aa, Bacillus licheniformis
HHNGTNGTMMQYFEWYLPNDGNHWNRLRSDASNLKDKGITAVWIPPAWKGASQNDVGYGAYDLYDLGEFNQKGTVRTKYGTRNQLQAAVTALKSNGIQVYGDVVMNHKGGADATEWVRAVEVNPSNRNQEVSGDYTIEAWTKFDFPGRGNTHSNFKWRWYHFDGVDWDQSRQLQNSIYKFRGKGWDWEVDTENGNYDYLMYADIDMDHPEVVNELRNWGVWYTNTLGLDGFRIDAVKHIKYSFTRDWLTHVRNTTGKNMFAVAEFWKNDIGAIENYLSKTNWNHSVFDVPLHYNLYNASRSGGNYDMRQIFNGTVVQRHPTHAVTFVDNHDSQPEEALESFVEEWFKPLAYALTLTRDQGYPSVFYGDYYGIPTHGVPAMKSKIDPILEARQKYAYGTQRDYLDHPDVIGWTREGDGVHADSGLATLMSDGPGGSKWMEVGKNNAGEVWYDITGNQTNTVTINKDGWGQFHVSGGSVSIYVQQ

SEQ ID NO: 24764 - protein, 483 aa, Bacillus licheniformis
HHNGTNGTMMQYFEWYLPNDGNHWNRLRSDASNLKDKGITAVWIPPAWKGASQNDVGYGAYDLYDLGEFNQKGTVRTKYGTRNQLQAAVTALKSNGIQVYGDVVMNHKGGADATEWVRAVEVNPSNRNQEVSGDYTIEAWTKFDFPGRGNTHSNFKWRWYHFDGVDWDQSRQLQNRIYKFRGKGWDWEVDTENGNYDYLMYADIDMDHPEVVNELRNWGVWYTNTLGLDGFRIDAVKHIKYSFTRDWLTHVRNTTGKNMFAVAEFWKNDIGAIENYLSKTNWNHSVFDVPLHYNLYNASRSGGNYDMRQIFNGTVVQRHPTHAVTFVDNHDSQPEEALESFVEEWFKPLAYALTLTRDQGYPSVLYGDYYGIPTHGVPAMKSKIDPILEARQKYAYGTQRDYLDHPDVIGWTREGDGVHADSGLATLMSDGPGGSKWMEVGKNNAGEVWYDITGNQTNTVTINKDGWGQFHVSGGSVSIYVQQ

SEQ ID NO: 24765 - protein, 483 aa, Bacillus licheniformis
HHNGTNGTMMQYFEWYLPNDGNHWNRLRSDASNLKDKGITAVWIPPAWKGASQNDVGYGAYDLYDLGEFNQKGTVRTKYGTRNQLQAAVTALKSNGIQVYGDVVMNHKGGADATEWVRAVEVNPSNRNQEVSGDYTIEAWTKFDFPGRGNTHSNFKWRWYHFDGVDWDQSRQLQNRIYKFRGKGWDIEVDTENGNYDYLMYADIDMDHPEVVNELRNWGVWYTNTLGLDGFRIDAVKHIKYSFTRDWLTHVRNTTGKNMFAVAEFWKNDIGAIENYLSKTNWNHSVFDVPLHYNLYNASRSGGNYDMRQIFNGTVVQRHPTHAVTFVDNHDSQPEEALESFVEEWFKPLAYALTLTRDQGYPSVFYGDYYGIPTHGVPAMKSKIDPILEARQKYAYGTQRDYLDHPDVIGWTREGDGVHADSGLATLMSDGPGGSKWMEVGKNNAGEVWYDITGNQTNTVTINKDGWGQFHVSGGSVSIYVQQ

SEQ ID NO: 24766 - protein, 483 aa, Bacillus licheniformis
HHNGTNGTMMQYFEWYLPNDGNHWNRLRSDASNLKDKGITAVWIPPAWKGASQNDVGYGAYDLYDLGEFNQKGTVRTKYGTRNQLQAAVTALKSNGIQVYGDVVMNHKGGADATEWVRAVEVNPSNRNQEVSGDYTIEAWTKFDFPGRGNTHSNFKWRWYHFDGVDWDQSRQLQNRIYKFRGKGWDWEVDTENGNYDYLMYADIDMDCPEVVNELRNWGVWYTNTLGLDGFRIDAVKHIKYSFTRDWLTHVRNTTGKNMFAVAEFWKNDIGAIENYLSKTNWNHSVFDVPLHYNLYNASRSGGNYDMRQIFNGTVVQRHPTHAVTFVDNHDSQPEEALESFVEEWFKPLAYALTLTRDQGYPSVFYGDYYGIPTHGVPAMKSKIDPILEARQKYAYGTQRDYLDHPDVIGWTREGDGVHADSGLATLMSDGPGGSKWMEVGKNNAGEVWYDITGNQTNTVTINKDGWGQFHVSGGSVSIYVQQ

SEQ ID NO: 24767 - protein, 483 aa, Bacillus licheniformis
HHNGTNGTMMQYFEWYLPNDGNHWNRLRSDASNLKDKGITAVWIPPAWKGASQNDVGYGAYDLYDLGEFNQKGTVRTKYGTRNQLQAAVTALKSNGIQVYGDVVMNHKGGADATEWVRAVEVNPSNRNQEVSGDYTIEAWTKFDFPGRGNTHSNFKWRWYHFDGVDWDQSRQLQNKIYKFRGKEWDWEVDTENGNYDYLMYADYDMDHPEVVNELRNWGVWYTNTLGLDGFRIDAVKHIKYSFTRDWLTHVRNTTGKNMFAVAEFWKNDIGAIENYLSKTNWNHSVFDVPLHYNLYNASRSGGNYDMRQIFNGTVVQRHPTHAVTFVDNHDSQPEEALESFVEEWFKPLAYALTLTRDQGYPSVFYGDYYGIPTHGVPAMKSKIDPILEARQKYAYGTQRDYMDHPDVIGWTREGDGVHADSGLATLMSDGPGGSKWMEVGKNNAGEVWYDITGNQTNTVTINKDGWGQFHVSGGSVSIYVQQ

SEQ ID NO: 24768 - protein, 483 aa, Bacillus licheniformis
HHNGTNGTMMQYFEWYLPNDGMHWNRLRSDASNLKDKGITAVWIPPAWKGASQNDVGYGAYDLYDLGEFNQKGTVRTKYGTRNQLQAAVTALKSNGIQVYGDVVMNHKGGADATEWVRAVEVNPSNRNQEVSGDYTIEAWTKFDFPGRGNTHSNFKWRWYHFDGVDWDQSRQLQNRIYKFRGKGWDWEVDTENGNYDYLMYADIDMDHPEVVNELRNWGVWYTNTLGLDGFRIDAVKHIKYSFTRDWLTHVRNTTGKNMFAVAEFWKNDIGAIENYLSKTNWNHSVFDVPLHYNLYNASRSGGNYDMRQIFNGTVVQRHPTHAVTFVDNHDSQPEEALESFVEEWFKPLAYALTLTRDQGYPSVFYGDYYGIPTHGVPAMKSKIDPILEARQKYAYGTQRDYLDHPDVIGWTREGDGVHADSGLATLMSDGPGGSKWMEVGKNNAGEVWYDITGNQTNTVTINKDGWGQFHVSGGSVSIYVQQ

SEQ ID NO: 24769 - protein, 483 aa, Bacillus licheniformis
HHNGTNGTMMQYFEWYLPNDGNHWNRLRSDASNLKDKGITAVWIPPAWKGASQNDVGYGAYDLYDLGEFNQKGTVRTKYGTRNQLQAAVTALKSNGIQVYGDVVMNHKGGADATEWVRAVEVNPSNRNQEVSGDYTIEAWTKFDFPGRGNTHSNFKWRWYHFDGVDWDQSRQLQNRIYKFRGKGWDWEVDTENGNYDYLMYADIDMDHPEVVNELRNWGVWYTNTLGLDGFRIDAVKHIKYSFTRDWLTHVRNTTGKNMFAVAEFWKNDIGAIENYLSKTNWNHSVFDVPLHYNLYNASRSGGNYDMRQIFNGTVVQRHPTHAVTFVDNHDSQPEEALESFVEEWFKPLAYALTLTRDQGYPSVFYGDYYGIPTHGVPAMKSKIDPILEARQKYAYGTQRDYLDHPDVIGWTREGDGVHADSGLATLMSDGPGGSKPMEVGKNNAGEVWYDITGNQTNTVTINKDGWGQFHVSGGSVSIYVQQ

SEQ ID NO: 24770 - protein, 483 aa, Bacillus licheniformis
HHNGTNGTMMQYFEWYLKNDGNHWNRLRSDASNLKDKGITAVWIPPAWKGASQNDVGYGAYDLYDLGEFNQKGTVRTKYGTRNQLQAAVTALKSNGIQVYGDVVMNHKGGADATEWVRAVEVNPSNRNQEVSGDYTIEAWTKFDFPGRGNTHSNFKWRWYHFDGVDWDQSRQLQNRIYKFRGKGWDWEVDTENGNYDYLMYADIDMDHPEVVNELRNWGVWYTNTLGLDGFRIDAVKHIKYSFTRDWLTHVRNTTGKNMFAVAEFWKNDIGAIENYLSKTNWNHSVFDVPLHYNLYNASRSGGNYDMRQIFNGTVVQRHPTHAVTFVDNHDSQPEEALESFVEEWFKPLAYALTLTRDQGYPSVFYGDYYGIPTHGVPAMKSKIDPILEARQKYAYGTQRDYLDHPDVIGWTREGDGVHADSGLATLMSDGPGGSKWMEVGKNNAGEVWYDITGNQTNTVTINKDGWGQFHVSGGSVSIYVQQ

SEQ ID NO: 24771 - protein, 483 aa, Bacillus licheniformis
HHNGTNGTMMQYFEWYLPNDGNHWNRLRSDASNLKDKGITAVWIPPAWKGASQNDVGYGAYDLYDLGEFNQKGTVRTKYGTRNQLQAAVTALKSNGIQVYGDVVMNHKGGADATEWVRAVEVNPSNRNQEVSGDYTIEAWTKFDFPGRGNTHSNFKWRWYHFDGVDWDQSRQLQNRIYKFRGKGWDWEVDTENGNYDYLMYADIDMDHPEVVNELRNWGVWYTNTLGLDGFRIDAVKHIKYSFTRDWLTHVRNTTGKNMYAVAEFWKNDIGAIENYLSKTNWNHSVFDVPLHYNLYNASRSGGNYDMRQIFNGTVVQRHPTHAVTFVDNHDSQPEEALESFVEEWFKPLAYALTLTRDQGYPSVFYGDYYGIPTHGVPAMKSKIDPILEARQKYAYGTQRDYLDHPDVIGWTREGDGVHADSGLATLMSDGPGGSKWMEVGKNNAGEVWYDITGNQTNTVTINKDGWGQFHVSGGSVSIYVQQ

SEQ ID NO: 24772 - protein, 483 aa, Bacillus licheniformis
HHNGTNGTMMQYFEWYLPNDGNHWNRLRSDASNLKDKGITAVWIPPAWKGASQNDVGYGAYDLYDLGEFNQKGTVRTKYGTRNQLQAAVTALKSNGIQVYGDVVMNHKGGADATEWVRAVEVNPSNRNQEVSGDYTIEAWTKFDFPGRGNTHSNFKWRWYHFDGVDWDQSRQLQNRIYKFRGKGWDWEVDTENGNYDYLMYADIDMDHPEVVNELRNWGVWFTNTLGLDGFRIDAVKHIKYSFTRDWLTHVRNTTGKNMFAVAEFWKNDIGAIENYLSKTNWNHSVFDVPLHYNLYNASRSGGNYDMRQIFNGTVVQRHPTHAVTFVDNHDSQPEEALESFVEEWFKPLAYALTLTRDQGYPSVFYGDYYGIPTHGVPAMKSKIDPILEARQKYAYGTQRDYLDHPDVIGWTREGDGVHADSGLATLMSDGPGGSKWMEVGKNNAGEVWYDITGNQTNTVTINKDGWGQFHVSGGSVSIYVQQ

SEQ ID NO: 24773 - protein, 483 aa, Bacillus licheniformis
HHNGTNGTMMQYFEWYLPNDGNHWNRLRSDASNLKDKGITAVWIPPAWKGASQNDVGYGAYDLYDLGEFNQKGTVRTKYGTRNQLQAAVTALKSNGIQVYGDVVMNHKGGADATEWVRAVEVNPSNRNQEVSGDYTIEAWTKFDFPGRGNTHSNFKWRWYHFDGVDWDQSRQLQNRIYKFRGKGWDWEVDTENGNYDYLMYADIDMDHPEVVNELRNWGVWYTNTLGLDGFRIDAVKHIKYSFTRDWLTHVRNTTGKNMFAVAEFWKNDIGAIENYLSKTNWNHSVFDVPLHYNLYNASRSGGNYDMRQIFNGTVVQRHPTHAVTFVDNHDSQPEEALESFVEEWFKPLAYALTLTRDQGYPSVFYGDYYGIPTHGVPAMKSKIDPILEARQKYAYGTQRDYLDHPDVIGWTREGDGVHADSGDATLMSDGPGGSKWMEVGKNNAGEVWYDITGNQTNTVTINKDGWGQFHVSGGSVSIYVQQ

SEQ ID NO: 24774 - protein, 483 aa, Bacillus licheniformis
HHNGTNGTMMQYFEWYLPNDGNHWNRLRSDASNLKDKGITAVWIPPAWKGASQNDVGYGAYDLYDLGEFNQKGTVRTKYGTRNQLQAAVTALKSNGIQVYGDVVMNHKGGADATEWVRAVEVNPSNRNQEVSGDYTIEAWTKFDFPGRGNTHSNFKWRWYHFDGVDWDQSRQLQNRIYKFRGKGWDWEVDTENGNYDYLMYADIDMDHPEVVNELRNWGVWYTNTLGLDGFRIDAVKHIKYSFTRDWLTHCRNTTGKNMFAVAEFWKNDIGAIENYLSKTNWNHSVFDVPLHYNLYNASRSGGNYDMRQIFNGTVVQRHPTHAVTFVDNHDSQPEEALESFVEEWFKPLAYALTLTRDQGYPSVFYGDYYGIPTHGVPAMKSKIDPILEARQKYAYGTQRDYLDHPDVIGWTREGDGVHADSGLATLMSDGPGGSKWMEVGKNNAGEVWYDITGNQTNTVTINKDGWGQFHVSGGSVSIYVQQ

SEQ ID NO: 24775 - protein, 483 aa, Bacillus licheniformis
HHNGTNGTMMQYFEWYLPNDGNHWNRLISDASNLKDKGITAVWIPPAWKGASQNDVGYGAYDLYDLGEFNQKGTVRTKYGTRNQLQAAVTALKSNGIQVYGDVVMNHKGGADATEWVRAVEVNPSNRNQEVSGDYTIEAWTKFDFPGRGNTHSNFKWRWYHFDGVDWDQSRQLQNRIYKFRGKGWDWEVDTENGNYDYLMYADIDMDHPEVVNELRNWGVWYTNTLGLDGFRIDAVKHIKYSFTRDWLTHVRNTTGKNMFAVAEFWKNDIGAIENYLSKTNWNHSVFDVPLHYNLYNASRSGGNYDMRQIFNGTVVQRHPTHAVTFVDNHDSQPEEALESFVEEWFKPLAYALTLTRDQGYPSVFYGDYYGIPTHGVPAMKSKIDPILEARQKYAYGTQRDYLDHPDVIGWTREGDGVHADSGLATLMSDGPGGSKWMEVGKNNAGEVWYDITGNQTNTVTINKDGWGQFHVSGGSVSIYVQQ

SEQ ID NO: 24776 - protein, 483 aa, Bacillus licheniformis
HHNGTNGTMMQYFEWYLPNDGNHWNRLRSDASNLKDKGITAVWIPPAWKGASQNDVGYGAYDLYDLGEFNQKGTVRTKYGTRNQLQAAVTALKSNGIQVYGDAVMNHKGGADATEWVRAVEVNPSNRNQEVSGDYTIEAWTKFDFPGRGNTHSNFKWRWYHFDGVDWDQSRQLQNRIYKFRGKGWDWEVDTENGNYDYLMYADIDMDHPEVVNELRNWGVWYTNTLGLDGFRIDAVKHIKYSFTRDWLTHVRNTTGKNMFAVAEFWKNDIGAIENYLSKTNWNHSVFDVPLHYNLYNASRSGGNYDMRQIFNGTVVQRHPTHAVTFVDNHDSQPEEALESFVEEWFKPLAYALTLTRDQGYPSVFYGDYYGIPTHGVPAMKSKIDPILEARQKYAYGTQRDYLDHPDVIGWTREGDGVHADSGLATLMSDGPGGSKWMEVGKNNAGEVWYDITGNQTNTVTINKDGWGQFHVSGGSVSIYVQQ

SEQ ID NO: 24777 - protein, 483 aa, Bacillus licheniformis
HHNGTNGTMMQYFEWYLPNDGNHWNRLRSDASNLKDKGITAVWIPPAWKGASQNDVGYGAYDLYDLGEFNQKGTVRTKYGTRNQLQAAVTALKSNGIQVYGDVVMNHKGGADATTWVRAVEVNPSNRNQEVSGDYTIEAWTKFDFPGRGNTHSNFKWRWYHFDGVDWDQSRQLQNRIYKFRGKGWDWEVDTENGNYDYLMYADIDMDHPEVVNELRNWGVWYTNTLGLDGFRIDAVKHIKYSFTRDWLTHVRNTTGKNMFAVAEFWKNDIGAIENYLSKTNWNHSVFDVPLHYNLYNASRSGGNYDMRQIFNGTVVQRHPTHAVTFVDNHDSQPEEALESFVEEWFKPLAYALTLTRDQGYPSVFYGDYYGIPTHGVPAMKSKIDPILEARQKYAYGTQRDYLDHPDVIGWTREGDGVHADSGLATLMSDGPGGSKWMEVGKNNAGEVWYDITGNQTNTVTINKDGWGQFHVSGGSVSIYVQQ

SEQ ID NO: 24778 - protein, 483 aa, Bacillus licheniformis
HHNGTNGTMMQYFEWYLPNDGNHWNRLRSDASNLKDKGITAVWIPPAWKGASQNDVGYGAYDLYDLGEFNQKGTVRTKYGTRNQLQAAVTALKSNGIQVYGDVVMNHKGGADATEWVRAVEVNPSNRNQEVSGDYTIEAWTKFDFPGRGNTHSNFKWRWYHFDGVDWDQSRQLQNRIYKFRGKGWDWEVDTENGNYDYLMYADIDMDHPEVVNELRNWGVWYTNTLGLDGFRIDAVKHIKYSFTRDWLTHVRNTTGKNMFAVAEFWKNDIGAIENYLSKTNWNHSVFDVPLHYNLYNASRSGGNYDMRQIFNGTVVQRHPTHAVTFVDNHDSQPEEALESFVEEWFKPLAYALTLTRDQGYCSVFYGDYYGIPTHGVPAMKSKIDPILEARQKYAYGTQRDYLDHPDVIGWTREGDGVHADSGLATLMSDGPGGSKWMEVGKNNAGEVWYDITGNQTNTVTINKDGWGQFHVSGGSVSIYVQQ

SEQ ID NO: 24779 - protein, 483 aa, Bacillus licheniformis
HHNGTNGTMAQYFEWYLPNDGNHWNRLRSDASNLKDKGITAVWIPPAWKGASQNDVGYGAYDLYDLGEFNQKGTVRTKYGTRNQLQAAVTALKSNGIQVYGDVVMNHKGGADATEWVRAVEVNPSNRNQEVSGDYTIEAWTKFDFPGRGNTHSNFKWRWYHFDGVDWDQSRQLQNRIYKFRGKGWDWEVDTENGNYDYLMYADIDMDHPEVVNELRNWGVWYTNTLGLDGFRIDAVKHIKYSFTRDWLTHVRNTTGKNMFAVAEFWKNDIGAIENYLSKTNWNHSVFDVPLHYNLYNASRSGGNYDMRQIFNGTVVQRHPTHAVTFVDNHDSQPEEALESFVEEWFKPLAYALTLTRDQGYPSVFYGDYYGIPTHGVPAMKSKIDPILEARQKYAYGTQRDYLDHPDVIGWTREGDGVHADSGLATLMSDGPGGSKWMEVGKNNAGEVWYDITGNQTNTVTINKDGWGQFHVSGGSVSIYVQQ

SEQ ID NO: 24780 - protein, 483 aa, Bacillus licheniformis
HHNGCNGTMMQYFEWYLPNDGNHWNRLRSDASNLKDKGITAVWIPPAWKGASQNDVGYGAYDLYDLGEFNQKGTVRTKYGTRNQLQAAVTALKSNGIQVYGDVVMNHKGGADATEWVRAVEVNPSNRNQEVSGDYTIEAWTKFDFPGRGNTHSNFKWRWYHFDGVDWDQSRQLQNRIYKFRGKGWDWEVDTENGNYDYLMYADIDMDHPEVVNELRNWGVWYTNTLGLDGFRIDAVKHIKYSFTRDWLTHVRNTTGKNMFAVAEFWKNDIGAIENYLSKTNWNHSVFDVPLHYNLYNASRSGGNYDMRQIFNGTVVQRHPTHAVTFVDNHDSQPEEALESFVEEWFKPLAYALTLTRDQGYPSVFYGDYYGIPTHGVPAMKSKIDPILEARQKYAYGTQRDYLDHPDVIGWTREGDGVHADSGLATLMSDGPGGSKWMEVGKNNAGEVWYDITGNQTNTVTINKDGWGQFHVSGGSVSIYVQQ

SEQ ID NO: 24781 - protein, 483 aa, Bacillus licheniformis
HHNGTNGTMMQYFEWYLPNDGNHWNRLRSDASNLKDKGITAVWIPPAWKGASQNDVGYGAYDLYDLGEFNQKGTVRTKYGTRNQLQAAVTALKSNGIQVYGDVVMNHKGGADATEWVRAVEVNPSNRNQEVSGDYTIEAWTKFDFPGRGNTHSNFKWRWYHFDGVDWDQSRQLQNRIYKFRGKGWDWEVDTENGNYDYLMYADIDMDHPEVVNELRNWGVWYTNTLGLDGFRIDAVKHIKYSFTRDWLTHVRNTTGKNMFAVAEFWKNDIGAIENYLSKTNWNHSVFDVPLHYNLYNASRSGGNYDMRQIFNGTVVQRVPTHAVTFVDNHDSQPEEALESFVEEWFKPLAYALTLTRDQGYPSVFYGDYYGIPTHGVPAMKSKIDPILEARQKYAYGTQRDYLDHPDVIGWTREGDGVHADSGLATLMSDGPGGSKWMEVGKNNAGEVWYDITGNQTNTVTINKDGWGQFHVSGGSVSIYVQQ

SEQ ID NO: 24782 - protein, 483 aa, Bacillus licheniformis
HHNGTNGTMMQYFEWYLPNDGNHWNLLRSDASNLKDKGITAVWIPPAWKGASQNDVGYGAYDLYDLGEFNQKGTVRTKYGTRNQLQAAVTALKSNGIQVYGDVVMNHKGGADATEWVRAVEVNPSNRNQEVSGDYTIEAWTKFDFPGRGNTHSNFKWRWYHFDGVDWDQSRQLQNRIYKFRGKGWDWEVDTENGNYDYLMYADIDMDHPEVVNELRNWGVWYTNTLGLDGFRIDAVKHIKYSFTRDWLTHVRNTTGKNMFAVAEFWKNDIGAIENYLSKTNWNHSVFDVPLHYNLYNASRSGGNYDMRQIFNGTVVQRHPTHAVTFVDNHDSQPEEALESFVEEWFKPLAYALTLTRDQGYPSVFYGDYYGIPTHGVPAMKSKIDPILEARQKYAYGTQRDYLDHPDVIGWTREGDGVHADSGLATLMSDGPGGSKWMEVGKNNAGEVWYDITGNQTNTVTINKDGWGQFHVSGGSVSIYVQQ

SEQ ID NO: 24783 - protein, 483 aa, Bacillus licheniformis
HHNGTNGTMMQYFEWYLPNDGNHWNRLRSDASNLKDKGITAVWIPPAWKGASQNDVGYGAYDLYDLGEFNQKGTVRTKYGTRNQLQAAVTALKSNGIQVYGDVVMNHKGGADATEWVRHVEVNPSNRNQEVSGDYTIEAWTKFDFPGRGNTHSNFKWRWYHFDGVDWDQSRQLQNRIYKFRGKGWDWEVDTENGNYDYLMYADIDMDHPEVVNELRNWGVWYTNTLGLDGFRIDAVKHIKYSFTRDWLTHVRNTTGKNMFAVAEFWKNDIGAIENYLSKTNWNHSVFDVPLHYNLYNASRSGGNYDMRQIFNGTVVQRHPTHAVTFVDNHDSQPEEALESFVEEWFKPLAYALTLTRDQGYPSVFYGDYYGIPTHGVPAMKSKIDPILEARQKYAYGTQRDYLDHPDVIGWTREGDGVHADSGLATLMSDGPGGSKWMEVGKNNAGEVWYDITGNQTNTVTINKDGWGQFHVSGGSVSIYVQQ

SEQ ID NO: 24784 - protein, 483 aa, Bacillus licheniformis
HHNGTNGTMMQYFEWYLPNDGNHWNRLRSDASNLKDKGITAVWIPPAWKGASQNDVGYGAYDLYDLGEFNQKGTVRTKYGTRNQLQAAVTALKSNGIQVYGDVVMNHKGGADATEWVRAVEVNPSNRNQEVSGDYTIEAWTKFDFPGRGNTHSNFKWRWYHFDGVDWDQSRQLQNRIYKFRGKGWDWEVDTENGNYDYLMYADIDMDHPEVVNELRNWGVWYTNTLGLDGFRIDAVKHIKYSFTRDWLTHVRNTTGKNMFAVAEFWKNDIGAIENYLSKTNWNHSVFDVPLHYNLYNASRSGGNYDMRQIFNGTVVQRHPTHAVTFVDNHDSQPEEALESFVEEWFKPLAYALTLTRDQGYPSVFYGDYYGIPTHGVPAMKSKIDPILEARQKYAYGTQRDYLDHPDVIGWTREGDGVHADSGLATLMSDGPGGSKWMEQGKNNAGEVWYDITGNQTNTVTINKDGWGQFHVSGGSVSIYVQQ

SEQ ID NO: 24785 - protein, 483 aa, Bacillus licheniformis
HHNGTNGTMMQYFEWYLPNDGNHWNRLRSDASNLKDKGITAVWIPPAWKGASQNDVGYGAYDLYDLGEFNQKGTVRTKYGTRNQLQAAVTALKSNGIQVYGDVVMNHKGGADATEWVRAVEVNPSNRNQEVSGDYTIEAWTKFDFPGRGNTHSNFKWRWYHFDGVDWDQSRQLQNRIYKFRGKGWDWEVDTENGNYDYLMYADIDMDHPEVVNELRNWGVWYTNTLGLDGFRIDAVKHIKYSFTRDWLTHVRNTTGKNMFAVAEFWKNDIGAIENYLSKTNWNHSVFDVPLHYNLYNASRSGGNYDMRQIFNGTVVQRHPTHAVTFVDNHDSQPEEALESFVEEWFKPLAYALTLTRDQGYPSVFYGDYYGIPTHGVPAMKSKIDPILEARQKYAYGTQRDYLDHPDVIGWTREGDGVHADSGLATLMSDGPGGSKWMEVGKNNAGEVWYDITGEQTNTVTINKDGWGQFHVSGGSVSIYVQQ

SEQ ID NO: 24786 - protein, 483 aa, Bacillus licheniformis
HHNGTNGTMMQYFEWYLPNDGNHWNRLRSDASNLKDKGITAVWIPPAWKGASQNDVGYGAYDLYDLGEFNQKGTVRTKYGTRNQLQAAVTALKSNGIQVYGDVVMNHKGGADATEWVRAVEVNPSNRNQEVSGDYTIEAWTKFDFPGRGNTHSNFKWRWYHFDGVDWDQSRQLQNRIYKFRGKGWDWEVDTENGNYDYLMYADIDMDHHEVVNELRNWGVWYTNTLGLDGFRIDAVKHIKYSFTRDWLTHVRNTTGKNMFAVAEFWKNDIGAIENYLSKTNWNHSVFDVPLHYNLYNASRSGGNYDMRQIFNGTVVQRHPTHAVTFVDNHDSQPEEALESFVEEWFKPLAYALTLTRDQGYPSVFYGDYYGIPTHGVPAMKSKIDPILEARQKYAYGTQRDYLDHPDVIGWTREGDGVHADSGLATLMSDGPGGSKWMEVGKNNAGEVWYDITGNQTNTVTINKDGWGQFHVSGGSVSIYVQQ

SEQ ID NO: 24787 - protein, 483 aa, Bacillus licheniformis
HHNGTNGTMMQYFEWYLPNDGNHWNRLRSDASNLKDKGITAVWIPPAWKGASQNDVGYGAYDLYDLGEFNQKGTVRTKYGTRNQLQAAVTALKSNGIQVYGDVVMNHKGGADATEWVRAVEVNPSNRNQEVSGDYTIEAWTKFGFPGRGNTHSNFKWRWYHFDGVDWDQSRQLQNRIYKFRGKGWDWEVDTENGNYDYLMYADIDMDHPEVVNELRNWGVWYTNTLGLDGFRIDAVKHIKYSFTRDWLTHVRNTTGKNMFAVAEFWKNDIGAIENYLSKTNWNHSVFDVPLHYNLYNASRSGGNYDMRQIFNGTVVQRHPTHAVTFVDNHDSQPEEALESFVEEWFKPLAYALTLTRDQGYPSVFYGDYYGIPTHGVPAMKSKIDPILEARQKYAYGTQRDYLDHPDVIGWTREGDGVHADSGLATLMSDGPGGSKWMEVGKNNAGEVWYDITGNQTNTVTINKDGWGQFHVSGGSVSIYVQQ

SEQ ID NO: 24788 - protein, 483 aa, Bacillus licheniformis
HHNGTNGTMMQYFEWYLPNDGNHWNRLRSKASNLKDKGITAVWIPPAWKGASQNDVGYGAYDLYDLGEFNQKGTVRTKYGTRNQLQAAVTALKSNGIQVYGDVVMNHKGGADATEWVRAVEVNPSNRNQEVSGDYTIEAWTKFDFPGRGNTHSNFKWRWYHFDGVDWDQSRQLQNRIYKFRGKGWDWEVDTENGNYDYLMYADIDMDHPEVVNELRNWGVWYTNTLGLDGFRIDAVKHIKYSFTRDWLTHVRNTTGKNMFAVAEFWKNDIGAIENYLSKTNWNHSVFDVPLHYNLYNASRSGGNYDMRQIFNGTVVQRHPTHAVTFVDNHDSQPEEALESFVEEWFKPLAYALTLTRDQGYPSVFYGDYYGIPTHGVPAMKSKIDPILEARQKYAYGTQRDYLDHPDVIGWTREGDGVHADSGLATLMSDGPGGSKWMEVGKNNAGEVWYDITGNQTNTVTINKDGWGQFHVSGGSVSIYVQQ

SEQ ID NO: 24789 - protein, 483 aa, Bacillus licheniformis
HHNGTNGTMMQYFEWYLPNDGNHWNRLRSDASNLKDKGITAVWIPPAWKGASQNDVGYGAYDLYDLGEFNQKGTVRTKYGTRNQLQAAVTALKSNGIQVYGDVVMNHKGGADATEWVRAVEVNPSNRNQEVSGDYTIEAWTKFDFPGRGNTHSNFKWRWYHFDGVDWDQSRQLQNRIYKFRGKGWDWEVDTENGNYDYLMYADIDMDHPEVVNELANWGVWYTNTLGLDGFRIDAVKHIKYSFTRDWLTHVRNTTGKNMFAVAEFWKNDIGAIENYLSKTNWNHSVFDVPLHYNLYNASRSGGNYDMRQIFNGTVVQRHPTHAVTFVDNHDSQPEEALESFVEEWFKPLAYALTLTRDQGYPSVFYGDYYGIPTHGVPAMKSKIDPILEARQKYAYGTQRDYLDHPDVIGWTREGDGVHADSGLATLMSDGPGGSKWMEVGKNNAGEVWYDITGNQTNTVTINKDGWGQFHVSGGSVSIYVQQ

SEQ ID NO: 24790 - protein, 483 aa, Bacillus licheniformis
HHNGTNGTMMQYFEWYLPNDGNHWNRLRSDASNLKDKGITAVWIPPAWKGASQNDVGYGAYDLYDLGEFNQKGTVRTKYGTRNQLQAAVTALKSNGIQVYGDVVMNHKGGADATEWVRAVEVNPSNRNQEVSGDYTIEAWTKFDFPGRGCTHSNFKWRWYHFDGVDWDQSRQLQNRIYKFRGKGWDWEVDTENGNYDYLMYADIDMDHPEVVNELRNWGVWYTNTLGLDGFRIDAVKHIKYSFTRDWLTHVRNTTGKNMFAVAEFWKNDIGAIENYLSKTNWNHSVFDVPLHYNLYNASRSGGNYDMRQIFNGTVVQRHPTHAVTFVDNHDSQPEEALESFVEEWFKPLAYALTLTRDQGYPSVFYGDYYGIPTHGVPAMKSKIDPILEARQKYAYGTQRDYLDHPDVIGWTREGDGVHADSGLATLMSDGPGGSKWMEVGKNNAGEVWYDITGNQTNTVTINKDGWGQFHVSGGSVSIYVQQ

SEQ ID NO: 24791 - protein, 483 aa, Bacillus licheniformis
HHNGTNGTMMQYFEWYLPNDGNHWNRLRSDASNLKDKGITAVWIPPAWKGASQNDVGYGAYDLYDLGEFNQKGTVRTKYGTRNQLQAAVTALKSNGIQVYGDVVMNHKGGADATEWVRAVEVNPSNRNQEVSGDYTIEAWTKFDFPGRGNTHSNFKWRWYHFDGVDWDQSRQLQNRIYKFRGKGWDWEVDTENGNYDYLMYADIDMDHPEVVNELRNWGVWYTNHLGLDGFRIDAVKHIKYSFTRDWLTHVRNTTGKNMFAVAEFWKNDIGAIENYLSKTNWNHSVFDVPLHYNLYNASRSGGNYDMRQIFNGTVVQRHPTHAVTFVDNHDSQPEEALESFVEEWFKPLAYALTLTRDQGYPSVFYGDYYGIPTHGVPAMKSKIDPILEARQKYAYGTQRDYLDHPDVIGWTREGDGVHADSGLATLMSDGPGGSKWMEVGKNNAGEVWYDITGNQTNTVTINKDGWGQFHVSGGSVSIYVQQ

SEQ ID NO: 24792 - protein, 483 aa, Bacillus licheniformis
HHNGTNGTMMQYFEWYLPNDGNHWNRLRSDASNLKDKGITAVWIPPAWKGASQNDVGYGAYDLYDLGEFNQKGTVRTKYGTRNQLQAAVTALKSNGIQVYGDVVMNHKGGADATEWVRAVEVNPSNRNQEVSGDYTIEAWTKFDFPGRGNTHSNFKWRWYHFDGVDWDQSRQLQNRIYKFRGKGWDWEVDTENGNYDYLMYADIDMDHPEVVHELRNWGVWYTNTLGLDGFRIDAVKHIKYSFTRDWLTHVRNTTGKNMFAVAEFWKNDIGAIENYLSKTNWNHSVFDVPLHYNLYNASRSGGNYDMRQIFNGTVVQRHPTHAVTFVDNHDSQPEEALESFVEEWFKPLAYALTLTRDQGYPSVFYGDYYGIPTHGVPAMKSKIDPILEARQKYAYGTQRDYLDHPDVIGWTREGDGVHADSGLATLMSDGPGGSKWMEVGKNNAGEVWYDITGNQTNTVTINKDGWGQFHVSGGSVSIYVQQ

SEQ ID NO: 24793 - protein, 483 aa, Bacillus licheniformis
HHNGTNGTMMQYFEWYLPNDGNHWNRLRSDASNLKDKGITAVWIPPAWKGASQNDVGYGAYDLYDLGEFNQKGTVRTKYGTRNQLQAAVTALKSNGIQVYGDVVMNHKGGADATEWVRAVEVNPSNRNQEVSGDYTIEAWTKFDFPGRGNTHSNFKWRWYHFDGVDWDQSRQLQNRIYKFRGKGWDWEVDTENGNYDYLMYADIDMDHPEVVNELRNWGVLYTNTLGLDGFRIDAVKHIKYSFTRDWLTHVRNTTGKNMFAVAEFWKNDIGAIENYLSKTNWNHSVFDVPLHYNLYNASRSGGNYDMRQIFNGTVVQRHPTHAVTFVDNHDSQPEEALESFVEEWFKPLAYALTLTRDQGYPSVFYGDYYGIPTHGVPAMKSKIDPILEARQKYAYGTQRDYLDHPDVIGWTREGDGVHADSGLATLMSDGPGGSKWMEVGKNNAGEVWYDITGNQTNTVTINKDGWGQFHVSGGSVSIYVQQ

SEQ ID NO: 24794 - protein, 483 aa, Bacillus licheniformis
HHNGTNGTMMQYFEWYLPNDGNHWNRLRSDASNLKDKGITAVWIPPAWKGASQNDVGYGAYDLYDLGEFNQKGTVRTKYGTRNQLQAAVTALKSNGIQVYGDVVMNHKGGADATEWVRAVEVNPSNRNQEVSGDYTIEAWTKFDFPGRGNTHSNFKWRWYHFDGVDWDQSRQLQNRIYKFRGKGWDWEVDTENGNYDYLMYADIDMDHPEVVNELRNWGVWYTNTLGLDGFRIDAVKHIKYSFTRDWLTHVRNTTGKNMFAVAEFWKNDIGAIENYLSKTNWNHSVFDVPLHYNLYIASRSGGNYDMRQIFNGTVVQRHPTHAVTFVDNHDSQPEEALESFVEEWFKPLAYALTLTRDQGYPSVFYGDYYGIPTHGVPAMKSKIDPILEARQKYAYGTQRDYLDHPDVIGWTREGDGVHADSGLATLMSDGPGGSKWMEVGKNNAGEVWYDITGNQTNTVTINKDGWGQFHVSGGSVSIYVQQ

SEQ ID NO: 24795 - protein, 483 aa, Bacillus licheniformis
HHNGTNGTMMQYFEWYLPNDGNHWNRLRSDASNLKDKGITAVWIPPAWKGASQNDVGYGAYDLYDLGEFNQKNTVRTKYGTRNQLQAAVTALKSNGIQVYGDVVMNHKGGADATEWVRAVEVNPSNRNQEVSGDYTIEAWTKFDFPGRGNTHSNFKWRWYHFDGVDWDQSRQLQNRIYKFRGKGWDWEVDTENGNYDYLMYADIDMDHPEVVNELRNWGVWYTNTLGLDGFRIDAVKHIKYSFTRDWLTHVRNTTGKNMFAVAEFWKNDIGAIENYLSKTNWNHSVFDVPLHYNLYNASRSGGNYDMRQIFNGTVVQRHPTHAVTFVDNHDSQPEEALESFVEEWFKPLAYALTLTRDQGYPSVFYGDYYGIPTHGVPAMKSKIDPILEARQKYAYGTQRDYLDHPDVIGWTREGDGVHADSGLATLMSDGPGGSKWMEVGKNNAGEVWYDITGNQTNTVTINKDGWGQFHVSGGSVSIYVQQ

SEQ ID NO: 24796 - protein, 483 aa, Bacillus licheniformis
HHNGTNGTMMQYFEWYLPNDGNHWNRLRSDASNLKDKGITAVWIPPAWKGASQNDVGYGAYDLYDLGEFNQKGTVRTKYGTRNQLQAAVTALKSNGIQVYGDVVMNHKGGADATEWVRAVEVNPSNRNQEVSGDYTIEAWTKFDFPGRGNTHSNFKWRWYHFDGVDWDQSRQLQNRIYKFRGKGWDWEVDTENGNYDYLMYADIDMDHPEVVNELRNWGVWYTNTLGLDGFRIDAVKHIKYSFTRDWLTHVRNTTGKNMFAVAEFWKNDIGAIENYLSKTNWNHSVFDVPLHYNLYNASRSGGNYDMRQIFNGTVVQRHPTHAVTFVDNHDSQPEEALESFVEAWFKPLAYALTLTRDQGYPSVFYGDYYGIPTHGVPAMKSKIDPILEARQKYAYGTQRDYLDHPDVIGWTREGDGVHADSGLATLMSDGPGGSKWMEVGKNNAGEVWYDITGNQTNTVTINKDGWGQFHVSGGSVSIYVQQ

SEQ ID NO: 24797 - protein, 483 aa, Bacillus licheniformis
HHNGTNGTMMQYFEWYLPNDGNHWNRLRSDASNLKDKGITAVWIPPAWKGASQNDVGYGAYDLYDLGEFNQKGTVRTKYGTRNQLQAAVTALKSNGIQVYGDVVMNHKGGADATEWVRAVEVNPSNRNQEVSGDYTIEAWTKFDFPGRGNTHSNFKWRWYHFDGVDWDQSRQLQNRIYKFRGNGWDWEVDTENGNYDYLMYADIDMDHPEVVNELRNWGVWYTNTLGLDGFRIDAVKHIKYSFTRDWLTHVRNTTGKNMFAVAEFWKNDIGAIENYLSKTNWNHSVFDVPLHYNLYNASRSGGNYDMRQIFNGTVVQRHPTHAVTFVDNHDSQPEEALESFVEEWFKPLAYALTLTRDQGYPSVFYGDYYGIPTHGVPAMKSKIDPILEARQKYAYGTQRDYLDHPDVIGWTREGDGVHADSGLATLMSDGPGGSKWMEVGKNNAGEVWYDITGNQTNTVTINKDGWGQFHVSGGSVSIYVQQ

SEQ ID NO: 24798 - protein, 483 aa, Bacillus licheniformis
HHNGTNGTMMQYFEWYLPNDGNHWNRLRSDASNLKDKGITAVWIPPAWKGASQNDVGYGAYDLYDLGEFNQKGTVRTKYGTRNQLQAAVTALKSNGIQVYGDVVMNHKGGADATEWVRAVEVNPSNRNQEVSGDYTIEAWTKFDFPGRGNTHSNFKWRWYHFDGVDWDQSRQLQNRIYKFRNKGWDWEVDTENGNYDYLMYADIDMDHPEVVNELRNWGVWYTNTLGLDGFRIDAVKHIKYSFTRDWLTHVRNTTGKNMFAVAEFWKNDIGAIENYLSKTNWNHSVFDVPLHYNLYNASRSGGNYDMRQIFNGTVVQRHPTHAVTFVDNHDSQPEEALESFVEEWFKPLAYALTLTRDQGYPSVFYGDYYGIPTHGVPAMKSKIDPILEARQKYAYGTQRDYLDHPDVIGWTREGDGVHADSGLATLMSDGPGGSKWMEVGKNNAGEVWYDITGNQTNTVTINKDGWGQFHVSGGSVSIYVQQ

SEQ ID NO: 24799 - protein, 483 aa, Bacillus licheniformis
HHNGTNGTMMQYFEWYLPNDGYHWNRLRSDASNLKDKGITAVWIPPAWKGASQNDVGYGAYDLYDLGEFNQKGTVRTKYGTRNQLQAAVTALKSNGIQVYGDVVMNHKGGADATEWVRAVEVNPSNRNQEVSGDYTIEAWTKFDFPGRGNTHSNFKWRWYHFDGVDWDQSRQLQNRIYKFRGKGWDWEVDTENGNYDYLMYADIDMDHPEVVNELRNWGVWYTNTLGLDGFRIDAVKHIKYSFTRDWLTHVRNTTGKNMFAVAEFWKNDIGAIENYLSKTNWNHSVFDVPLHYNLYNASRSGGNYDMRQIFNGTVVQRHPTHAVTFVDNHDSQPEEALESFVEEWFKPLAYALTLTRDQGYPSVFYGDYYGIPTHGVPAMKSKIDPILEARQKYAYGTQRDYLDHPDVIGWTREGDGVHADSGLATLMSDGPGGSKWMEVGKNNAGEVWYDITGNQTNTVTINKDGWGQFHVSGGSVSIYVQQ

SEQ ID NO: 24800 - protein, 483 aa, Bacillus licheniformis
HHNGTNGTMMQYFEWYLPNDGNHWNRLRSDASNLKDKGITAVWIPPAWKGASQNDVGYGAYDLYDLGEFNQKGTVRTKYGTRNQLQAAVTALKSNGIQVYGDVVMNHKGGADATEWVRAVEVNPSNRNQEVSGDYTIEAWTKFDFPGRGNTHSNFKWRWYHFDGVDWDQSRQLQNRIYKFRGKGWDWEVDTENGNYDYLMYADIDMDHPEVVNELRNWGVWYTNVLGLDGFRIDAVKHIKYSFTRDWLTHVRNTTGKNMFAVAEFWKNDIGAIENYLSKTNWNHSVFDVPLHYNLYNASRSGGNYDMRQIFNGTVVQRHPTHAVTFVDNHDSQPEEALESFVEEWFKPLAYALTLTRDQGYPSVFYGDYYGIPTHGVPAMKSKIDPILEARQKYAYGTQRDYLDHPDVIGWTREGDGVHADSGLATLMSDGPGGSKWMEVGKNNAGEVWYDITGNQTNTVTINKDGWGQFHVSGGSVSIYVQQ

SEQ ID NO: 24801 - protein, 483 aa, Bacillus licheniformis
HHNGTNGTMMQYFEWYLPNDGNHWNRLRSDASNLKDKGITAVWIPPAWKGASQNDVGYGAYDLYDLGEFNQKGTVRTKYGTRNQLQAAVTALKSNGIQVYGDVVMNHKGGADATEWVRAVEVNPSNRNQEVSGDYTIEAWTKFDFPGRGNTHSNFKWRWYHFDGVDWDQSRQLQNRIYKFRGKGWDWEVDTENGNYDYLMYADIDMDHPEVVNELRNWGVWYTNTLGFDGFRIDAVKHIKYSFTRDWLTHVRNTTGKNMFAVAEFWKNDIGAIENYLSKTNWNHSVFDVPLHYNLYNASRSGGNYDMRQIFNGTVVQRHPTHAVTFVDNHDSQPEEALESFVEEWFKPLAYALTLTRDQGYPSVFYGDYYGIPTHGVPAMKSKIDPILEARQKYAYGTQRDYLDHPDVIGWTREGDGVHADSGLATLMSDGPGGSKWMEVGKNNAGEVWYDITGNQTNTVTINKDGWGQFHVSGGSVSIYVQQ

SEQ ID NO: 24802 - protein, 483 aa, Bacillus licheniformis
HHGGTNGTMMQYFEWYLPNDGNHWNRLRSDASNLKDKGITAVWIPPAWKGASQNDVGYGAYDLYDLGEFNQKGTVRTKYGTRNQLQAAVTALKSNGIQVYGDVVMNHKGGADATEWVRAVEVNPSNRNQEVSGDYTIEAWTKFDFPGRGNTHSNFKWRWYHFDGVDWDQSRQLQNRIYKFRGKGWDWEVDTENGNYDYLMYADIDMDHPEVVNELRNWGVWYTNTLGLDGFRIDAVKHIKYSFTRDWLTHVRNTTGKNMFAVAEFWKNDIGAIENYLSKTNWNHSVFDVPLHYNLYNASRSGGNYDMRQIFNGTVVQRHPTHAVTFVDNHDSQPEEALESFVEEWFKPLAYALTLTRDQGYPSVFYGDYYGIPTHGVPAMKSKIDPILEARQKYAYGTQRDYLDHPDVIGWTREGDGVHADSGLATLMSDGPGGSKWMEVGKNNAGEVWYDITGNQTNTVTINKDGWGQFHVSGGSVSIYVQQ

SEQ ID NO: 24803 - protein, 483 aa, Bacillus licheniformis
HHNGTNGTMMQYFEWYLPNDGNHWNRLRSDASNLKDKGITAVWIPPAWKGASQNDVGYGAYDLYDLGEFNQKGTVRTKYGTRNQLQAAVTALKSNGIQVYGDVVMNHKGGADATEWVRAVEVNPSNRNQEVSGDYTIEAWTKFDFPGRGNTHSNFKWRWYHFDGVDWDQSRQLQNRIYKFRGKGWDWEVDTENGNYDYLMYADIDMDHPEVVNELRNWGVWYTNTLGLDGFRIDAVKHIKYSFTRDWLTHVRNTTGKNMFAVAEFWKNDIGAIENYLSSTNWNHSVFDVPLHYNLYNASRSGGNYDMRQIFNGTVVQRHPTHAVTFVDNHDSQPEEALESFVEEWFKPLAYALTLTRDQGYPSVFYGDYYGIPTHGVPAMKSKIDPILEARQKYAYGTQRDYLDHPDVIGWTREGDGVHADSGLATLMSDGPGGSKWMEVGKNNAGEVWYDITGNQTNTVTINKDGWGQFHVSGGSVSIYVQQ

SEQ ID NO: 24804 - protein, 483 aa, Bacillus licheniformis
HHNGTNGTMMQYFEWYLPNDGNHWNRLRSDASNLKDKGITAVWIPPAWKGASQNDVGYGAYDLYDLGEFNQKGTVRTKYGTRNQLQAAVTALKSNGIQVYGDVVMNHKGGADATEWVRAVEVNPSNRNQEVSGDYTIEAWTKFDFPGRGNTHSNFKWRWYHFDGVDWDQSRQLQNRIYKFRGKGWDWEVDTENGNYDYLMYADIDMDHPEVVNELRNWGVWYTNTLGLDGWRIDAVKHIKYSFTRDWLTHVRNTTGKNMFAVAEFWKNDIGAIENYLSKTNWNHSVFDVPLHYNLYNASRSGGNYDMRQIFNGTVVQRHPTHAVTFVDNHDSQPEEALESFVEEWFKPLAYALTLTRDQGYPSVFYGDYYGIPTHGVPAMKSKIDPILEARQKYAYGTQRDYLDHPDVIGWTREGDGVHADSGLATLMSDGPGGSKWMEVGKNNAGEVWYDITGNQTNTVTINKDGWGQFHVSGGSVSIYVQQ

SEQ ID NO: 24805 - protein, 483 aa, Bacillus licheniformis
HHNGTNGTMMQYFEWYLPNDGNHWNRLRSDASNLKDKGITAVWIPPAWKGASQNDVGYGAYDLYDLGEFNQKGTVRTKYGTRNQLQAAVTALKSNGIQVYGDVVMNHKGGADATEWVRAVEVNPSNRNQEVSGDYTIEAWTKFDFPGRGNTHSNFKWRWYHFDGVDWDQSRQLQNRIYKFRGKGWDWEVDTENGNYDYLMYADIDMDHPEVVNELRNWGVWYTNTLGLDGFRIDAVKHIKYSFTRDWLTHVRNTTGKNMFAVAEFWKNDIGAIENYLSKTNWNHSVFDVPLHYNLYNASREGGNYDMRQIFNGTVVQRHPTHAVTFVDNHDSQPEEALESFVEEWFKPLAYALTLTRDQGYPSVFYGDYYGIPTHGVPAMKSKIDPILEARQKYAYGTQRDYLDHPDVIGWTREGDGVHADSGLATLMSDGPGGSKWMEVGKNNAGEVWYDITGNQTNTVTINKDGWGQFHVSGGSVSIYVQQ

SEQ ID NO: 24806 - protein, 483 aa, Bacillus licheniformis
HHNGTNGTMMQYFEWYLPNDGNHWNRLRSDASNLKDKGITAVWIPPAWKGASQNDVGYGAYDLYDLGEFNQKGTVRTKYGTRNQLQAAVTALKSNGIQVYGDVVMNHKGGADATEWVRAVEVNPSNRNQEVSGDYTIEAWTKFDFPGRGNTHSNFKWRWYHFDGVDWDQSRQLQNRIYKFRGKEWDWEVDTENGNYDYLMYADIDMDHPEVVNELRNWGVWYTNTLGLDGFRIDAVKHIKYSFTRDWLTHVRNTTGKNMFAVAEFWKNDIGAIENYLSKTNWNHSVFDVPLHYNLYNASRSGGNYDMRQIFNGTVVQRHPTHAVTFVDNHDSQPEEALESFVEEWFKPLAYALTLTRDQGYPSVFYGDYYGIPTHGVPAMKSKIDPILEARQKYAYGTQRDYLDHPDVIGWTREGDGKHADSGLATLMSDGPGGSKWMEVGKNNAGERWYDITGNQTNTVTINKDGWGEFHVSGGSVSIYVQQ

SEQ ID NO: 24807 - protein, 483 aa, Bacillus licheniformis
HHNGTNGTMMQYFEWYLPNDGNHWNRLRSDASNLKDKGITAVWIPPAWKGASQNDVGYGAYDLYDLGEFNQKGTVRTKYGTRNQLQAAVTALKSNGIQVYGDVVMNHKGGADATEWVRAVEVNPSNRNQEVSGDYTIEAWTKFDFPGRGNTHSNFKWRWYHFDGVDWDQSRQLQNRIYKFRGKGWDWEVDTENGNYDYLMYADIDMDHPEVVNELRNWGVWYTNTLGLDGFRIDAVKHIKYSFTRDWLTHVRNTTGKNMFAVAEFWKNDIGAIENYLSKTNWNHSVFDVPLHYNLYNASRSGGNYDMRQIFNGTVVPRHPTHAVTFVDNHDSQPEEALESFVEEWFKPLAYALTLTRDQGYPSVFYGDYYGIPTHGVPAMKSKIDPILEARQKYAYGTQRDYLDHPDVIGWTREGDGVHADSGLATLMSDGPGGSKWMEVGKNNAGEVWYDITGNQTNTVTINKDGWGQFHVSGGSVSIYVQQ

SEQ ID NO: 24808 - protein, 483 aa, Bacillus licheniformis
HHNGTNGTMMQYFEWYLPNDGNHWNRLRSDASNLKDKGITAVWIPPAWKGASQNDVGYGAYDLYDLGEFNQKGTVRTKYGTRNQLQAAVTALKSNGIQVYGDVVMNHKGGADATEWWRAVEVNPSNRNQEVSGDYTIEAWTKFDFPGRGNTHSNFKWRWYHFDGVDWDQSRQLQNRIYKFRGKGWDWEVDTENGNYDYLMYADIDMDHPEVVNELRNWGVWYTNTLGLDGFRIDAVKHIKYSFTRDWLTHVRNTTGKNMFAVAEFWKNDIGAIENYLSKTNWNHSVFDVPLHYNLYNASRSGGNYDMRQIFNGTVVQRHPTHAVTFVDNHDSQPEEALESFVEEWFKPLAYALTLTRDQGYPSVFYGDYYGIPTHGVPAMKSKIDPILEARQKYAYGTQRDYLDHPDVIGWTREGDGVHADSGLATLMSDGPGGSKWMEVGKNNAGEVWYDITGNQTNTVTINKDGWGQFHVSGGSVSIYVQQ

SEQ ID NO: 24809 - protein, 483 aa, Bacillus licheniformis
HHNGTNGTMMQYFEWYLPNDGNHWNRLRSDASNLKDKGITAVWIPPAWKGASQNDVGYGAYDLYDLGEFNQKGTVRTKYGTRNQLQAAVTALKSNGIQVYGDVVMNHKGGADATEWVRAVEVNPSNRNQEVSGDYTIEAWTKFDFPGRGNTHSNFKWRWYHFDGVDWDQSRQLQNRIYKFRGKGWDWEVDTENGNYDYLMYADIDMDHPEVVNELRNWGVWYTNTLGLDGFRIDAVKHIKYSFTRDWLTHVRNTTGKNMFAVAEFWKNDIGAIENYLSKTNWNHSVFDVPLHYNLYNASRSGGNYDMRQIFNGTVVQRHPTHAVTFVDNHDSQPEEALESFVEEWFKPLAYALTLTRDQGYLSVFYGDYYGIPTHGVPAMKSKIDPILEARQKYAYGTQRDYLDHPDVIGWTREGDGVHADSGLATLMSDGPGGSKWMEVGKNNAGEVWYDITGNQTNTVTINKDGWGQFHVSGGSVSIYVQQ

SEQ ID NO: 24810 - protein, 483 aa, Bacillus licheniformis
HHNGTNGTMMQYFEWYLPNDGNHWNRLRSDASNLKDKGITAVWIPPAWKGASQNDVGYGAYDLYDLGEFNQKGTVRTKYGTRNQLQAAVTALKSNGIQVYGDVVMNHKGGADATEWVRAVEVNPSNRNQEVSGDYTIEAWTKFDFPGRGNTHSNFKWRWYHFDGVDWDQSRQLQNRIYKFRGKGWTWEVDTENGNYDYLMYADIDMDHPEVVNELRNWGVWYTNTLGLDGFRIDAVKHIKYSFTRDWLTHVRNTTGKNMFAVAEFWKNDIGAIENYLSKTNWNHSVFDVPLHYNLYNASRSGGNYDMRQIFNGTVVQRHPTHAVTFVDNHDSQPEEALESFVEEWFKPLAYALTLTRDQGYPSVFYGDYYGIPTHGVPAMKSKIDPILEARQKYAYGTQRDYLDHPDVIGWTREGDGVHADSGLATLMSDGPGGSKWMEVGKNNAGEVWYDITGNQTNTVTINKDGWGQFHVSGGSVSIYVQQ

SEQ ID NO: 24811 - protein, 483 aa, Bacillus licheniformis
HHLGTNGTMMQYFEWYLPNDGNHWNRLRSDASNLKDKGITAVWIPPAWKGASQNDVGYGAYDLYDLGEFNQKGTVRTKYGTRNQLQAAVTALKSNGIQVYGDVVMNHKGGADATEWVRAVEVNPSNRNQEVSGDYTIEAWTKFDFPGRGNTHSNFKWRWYHFDGVDWDQSRQLQNRIYKFRGKGWDWEVDTENGNYDYLMYADIDMDHPEVVNELRNWGVWYTNTLGLDGFRIDAVKHIKYSFTRDWLTHVRNTTGKNMFAVAEFWKNDIGAIENYLSKTNWNHSVFDVPLHYNLYNASRSGGNYDMRQIFNGTVVQRHPTHAVTFVDNHDSQPEEALESFVEEWFKPLAYALTLTRDQGYPSVFYGDYYGIPTHGVPAMKSKIDPILEARQKYAYGTQRDYLDHPDVIGWTREGDGVHADSGLATLMSDGPGGSKWMEVGKNNAGEVWYDITGNQTNTVTINKDGWGQFHVSGGSVSIYVQQ

SEQ ID NO: 24812 - protein, 483 aa, Bacillus licheniformis
HHNGTNGTMMQYFEWYLPNDGNHWNRLRSDASNLKDKGITAVWIPPAWKGASQNDVGYGAYDLYDLGEFNQKGTVRTKYGTRNQLQAAVTALKSNGIQVYGDVVMNHKGGADATEWVRAVEVNPSNRNQEVSGDYTIEAWTKFDFPGRGNTHSNFKWRWYHFDGVDWDQSRQLQNRIYKFRGKEWDWEVDTENGNYDYLMYADYDMDHPEVVNELRNWGVWYTNTLGLDGFRIDAVKHIKYSFTRDWLEHVRNTTGKNMFAVAEFWKNDIGAIENYLSKTNWNHSVFDVPLHYNLYNASRSGGNYDMRQIFNGTVVQRHPTHAVTFVDNHDSQPEEALESFVEEWFKPLAYALTLTRDQGYPSVFYGDYYGIPTHGVPAMKSKIDPILEARQKYAYGTQRDYLDHPDVIGWTREGDGVHADSGLATLMSDGPGGSKWMEVGKNNAGEVWYDITGNQTNTVTINKDGWGQFHVSGGSVSIYVQQ

SEQ ID NO: 24813 - protein, 483 aa, Bacillus licheniformis
HHNGTNGTMMQYFEWYLPNDGNHWNRLRSDASNLKDKGITAVWIPPAWKGASQNDVGYGAYDLYDLGEFNQKGTVRTKYGTRNQLQAAVTALKSNGIQVYGDVVMNHKGGADATEWVRAVEVNPSNRNQEVSGDYTIEAWTKFDFPGRGNTHSNFKWRWYHFDGVDWDQSRQLQNRIYKFRGKGWDWEVDTENGNYDYLMYADIDMDHPEVVNELRNWGVWYTNTLGLDGFRIDAVKHIKYSFTRDWLTHVRNTTGKNMFAVAEFWKNDIGAIENYLSKTNWNHSVFDVPLHYNLYNASRSGGNYDMRQIFNGTVVQRHPTHAVTFVDNHDSQPEEALESFVEEWFKPLAYALTLTRDQGYPSVFYGDYYGIPTHGVPAMKSKIDPILEARQKYAYGTQRDYLDHPDVIGWTREGDGVHADSGLATLMSDGPGGSKWMEVGKNNAGEVWYDITGNQTNMVTINKDGWGQFHVSGGSVSIYVQQ

SEQ ID NO: 24814 - protein, 483 aa, Bacillus licheniformis
HHNGTNGTMMQYFEWYLPNDGNHWHRLRSDASNLKDKGITAVWIPPAWKGASQNDVGYGAYDLYDLGEFNQKGTVRTKYGTRNQLQAAVTALKSNGIQVYGDVVMNHKGGADATEWVRAVEVNPSNRNQEVSGDYTIEAWTKFDFPGRGNTHSNFKWRWYHFDGVDWDQSRQLQNKIYKFRGKEWDWEVDEENGNYDYLMYADYDMDHPEVVNELRNWGVWYTNTLGLDGFRIDAVKHIKYSFTRDWLTHVRNTTGKNMFAVAEFWKNDIGAIENYLSKTNWNHSVFDVPLHYNLYNASRSGGNYDMRQIFNGTVVQRHPTHAVTFVDNHDSQPEEALESFVEEWFKPLAYALTLTRDQGYPSVFYGDYYGIPTHGVPAMKSKIDPILEARQKYAYGTQRDYLDHPDVIGWTREGDGVHADSGLATLMSDGPGGSKWMEVGKNNAGEVWYDITGNQTGTVTINKDGWGQFHVSGGSVSIYVQQ

SEQ ID NO: 24815 - protein, 483 aa, Bacillus licheniformis
HHNGTNGTMMQYFEWYLPNDGNHWNRLRSDASNLKDKGITAVWIPPAWKGASQNDVGYGAYDLYDLGEFNQKGTVRTKYGTRNQLQAAVTALKSNGIQVYGDVVMNHKGGADATEWVRAVEVNPSNRNQEVSGDYTIEAWTKFDFPGRGNTHSNFKWRWYHFDGVDWDQSRQLQNRIYKFRGKGWDWEVDTENGNYDYLMYADIDMDHPEVVNELRNWGVWYTNTLGLDGFRIDAVKHIKYSFTRDWLTHVRNTTGKNMFAVAEFWKADIGAIENYLSKTNWNHSVFDVPLHYNLYNASRSGGNYDMRQIFNGTVVQRHPTHAVTFVDNHDSQPEEALESFVEEWFKPLAYALTLTRDQGYPSVFYGDYYGIPTHGVPAMKSKIDPILEARQKYAYGTQRDYLDHPDVIGWTREGDGVHADSGLATLMSDGPGGSKWMEVGKNNAGEVWYDITGNQTNTVTINKDGWGQFHVSGGSVSIYVQQ

SEQ ID NO: 24816 - protein, 483 aa, Bacillus licheniformis
HHNGTNGAMMQYFEWYLPNDGNHWNRLRSDASNLKDKGITAVWIPPAWKGASQNDVGYGAYDLYDLGEFNQKGTVRTKYGTRNQLQAAVTALKSNGIQVYGDVVMNHKGGADATEWVRAVEVNPSNRNQEVSGDYTIEAWTKFDFPGRGNTHSNFKWRWYHFDGVDWDQSRQLQNRIYKFRGKGWDWEVDTENGNYDYLMYADIDMDHPEVVNELRNWGVWYTNTLGLDGFRIDAVKHIKYSFTRDWLTHVRNTTGKNMFAVAEFWKNDIGAIENYLSKTNWNHSVFDVPLHYNLYNASRSGGNYDMRQIFNGTVVQRHPTHAVTFVDNHDSQPEEALESFVEEWFKPLAYALTLTRDQGYPSVFYGDYYGIPTHGVPAMKSKIDPILEARQKYAYGTQRDYLDHPDVIGWTREGDGVHADSGLATLMSDGPGGSKWMEVGKNNAGEVWYDITGNQTNTVTINKDGWGQFHVSGGSVSIYVQQ

SEQ ID NO: 24817 - protein, 483 aa, Bacillus licheniformis
HHNGTNGTMMQYFEWYLPNDGNHWNRLRSDASNLKDKGITAVWIPPAWKGASQNDVGYGAYDLYDLGEFNQKGTVRTKYGTRNQLQAAVTALKSNGIQVYGDVVMNHKGGADATEWVRAVEVNPSNRNQEVSGDYTIEAWTKFDFPGRGNTHSNFKWRWYHFDGVDWDQSRQLQNRIYKFRGKGWDWEVDTENGNYDYLMYADIDMDHPEVVNELRNWGVWYTNTLGLDGFRIDAVKHIKYSFTRDWLTHVRNTTGKNMFAVAEFWKNDIGAIENYLSKTNWNHSVFDVPLHYNLYNASRSGGNYDMRQIFNGTVVQRHPTHAVTFVDNHDSQPEEALESFVEEWFKPLAYALTLTRDQGQPSVFYGDYYGIPTHGVPAMKSKIDPILEARQKYAYGTQRDYLDHPDVIGWTREGDGVHADSGLATLMSDGPGGSKWMEVGKNNAGEVWYDITGNQTNTVTINKDGWGQFHVSGGSVSIYVQQ

SEQ ID NO: 24818 - protein, 483 aa, Bacillus licheniformis
HHNGTNGTMMQYFEWYLPNDGNHWNRLRSDASNLKDKGITAVWIPPAWKGASQNDVGYGAYDLYDLGEFNQKGTVRTKYGLRNQLQAAVTALKSNGIQVYGDVVMNHKGGADATEWVRAVEVNPSNRNQEVSGDYTIEAWTKFDFPGRGNTHSNFKWRWYHFDGVDWDQSRQLQNRIYKFRGKGWDWEVDTENGNYDYLMYADIDMDHPEVVNELRNWGVWYTNTLGLDGFRIDAVKHIKYSFTRDWLTHVRNTTGKNMFAVAEFWKNDIGAIENYLSKTNWNHSVFDVPLHYNLYNASRSGGNYDMRQIFNGTVVQRHPTHAVTFVDNHDSQPEEALESFVEEWFKPLAYALTLTRDQGYPSVFYGDYYGIPTHGVPAMKSKIDPILEARQKYAYGTQRDYLDHPDVIGWTREGDGVHADSGLATLMSDGPGGSKWMEVGKNNAGEVWYDITGNQTNTVTINKDGWGQFHVSGGSVSIYVQQ

SEQ ID NO: 24819 - protein, 483 aa, Bacillus licheniformis
HHNGTNGTMMQYFEWYLPNDGNHWNRLRSDASNLKDKGITAVWIPPAWKGASQNDVGYGAYDLYDLGEFNQKGTVRTKYGTRNQLQAAVTALKSNGIQVYGDVVMNHKGGADATEWVRAVEVNPSNRNQEVSGDYTIEAWTKFDFPGRGNTHSNFKWRWYHFDGVDWDQSRQLQNRIYKFRGKGWDWEVDTENGNYDYLMYADIDMDHTEVVNELRNWGVWYTNTLGLDGFRIDAVKHIKYSFTRDWLTHVRNTTGKNMFAVAEFWKNDIGAIENYLSKTNWNHSVFDVPLHYNLYNASRSGGNYDMRQIFNGTVVQRHPTHAVTFVDNHDSQPEEALESFVEEWFKPLAYALTLTRDQGYPSVFYGDYYGIPTHGVPAMKSKIDPILEARQKYAYGTQRDYLDHPDVIGWTREGDGVHADSGLATLMSDGPGGSKWMEVGKNNAGEVWYDITGNQTNTVTINKDGWGQFHVSGGSVSIYVQQ

SEQ ID NO: 24820 - protein, 483 aa, Bacillus licheniformis
HHNGTNGTMMQYFEWYLPNDGNHWNRLRSDASNLKDKGITAVWIPPAWKGASQNDVGYGAYDLYDLGEFNQKGTVRTKYGTRNQLQAAVTALKSNGIQVYGDVVMNHKGGADATEWVRAVEVNPSNRNQEVSGDYTIEAWTKFDFPGRGNTHSNFKWRWYHFDGVDWDQSRQLQNRIYKFRGKGWDWEVDTENGNYDYLMYADIDMDHPEVVNELRNWGVWYTNTLGLDGFRIDAVKHIKYSFTRDWLTHVRNTTGKNMFAVAEFWKNDIGAIENYLSKTNWNHSVFDVPLHYNLYNASRSGGNYDMRQIFNGTVVQRHPTHAVTFVDNHDSQPEEALESFVEEWFKPLAYALTLTRDQGYPSVFYGDYYGIPTHGVPAMKSKIDPILEARQKYAYGTQRDYLDHPDVIGWTREGDGVHADSGLATLMSDGPGGSKWMEVGKNNAGEVWYDITGNQTNRVTINKDGWGQFHVSGGSVSIYVQQ

SEQ ID NO: 24821 - protein, 483 aa, Bacillus licheniformis
HHNGTNGTMMQYFEWYLPNDGNHWNRLRSDWSNLKDKGITAVWIPPAWKGASQNDVGYGAYDLYDLGEFNQKGTVRTKYGTRNQLQAAVTALKSNGIQVYGDVVMNHKGGADATEWVRAVEVNPSNRNQEVSGDYTIEAWTKFDFPGRGNTHSNFKWRWYHFDGVDWDQSRQLQNRIYKFRGKGWDWEVDTENGNYDYLMYADIDMDHPEVVNELRNWGVWYTNTLGLDGFRIDAVKHIKYSFTRDWLTHVRNTTGKNMFAVAEFWKNDIGAIENYLSKTNWNHSVFDVPLHYNLYNASRSGGNYDMRQIFNGTVVQRHPTHAVTFVDNHDSQPEEALESFVEEWFKPLAYALTLTRDQGYPSVFYGDYYGIPTHGVPAMKSKIDPILEARQKYAYGTQRDYLDHPDVIGWTREGDGVHADSGLATLMSDGPGGSKWMEVGKNNAGEVWYDITGNQTNTVTINKDGWGQFHVSGGSVSIYVQQ

SEQ ID NO: 24822 - protein, 483 aa, Bacillus licheniformis
HHNGTNGTMMQYFEWYLPNDGNHWNRLRSDASNLKDKGITAVWIPPAWKGASQNDVGYGAYDLYDLGEFNQKGTVRTKYGTRNQLQAAVTALKSNGIQVYGDVVMNHKGGADATEWVRAVEVNPSNRNQEVSGDYTIEAWTKFKFPGRGNTHSNFKWRWYHFDGVDWDQSRQLQNRIYKFRGKGWDWEVDTENGNYDYLMYADIDMDHPEVVNELRNWGVWYTNTLGLDGFRIDAVKHIKYSFTRDWLTHVRNTTGKNMFAVAEFWKNDIGAIENYLSKTNWNHSVFDVPLHYNLYNASRSGGNYDMRQIFNGTVVQRHPTHAVTFVDNHDSQPEEALESFVEEWFKPLAYALTLTRDQGYPSVFYGDYYGIPTHGVPAMKSKIDPILEARQKYAYGTQRDYLDHPDVIGWTREGDGVHADSGLATLMSDGPGGSKWMEVGKNNAGEVWYDITGNQTNTVTINKDGWGQFHVSGGSVSIYVQQ

SEQ ID NO: 24823 - protein, 483 aa, Bacillus licheniformis
HHNGTNGTMMQYFEWYLPNDGNHWNRLRSDASNLKDKGITAVWIPPAWKGASQNDVGYGAYDLYDLGEFNQKGTVRTKYGTRNQLQAAVTALKSNGIQVYGDVVMNHKGGADATEWVRAVEVNPSNRNQEVSGDYTIEAWTKFDFPGRGNTHSNFKWRWYHFDGVDWDQSRQLQNRIYKFRGKGWDWEVDTENGNYDYLMEADIDMDHPEVVNELRNWGVWYTNTLGLDGFRIDAVKHIKYSFTRDWLTHVRNTTGKNMFAVAEFWKNDIGAIENYLSKTNWNHSVFDVPLHYNLYNASRSGGNYDMRQIFNGTVVQRHPTHAVTFVDNHDSQPEEALESFVEEWFKPLAYALTLTRDQGYPSVFYGDYYGIPTHGVPAMKSKIDPILEARQKYAYGTQRDYLDHPDVIGWTREGDGVHADSGLATLMSDGPGGSKWMEVGKNNAGEVWYDITGNQTNTVTINKDGWGQFHVSGGSVSIYVQQ

SEQ ID NO: 24824 - protein, 483 aa, Bacillus licheniformis
HHNGTNGTMMQYFEWYLPNDGNHWNRLRSDASNLKDKGITAVWIPPAWKGASQNDVGYGAYDLYDLGEFNQKGTVRTKYGTRNQLQAAVTALKSNGIQVYGDVVMNHKGGADATEWVRAVEVNPSNRNQEVSGDYTIEAWTKFDFPGRGNTHSNFKWRWYHFDGVDWDQSRQLQNRIYKFRGKGWDWEVDTENGNYDYLMYADIDMDHPEVVNELNNWGVWYTNTLGLDGFRIDAVKHIKYSFTRDWLTHVRNTTGKNMFAVAEFWKNDIGAIENYLSKTNWNHSVFDVPLHYNLYNASRSGGNYDMRQIFNGTVVQRHPTHAVTFVDNHDSQPEEALESFVEEWFKPLAYALTLTRDQGYPSVFYGDYYGIPTHGVPAMKSKIDPILEARQKYAYGTQRDYLDHPDVIGWTREGDGVHADSGLATLMSDGPGGSKWMEVGKNNAGEVWYDITGNQTNTVTINKDGWGQFHVSGGSVSIYVQQ

SEQ ID NO: 24825 - protein, 483 aa, Bacillus licheniformis
HHNGTNGTMMQYFEWYLPNDGNHWNRLRSDASNLKDKGITAVWIPPAWKGASQNDVGYGAYDLYDLGEFNQKGTVETKYGTRNQLQAAVTALKSNGIQVYGDVVMNHKGGADATEWVRAVEVNPSNRNQEVSGDYTIEAWTKFDFPGRGNTHSNFKWRWYHFDGVDWDQSRQLQNRIYKFRGKGWDWEVDTENGNYDYLMYADIDMDHPEVVNELRNWGVWYTNTLGLDGFRIDAVKHIKYSFTRDWLTHVRNTTGKNMFAVAEFWKNDIGAIENYLSKTNWNHSVFDVPLHYNLYNASRSGGNYDMRQIFNGTVVQRHPTHAVTFVDNHDSQPEEALESFVEEWFKPLAYALTLTRDQGYPSVFYGDYYGIPTHGVPAMKSKIDPILEARQKYAYGTQRDYLDHPDVIGWTREGDGVHADSGLATLMSDGPGGSKWMEVGKNNAGEVWYDITGNQTNTVTINKDGWGQFHVSGGSVSIYVQQ

SEQ ID NO: 24826 - protein, 483 aa, Bacillus licheniformis
HHNGTNGTMMQYFEWYLPNDGNHWNRLRSDASNLKDKGITAVWIPPAWKGASQNDVGYGAYDLYDLGEFNQKGTVRTKYGTRNQLQAAVTALKSNGIQVYGDVVMNHKGGADATEWVRAVEVNPSNRNQEVSGDYTIEAWTKFDFPGRGNTHSNFKWRWYHFDGVDWDQSRQLQNRIYKFRGKEWDWEVDTENGNYDYLMYADYDMDHPEVVNELRNWGVWYTNTLGLDGFRIDAVKHIKYSFTRDWLTHVRNTTGKNMFAVAEFWKNDIGAIRNYLSKTNWNHSVFDVPLHYNLYNASRSGGNYDMRQIFNGTVVQRHPTHAVTFVDNHDSQPEEALESFVEEWFKPLAYALTLTRDQGYPSVFYGDYYGIPTHGVPAMKSKIDPILEARQKYAYGTQRDYMDHPDVIGWTREGDGVHADSGLATLMSDGPGGSKWMEVGKNNAGEVWYDITGNQTNTVTINKDGWGQFHVSGGSVSIYVQQ

SEQ ID NO: 24827 - protein, 483 aa, Bacillus licheniformis
HHNGTNGTMMQYFEWYLPNDGNHWNRLRSDASNLKDKGITAVWIPPAWKGASQNDVGYGAYDLYDLGEFNQKGTVRTKYGTRNQLQAAVTALKSNGIQVYGDVVMNHKGGADATEWVRAVEVNPSNRNQEVSGDYTIEAWTKFDFPGRGNTHSNFKWRWYHFDGVDWDQSRQLQNRIYKFRGKGWDWEVDTENGNYDYLMYADIDMDHPEVVNELRNWGVWYTNLLGLDGFRIDAVKHIKYSFTRDWLTHVRNTTGKNMFAVAEFWKNDIGAIENYLSKTNWNHSVFDVPLHYNLYNASRSGGNYDMRQIFNGTVVQRHPTHAVTFVDNHDSQPEEALESFVEEWFKPLAYALTLTRDQGYPSVFYGDYYGIPTHGVPAMKSKIDPILEARQKYAYGTQRDYLDHPDVIGWTREGDGVHADSGLATLMSDGPGGSKWMEVGKNNAGEVWYDITGNQTNTVTINKDGWGQFHVSGGSVSIYVQQ

SEQ ID NO: 24828 - protein, 483 aa, Bacillus licheniformis
HHNGTNGTMMQYFEWYLPNDGNHWNRLRSDASNLKDKGITAVWIPPAWKGASQNDVGYGAYDLYDLGEFNQKGTVRTKYGTRNQLQAAVTALKSNGIQVYGDVVMNHKGGADATEWVRAVEVNPSNRNQEVSGDYTIEAWTKFDFPGRGNTHSNFKWRWYHFDGVDWDQSRQLQNRIYKFRGKGWDWEVDTENGNYDYLMYADIDMDHPEVVNELRNWGVWYTNTLGLDGFRIDIVKHIKYSFTRDWLTHVRNTTGKNMFAVAEFWKNDIGAIENYLSKTNWNHSVFDVPLHYNLYNASRSGGNYDMRQIFNGTVVQRHPTHAVTFVDNHDSQPEEALESFVEEWFKPLAYALTLTRDQGYPSVFYGDYYGIPTHGVPAMKSKIDPILEARQKYAYGTQRDYLDHPDVIGWTREGDGVHADSGLATLMSDGPGGSKWMEVGKNNAGEVWYDITGNQTNTVTINKDGWGQFHVSGGSVSIYVQQ

SEQ ID NO: 24829 - protein, 483 aa, Bacillus licheniformis
HHNGTNGTMMQYFEWYLPNDGNHWNRLRSDASNLKDKGITAVWIPPAWKGASQNDVGYGAYDLYDLGEFNQKGTVRTKYGTRNQLQAAVTALKSNGIQVYGDVVMNHKGGADATEWVRAVEVNPSNRNQEVSGDYTIEAWTKFDFPGRGNTHSNFKWRWYHFDGVDWDQSRQLQNRIYKFRGKGWDWEVDTENGNYDYLMYADIDMDHPEVVNELRNWGVWYTNTLGLDGFRIDAVKHIKYSFTRDWLTHVRNTTGKNMFAVAEFWKNDIGAIENYLSKTNWNHSVFDVPLHYNLYNASRSGGNYDMRQIFNGTVVQRWPTHAVTFVDNHDSQPEEALESFVEEWFKPLAYALTLTRDQGYPSVFYGDYYGIPTHGVPAMKSKIDPILEARQKYAYGTQRDYLDHPDVIGWTREGDGVHADSGLATLMSDGPGGSKWMEVGKNNAGEVWYDITGNQTNTVTINKDGWGQFHVSGGSVSIYVQQ

SEQ ID NO: 24830 - protein, 483 aa, Bacillus licheniformis
HHNGTNGTMMQYFEWYLPIDGNHWNRLRSDASNLKDKGITAVWIPPAWKGASQNDVGYGAYDLYDLGEFNQKGTVRTKYGTRNQLQAAVTALKSNGIQVYGDVVMNHKGGADATEWVRAVEVNPSNRNQEVSGDYTIEAWTKFDFPGRGNTHSNFKWRWYHFDGVDWDQSRQLQNRIYKFRGKGWDWEVDTENGNYDYLMYADIDMDHPEVVNELRNWGVWYTNTLGLDGFRIDAVKHIKYSFTRDWLTHVRNTTGKNMFAVAEFWKNDIGAIENYLSKTNWNHSVFDVPLHYNLYNASRSGGNYDMRQIFNGTVVQRHPTHAVTFVDNHDSQPEEALESFVEEWFKPLAYALTLTRDQGYPSVFYGDYYGIPTHGVPAMKSKIDPILEARQKYAYGTQRDYLDHPDVIGWTREGDGVHADSGLATLMSDGPGGSKWMEVGKNNAGEVWYDITGNQTNTVTINKDGWGQFHVSGGSVSIYVQQ

SEQ ID NO: 24831 - protein, 483 aa, Bacillus licheniformis
HHNGTNGTMMQYFEWYLPNDGNHWNRLRSDASNLKDKGITAVWIPPAWKGASQNDVGYGAYDLYDLGEFNQKGTVRTKYGTRNQLQAAVTALKSNGIQVYGDVVMNHKGGADATEWVRAVEVNPSNRNQEVSGDYTIEAWTKFDFPGRGNTHSNFKWRWYHFDGVDWDQSRQLQNRIYKFRGKGWDWEVDTENGNYDYLMYADIDMDHPEVVNELRNWGVWYTNTLGLDGFRIDAVKHIKYSFTRDWLTHVRNTTGKNMFAVAEFWKNDIGAIENYLSKTNLNHSVFDVPLHYNLYNASRSGGNYDMRQIFNGTVVQRHPTHAVTFVDNHDSQPEEALESFVEEWFKPLAYALTLTRDQGYPSVFYGDYYGIPTHGVPAMKSKIDPILEARQKYAYGTQRDYLDHPDVIGWTREGDGVHADSGLATLMSDGPGGSKWMEVGKNNAGEVWYDITGNQTNTVTINKDGWGQFHVSGGSVSIYVQQ

SEQ ID NO: 24832 - protein, 483 aa, Bacillus licheniformis
HHNGTNGTMMQYFEWYLPNDGNHWNRLRSDASNLKDKGITAVWIPPAWKGASQNDVGYGAYDLYDLGEFNQKGTVRTKYGTRNQLQAAVTALKSNGIQVYGDVVMNHKGGADATEWVRAVEVNPSNRNQEVSGDYTIEAWTKFDFPGRGNTHSNFVWRWYHFDGVDWDQSRQLQNRIYKFRGKGWDWEVDTENGNYDYLMYADIDMDHPEVVNELRNWGVWYTNTLGLDGFRIDAVKHIKYSFTRDWLTHVRNTTGKNMFAVAEFWKNDIGAIENYLSKTNWNHSVFDVPLHYNLYNASRSGGNYDMRQIFNGTVVQRHPTHAVTFVDNHDSQPEEALESFVEEWFKPLAYALTLTRDQGYPSVFYGDYYGIPTHGVPAMKSKIDPILEARQKYAYGTQRDYLDHPDVIGWTREGDGVHADSGLATLMSDGPGGSKWMEVGKNNAGEVWYDITGNQTNTVTINKDGWGQFHVSGGSVSIYVQQ

SEQ ID NO: 24833 - protein, 483 aa, Bacillus licheniformis
HHNGTNGTMMQYFEWYLPNDGNHWNRLRSDASNLKDKGITAVWIPPAWKGASQNDVGYGAYDLYDLGEFNQKGTVRTKYGTRNQLQAAVTALKSNGIQVYGDVVMNHKGGADALEWVRAVEVNPSNRNQEVSGDYTIEAWTKFDFPGRGNTHSNFKWRWYHFDGVDWDQSRQLQNRIYKFRGKGWDWEVDTENGNYDYLMYADIDMDHPEVVNELRNWGVWYTNTLGLDGFRIDAVKHIKYSFTRDWLTHVRNTTGKNMFAVAEFWKNDIGAIENYLSKTNWNHSVFDVPLHYNLYNASRSGGNYDMRQIFNGTVVQRHPTHAVTFVDNHDSQPEEALESFVEEWFKPLAYALTLTRDQGYPSVFYGDYYGIPTHGVPAMKSKIDPILEARQKYAYGTQRDYLDHPDVIGWTREGDGVHADSGLATLMSDGPGGSKWMEVGKNNAGEVWYDITGNQTNTVTINKDGWGQFHVSGGSVSIYVQQ

SEQ ID NO: 24834 - protein, 483 aa, Bacillus licheniformis
HHNGTNGTMMQYFEWYLPNDGNHWHRLRSDASNLKDKGITAVWIPPAWKGASQNDVGYGAYDLYDLGEFNQKGTVRTKYGTRNQLQAAVTALKSNGIQVYGDVVMNHKGGADATEWVRAVEVNPSNRNQEVSGDYTIEAWTKFDFPGRGNTHSNFKWRWYHFDGVDWDQSRQLQNRIYKFRGKEWDWEVDTENGNYDYLMYADIDMDHPEVVNELRNWGVWYTNTLGLDGFRIDAVKHIKYSFTRDWLTHVRNTTGKNMFAVAEFWKNDIGAIENYLSKTNWNHSVFDVPLHYNLYNASRSGGNYDMRQIFNGTVVQRHPTHAVTFVDNHDSQPEEALESFVEEWFKPLAYALTLTRDQGYPSVFYGDYYGIPTHGVPAMKSKIDPILEARQKYAYGTQRDYMDHPDVIGWTREGDGVHADSGLATLMSDGPGGSKWMEVGKNNAGEVWYDITGNQTNTVTINKDGWGQFHVSGGSVSIYVQQ

SEQ ID NO: 24835 - protein, 483 aa, Bacillus licheniformis
HHNGTNGTMMQYFEWYLPNDGNHWNRLRSDASNLKDKGITAVWIPPAWKGASQNDVGYGAYDLYDLGEFNQKGTVRTKYGTRNQLQAAVTALKSNGIQVYGDVVMNHKGGADATEWVRAVEVNPSNRNQEVSGDYTIEAWTKFDFPGRGNTHSNFKWRWYHFDGVDWDQSRQLQNRIYKFRGKGWDWEVDTENGNYDYLMYADIDMDHPEVVNELRNWGVWYTNTLGLDGFRIDAVKHIKYSFTRDWLTHVRNTTGKNMFAVAEFWKQDIGAIENYLSKTNWNHSVFDVPLHYNLYNASRSGGNYDMRQIFNGTVVQRHPTHAVTFVDNHDSQPEEALESFVEEWFKPLAYALTLTRDQGYPSVFYGDYYGIPTHGVPAMKSKIDPILEARQKYAYGTQRDYLDHPDVIGWTREGDGVHADSGLATLMSDGPGGSKWMEVGKNNAGEVWYDITGNQTNTVTINKDGWGQFHVSGGSVSIYVQQ

SEQ ID NO: 24836 - protein, 483 aa, Bacillus licheniformis
HHNGTNGTMMQYFEWYLPNDGNHWNRLRSDASNLKDKGITAVWIPPAWKGASQNDVGYGAYDLYDLGEFNQKGTVRTKYGTRNQLQAAVTALKSNGIQVYGDVVMNHKGGADATEWVRAVEVNPSNRNQEVSGDYTIEAWTKFDFPGRGNTHSNFKWRWYHFDGVDWDQSRQLQNRIYKFRGKGWDWEVDTENGNYDYLMYADIDMDHPEVVNELRNWGVWYTNTLGLDGFRIDAVKHIKYSFTRDWLTHVRNTTGKNMFAVAEFWKNDIGAIENYLSKTNWNHSVFDVPLHFNLYNASRSGGNYDMRQIFNGTVVQRHPTHAVTFVDNHDSQPEEALESFVEEWFKPLAYALTLTRDQGYPSVFYGDYYGIPTHGVPAMKSKIDPILEARQKYAYGTQRDYLDHPDVIGWTREGDGVHADSGLATLMSDGPGGSKWMEVGKNNAGEVWYDITGNQTNTVTINKDGWGQFHVSGGSVSIYVQQ

SEQ ID NO: 24837 - protein, 483 aa, Bacillus licheniformis
HHNGTNGTMMQYFEWYLPNDGNHWNRLRSDASNLKDKGITAVWIPPAWKGASQNDVGYGAYDLYDLGEFNQKGTVRTKYGTRNQLQAAVTALKSNGIQVYGDVVMNHKGGADATEWVRAVEVNPSNRNQEVSGDYTIEAWTKFDFPGRGNTHSNFKWRWYHFDGVDWDQSRQLQNRIYKFRGKGWDWEVDTENGNYDYLMYADIDMDHPEVVNELRNWGVWYTNTLGLDGFRIDAVKHIKYSFTRDWLTHVRNTTGKNMFAVAEFWKNDIGAIENYLSNTNWNHSVFDVPLHYNLYNASRSGGNYDMRQIFNGTVVQRHPTHAVTFVDNHDSQPEEALESFVEEWFKPLAYALTLTRDQGYPSVFYGDYYGIPTHGVPAMKSKIDPILEARQKYAYGTQRDYLDHPDVIGWTREGDGVHADSGLATLMSDGPGGSKWMEVGKNNAGEVWYDITGNQTNTVTINKDGWGQFHVSGGSVSIYVQQ

SEQ ID NO: 24838 - protein, 483 aa, Bacillus licheniformis
HHNGTNGTMMQYFEWYLPNDGNHWNRLRSDASNLKDKGITAVWIPPAWKGASQNDVGYGAYDLYDLGEFNQKGTGRTKYGTRNQLQAAVTALKSNGIQVYGDVVMNHKGGADATEWVRAVEVNPSNRNQEVSGDYTIEAWTKFDFPGRGNTHSNFKWRWYHFDGVDWDQSRQLQNRIYKFRGKGWDWEVDTENGNYDYLMYADIDMDHPEVVNELRNWGVWYTNTLGLDGFRIDAVKHIKYSFTRDWLTHVRNTTGKNMFAVAEFWKNDIGAIENYLSKTNWNHSVFDVPLHYNLYNASRSGGNYDMRQIFNGTVVQRHPTHAVTFVDNHDSQPEEALESFVEEWFKPLAYALTLTRDQGYPSVFYGDYYGIPTHGVPAMKSKIDPILEARQKYAYGTQRDYLDHPDVIGWTREGDGVHADSGLATLMSDGPGGSKWMEVGKNNAGEVWYDITGNQTNTVTINKDGWGQFHVSGGSVSIYVQQ

SEQ ID NO: 24839 - protein, 483 aa, Bacillus licheniformis
HHNGTNGTMMQYFEWYLPNDGNHWNRLRSDASNLKDKGITSVWIPPAWKGASQNDVGYGAYDLYDLGEFNQKGTVRTKYGTRNQLQAAVTALKSNGIQVYGDVVMNHKGGADATEWVRAVEVNPSNRNQEVSGDYTIEAWTKFDFPGRGNTHSNFKWRWYHFDGVDWDQSRQLQNRIYKFRGKGWDWEVDTENGNYDYLMYADIDMDHPEVVNELRNWGVWYTNTLGLDGFRIDAVKHIKYSFTRDWLTHVRNTTGKNMFAVAEFWKNDIGAIENYLSKTNWNHSVFDVPLHYNLYNASRSGGNYDMRQIFNGTVVQRHPTHAVTFVDNHDSQPEEALESFVEEWFKPLAYALTLTRDQGYPSVFYGDYYGIPTHGVPAMKSKIDPILEARQKYAYGTQRDYLDHPDVIGWTREGDGVHADSGLATLMSDGPGGSKWMEVGKNNAGEVWYDITGNQTNTVTINKDGWGQFHVSGGSVSIYVQQ

SEQ ID NO: 24840 - protein, 483 aa, Bacillus licheniformis
HHNGTNGTMMQYFEWYLPNDGNHWNRLRSDASNLKDKGITAVWIPPAWKGASQNDVGYGAYDLYDLGEFNQKGTVRTKYGTRNQLQAAVTALKSNGIQVYGDVVMNHKGGADATEWVRAVEVNPSNRNQEVSGDYHIEAWTKFDFPGRGNTHSNFKWRWYHFDGVDWDQSRQLQNRIYKFRGKGWDWEVDTENGNYDYLMYADIDMDHPEVVNELRNWGVWYTNTLGLDGFRIDAVKHIKYSFTRDWLTHVRNTTGKNMFAVAEFWKNDIGAIENYLSKTNWNHSVFDVPLHYNLYNASRSGGNYDMRQIFNGTVVQRHPTHAVTFVDNHDSQPEEALESFVEEWFKPLAYALTLTRDQGYPSVFYGDYYGIPTHGVPAMKSKIDPILEARQKYAYGTQRDYLDHPDVIGWTREGDGVHADSGLATLMSDGPGGSKWMEVGKNNAGEVWYDITGNQTNTVTINKDGWGQFHVSGGSVSIYVQQ

SEQ ID NO: 24841 - protein, 483 aa, Bacillus licheniformis
HHNGINGTMMQYFEWYLPNDGNHWNRLRSDASNLKDKGITAVWIPPAWKGASQNDVGYGAYDLYDLGEFNQKGTVRTKYGTRNQLQAAVTALKSNGIQVYGDVVMNHKGGADATEWVRAVEVNPSNRNQEVSGDYTIEAWTKFDFPGRGNTHSNFKWRWYHFDGVDWDQSRQLQNRIYKFRGKGWDWEVDTENGNYDYLMYADIDMDHPEVVNELRNWGVWYTNTLGLDGFRIDAVKHIKYSFTRDWLTHVRNTTGKNMFAVAEFWKNDIGAIENYLSKTNWNHSVFDVPLHYNLYNASRSGGNYDMRQIFNGTVVQRHPTHAVTFVDNHDSQPEEALESFVEEWFKPLAYALTLTRDQGYPSVFYGDYYGIPTHGVPAMKSKIDPILEARQKYAYGTQRDYLDHPDVIGWTREGDGVHADSGLATLMSDGPGGSKWMEVGKNNAGEVWYDITGNQTNTVTINKDGWGQFHVSGGSVSIYVQQ

SEQ ID NO: 24842 - protein, 483 aa, Bacillus licheniformis
HHIGTNGTMMQYFEWYLPNDGNHWNRLRSDASNLKDKGITAVWIPPAWKGASQNDVGYGAYDLYDLGEFNQKGTVRTKYGTRNQLQAAVTALKSNGIQVYGDVVMNHKGGADATEWVRAVEVNPSNRNQEVSGDYTIEAWTKFDFPGRGNTHSNFKWRWYHFDGVDWDQSRQLQNRIYKFRGKGWDWEVDTENGNYDYLMYADIDMDHPEVVNELRNWGVWYTNTLGLDGFRIDAVKHIKYSFTRDWLTHVRNTTGKNMFAVAEFWKNDIGAIENYLSKTNWNHSVFDVPLHYNLYNASRSGGNYDMRQIFNGTVVQRHPTHAVTFVDNHDSQPEEALESFVEEWFKPLAYALVLTRDQGYPSVFYGDYYGIPTHGVPAMKSKIDPILEARQKYAYGTQRDYLDHPDVIGWTREGDGVHADSGLATLMSDGPGGSKWMEVGKNNAGEVWYDITGNQTNTVTINKDGWGQFHVSGGSVSIYVQQ

SEQ ID NO: 24843 - protein, 483 aa, Bacillus licheniformis
HHNGTNGTMMQYFEWYLPNDGNHWNRLRSDASNLKDKGITAVWIPPAWKGASQNDVGYGAYDLYDLGEFNQKGTVRTKYGTRNQLQAAVTALKSNGIQVYGDVVMNHKGGADATEWVRAVEVNPSNRNQEVSGDYTIEAWTKFDFPGRGNTHSNFKWRWYHFDGVDWDQSRQLQNRIYKNRGKGWDWEVDTENGNYDYLMYADIDMDHPEVVNELRNWGVWYTNTLGLDGFRIDAVKHIKYSFTRDWLTHVRNTTGKNMFAVAEFWKNDIGAIENYLSKTNWNHSVFDVPLHYNLYNASRSGGNYDMRQIFNGTVVQRHPTHAVTFVDNHDSQPEEALESFVEEWFKPLAYALTLTRDQGYPSVFYGDYYGIPTHGVPAMKSKIDPILEARQKYAYGTQRDYLDHPDVIGWTREGDGVHADSGLATLMSDGPGGSKWMEVGKNNAGEVWYDITGNQTNTVTINKDGWGQFHVSGGSVSIYVQQ

SEQ ID NO: 24844 - protein, 483 aa, Bacillus licheniformis
HHNGTNGTMMQYFEWYLPNDGNHWNRLRSDASNLKDKGITAVWIPPAWKGASQNDVGYGAYDLYDLGEFNQKGTVRTKYGTRNQLQAAVTALKSNGIQVYGDVVMNHKGGADATEWVRAVEVNPSNRNQEVSCDYTIEAWTKFDFPGRGNTHSNFKWRWYHFDGVDWDQSRQLQNRIYKFRGKGWDWEVDTENGNYDYLMYADIDMDHPEVVNELRNWGVWYTNTLGLDGFRIDAVKHIKYSFTRDWLTHVRNTTGKNMFAVAEFWKNDIGAIENYLSKTNWNHSVFDVPLHYNLYNASRSGGNYDMRQIFNGTVVQRHPTHAVTFVDNHDSQPEEALESFVEEWFKPLAYALTLTRDQGYPSVFYGDYYGIPTHGVPAMKSKIDPILEARQKYAYGTQRDYLDHPDVIGWTREGDGVHADSGLATLMSDGPGGSKWMEVGKNNAGEVWYDITGNQTNTVTINKDGWGQFHVSGGSVSIYVQQ

SEQ ID NO: 24845 - protein, 483 aa, Bacillus licheniformis
HHNGTNGTMMQYFEWYLPNDGNHWNRLRSDASNLKDKGITAVWIPPAWKGASQNDVGYGAYDLYDLGEFNQKGTVRTKYGTRNQLQAAVTALKSNGIQVYGDVVMNHKGGADATEWVRAVEVNPSNRNQEVSGDYTIEAWTKFDFPGRGNTHSNFKWRWYHFDGVDWDQSRQLQNRIYKFRGKEWDWEVDTENGNYDYLMYADYDMDHPEVVNELRNWGVWYTNTLGLDGFRIDAVKHIKYSFTRDWLEHVRNTTGKNMFAVAEFWKNDIGAIENYLSKTNWNHSVFDVPLHYNLYNASRSGGNYDMRQIFNGTVVQRHPTHAVTFVDNHDSQPEEALESFVEEWFKPLAYALTLTRDQGYPSVFYGDYYGIPTHGVPAMKSKIDPILEARQKYAYGTQRDYMDHPDVIGWTREGDGVHADSGLATLMSDGPGGSKWMEVGKNNAGEVWYDITGNQTNTVTINKDGWGQFHVSGGSVSIYVQQ

SEQ ID NO: 24846 - protein, 483 aa, Bacillus licheniformis
HHNGTNGTMMQYFEWYLPNDGNHWNRLRSDASNLKDKGITAVWIPPAWKGASQNDVGYGAYDLYDLGEFNQKGTVRTKYGTRNQLQAAVTALKSNGIQVYGDVVMNHKGGADATEWVRAVEVNPSNRNQEVSGDYTIEAWTKFDFPGRGNTHSNFKWRWYHFDGVDWDQSRQLNNRIYKFRGKGWDWEVDTENGNYDYLMYADIDMDHPEVVNELRNWGVWYTNTLGLDGFRIDAVKHIKYSFTRDWLTHVRNTTGKNMFAVAEFWKNDIGAIENYLSKTNWNHSVFDVPLHYNLYNASRSGGNYDMRQIFNGTVVQRHPTHAVTFVDNHDSQPEEALESFVEEWFKPLAYALTLTRDQGYPSVFYGDYYGIPTHGVPAMKSKIDPILEARQKYAYGTQRDYLDHPDVIGWTREGDGVHADSGLATLMSDGPGGSKWMEVGKNNAGEVWYDITGNQTNTVTINKDGWGQFHVSGGSVSIYVQQ

SEQ ID NO: 24847 - protein, 483 aa, Bacillus licheniformis
HHNGTNGTMMQYFEWYLPNDGNHWNRLESDASNLKDKGITAVWIPPAWKGASQNDVGYGAYDLYDLGEFNQKGTVRTKYGTRNQLQAAVTALKSNGIQVYGDVVMNHKGGADATEWVRAVEVNPSNRNQEVSGDYTIEAWTKFDFPGRGNTHSNFKWRWYHFDGVDWDQSRQLQNRIYKFRGKGWDWEVDTENGNYDYLMYADIDMDHPEVVNELRNWGVWYTNTLGLDGFRIDAVKHIKYSFTRDWLTHVRNTTGKNMFAVAEFWKNDIGAIENYLSKTNWNHSVFDVPLHYNLYNASRSGGNYDMRQIFNGTVVQRHPTHAVTFVDNHDSQPEEALESFVEEWFKPLAYALTLTRDQGYPSVFYGDYYGIPTHGVPAMKSKIDPILEARQKYAYGTQRDYLDHPDVIGWTREGDGVHADSGLATLMSDGPGGSKWMEVGKNNAGEVWYDITGNQTNTVTINKDGWGQFHVSGGSVSIYVQQ

SEQ ID NO: 24848 - protein, 483 aa, Bacillus licheniformis
HHNGTNGTMMQYFEWYLPNDGNHWNRLRSDASNLKDKGITAVWIPPAWKGASQNDVGYGAYDLYDLGEFNQKGTVRTKYGTRNQLQAAVTALKSNGIQVYGDVVMNHKGGADATQWVRAVEVNPSNRNQEVSGDYTIEAWTKFDFPGRGNTHSNFKWRWYHFDGVDWDQSRQLQNRIYKFRGKGWDWEVDTENGNYDYLMYADIDMDHPEVVNELRNWGVWYTNTLGLDGFRIDAVKHIKYSFTRDWLTHVRNTTGKNMFAVAEFWKNDIGAIENYLSKTNWNHSVFDVPLHYNLYNASRSGGNYDMRQIFNGTVVQRHPTHAVTFVDNHDSQPEEALESFVEEWFKPLAYALTLTRDQGYPSVFYGDYYGIPTHGVPAMKSKIDPILEARQKYAYGTQRDYLDHPDVIGWTREGDGVHADSGLATLMSDGPGGSKWMEVGKNNAGEVWYDITGNQTNTVTINKDGWGQFHVSGGSVSIYVQQ

SEQ ID NO: 24849 - protein, 483 aa, Bacillus licheniformis
HHNGTNGTMMQYFEWYLPNDGNHWNRLRSDASNLKDKGITAVWIPPAWKGASQNDVGYGAYDLYDLGEFNQKGTVRTKYGTRNQLQAAVTALKSNGIQVYGDVVMNHKGGADATEWVRAVEVNPSNRNQEVSGDYTIEAWTKFDFPGRGNTHSNFKWRWYHFDGVDWDQSRQLQNRIYKFRGKGWDWEVDTENGNYDYLMYADIDMDHPEVVNELRNWGVWYTNTLGLDGFRIDAVKHIKYSFTRDWLTHVRNTTGKNMFAVAEFWKNDIGAIENYLSKTNWNHSVFDVPLHYNLYNASRSGGNYDMRQIFNGTVVQRHPTHAVTFVDNHDSQPEEALESFVEEWFKPLAYALTLTRDQGYPSVFYGDYYGIPTHGVPAMKSKIDPILEARQKYAYGTQRDYLDHPDVIGWTREGDGVHADSGLATLMSDGPGGSKWMEVGKNNAGEVWYDITGNQTNTVTIHKDGWGQFHVSGGSVSIYVQQ

SEQ ID NO: 24850 - protein, 483 aa, Bacillus licheniformis
HHNGTNGTMMQYFEWYLPNDGNHWNRLRSDASNLKDKGITAVWIPPAWKGASQNDVGYGAYDLYDLGEFNQKGTVRTKYGTRNQLQAAVTALKSNGIQVYGDVVMNHKGGADATEWVRAVEVNPSNRNQEVSGDYTIEAWTKFDFPGRGNTHSNFKWRWYHFDGVDWDQSRQLQNRIYKFRGKGWDWEVDTENGNYDYLMYADIDMDHPEMVNELRNWGVWYTNTLGLDGFRIDAVKHIKYSFTRDWLTHVRNTTGKNMFAVAEFWKNDIGAIENYLSKTNWNHSVFDVPLHYNLYNASRSGGNYDMRQIFNGTVVQRHPTHAVTFVDNHDSQPEEALESFVEEWFKPLAYALTLTRDQGYPSVFYGDYYGIPTHGVPAMKSKIDPILEARQKYAYGTQRDYLDHPDVIGWTREGDGVHADSGLATLMSDGPGGSKWMEVGKNNAGEVWYDITGNQTNTVTINKDGWGQFHVSGGSVSIYVQQ

SEQ ID NO: 24851 - protein, 483 aa, Bacillus licheniformis
HHNGTNGTMMQYFEWYLPNDGNHWNRLRSDASYLKDKGITAVWIPPAWKGASQNDVGYGAYDLYDLGEFNQKGTVRTKYGTRNQLQAAVTALKSNGIQVYGDVVMNHKGGADATEWVRAVEVNPSNRNQEVSGDYTIEAWTKFDFPGRGNTHSNFKWRWYHFDGVDWDQSRQLQNRIYKFRGKGWDWEVDTENGNYDYLMYADIDMDHPEVVNELRNWGVWYTNTLGLDGFRIDAVKHIKYSFTRDWLTHVRNTTGKNMFAVAEFWKNDIGAIENYLSKTNWNHSVFDVPLHYNLYNASRSGGNYDMRQIFNGTVVQRHPTHAVTFVDNHDSQPEEALESFVEEWFKPLAYALTLTRDQGYPSVFYGDYYGIPTHGVPAMKSKIDPILEARQKYAYGTQRDYLDHPDVIGWTREGDGVHADSGLATLMSDGPGGSKWMEVGKNNAGEVWYDITGNQTNTVTINKDGWGQFHVSGGSVSIYVQQ

SEQ ID NO: 24852 - protein, 483 aa, Bacillus licheniformis
HHNGTNGTMMQYFEWYLPNDGNHWNRLRSDASMLKDKGITAVWIPPAWKGASQNDVGYGAYDLYDLGEFNQKGTVRTKYGTRNQLQAAVTALKSNGIQVYGDVVMNHKGGADATEWVRAVEVNPSNRNQEVSGDYTIEAWTKFDFPGRGNTHSNFKWRWYHFDGVDWDQSRQLQNRIYKFRGKGWDWEVDTENGNYDYLMYADIDMDHPEVVNELRNWGVWYTNTLGLDGFRIDAVKHIKYSFTRDWLTHVRNTTGKNMFAVAEFWKNDIGAIENYLSKTNWNHSVFDVPLHYNLYNASRSGGNYDMRQIFNGTVVQRHPTHAVTFVDNHDSQPEEALESFVEEWFKPLAYALTLTRDQGYPSVFYGDYYGIPTHGVPAMKSKIDPILEARQKYAYGTQRDYLDHPDVIGWTREGDGVHADSGLATLMSDGPGGSKWMEVGKNNAGEVWYDITGNQTNTVTINKDGWGQFHVSGGSVSIYVQQ

SEQ ID NO: 24853 - protein, 483 aa, Bacillus licheniformis
HHNGTNGTMMQYFEWYLPADGNHWNRLRSDASNLKDKGITAVWIPPAWKGASQNDVGYGAYDLYDLGEFNQKGTVRTKYGTRNQLQAAVTALKSNGIQVYGDVVMNHKGGADATEWVRAVEVNPSNRNQEVSGDYTIEAWTKFDFPGRGNTHSNFKWRWYHFDGVDWDQSRQLQNRIYKFRGKGWDWEVDTENGNYDYLMYADIDMDHPEVVNELRNWGVWYTNTLGLDGFRIDAVKHIKYSFTRDWLTHVRNTTGKNMFAVAEFWKNDIGAIENYLSKTNWNHSVFDVPLHYNLYNASRSGGNYDMRQIFNGTVVQRHPTHAVTFVDNHDSQPEEALESFVEEWFKPLAYALTLTRDQGYPSVFYGDYYGIPTHGVPAMKSKIDPILEARQKYAYGTQRDYLDHPDVIGWTREGDGVHADSGLATLMSDGPGGSKWMEVGKNNAGEVWYDITGNQTNTVTINKDGWGQFHVSGGSVSIYVQQ

SEQ ID NO: 24854 - protein, 483 aa, Bacillus licheniformis
HHNGTNGTMMQYFEWYLPNDGNHWNRLCSDASNLKDKGITAVWIPPAWKGASQNDVGYGAYDLYDLGEFNQKGTVRTKYGTRNQLQAAVTALKSNGIQVYGDVVMNHKGGADATEWVRAVEVNPSNRNQEVSGDYTIEAWTKFDFPGRGNTHSNFKWRWYHFDGVDWDQSRQLQNRIYKFRGKGWDWEVDTENGNYDYLMYADIDMDHPEVVNELRNWGVWYTNTLGLDGFRIDAVKHIKYSFTRDWLTHVRNTTGKNMFAVAEFWKNDIGAIENYLSKTNWNHSVFDVPLHYNLYNASRSGGNYDMRQIFNGTVVQRHPTHAVTFVDNHDSQPEEALESFVEEWFKPLAYALTLTRDQGYPSVFYGDYYGIPTHGVPAMKSKIDPILEARQKYAYGTQRDYLDHPDVIGWTREGDGVHADSGLATLMSDGPGGSKWMEVGKNNAGEVWYDITGNQTNTVTINKDGWGQFHVSGGSVSIYVQQ

SEQ ID NO: 24855 - protein, 483 aa, Bacillus licheniformis
HHNGTNGTMMQYAEWYLPNDGNHWNRLRSDASNLKDKGITAVWIPPAWKGASQNDVGYGAYDLYDLGEFNQKGTVRTKYGTRNQLQAAVTALKSNGIQVYGDVVMNHKGGADATEWVRAVEVNPSNRNQEVSGDYTIEAWTKFDFPGRGNTHSNFKWRWYHFDGVDWDQSRQLQNRIYKFRGKGWDWEVDTENGNYDYLMYADIDMDHPEVVNELRNWGVWYTNTLGLDGFRIDAVKHIKYSFTRDWLTHVRNTTGKNMFAVAEFWKNDIGAIENYLSKTNWNHSVFDVPLHYNLYNASRSGGNYDMRQIFNGTVVQRHPTHAVTFVDNHDSQPEEALESFVEEWFKPLAYALTLTRDQGYPSVFYGDYYGIPTHGVPAMKSKIDPILEARQKYAYGTQRDYLDHPDVIGWTREGDGVHADSGLATLMSDGPGGSKWMEVGKNNAGEVWYDITGNQTNTVTINKDGWGQFHVSGGSVSIYVQQ

SEQ ID NO: 24856 - protein, 483 aa, Bacillus licheniformis
HHNGTNGTMMQYFEWYLPNDGNHWNRLRSDASNLKDKGITAVWIPPAWKGASQNDVGYGAYDLYDLGEFNQKGTVRTKYGTRNQLQAAVTALKSNGIQVYGDVVMNHKGGADATEWVRAVEVNPSNRNQEVSGDYTIEAWTKFDFPGRGNTHSNFKWRWYHFDGVDWDQSRQLQNRIYKFRGKGWDWEHDTENGNYDYLMYADIDMDHPEVVNELRNWGVWYTNTLGLDGFRIDAVKHIKYSFTRDWLTHVRNTTGKNMFAVAEFWKNDIGAIENYLSKTNWNHSVFDVPLHYNLYNASRSGGNYDMRQIFNGTVVQRHPTHAVTFVDNHDSQPEEALESFVEEWFKPLAYALTLTRDQGYPSVFYGDYYGIPTHGVPAMKSKIDPILEARQKYAYGTQRDYLDHPDVIGWTREGDGVHADSGLATLMSDGPGGSKWMEVGKNNAGEVWYDITGNQTNTVTINKDGWGQFHVSGGSVSIYVQQ

SEQ ID NO: 24857 - protein, 483 aa, Bacillus licheniformis
HHNGTNGTMMQYFEWYLPNDGNHWNRLRSDASNLKDKGITAVWIPPAWKGASQNDVGYGAYDLYDLGEFNQKGTVRTKYGTRNQLQAAVTALKSNGIQVYGDVVMNHKGGADATEWVRAVEVNPSNRNQEVSGDSTIEAWTKFDFPGRGNTHSNFKWRWYHFDGVDWDQSRQLQNRIYKFRGKGWDWEVDTENGNYDYLMYADIDMDHPEVVNELRNWGVWYTNTLGLDGFRIDAVKHIKYSFTRDWLTHVRNTTGKNMFAVAEFWKNDIGAIENYLSKTNWNHSVFDVPLHYNLYNASRSGGNYDMRQIFNGTVVQRHPTHAVTFVDNHDSQPEEALESFVEEWFKPLAYALTLTRDQGYPSVFYGDYYGIPTHGVPAMKSKIDPILEARQKYAYGTQRDYLDHPDVIGWTREGDGVHADSGLATLMSDGPGGSKWMEVGKNNAGEVWYDITGNQTNTVTINKDGWGQFHVSGGSVSIYVQQ

SEQ ID NO: 24858 - protein, 483 aa, Bacillus licheniformis
HHNGTNGTMMQYFEWYLPNDGNHWNRLRSDASNLKDKGITAVWIPPAWKGASQNDVGYGAYDLYDLGEFNQKGTVRTKYGTRNQLQAAVTALKSNGIQVYGDVVMNHKGGADATEWVRAVEVNPSNRNQEVSGDYTIEAWTKFDFPGRGNTHSNFKWRWYHFDGVDWDQSRQLQNRIYKFRGKGWDWEVDTENGNYDYLMYADIDMDHPEVVNELRNWGVWYTNTLGLDGFRIDAVKHIKYSFTRDWLTHVRNTTGKNMFAVAEFWKNDIGAIENYLSKTNWNHSVFDVPLHYNLYNASRSGGNYDMRQIFNGTVVQRHPTHAVTFVDNHDSQPEEALESFVEEWFKPLAYALTLTRDQGYSSVFYGDYYGIPTHGVPAMKSKIDPILEARQKYAYGTQRDYLDHPDVIGWTREGDGVHADSGLATLMSDGPGGSKWMEVGKNNAGEVWYDITGNQTNTVTINKDGWGQFHVSGGSVSIYVQQ

SEQ ID NO: 24859 - protein, 483 aa, Bacillus licheniformis
HHNGTNGTMMQYFEWYLPNDGNHWNSLRSDASNLKDKGITAVWIPPAWKGASQNDVGYGAYDLYDLGEFNQKGTVRTKYGTRNQLQAAVTALKSNGIQVYGDVVMNHKGGADATEWVRAVEVNPSNRNQEVSGDYTIEAWTKFDFPGRGNTHSNFKWRWYHFDGVDWDQSRQLQNRIYKFRGKGWDWEVDTENGNYDYLMYADIDMDHPEVVNELRNWGVWYTNTLGLDGFRIDAVKHIKYSFTRDWLTHVRNTTGKNMFAVAEFWKNDIGAIENYLSKTNWNHSVFDVPLHYNLYNASRSGGNYDMRQIFNGTVVQRHPTHAVTFVDNHDSQPEEALESFVEEWFKPLAYALTLTRDQGYPSVFYGDYYGIPTHGVPAMKSKIDPILEARQKYAYGTQRDYLDHPDVIGWTREGDGVHADSGLATLMSDGPGGSKWMEVGKNNAGEVWYDITGNQTNTVTINKDGWGQFHVSGGSVSIYVQQ

SEQ ID NO: 24860 - protein, 483 aa, Bacillus licheniformis
HHNGTNGTMMQYFEWYLPNDGTHWNRLRSDASNLKDKGITAVWIPPAWKGASQNDVGYGAYDLYDLGEFNQKGTVRTKYGTRNQLQAAVTALKSNGIQVYGDVVMNHKGGADATEWVRAVEVNPSNRNQEVSGDYTIEAWTKFDFPGRGNTHSNFKWRWYHFDGVDWDQSRQLQNRIYKFRGKGWDWEVDTENGNYDYLMYADIDMDHPEVVNELRNWGVWYTNTLGLDGFRIDAVKHIKYSFTRDWLTHVRNTTGKNMFAVAEFWKNDIGAIENYLSKTNWNHSVFDVPLHYNLYNASRSGGNYDMRQIFNGTVVQRHPTHAVTFVDNHDSQPEEALESFVEEWFKPLAYALTLTRDQGYPSVFYGDYYGIPTHGVPAMKSKIDPILEARQKYAYGTQRDYLDHPDVIGWTREGDGVHADSGLATLMSDGPGGSKWMEVGKNNAGEVWYDITGNQTNTVTINKDGWGQFHVSGGSVSIYVQQ

SEQ ID NO: 24861 - protein, 483 aa, Bacillus licheniformis
HHNGTNGTMMQYFEWYLPNDGNHWNRLRSDASNLKDKGITAVWIPPAWKGASQNDVGYGAYDLYDLGEFNQKGTVRTKYGTRNQLQAAVTALKSNGIQVYGDVVMNHKGGADATEWVRAVEVNPSNRNQEVSGDYTIEAWTKFDFPGRGNTHSNFKWRWYHFDGVDWDQSRQLQNRIYKFRGKGWDWEVDTENGNYDYLMYADIDMDHPEVVNELRNWGVWYTNTLGLDGFRIDAVKHIKYSFTRDWLTHVRNTTGKNMFAVAEFWKNDIGAIENYLSKTNWNHSVFDVPLHYNLYNASRSGGNYDMRQIFNGTVVQRHPTHAVTFVDNHDSQPEEALESFVEEWFKPLAYALTLTRDQGYPSVFYGDYYGIPTHGVPAMKSKIDPILEARQKYAYGAQRDYLDHPDVIGWTREGDGVHADSGLATLMSDGPGGSKWMEVGKNNAGEVWYDITGNQTNTVTINKDGWGQFHVSGGSVSIYVQQ

SEQ ID NO: 24862 - protein, 483 aa, Bacillus licheniformis
HHNGTNGTMMQYFEWYLPNDGNHWNRLRSDASNLKDKGITAVWIPPAWKGASQNDVGYGAYDLYDLGEFNQKGTVRTKYGTRNQLQAAVTALKSNGIQVYGDVVMNHKGGADATEWVRAVEVNPSNRNQEVSGDYTIEAWTKFDFPGRGNTHSNFKWRWYHFDGVDWDQSRQLQNRIYKFRGKGWDWEVDTENGNYDYLMYADIDMDHPEVVNELRNWGVWYTNTLGLDGFRIDAVKHIKYSFTRDWLTHVRNTTGKNMFAVAEFWKNDIGAIENYLSKTNWNHSVFDVPLHYNLYNASRSGGNYDMRQIFNGTVVQRHPTHAVTFVDNHDSQPEEALESFVEEWFKPLAYALTLTRDQGYPSVFYGDYYGIPTHGVPAMKSKIDPILEARQKYAYGTQRDYLDHPDVIGWTREGDGVHADSGLATLMSDGPGGSKWMEVGKFNAGEVWYDITGNQTNTVTINKDGWGQFHVSGGSVSIYVQQ

SEQ ID NO: 24863 - protein, 483 aa, Bacillus licheniformis
HHNGTNGTMMQYFEWYLPNDGNHWNRLRSDASNLKDKGITAVWIPPAWKGASQNDVGYGAYDLYDLGEFNQKGTVRTKYGTRNQLQAAVTALKSNGIQVYGDVVMNHKGGADATEWVRAVEVNPSNRNQEVSGDYTIEAWTKFDFPGRGNTHSNFKWRWYHFDGVDWDQSRQLQNRIYKFRGKGWDWEVDTENGNYDYLMYADIDMDHPEVVNELGNWGVWYTNTLGLDGFRIDAVKHIKYSFTRDWLTHVRNTTGKNMFAVAEFWKNDIGAIENYLSKTNWNHSVFDVPLHYNLYNASRSGGNYDMRQIFNGTVVQRHPTHAVTFVDNHDSQPEEALESFVEEWFKPLAYALTLTRDQGYPSVFYGDYYGIPTHGVPAMKSKIDPILEARQKYAYGTQRDYLDHPDVIGWTREGDGVHADSGLATLMSDGPGGSKWMEVGKNNAGEVWYDITGNQTNTVTINKDGWGQFHVSGGSVSIYVQQ

SEQ ID NO: 24864 - protein, 483 aa, Bacillus licheniformis
HHNGTNGTMMQYFEWYLPNDGNHWNRLRSDASNLKDKGITAVWIPPAWKGASQNDVGYGAYDLYDLGEFNQKGTVRTKYGTRNQLQAAVTALKSNGIQVYGDVVMNHKGGADATEWVRAVEVNPSNRNQEVSGDYTIEAWTKFDFPGRGNTHSNFKWRWYHFDGVDWDQSRQLQNRIYKFRGKGWDWEVDTENGNYDYLMYADIDMDHPEVVNELRNWGVWYTNTLGLDGFRIDAVKHIKYSFTRDWLTHVRNTTGKNMFAVAEFWKNDIGAIENYLSKTNWNHSVFDVPLHYNLYNASRSGGNYDMRQIFNGTVVQRHPTHAVTFVDNHDSQPEEALESFVEEWFKPAAYALTLTRDQGYPSVFYGDYYGIPTHGVPAMKSKIDPILEARQKYAYGTQRDYLDHPDVIGWTREGDGVHADSGLATLMSDGPGGSKWMEVGKNNAGEVWYDITGNQTNTVTINKDGWGQFHVSGGSVSIYVQQ

SEQ ID NO: 24865 - protein, 483 aa, Bacillus licheniformis
HHNGANGTMMQYFEWYLPNDGNHWNRLRSDASNLKDKGITAVWIPPAWKGASQNDVGYGAYDLYDLGEFNQKGTVRTKYGTRNQLQAAVTALKSNGIQVYGDVVMNHKGGADATEWVRAVEVNPSNRNQEVSGDYTIEAWTKFDFPGRGNTHSNFKWRWYHFDGVDWDQSRQLQNRIYKFRGKGWDWEVDTENGNYDYLMYADIDMDHPEVVNELRNWGVWYTNTLGLDGFRIDAVKHIKYSFTRDWLTHVRNTTGKNMFAVAEFWKNDIGAIENYLSKTNWNHSVFDVPLHYNLYNASRSGGNYDMRQIFNGTVVQRHPTHAVTFVDNHDSQPEEALESFVEEWFKPLAYALTLTRDQGYPSVFYGDYYGIPTHGVPAMKSKIDPILEARQKYAYGTQRDYLDHPDVIGWTREGDGVHADSGLATLMSDGPGGSKWMEVGKNNAGEVWYDITGNQTNTVTINKDGWGQFHVSGGSVSIYVQQ

SEQ ID NO: 24866 - protein, 483 aa, Bacillus licheniformis
HHNGTNGTMMQYFEWYLPNDGNHWNRLRSDASNLKDKGITAVWIPPAWKGASQNDVGYGAYDLYDLGEFNQKGTVRTKYGTRNQLQAAVTALKSNGIQVYGDVVMNHKGGADATEWVRAVEVNPSNRNQEVSGDYTIEAWTKFDFPGRGNTHSNFKWRWYHFDGVDWDQSRQLQNRIYKFRGKGWDWEVDTENGNYDYLMYADIDMDHPEVVNELRNWGVWYTNTLGLDGFRIDAVKHIKYSFTRDWLTHVRNTTGKNMFAVAEFWKNDIGAIENYLSKTNWNHSVFDVPLHYNLYNASRSGGNYDMRQIFNGTVVQRHPTHAVTFVDNHDSQPEEALESFVEEWFKPLAYALTLTRDQGYPSVFYGDYYGIPTHGVPAMKSKIDPILEARQKYCYGTQRDYLDHPDVIGWTREGDGVHADSGLATLMSDGPGGSKWMEVGKNNAGEVWYDITGNQTNTVTINKDGWGQFHVSGGSVSIYVQQ

SEQ ID NO: 24867 - protein, 483 aa, Bacillus licheniformis
HHNGTNGTMMQYFEWYLPNDGNHWNRLRSDASNLKDKGITAVWIPPAWKGASQNDVGYGAYDLYDLGEFNQKGTVRTKYGTRNQLQAAVTALKSNGIQVYGDVVMNHKGGADATEWVRAVEVNPSNRNQEVSGDYTIEAWTKFDFPGRGNTHSNFKWRWYHFDGVDWDQSRQLQNRIYKFRGKGWDWEVDTENGNYDYLMYADIDMDHPEVVNELRNWGVWYTNTLGLDGFRIDAVKHIKYSFTRDWLTHVRNTTGKNMFAVAEFWKNDIGAIENYLSKTNWNHSVFDVPLHYNLYNASRSGGNYDMRQIFNGTVVQRHPTHAVTFVDNHDSQPEEALESFVEEWFKPLAYALTLTRDQGYPSVFYGDYYGIPTHGVPAMKSKIDPIFEARQKYAYGTQRDYLDHPDVIGWTREGDGVHADSGLATLMSDGPGGSKWMEVGKNNAGEVWYDITGNQTNTVTINKDGWGQFHVSGGSVSIYVQQ

SEQ ID NO: 24868 - protein, 483 aa, Bacillus licheniformis
HHNGTNGTMMQYFEWYLPNDGNHWNRLRSDASNLKDKGITAVWIPPAWKGASQNDVGYGAYDLYDLGEFNQKGTVRTKYGTRNQLQAAVTALKSNGIQVYGDVVMNHKGGADATEWVRAVEVNPSNRNQEVSGDYTIEAWTKFDFPGRGNTHSNFKWRWYHFDGVDWDQSRQLQNRIYKFRGKGWDWEVDTENGNYDYLMYADIDMDHPEVVNELRNWGVWYTNTLGLDGFRIDAVKHIKYSFTRDWLTHVRNTTGKNMFAVAEFWKNDIGAIENYLSKTNWNHSVFDVPLHYNFYNASRSGGNYDMRQIFNGTVVQRHPTHAVTFVDNHDSQPEEALESFVEEWFKPLAYALTLTRDQGYPSVFYGDYYGIPTHGVPAMKSKIDPILEARQKYAYGTQRDYLDHPDVIGWTREGDGVHADSGLATLMSDGPGGSKWMEVGKNNAGEVWYDITGNQTNTVTINKDGWGQFHVSGGSVSIYVQQ

SEQ ID NO: 24869 - protein, 483 aa, Bacillus licheniformis
HHNGTNGTMMQYFEWYLPNDGNHWNRLRSDASNLKDKGITAVWIPPAWKGASQNDVGYGAYDLYDLGEFNQKGTVRTKYGTRNQLQAAVTALKSNGIQVYGDVVMNHKGGADFTEWVRAVEVNPSNRNQEVSGDYTIEAWTKFDFPGRGNTHSNFKWRWYHFDGVDWDQSRQLQNRIYKFRGKGWDWEVDTENGNYDYLMYADIDMDHPEVVNELRNWGVWYTNTLGLDGFRIDAVKHIKYSFTRDWLTHVRNTTGKNMFAVAEFWKNDIGAIENYLSKTNWNHSVFDVPLHYNLYNASRSGGNYDMRQIFNGTVVQRHPTHAVTFVDNHDSQPEEALESFVEEWFKPLAYALTLTRDQGYPSVFYGDYYGIPTHGVPAMKSKIDPILEARQKYAYGTQRDYLDHPDVIGWTREGDGVHADSGLATLMSDGPGGSKWMEVGKNNAGEVWYDITGNQTNTVTINKDGWGQFHVSGGSVSIYVQQ

SEQ ID NO: 24870 - protein, 483 aa, Bacillus licheniformis
HHNGTNGTMMQYFEWYLPPDGNHWNRLRSDASNLKDKGITAVWIPPAWKGASQNDVGYGAYDLYDLGEFNQKGTVRTKYGTRNQLQAAVTALKSNGIQVYGDVVMNHKGGADATEWVRAVEVNPSNRNQEVSGDYTIEAWTKFDFPGRGNTHSNFKWRWYHFDGVDWDQSRQLQNRIYKFRGKGWDWEVDTENGNYDYLMYADIDMDHPEVVNELRNWGVWYTNTLGLDGFRIDAVKHIKYSFTRDWLTHVRNTTGKNMFAVAEFWKNDIGAIENYLSKTNWNHSVFDVPLHYNLYNASRSGGNYDMRQIFNGTVVQRHPTHAVTFVDNHDSQPEEALESFVEEWFKPLAYALTLTRDQGYPSVFYGDYYGIPTHGVPAMKSKIDPILEARQKYAYGTQRDYLDHPDVIGWTREGDGVHADSGLATLMSDGPGGSKWMEVGKNNAGEVWYDITGNQTNTVTINKDGWGQFHVSGGSVSIYVQQ

SEQ ID NO: 24871 - protein, 483 aa, Bacillus licheniformis
HHNGTNGTMMQYFEWYLPNTGNHWNRLRSDASNLKDKGITAVWIPPAWKGASQNDVGYGAYDLYDLGEFNQKGTVRTKYGTRNQLQAAVTALKSNGIQVYGDVVMNHKGGADATEWVRAVEVNPSNRNQEVSGDYTIEAWTKFDFPGRGNTHSNFKWRWYHFDGVDWDQSRQLQNRIYKFRGKGWDWEVDTENGNYDYLMYADIDMDHPEVVNELRNWGVWYTNTLGLDGFRIDAVKHIKYSFTRDWLTHVRNTTGKNMFAVAEFWKNDIGAIENYLSKTNWNHSVFDVPLHYNLYNASRSGGNYDMRQIFNGTVVQRHPTHAVTFVDNHDSQPEEALESFVEEWFKPLAYALTLTRDQGYPSVFYGDYYGIPTHGVPAMKSKIDPILEARQKYAYGTQRDYLDHPDVIGWTREGDGVHADSGLATLMSDGPGGSKWMEVGKNNAGEVWYDITGNQTNTVTINKDGWGQFHVSGGSVSIYVQQ

SEQ ID NO: 24872 - protein, 483 aa, Bacillus licheniformis
HHNGTNGTMMQYFEWYLPNDGNHWNRLRSDASNLKDKGITAVWIPPAWKGASQNDVGYGAYDLYDLGEFNQKGTVRTKYGTRNQLQAAVTALKSNGIQVYGDVVMNHKGGADATEWDRAVEVNPSNRNQEVSGDYTIEAWTKFDFPGRGNTHSNFKWRWYHFDGVDWDQSRQLQNRIYKFRGKGWDWEVDTENGNYDYLMYADIDMDHPEVVNELRNWGVWYTNTLGLDGFRIDAVKHIKYSFTRDWLTHVRNTTGKNMFAVAEFWKNDIGAIENYLSKTNWNHSVFDVPLHYNLYNASRSGGNYDMRQIFNGTVVQRHPTHAVTFVDNHDSQPEEALESFVEEWFKPLAYALTLTRDQGYPSVFYGDYYGIPTHGVPAMKSKIDPILEARQKYAYGTQRDYLDHPDVIGWTREGDGVHADSGLATLMSDGPGGSKWMEVGKNNAGEVWYDITGNQTNTVTINKDGWGQFHVSGGSVSIYVQQ

SEQ ID NO: 24873 - protein, 483 aa, Bacillus licheniformis
HHNGTNGTMMQYFEWYLPNDGNHWNRLRSDASNLKDKGITAVWIPPAWKGASQNDVGYGAYDLYDLGEFNQKGTVRTKYGTRNQLQAAVTALKSNGIQVYGDVVMNHKGGADATEWVRAVEVNPSNRNQEVSADYTIEAWTKFDFPGRGNTHSNFKWRWYHFDGVDWDQSRQLQNRIYKFRGKGWDWEVDTENGNYDYLMYADIDMDHPEVVNELRNWGVWYTNTLGLDGFRIDAVKHIKYSFTRDWLTHVRNTTGKNMFAVAEFWKNDIGAIENYLSKTNWNHSVFDVPLHYNLYNASRSGGNYDMRQIFNGTVVQRHPTHAVTFVDNHDSQPEEALESFVEEWFKPLAYALTLTRDQGYPSVFYGDYYGIPTHGVPAMKSKIDPILEARQKYAYGTQRDYLDHPDVIGWTREGDGVHADSGLATLMSDGPGGSKWMEVGKNNAGEVWYDITGNQTNTVTINKDGWGQFHVSGGSVSIYVQQ

SEQ ID NO: 24874 - protein, 483 aa, Bacillus licheniformis
HHNGTNGTMMQYFEWYLPNDGNHWNRLRSDAINLKDKGITAVWIPPAWKGASQNDVGYGAYDLYDLGEFNQKGTVRTKYGTRNQLQAAVTALKSNGIQVYGDVVMNHKGGADATEWVRAVEVNPSNRNQEVSGDYTIEAWTKFDFPGRGNTHSNFKWRWYHFDGVDWDQSRQLQNRIYKFRGKGWDWEVDTENGNYDYLMYADIDMDHPEVVNELRNWGVWYTNTLGLDGFRIDAVKHIKYSFTRDWLTHVRNTTGKNMFAVAEFWKNDIGAIENYLSKTNWNHSVFDVPLHYNLYNASRSGGNYDMRQIFNGTVVQRHPTHAVTFVDNHDSQPEEALESFVEEWFKPLAYALTLTRDQGYPSVFYGDYYGIPTHGVPAMKSKIDPILEARQKYAYGTQRDYLDHPDVIGWTREGDGVHADSGLATLMSDGPGGSKWMEVGKNNAGEVWYDITGNQTNTVTINKDGWGQFHVSGGSVSIYVQQ

SEQ ID NO: 24875 - protein, 483 aa, Bacillus licheniformis
HHNGTNGTMMQYFEWYLPNDGNHWNRLRSDASNLKDKGITAVWIPPAWKGASQNDVGYGAYDLYDLGEFNQKGTVRTKYGTRNQLQAAVTALKSNGIQVYGDVVMNHKGGADATEWVRAVEVNPSNRNQEVSGDYTIEAWTKFDFPGRGNTHSNFKWRWYHFDGVDWDQSRQLQNRIYKFRGKGWDWEVDTENGNYDYLMYADIDMDHPEVVNELRNWGVWYTNTLGLDGFRIDAVKHIKYSFTRDWLTHVRNTTGKNMFAVAEFWKNDIGAIENYLSKTNWNHSVFDVPLHYNLYNASRSGGNYDMRQIFNGTVVQRHPTHAVTFVDNHDSQPEEALESFVEEWFKPLAYALTLTRDQGYPSVFYGDYYGIPTHGVPAMKSKIDPILEARQKYAYGTQRDYLDHPDVIGWTREGDGVHADSGLATLMSDGPGGSKWMEVGKHNAGEVWYDITGNQTNTVTINKDGWGQFHVSGGSVSIYVQQ

SEQ ID NO: 24876 - protein, 483 aa, Bacillus licheniformis
HHNGTGGTMMQYFEWYLPNDGNHWNRLRSDASNLKDKGITAVWIPPAWKGASQNDVGYGAYDLYDLGEFNQKGTVRTKYGTRNQLQAAVTALKSNGIQVYGDVVMNHKGGADATEWVRAVEVNPSNRNQEVSGDYTIEAWTKFDFPGRGNTHSNFKWRWYHFDGVDWDQSRQLQNRIYKFRGKGWDWEVDTENGNYDYLMYADIDMDHPEVVNELRNWGVWYTNTLGLDGFRIDAVKHIKYSFTRDWLTHVRNTTGKNMFAVAEFWKNDIGAIENYLSKTNWNHSVFDVPLHYNLYNASRSGGNYDMRQIFNGTVVQRHPTHAVTFVDNHDSQPEEALESFVEEWFKPLAYALTLTRDQGYPSVFYGDYYGIPTHGVPAMKSKIDPILEARQKYAYGTQRDYLDHPDVIGWTREGDGVHADSGLATLMSDGPGGSKWMEVGKNNAGEVWYDITGNQTNTVTINKDGWGQFHVSGGSVSIYVQQ

SEQ ID NO: 24877 - protein, 483 aa, Bacillus licheniformis
HHNGTNGTMMQYFEWYLPNDGNHWNRLRSDASNLKDKGITAVWIPPAWKGASQNDVGYGAYDLYDLGEFNQKGTVRTKYGTRNQLQAAVTALKSNGIQVYGDVVMNHKGGADATEWVRAVEVNPSNRNQEVSGDYTIEAWTKFDFPGRGNTHSNFKWRWYHFDGVDWDQSRQLQNRIYKFRGKEWDWEVDTENGNYDYLMYADYDMDHPEVVNELRNWGVWYTNTLGLDGFRIDAVKHIKYSFTRDWLTHVRNTTGKNMFAVAEFWKNDIGAIENYLSKTNWNHSVFDVPLHYNLYNASRSGGNYDMRQIFNGTVVQRHPTHGVTFVDNHDSQPEEALESFVEEWFKPLAYALTLTRDQGYPSVFYGDYYGIPTHGVPAMKSKIDPILEARQKYAYGTQRDYMDHPDVIGWTREGDGVHADSGLATLMSDGPGGSKWMEVGKNNAGEVWYDITGNQTNTVTINKDGWGQFHVSGGSVSIYVQQ

SEQ ID NO: 24878 - protein, 483 aa, Bacillus licheniformis
HHNGTNGTMMQYFEWYLPNDGNHWNRLRSDASNLKDKGITAVWIPPAWKGASQNDVGYGAYDLYDLGEFNQKGTVRTKYGTRNQLQAAVTALKSNGIQVYGDVVMNHKGGADATEWVRAVEVNPSNRNQEVSGDYTIEAWTKFDFPGRGNTHSNFKWRWYHFDGVDWDQSRQLQNRIFKFRGKGWDWEVDTENGNYDYLMYADIDMDHPEVVNELRNWGVWYTNTLGLDGFRIDAVKHIKYSFTRDWLTHVRNTTGKNMFAVAEFWKNDIGAIENYLSKTNWNHSVFDVPLHYNLYNASRSGGNYDMRQIFNGTVVQRHPTHAVTFVDNHDSQPEEALESFVEEWFKPLAYALTLTRDQGYPSVFYGDYYGIPTHGVPAMKSKIDPILEARQKYAYGTQRDYLDHPDVIGWTREGDGVHADSGLATLMSDGPGGSKWMEVGKNNAGEVWYDITGNQTNTVTINKDGWGQFHVSGGSVSIYVQQ

SEQ ID NO: 24879 - protein, 483 aa, Bacillus licheniformis
HHNGTNGTMMQYFEWYLPNDGNHWNRLRSDASNLKDKGITAVWIPPAWKGASQNDVGYGAYDLYDLGEFNQKGTVRTKYGTRNQLQAAVTALKSNGIQVYGDVVMNHKGGADATEWVRAVEVNPSNRNQEVSGDYTIEAWTKFDFPGRGNTHSNFKWRWYHFDGVDWDQSRQLQNRIYKFRGKGWDWEVDTENGNYDYLMYADIDMDHPEVVNELRNWGVWYTNTLGLDGFRIDAVKHIKYSFTRDWLTHVRNTTGKNMFAVAEFWKNDIYAIENYLSKTNWNHSVFDVPLHYNLYNASRSGGNYDMRQIFNGTVVQRHPTHAVTFVDNHDSQPEEALESFVEEWFKPLAYALTLTRDQGYPSVFYGDYYGIPTHGVPAMKSKIDPILEARQKYAYGTQRDYLDHPDVIGWTREGDGVHADSGLATLMSDGPGGSKWMEVGKNNAGEVWYDITGNQTNTVTINKDGWGQFHVSGGSVSIYVQQ

SEQ ID NO: 24880 - protein, 483 aa, Bacillus licheniformis
HHNGTNGTMMQYFEWYLPNDGNHWNRLRSDASNLKDKGITAVWIPPAWKGASQNDVGYGAYDLYDLGEFNQKGTVRTKYGTRNQLQAAVTALKSNGIQVYGDVVMNHKGGADATEWVRAVEVNPSNRNQEVSGDYTIEAWTKFDFPGRGNTHSNFKWRWYTFDGVDWDQSRQLQNRIYKFRGKGWDWEVDTENGNYDYLMYADIDMDHPEVVNELRNWGVWYTNTLGLDGFRIDAVKHIKYSFTRDWLTHVRNTTGKNMFAVAEFWKNDIGAIENYLSKTNWNHSVFDVPLHYNLYNASRSGGNYDMRQIFNGTVVQRHPTHAVTFVDNHDSQPEEALESFVEEWFKPLAYALTLTRDQGYPSVFYGDYYGIPTHGVPAMKSKIDPILEARQKYAYGTQRDYLDHPDVIGWTREGDGVHADSGLATLMSDGPGGSKWMEVGKNNAGEVWYDITGNQTNTVTINKDGWGQFHVSGGSVSIYVQQ

SEQ ID NO: 24881 - protein, 483 aa, Bacillus licheniformis
HHNGTNGTMMQYFEWYLPNDGNHWNRLRSDASNLKDKGITAVWIPPAWKGASQNDVGYGAYDLYDLGEFNQKGTVRTKYGTRNQLQAAVTALKSNGIQVYGDVVMNHKGGADHTEWVRAVEVNPSNRNQEVSGDYTIEAWTKFDFPGRGNTHSNFKWRWYHFDGVDWDQSRQLQNRIYKFRGKGWDWEVDTENGNYDYLMYADIDMDHPEVVNELRNWGVWYTNTLGLDGFRIDAVKHIKYSFTRDWLTHVRNTTGKNMFAVAEFWKNDIGAIENYLSKTNWNHSVFDVPLHYNLYNASRSGGNYDMRQIFNGTVVQRHPTHAVTFVDNHDSQPEEALESFVEEWFKPLAYALTLTRDQGYPSVFYGDYYGIPTHGVPAMKSKIDPILEARQKYAYGTQRDYLDHPDVIGWTREGDGVHADSGLATLMSDGPGGSKWMEVGKNNAGEVWYDITGNQTNTVTINKDGWGQFHVSGGSVSIYVQQ

SEQ ID NO: 24882 - protein, 483 aa, Bacillus licheniformis
HHNGTNGTMMQYFEWYLPNDGNHWNRLRSDASNLKDKGITAVWIPPAWKGASQNDVGYGAYDLYDLGEFNQKGTVRTKYGTRNQLQAAVTALKSNGIQVYGDVVMNHKGGADATEWVRAVEVNPSNRNQEVSGDYTIEAWTKFDFPGRGNTHSNFKWRWYHFDGVDWDQSRQLQNRIYKWRGKGWDWEVDTENGNYDYLMYADIDMDHPEVVNELRNWGVWYTNTLGLDGFRIDAVKHIKYSFTRDWLTHVRNTTGKNMFAVAEFWKNDIGAIENYLSKTNWNHSVFDVPLHYNLYNASRSGGNYDMRQIFNGTVVQRHPTHAVTFVDNHDSQPEEALESFVEEWFKPLAYALTLTRDQGYPSVFYGDYYGIPTHGVPAMKSKIDPILEARQKYAYGTQRDYLDHPDVIGWTREGDGVHADSGLATLMSDGPGGSKWMEVGKNNAGEVWYDITGNQTNTVTINKDGWGQFHVSGGSVSIYVQQ

SEQ ID NO: 24883 - protein, 483 aa, Bacillus licheniformis
HHNGTNGTMMQYFEWYLPNDGNHWNRLRSDASNLKDKGITAVWIPPAWKGASQNDVGYGAYDLYDLGEFNQKQTVRTKYGTRNQLQAAVTALKSNGIQVYGDVVMNHKGGADATEWVRAVEVNPSNRNQEVSGDYTIEAWTKFDFPGRGNTHSNFKWRWYHFDGVDWDQSRQLQNRIYKFRGKGWDWEVDTENGNYDYLMYADIDMDHPEVVNELRNWGVWYTNTLGLDGFRIDAVKHIKYSFTRDWLTHVRNTTGKNMFAVAEFWKNDIGAIENYLSKTNWNHSVFDVPLHYNLYNASRSGGNYDMRQIFNGTVVQRHPTHAVTFVDNHDSQPEEALESFVEEWFKPLAYALTLTRDQGYPSVFYGDYYGIPTHGVPAMKSKIDPILEARQKYAYGTQRDYLDHPDVIGWTREGDGVHADSGLATLMSDGPGGSKWMEVGKNNAGEVWYDITGNQTNTVTINKDGWGQFHVSGGSVSIYVQQ

SEQ ID NO: 24884 - protein, 483 aa, Bacillus licheniformis
HHNGTNGTMMQYFEWYLPNDENHWNRLRSDASNLKDKGITAVWIPPAWKGASQNDVGYGAYDLYDLGEFNQKGTVRTKYGTRNQLQAAVTALKSNGIQVYGDVVMNHKGGADATEWVRAVEVNPSNRNQEVSGDYTIEAWTKFDFPGRGNTHSNFKWRWYHFDGVDWDQSRQLQNRIYKFRGKGWDWEVDTENGNYDYLMYADIDMDHPEVVNELRNWGVWYTNTLGLDGFRIDAVKHIKYSFTRDWLTHVRNTTGKNMFAVAEFWKNDIGAIENYLSKTNWNHSVFDVPLHYNLYNASRSGGNYDMRQIFNGTVVQRHPTHAVTFVDNHDSQPEEALESFVEEWFKPLAYALTLTRDQGYPSVFYGDYYGIPTHGVPAMKSKIDPILEARQKYAYGTQRDYLDHPDVIGWTREGDGVHADSGLATLMSDGPGGSKWMEVGKNNAGEVWYDITGNQTNTVTINKDGWGQFHVSGGSVSIYVQQ

SEQ ID NO: 24885 - protein, 483 aa, Bacillus licheniformis
HHNGTNGTMLQYFEWYLPNDGNHWNRLRSDASNLKDKGITAVWIPPAWKGASQNDVGYGAYDLYDLGEFNQKGTVRTKYGTRNQLQAAVTALKSNGIQVYGDVVMNHKGGADATEWVRAVEVNPSNRNQEVSGDYTIEAWTKFDFPGRGNTHSNFKWRWYHFDGVDWDQSRQLQNRIYKFRGKGWDWEVDTENGNYDYLMYADIDMDHPEVVNELRNWGVWYTNTLGLDGFRIDAVKHIKYSFTRDWLTHVRNTTGKNMFAVAEFWKNDIGAIENYLSKTNWNHSVFDVPLHYNLYNASRSGGNYDMRQIFNGTVVQRHPTHAVTFVDNHDSQPEEALESFVEEWFKPLAYALTLTRDQGYPSVFYGDYYGIPTHGVPAMKSKIDPILEARQKYAYGTQRDYLDHPDVIGWTREGDGVHADSGLATLMSDGPGGSKWMEVGKNNAGEVWYDITGNQTNTVTINKDGWGQFHVSGGSVSIYVQQ

SEQ ID NO: 24886 - protein, 483 aa, Bacillus licheniformis
HHNGTNGTMMQYFEWYLPNDGNHWNRLRSDASNLKDKGITAVWIPPAWKGASQNDVGYGAYDLYDLGEFNQKGTVRTKYGTRNQLQAAVTALKSNGIQVYGDVVMNHKGGADATEWVRAVEVNPSNRNQEVSGDYTIEAWTKFDFPGRGNTHSNFKWRWYHFDGVDWDQSRQLQNRIYKFRGKGWDWEVDTENGNYDYLMYADIDMDHPEVVNELRNWGVWYTNTLGLDGFRIDCVKHIKYSFTRDWLTHVRNTTGKNMFAVAEFWKNDIGAIENYLSKTNWNHSVFDVPLHYNLYNASRSGGNYDMRQIFNGTVVQRHPTHAVTFVDNHDSQPEEALESFVEEWFKPLAYALTLTRDQGYPSVFYGDYYGIPTHGVPAMKSKIDPILEARQKYAYGTQRDYLDHPDVIGWTREGDGVHADSGLATLMSDGPGGSKWMEVGKNNAGEVWYDITGNQTNTVTINKDGWGQFHVSGGSVSIYVQQ

SEQ ID NO: 24887 - protein, 483 aa, Bacillus licheniformis
HHNGTNGTMMQSFEWYLPNDGNHWNRLRSDASNLKDKGITAVWIPPAWKGASQNDVGYGAYDLYDLGEFNQKGTVRTKYGTRNQLQAAVTALKSNGIQVYGDVVMNHKGGADATEWVRAVEVNPSNRNQEVSGDYTIEAWTKFDFPGRGNTHSNFKWRWYHFDGVDWDQSRQLQNRIYKFRGKGWDWEVDTENGNYDYLMYADIDMDHPEVVNELRNWGVWYTNTLGLDGFRIDAVKHIKYSFTRDWLTHVRNTTGKNMFAVAEFWKNDIGAIENYLSKTNWNHSVFDVPLHYNLYNASRSGGNYDMRQIFNGTVVQRHPTHAVTFVDNHDSQPEEALESFVEEWFKPLAYALTLTRDQGYPSVFYGDYYGIPTHGVPAMKSKIDPILEARQKYAYGTQRDYLDHPDVIGWTREGDGVHADSGLATLMSDGPGGSKWMEVGKNNAGEVWYDITGNQTNTVTINKDGWGQFHVSGGSVSIYVQQ

SEQ ID NO: 24888 - protein, 483 aa, Bacillus licheniformis
HHNGTNGTMMQYFEWYLPNDGNHWNRLRSDASNLKDKGITAVWIPPAWKGASQNDVGYGAYDLYDLGEFNQKGTVRTKYGTRNQLQAAVTALKSNGIQVYGDVVMNHKGGADATEWVRAVEVNPSNRNQEVSGDYTIEAWTKFDFPGRGNTHSNFKWRWYHFDGVDWDQSRQLQNRIYKFRGKGWDWEVDTENGNYDYLMYADIDMDHPEVVNELRNWGVWYTNTLGLDGFRIDAVKHIKYSFTRDILTHVRNTTGKNMFAVAEFWKNDIGAIENYLSKTNWNHSVFDVPLHYNLYNASRSGGNYDMRQIFNGTVVQRHPTHAVTFVDNHDSQPEEALESFVEEWFKPLAYALTLTRDQGYPSVFYGDYYGIPTHGVPAMKSKIDPILEARQKYAYGTQRDYLDHPDVIGWTREGDGVHADSGLATLMSDGPGGSKWMEVGKNNAGEVWYDITGNQTNTVTINKDGWGQFHVSGGSVSIYVQQ

SEQ ID NO: 24889 - protein, 483 aa, Bacillus licheniformis
HHNGTNGTMMQYFEWYLPNDGNHWARLRSDASNLKDKGITAVWIPPAWKGASQNDVGYGAYDLYDLGEFNQKGTVRTKYGTRNQLQAAVTALKSNGIQVYGDVVMNHKGGADATEWVRAVEVNPSNRNQEVSGDYTIEAWTKFDFPGRGNTHSNFKWRWYHFDGVDWDQSRQLQNRIYKFRGKGWDWEVDTENGNYDYLMYADIDMDHPEVVNELRNWGVWYTNTLGLDGFRIDAVKHIKYSFTRDWLTHVRNTTGKNMFAVAEFWKNDIGAIENYLSKTNWNHSVFDVPLHYNLYNASRSGGNYDMRQIFNGTVVQRHPTHAVTFVDNHDSQPEEALESFVEEWFKPLAYALTLTRDQGYPSVFYGDYYGIPTHGVPAMKSKIDPILEARQKYAYGTQRDYLDHPDVIGWTREGDGVHADSGLATLMSDGPGGSKWMEVGKNNAGEVWYDITGNQTNTVTINKDGWGQFHVSGGSVSIYVQQ

SEQ ID NO: 24890 - protein, 483 aa, Bacillus licheniformis
HHNGTNGTMMQYFEWYLPNDGNHWNRLRSDASNLKDKGITAVWIPPAWKGASQNDVGYGAYDLYDLGEFNQKGTVRTKYGTRNQLQAAVTALKSNGIQVYGDVVMNHKGGADATEWVRAVEVNPSNRNQEVSGDYTIEAWTKFDFPGRGNTHSNFKWRWYHFDGVDWDQSRQLQNRIYKFRGKGWDWEVDTENGNYDYLMYADIDMDHPEVVNELRNWGVWYTNTLGLDGFRIDAVKHIKYSFTRDWLTHVRNTLGKNMFAVAEFWKNDIGAIENYLSKTNWNHSVFDVPLHYNLYNASRSGGNYDMRQIFNGTVVQRHPTHAVTFVDNHDSQPEEALESFVEEWFKPLAYALTLTRDQGYPSVFYGDYYGIPTHGVPAMKSKIDPILEARQKYAYGTQRDYLDHPDVIGWTREGDGVHADSGLATLMSDGPGGSKWMEVGKNNAGEVWYDITGNQTNTVTINKDGWGQFHVSGGSVSIYVQQ

SEQ ID NO: 24891 - protein, 483 aa, Bacillus licheniformis
HHNQTNGTMMQYFEWYLPNDGNHWNRLRSDASNLKDKGITAVWIPPAWKGASQNDVGYGAYDLYDLGEFNQKGTVRTKYGTRNQLQAAVTALKSNGIQVYGDVVMNHKGGADATEWVRAVEVNPSNRNQEVSGDYTIEAWTKFDFPGRGNTHSNFKWRWYHFDGVDWDQSRQLQNRIYKFRGKGWDWEVDTENGNYDYLMYADIDMDHPEVVNELRNWGVWYTNTLGLDGFRIDAVKHIKYSFTRDWLTHVRNTTGKNMFAVAEFWKNDIGAIENYLSKTNWNHSVFDVPLHYNLYNASRSGGNYDMRQIFNGTVVQRHPTHAVTFVDNHDSQPEEALESFVEEWFKPLAYALTLTRDQGYPSVFYGDYYGIPTHGVPAMKSKIDPILEARQKYAYGTQRDYLDHPDVIGWTREGDGVHADSGLATLMSDGPGGSKWMEVGKNNAGEVWYDITGNQTNTVTINKDGWGQFHVSGGSVSIYVQQ

SEQ ID NO: 24892 - protein, 483 aa, Bacillus licheniformis
HHNGTNGTMMQYFEWYLPNDGNHWNRLRSDASNLKDKGITAVWIPPAWKGASQNDVGYGAYDLYDLGEFNQKGTVRTKYGTRNQLQAAVTALKSNGIQVYGDVVMNHKGGADATEWVRAVEVNPSNRNQEVSGDYTIEAWTKFDFPGRGNTHSNFKWRWYHFDGVDWDQSRQLQNRIYKFRGKGWDWEVDTENGNYDYLMYADIDMDHPEVVNELRNWGVWYTNTLGLDGFRIDAVKHIKYSFTRDWLTHGRNTTGKNMFAVAEFWKNDIGAIENYLSKTNWNHSVFDVPLHYNLYNASRSGGNYDMRQIFNGTVVQRHPTHAVTFVDNHDSQPEEALESFVEEWFKPLAYALTLTRDQGYPSVFYGDYYGIPTHGVPAMKSKIDPILEARQKYAYGTQRDYLDHPDVIGWTREGDGVHADSGLATLMSDGPGGSKWMEVGKNNAGEVWYDITGNQTNTVTINKDGWGQFHVSGGSVSIYVQQ

SEQ ID NO: 24893 - protein, 483 aa, Bacillus licheniformis
HHNGTNGTMMQYFEWYLPNDGNHWNRLRSDASNLKDKGITAVWIPPAWKGASQNDVGYGAYDLYDLGEFNQKGTVRTKYGTRNQLQAAVTALKSNGIQVYGDVVMNHKGGADATEWVRAVEVNPSNRNQEVSGDYTIEAWTKFDFPGRGNTHSNFKWRWYHFDGVDWDQSRQLQNRIYKFRGKGWDWEVDTENGNYDYLMYADIDMDHPEVVNELRNWGVWYTNTLGLDGFRIDAVKMIKYSFTRDWLTHVRNTTGKNMFAVAEFWKNDIGAIENYLSKTNWNHSVFDVPLHYNLYNASRSGGNYDMRQIFNGTVVQRHPTHAVTFVDNHDSQPEEALESFVEEWFKPLAYALTLTRDQGYPSVFYGDYYGIPTHGVPAMKSKIDPILEARQKYAYGTQRDYLDHPDVIGWTREGDGVHADSGLATLMSDGPGGSKWMEVGKNNAGEVWYDITGNQTNTVTINKDGWGQFHVSGGSVSIYVQQ

SEQ ID NO: 24894 - protein, 483 aa, Bacillus licheniformis
HHNGTNGTMMQYFEWYLPNDGNHWNRLRSDASNLKDKGITAVWIPPAWKGASQNDVGYGAYDLYDLGEFNQKGTVRTKYGTRNQLQAAVTALKSNGIQVYGDVVMNHKGGADATEWVRAVEVNPSNRNQEVSGDYTIEAWTKFDFPGRGNTHSNFKWRWYHFDGVDWDQSRQLQNRIYKFRGKGWDWEVDTENGNYDYLMYADIDMDHPEVVNELRNWGVWYTNTLGLDGYRIDAVKHIKYSFTRDWLTHVRNTTGKNMFAVAEFWKNDIGAIENYLSKTNWNHSVFDVPLHYNLYNASRSGGNYDMRQIFNGTVVQRHPTHAVTFVDNHDSQPEEALESFVEEWFKPLAYALTLTRDQGYPSVFYGDYYGIPTHGVPAMKSKIDPILEARQKYAYGTQRDYLDHPDVIGWTREGDGVHADSGLATLMSDGPGGSKWMEVGKNNAGEVWYDITGNQTNTVTINKDGWGQFHVSGGSVSIYVQQ

SEQ ID NO: 24895 - protein, 483 aa, Bacillus licheniformis
HHNGTNGTMMQYFEWYLPNDGNHWNRLRSDASNLKDKGITAVWIPPAWKGASQNDVGYGAYDLYDLGEFNQKGTVRTKYGTRNQLQAAVTALKSNGIQVYGDVVMNHKGGADATEWVRAVEVNPSNRNQEVSGDYTIEAWTKFDFPGRGNTHSNFKWRWYHFDGVDWDQSRQLQNRIYKFRGKGWDWEVDTENGNYDYLMYADIDMDHPEAVNELRNWGVWYTNTLGLDGFRIDAVKHIKYSFTRDWLTHVRNTTGKNMFAVAEFWKNDIGAIENYLSKTNWNHSVFDVPLHYNLYNASRSGGNYDMRQIFNGTVVQRHPTHAVTFVDNHDSQPEEALESFVEEWFKPLAYALTLTRDQGYPSVFYGDYYGIPTHGVPAMKSKIDPILEARQKYAYGTQRDYLDHPDVIGWTREGDGVHADSGLATLMSDGPGGSKWMEVGKNNAGEVWYDITGNQTNTVTINKDGWGQFHVSGGSVSIYVQQ

SEQ ID NO: 24896 - protein, 483 aa, Bacillus licheniformis
HHNGTNGTMMQYFEWYLPNDGNHWNRLRSDASNLKDKGITAVWIPPAWKGASQNDVGYGAYDLYDLGEFNQKGTVRTKYGTRNQLQAAVTALKSNGIQVYGDVVMNHKGGADATEWVRRVEVNPSNRNQEVSGDYTIEAWTKFDFPGRGNTHSNFKWRWYHFDGVDWDQSRQLQNRIYKFRGKGWDWEVDTENGNYDYLMYADIDMDHPEVVNELRNWGVWYTNTLGLDGFRIDAVKHIKYSFTRDWLTHVRNTTGKNMFAVAEFWKNDIGAIENYLSKTNWNHSVFDVPLHYNLYNASRSGGNYDMRQIFNGTVVQRHPTHAVTFVDNHDSQPEEALESFVEEWFKPLAYALTLTRDQGYPSVFYGDYYGIPTHGVPAMKSKIDPILEARQKYAYGTQRDYLDHPDVIGWTREGDGVHADSGLATLMSDGPGGSKWMEVGKNNAGEVWYDITGNQTNTVTINKDGWGQFHVSGGSVSIYVQQ

SEQ ID NO: 24897 - protein, 483 aa, Bacillus licheniformis
HHNGTNGTMMQYFEWYLPNDGNHWNRLRSDASNLKDKGITAVWIPPAWKGASQNDVGYGAYDLYDLGEFNQKGTVRTKYGTRNQLQAAVTALKSNGIQVYGDVVMNHKGGADATEWVRAVEVNPSNRNQEVSGDYTIEAWTKFDFPGRGNTHSNFKWRWYHFDGVDWDQSRQLQNRIYKFRGKGWDWEVDTENGNYDYLMYADIDMDYPEVVNELRNWGVWYTNTLGLDGFRIDAVKHIKYSFTRDWLTHVRNTTGKNMFAVAEFWKNDIGAIENYLSKTNWNHSVFDVPLHYNLYNASRSGGNYDMRQIFNGTVVQRHPTHAVTFVDNHDSQPEEALESFVEEWFKPLAYALTLTRDQGYPSVFYGDYYGIPTHGVPAMKSKIDPILEARQKYAYGTQRDYLDHPDVIGWTREGDGVHADSGLATLMSDGPGGSKWMEVGKNNAGEVWYDITGNQTNTVTINKDGWGQFHVSGGSVSIYVQQ

SEQ ID NO: 24898 - protein, 483 aa, Bacillus licheniformis
HHNGTNGTMMQYFEWYLPNDGNHWNRLRSDASNLKDKGITAVWIPPAWKGASQNDVGYGAYDLYDLGEFNQKGTVRTKYGTRNQLQAAVTALKSNGIQVYGDVVMNHKGGADATEWVRAVEVNPSNRNQEVSGDYTIEAWTKFDFPGRGNTHSNFKWRWYHFDGVDWDQSRQLQNRIYKFRGKGWDWEVDTENGNYDYLMYADIDMDHPEVVNELRNWGVWYTNTLGLDGFRIDAVKHIKYSFTRDWLTHVRNTTGKNMFAVAEFWKNDIGAIENYLSKTNWNHSVFDVPLHYNLYNASRSGGNYDMRQIFNGTVVQRHPTHAVTFVDNHDSQPEEALESFVEEWFKPLAYALTLTRDQGYPSVFYGDYYGIPTHGVPAMKSKIDPILEARQKYAYGTQRDYLDHPDVIGWTREGDGVHADSGLATLMSDGPGGSKWMEVGKNNAHEVWYDITGNQTNTVTINKDGWGQFHVSGGSVSIYVQQ

SEQ ID NO: 24899 - protein, 483 aa, Bacillus licheniformis
HHNGTNGTMMQYFEWYLPNDGNQWNRLRSDASNLKDKGITAVWIPPAWKGASQNDVGYGAYDLYDLGEFNQKGTVRTKYGTRNQLQAAVTALKSNGIQVYGDVVMNHKGGADATEWVRAVEVNPSNRNQEVSGDYTIEAWTKFDFPGRGNTHSNFKWRWYHFDGVDWDQSRQLQNRIYKFRGKGWDWEVDTENGNYDYLMYADIDMDHPEVVNELRNWGVWYTNTLGLDGFRIDAVKHIKYSFTRDWLTHVRNTTGKNMFAVAEFWKNDIGAIENYLSKTNWNHSVFDVPLHYNLYNASRSGGNYDMRQIFNGTVVQRHPTHAVTFVDNHDSQPEEALESFVEEWFKPLAYALTLTRDQGYPSVFYGDYYGIPTHGVPAMKSKIDPILEARQKYAYGTQRDYLDHPDVIGWTREGDGVHADSGLATLMSDGPGGSKWMEVGKNNAGEVWYDITGNQTNTVTINKDGWGQFHVSGGSVSIYVQQ

SEQ ID NO: 24900 - protein, 483 aa, Bacillus licheniformis
HHNGTNGTMMQYFEWYLPNDGNHWNRLRSDASNLKDKGITAVWIPPAWKGASQNDVGYGAYDLYDLGEFNQKGTVRTKYGTRNQLQAAVTALKSNGIQVYGDVVMNHKGGADATEWVRAVEVNPSNRNQEVSGDYTIEAWTKFDFPGRGNTHSNFKWRWYHFDGVDWDQSRQLQNRIYKFRGKGWDWEVDTENGNYDYLMYADIDMDHPEVVNELRNWGVWYTNTLGLDGFRIDAVKHIKYSFTRDWLTHVRNTTGKNMFAVAEFWKNDIGAIENYLSKTNWNHSVFDVPLHYNLYNASRSGGVYDMRQIFNGTVVQRHPTHAVTFVDNHDSQPEEALESFVEEWFKPLAYALTLTRDQGYPSVFYGDYYGIPTHGVPAMKSKIDPILEARQKYAYGTQRDYLDHPDVIGWTREGDGVHADSGLATLMSDGPGGSKWMEVGKNNAGEVWYDITGNQTNTVTINKDGWGQFHVSGGSVSIYVQQ

SEQ ID NO: 24901 - protein, 483 aa, Bacillus licheniformis
HHNGTNGTMMQYFEWYLPNDGNHWNRLRSDASNLKDKGITAVWIPPAWKGASQNDVGYGAYDLYDLGEFNQKGTVRTKYGTRNQLQAAVTALKSNGIQVDGDVVMNHKGGADATEWVRAVEVNPSNRNQEVSGDYTIEAWTKFDFPGRGNTHSNFKWRWYHFDGVDWDQSRQLQNRIYKFRGKGWDWEVDTENGNYDYLMYADIDMDHPEVVNELRNWGVWYTNTLGLDGFRIDAVKHIKYSFTRDWLTHVRNTTGKNMFAVAEFWKNDIGAIENYLSKTNWNHSVFDVPLHYNLYNASRSGGNYDMRQIFNGTVVQRHPTHAVTFVDNHDSQPEEALESFVEEWFKPLAYALTLTRDQGYPSVFYGDYYGIPTHGVPAMKSKIDPILEARQKYAYGTQRDYLDHPDVIGWTREGDGVHADSGLATLMSDGPGGSKWMEVGKNNAGEVWYDITGNQTNTVTINKDGWGQFHVSGGSVSIYVQQ

SEQ ID NO: 24902 - protein, 483 aa, Bacillus licheniformis
HHNGTNGTMMQYFEWYLPNDGNHWNRLRSDASNLKDKGITAVWIPPAWKGASQNDVGYGAYDLYDLGEFNQKGTVRTKYGTRNQLQAAVTVLKSNGIQVYGDVVMNHKGGADATEWVRAVEVNPSNRNQEVSGDYTIEAWTKFDFPGRGNTHSNFKWRWYHFDGVDWDQSRQLQNRIYKFRGKGWDWEVDTENGNYDYLMYADIDMDHPEVVNELRNWGVWYTNTLGLDGFRIDAVKHIKYSFTRDWLTHVRNTTGKNMFAVAEFWKNDIGAIENYLSKTNWNHSVFDVPLHYNLYNASRSGGNYDMRQIFNGTVVQRHPTHAVTFVDNHDSQPEEALESFVEEWFKPLAYALTLTRDQGYPSVFYGDYYGIPTHGVPAMKSKIDPILEARQKYAYGTQRDYLDHPDVIGWTREGDGVHADSGLATLMSDGPGGSKWMEVGKNNAGEVWYDITGNQTNTVTINKDGWGQFHVSGGSVSIYVQQ

SEQ ID NO: 24903 - protein, 483 aa, Bacillus licheniformis
HHNGTNGTMMQYFEWYLPNDGNHWNRLRSDASNLKDKGITAVWIPPAWKGASQNDVGYGAYDLYDLGEFNQKGTVRTKYGTRNQLQAAVTALKSNGIQVYGDVVMNHKGGADATEWVRAVEVNPSNRNQEVSGDYTIEAWTKFDFPGRGNTHSNFKWRWYHFDGVDWDQSRQLQNRIYKFRGKGWDWEVDTENGNYDYLMYADIDMDHPEVVNELRNWGVWYTNTLGLDGFRIDAVKHIKYSFTRDWLTHVRFTTGKNMFAVAEFWKNDIGAIENYLSKTNWNHSVFDVPLHYNLYNASRSGGNYDMRQIFNGTVVQRHPTHAVTFVDNHDSQPEEALESFVEEWFKPLAYALTLTRDQGYPSVFYGDYYGIPTHGVPAMKSKIDPILEARQKYAYGTQRDYLDHPDVIGWTREGDGVHADSGLATLMSDGPGGSKWMEVGKNNAGEVWYDITGNQTNTVTINKDGWGQFHVSGGSVSIYVQQ

SEQ ID NO: 24904 - protein, 483 aa, Bacillus licheniformis
HHNGTNGTMMQYFEWYLPNDGNHWNRLRSDASNLKDKGITAVWIPPAWKGASQNDVGYGAYDLYDLGEFNQKGTVRTKYGTRNQLQAAVTALKSNGIQVYGDVVMNHKGGADATEWVRAVEVNPSNRNQEVSGDYTIEAWTKFDFPGRGNTHSNFKWRWYHFDGVDWDQSRQLQNRIYKFRGKGWDWEVDTENGNYDYLMYADIDMDHPEVVNELRNWGVWYTNTLGLDGFRIDAVKHIKYSFTRDWLTHVRNTTGKNMFAVAEFWKNDIGAIENYLSKTNWNHSVFDVPLHYNLYNASRSGGNYDMRQIFNGTVVQRHPTHAVTFVDNHDSQPEEALESFVEEWFKPLAYALTLTRDQGYPSVFYGDYYGIPTHGVPAMKSKIDPILEARQKYAYGTQRDYLDHPDVIGWTREGDGVHADSGLATLMSDGPGGSKWMEVGKNNAGEVWYNITGNQTNTVTINKDGWGQFHVSGGSVSIYVQQ

SEQ ID NO: 24905 - protein, 483 aa, Bacillus licheniformis
HHNGTNGTMMQYFEWYLPNDGNHWHRLRSDASNLKDKGITAVWIPPAWKGASQNDVGYGAYDLYDLGEFNQKGTVRTKYGTRNQLQAAVTALKSNGIQVYGDVVMNHKGGADATEWVRAVEVNPSNRNQEVSGDYTIEAWTKFDFPGRGNTHSNFKWRWYHFDGVDWDQSRQLQNKIYKFRGKGWDWEVDTENGNYDYLMYADYDMDHPEVVNELRNWGVWYTNTLGLDGFRIDAVKHIKYSFTRDWLTHVRNTTGKNMFAVAEFWKNDIGAIENYLSKTNWNHSVFDVPLHYNLYNASRSGGNYDMRQIFNGTVVQRHPTHAVTFVDNHDSQPEEALESFVEEWFKPLAYALTLTRDQGYPSVFYGDYYGIPTHGVPAMKSKIDPILEARQKYAYGTQRDYLDHPDVIGWTREGDGVHADSGLATLMSDGPGGSKWMEVGKNNAGEVWYDITGNQTGTVTINKDGWGQFHVSGGSVSIYVQQ

SEQ ID NO: 24906 - protein, 483 aa, Bacillus licheniformis
HHNGTNGTMMQYFEWYLPNDGNHWNRLRSDASNLKDKGITAVWIPPAWKGASQNDVGYGAYDLYDLGEFNQKGTVRTKYGTRNQLQAAVTALKSNGIQVYGDVVMNHKGGADATEWVRAVEVNPSNRNQEVSGDYEIEAWTKFDFPGRGNTHSNFKWRWYHFDGVDWDQSRQLQNRIYKFRGKGWDWEVDTENGNYDYLMYADIDMDHPEVVNELRNWGVWYTNTLGLDGFRIDAVKHIKYSFTRDWLTHVRNTTGKNMFAVAEFWKNDIGAIENYLSKTNWNHSVFDVPLHYNLYNASRSGGNYDMRQIFNGTVVQRHPTHAVTFVDNHDSQPEEALESFVEEWFKPLAYALTLTRDQGYPSVFYGDYYGIPTHGVPAMKSKIDPILEARQKYAYGTQRDYLDHPDVIGWTREGDGVHADSGLATLMSDGPGGSKWMEVGKNNAGEVWYDITGNQTNTVTINKDGWGQFHVSGGSVSIYVQQ

SEQ ID NO: 24907 - protein, 483 aa, Bacillus licheniformis
HHNGTNGTMMQYFEWYLPNDGNHWNRLRSDASNLKDKGITAVWIPPAWKGASQNDVGYGAYDLYDLGEFNQKGTVRTKYGTRNQLQAAVTALKSNGIQVYGDVVMNHKGGADATEWVRAVEVNPSNRNQEVSGDYTIEAWTKFDFPGRGNTHSNFKWRWYHFDGVDWDQSRQLQNRIYKFRGKGWDWEVDTENGNYDYLMYADIDMDHPEVVNELRNWGVWYTNTLGLDGFRIDAVKHIKYSFTRDWLTHVRNTTGKNMFAVAEFWKNDIGAIENYLSKTNWNHSVFDVPLHYNLYNASRSGGNYDMRQIFNGTVVQRHPTHAVTFVDNHDSQPEEALESFVEEWFKPLSYALTLTRDQGYPSVFYGDYYGIPTHGVPAMKSKIDPILEARQKYAYGTQRDYLDHPDVIGWTREGDGVHADSGLATLMSDGPGGSKWMEVGKNNAGEVWYDITGNQTNTVTINKDGWGQFHVSGGSVSIYVQQ

SEQ ID NO: 24908 - protein, 483 aa, Bacillus licheniformis
HHNGTNGTMMQYFEWYLPNDGNHWNRLRSDASNLKDKGITAVWIPPAWKGASQNDVGYGAYDLYDLGEFNQKGTVRTKYGTRNQLQAAVTALKSNGIQVYGDVVMNHKGGADATEWVRAVEVNPSNRNQEVSGDYTIEAWTKFDFPGRGNTHSNFKWRWYHFDGVDWDQSRQLQNRIYKFRGKGWDWEVDTENGNYDYLMYADIDMDHPEVVNELRNWGVWYTNTLGLDGFRIDAVKHIKYSFTRDWLTHVRNTTGKNMFAVAEFWKNDIGSIENYLSKTNWNHSVFDVPLHYNLYNASRSGGNYDMRQIFNGTVVQRHPTHAVTFVDNHDSQPEEALESFVEEWFKPLAYALTLTRDQGYPSVFYGDYYGIPTHGVPAMKSKIDPILEARQKYAYGTQRDYLDHPDVIGWTREGDGVHADSGLATLMSDGPGGSKWMEVGKNNAGEVWYDITGNQTNTVTINKDGWGQFHVSGGSVSIYVQQ

SEQ ID NO: 24909 - protein, 483 aa, Bacillus licheniformis
HHNGTNGTMMQYFEWYLPNDGNHWNRLRSDASNLKDKGITAVWIPPAWKGASQNDVGYGAYDLYDLGEFNQKGTVRTKYGTRNQLQAAVTALKSNGIQVYGDVVMNHKGGADATEWVRAVEVNPSNRNQEVSGDYTIEAWTKFDFPGRGNTHSNFKWRWYHFDGVDWDQSRQLQNRIYKFRGKGWDWEVDTENGNYDYLMYADIDMDHPEVVNELRNWGVWYTNTLGLDGFRIDAVKHIKYSFTRDWLTHVRNTTGKNMFAVAEFWKNDIGAIENYLSKTNWNHSVFDVPLHYNLYNASRSGGNYDMRQIFNGTVVQRHPTHAVTFVDNHDSQPEEALESFVEEWFKPLAYALTLTRDQVYPSVFYGDYYGIPTHGVPAMKSKIDPILEARQKYAYGTQRDYLDHPDVIGWTREGDGVHADSGLATLMSDGPGGSKWMEVGKNNAGEVWYDITGNQTNTVTINKDGWGQFHVSGGSVSIYVQQ

SEQ ID NO: 24910 - protein, 483 aa, Bacillus licheniformis
HHNGTNGTMMQYFEWYLPNDGNHWNRLRSDASNLKDKGITAVWIPPAWKGASQNDVGYGAYDLYDLGEFNQKGTVRTKYGTRNQLQAAVTALKSNGIQVYGDVVMNHKGGADATEWVRAVEVNPSNRNQEVSGDYTIEAWTKFDFPGRGNTHSNFKWRWYHFDGVDWDQSRQLQNRIYKFRGKGWDWEVDTENGNYDYLMYADIDMDHPEVVNELRNWGVWYTNTLGLDGFRIDAVKHIKYSFTRDWLTHVRNTTGKNMFAVAEFWKNDIGAIENYLSKTNWNHSVFDVPLHYNLYNASRSGGNYDMRQIFQGTVVQRHPTHAVTFVDNHDSQPEEALESFVEEWFKPLAYALTLTRDQGYPSVFYGDYYGIPTHGVPAMKSKIDPILEARQKYAYGTQRDYLDHPDVIGWTREGDGVHADSGLATLMSDGPGGSKWMEVGKNNAGEVWYDITGNQTNTVTINKDGWGQFHVSGGSVSIYVQQ

SEQ ID NO: 24911 - protein, 483 aa, Bacillus licheniformis
HHNGTNGTMMQYFEWYLPNDGNHWNRLRSDASNLKDKGITAVWIPPAWKGASQNDVGYGAYDLYDLGEFNQKGTVRTKYGTRNQLQAAVTALKSNGIQVYGDVVMNHKGGADATEWVRAVEVNPSNRNQEVSGDYTIEAWTKFDFPGRGNTHSNFKWRWYHFDGVDWDQSRQLQNRIYKFRGKGWDWEVDTENGNYDYLMYADIDMDHPEVVNELRNWGVWYTNTLGLDGFRIDAVKHIKYSFTRDWLTHVRNTTGKNMFAVAEFWKNDIGAIENYLSKTNWNHSVFDVPLHYNLYNASRSGGNYDMRQIFNGTVVQRHPTHAVTFVDNHDSQPEEALESFVEEWFKPLAYALTLTRDQGYPSVFYGDYYGIPTHGVPAMKSKIDPILEARQKYAYGSQRDYLDHPDVIGWTREGDGVHADSGLATLMSDGPGGSKWMEVGKNNAGEVWYDITGNQTNTVTINKDGWGQFHVSGGSVSIYVQQ

SEQ ID NO: 24912 - protein, 483 aa, Bacillus licheniformis
HHNGTNGTMMQYFEWYLPNDGNHWNRLRSDASNLKDKGITAVWIPPAWKGASQNDVGYGAYDLYDLGEFNQKGTVRTKYGTRNQLQAAVTALKSNGIQVYGDVVMNHKGGADATEWVRAVEVNPSNRNQEVSGDYTIEAWTKFDFPGRGNTHSNFKWRWYHFDGTDWDQSRQLQNRIYKFRGKGWDWEVDTENGNYDYLMYADIDMDHPEVVNELRNWGVWYTNTLGLDGFRIDAVKHIKYSFTRDWLTHVRNTTGKNMFAVAEFWKNDIGAIENYLSKTNWNHSVFDVPLHYNLYNASRSGGNYDMRQIFNGTVVQRHPTHAVTFVDNHDSQPEEALESFVEEWFKPLAYALTLTRDQGYPSVFYGDYYGIPTHGVPAMKSKIDPILEARQKYAYGTQRDYLDHPDVIGWTREGDGVHADSGLATLMSDGPGGSKWMEVGKNNAGEVWYDITGNQTNTVTINKDGWGQFHVSGGSVSIYVQQ

SEQ ID NO: 24913 - protein, 483 aa, Bacillus licheniformis
HHNGTNGTMMQYFEWYLPNDGNHWNRLRSDASNLKDKGITAVWIPPAWKGASQNDVGYGAYDLYDLGEFNQKGTVRTKYGTRNQLQAAVTALKSNGIQVYGDVVMNHKGGADATEWVRAVEVNPSNRNQEVSQDYTIEAWTKFDFPGRGNTHSNFKWRWYHFDGVDWDQSRQLQNRIYKFRGKGWDWEVDTENGNYDYLMYADIDMDHPEVVNELRNWGVWYTNTLGLDGFRIDAVKHIKYSFTRDWLTHVRNTTGKNMFAVAEFWKNDIGAIENYLSKTNWNHSVFDVPLHYNLYNASRSGGNYDMRQIFNGTVVQRHPTHAVTFVDNHDSQPEEALESFVEEWFKPLAYALTLTRDQGYPSVFYGDYYGIPTHGVPAMKSKIDPILEARQKYAYGTQRDYLDHPDVIGWTREGDGVHADSGLATLMSDGPGGSKWMEVGKNNAGEVWYDITGNQTNTVTINKDGWGQFHVSGGSVSIYVQQ

SEQ ID NO: 24914 - protein, 483 aa, Bacillus licheniformis
HHNGTNGTMMQYFEWYLPNDGNHWNRLRSDASNLKDKGITAVWIPPAWKGASQNDVGYGAYDLYDLGEFNQKGTVRTKYGTRNQLQAAVTALKSNGIQVYGDVVMNHKGGADATEWVRAVEVNPSNRNQEVSGDYTIEAWTKFDFEGRGNTHSNFKWRWYHFDGVDWDQSRQLQNRIYKFRGKGWDWEVDTENGNYDYLMYADIDMDHPEVVNELRNWGVWYTNTLGLDGFRIDAVKHIKYSFTRDWLTHVRNTTGKNMFAVAEFWKNDIGAIENYLSKTNWNHSVFDVPLHYNLYNASRSGGNYDMRQIFNGTVVQRHPTHAVTFVDNHDSQPEEALESFVEEWFKPLAYALTLTRDQGYPSVFYGDYYGIPTHGVPAMKSKIDPILEARQKYAYGTQRDYLDHPDVIGWTREGDGVHADSGLATLMSDGPGGSKWMEVGKNNAGEVWYDITGNQTNTVTINKDGWGQFHVSGGSVSIYVQQ

SEQ ID NO: 24915 - protein, 483 aa, Bacillus licheniformis
HHNGTNGTMMQYFEWYLPNDGNHWNRLRSDASNLKDKGITAVWIPPAWKGASQNDVGYGAYDLYDLGEFNQKGTVRTKYGTRNQLQAAVTALKSNGIQVYGDVVMNHKGGADATEWVRAVEVNPSNRNQEVSGDYTIEAWTKFDFDGRGNTHSNFKWRWYHFDGVDWDQSRQLQNRIYKFRGKGWDWEVDTENGNYDYLMYADIDMDHPEVVNELRNWGVWYTNTLGLDGFRIDAVKHIKYSFTRDWLTHVRNTTGKNMFAVAEFWKNDIGAIENYLSKTNWNHSVFDVPLHYNLYNASRSGGNYDMRQIFNGTVVQRHPTHAVTFVDNHDSQPEEALESFVEEWFKPLAYALTLTRDQGYPSVFYGDYYGIPTHGVPAMKSKIDPILEARQKYAYGTQRDYLDHPDVIGWTREGDGVHADSGLATLMSDGPGGSKWMEVGKNNAGEVWYDITGNQTNTVTINKDGWGQFHVSGGSVSIYVQQ

SEQ ID NO: 24916 - protein, 483 aa, Bacillus licheniformis
HHNGTNGTMMQYFEWYLPNDGNHWNRLRSDASNLKDKGITAVWIPPAWKGASQNDVGYGAYDLYDLGEFNQKGTVRTKYGTRNQLQAAVTALKSNGIQVYGDVVMNHKGGADATEWVRAVEVNPSNRNQEVSGDYTIEAWTKFDFPGRGNTHSNFKWRWYHFDGVDWDQSRQLQNRIYKFRGKGWDWEVDTENGNYDYLMYADIDMDHPEVVNELRNWGVWYTNTLGLDGFRIDAVKHIKYSFTRDWLTHVRNTTGKNMFAVAEFWKNDIQAIENYLSKTNWNHSVFDVPLHYNLYNASRSGGNYDMRQIFNGTVVQRHPTHAVTFVDNHDSQPEEALESFVEEWFKPLAYALTLTRDQGYPSVFYGDYYGIPTHGVPAMKSKIDPILEARQKYAYGTQRDYLDHPDVIGWTREGDGVHADSGLATLMSDGPGGSKWMEVGKNNAGEVWYDITGNQTNTVTINKDGWGQFHVSGGSVSIYVQQ

SEQ ID NO: 24917 - protein, 483 aa, Bacillus licheniformis
HHNGTNGTMMQYFEWYLPNDGNHWHRLRSDASNLKDKGITAVWIPPAWKGASQNDVGYGAYDLYDLGEFNQKGTVRTKYGTRNQLQAAVTALKSNGIQVYGDVVMNHKGGADATEWVRAVEVNPSNRNQEVSGDYTIEAWTKFDFPGRGNTHSNFKWRWYHFDGVDWDQSRQLQNKIYKFRGKEWDWEVDTENGNYDYLMYADYDMDHPEVVNELRNWGVWYTNTLGLDGFRIDAVKHIKYSFTRDWLTHVRNTTGKNMFAVAEFWKNDIGAIENYLSKTNWNHSVFDVPLHYNLYNASRSGGNYDMRQIFNGTVVQRHPTHAVTFVDNHDSQPEEALESFVEEWFKPLAYALTLTRDQGYPSVFYGDYYGIPTHGVPAMKSKIDPILEARQKYAYGTQRDYLDHPDVIGWTREGDGVHADSGLATLMSDGPGGSKWMEVGKNNAGEVWYDITGNQTGTVTINKDGWGQFHVSGGSVSIYVQQ

SEQ ID NO: 24918 - protein, 483 aa, Bacillus licheniformis
HHNGTNGTMMQYFEWYLPNDGNHWNRLRSDASNLKDKGITAVWIPPAWKGASQNDVGYGAYDLYDLGEFNQKGTVRTKYGTRNQLQAAVTTLKSNGIQVYGDVVMNHKGGADATEWVRAVEVNPSNRNQEVSGDYTIEAWTKFDFPGRGNTHSNFKWRWYHFDGVDWDQSRQLQNRIYKFRGKGWDWEVDTENGNYDYLMYADIDMDHPEVVNELRNWGVWYTNTLGLDGFRIDAVKHIKYSFTRDWLTHVRNTTGKNMFAVAEFWKNDIGAIENYLSKTNWNHSVFDVPLHYNLYNASRSGGNYDMRQIFNGTVVQRHPTHAVTFVDNHDSQPEEALESFVEEWFKPLAYALTLTRDQGYPSVFYGDYYGIPTHGVPAMKSKIDPILEARQKYAYGTQRDYLDHPDVIGWTREGDGVHADSGLATLMSDGPGGSKWMEVGKNNAGEVWYDITGNQTNTVTINKDGWGQFHVSGGSVSIYVQQ

SEQ ID NO: 24919 - protein, 483 aa, Bacillus licheniformis
HHNGTNGTMMQYFEWYLPNDGNHWNRLRSDASNLKDKGITAVWIPPAWKGASQNDVGYGAYDLYDLGEFNQKGTVRTKYGTRNQLQAAVTALKSNGIQVYGDVVMNHKGGADATEWVRAVEVNPSNRNQEVSGDYTIEAWTKFDFWGRGNTHSNFKWRWYHFDGVDWDQSRQLQNRIYKFRGKGWDWEVDTENGNYDYLMYADIDMDHPEVVNELRNWGVWYTNTLGLDGFRIDAVKHIKYSFTRDWLTHVRNTTGKNMFAVAEFWKNDIGAIENYLSKTNWNHSVFDVPLHYNLYNASRSGGNYDMRQIFNGTVVQRHPTHAVTFVDNHDSQPEEALESFVEEWFKPLAYALTLTRDQGYPSVFYGDYYGIPTHGVPAMKSKIDPILEARQKYAYGTQRDYLDHPDVIGWTREGDGVHADSGLATLMSDGPGGSKWMEVGKNNAGEVWYDITGNQTNTVTINKDGWGQFHVSGGSVSIYVQQ

SEQ ID NO: 24920 - protein, 483 aa, Bacillus licheniformis
HHNGTNGTMMQYFEWYLPNDGNHWNRLRSDASNLKDKGITAVWIPPAWKGASQNDVGYGAYDLYDLGEFNQKGTVRTKYGTRNQLQAAVTALKSNGIQVYGDVVMNHKGGADATEWVRAVEVNPSNRNQEVSGDYTIEAWTKFDFPMRGNTHSNFKWRWYHFDGVDWDQSRQLQNRIYKFRGKGWDWEVDTENGNYDYLMYADIDMDHPEVVNELRNWGVWYTNTLGLDGFRIDAVKHIKYSFTRDWLTHVRNTTGKNMFAVAEFWKNDIGAIENYLSKTNWNHSVFDVPLHYNLYNASRSGGNYDMRQIFNGTVVQRHPTHAVTFVDNHDSQPEEALESFVEEWFKPLAYALTLTRDQGYPSVFYGDYYGIPTHGVPAMKSKIDPILEARQKYAYGTQRDYLDHPDVIGWTREGDGVHADSGLATLMSDGPGGSKWMEVGKNNAGEVWYDITGNQTNTVTINKDGWGQFHVSGGSVSIYVQQ

SEQ ID NO: 24921 - protein, 483 aa, Bacillus licheniformis
HHNGTNGTMMQYFEWYLPNDGNHWNRLRSDASNLKDKGITAVWIPPAWKGASQNDVGYGAYDLYDLGEFNQKGTVRTKYGTRNQLQAAVTALKSNGIQVYGDVVMNHKGGADATEWVRAVEVNPSNRNQEVSGDYTIEAWTKFDFPGRGNTHSNFKWRWYHFDGVDWDQSRQLQNRIYKFRGKGWDWEFDTENGNYDYLMYADIDMDHPEVVNELRNWGVWYTNTLGLDGFRIDAVKHIKYSFTRDWLTHVRNTTGKNMFAVAEFWKNDIGAIENYLSKTNWNHSVFDVPLHYNLYNASRSGGNYDMRQIFNGTVVQRHPTHAVTFVDNHDSQPEEALESFVEEWFKPLAYALTLTRDQGYPSVFYGDYYGIPTHGVPAMKSKIDPILEARQKYAYGTQRDYLDHPDVIGWTREGDGVHADSGLATLMSDGPGGSKWMEVGKNNAGEVWYDITGNQTNTVTINKDGWGQFHVSGGSVSIYVQQ

SEQ ID NO: 24922 - protein, 483 aa, Bacillus licheniformis
HHNGTNGTMMQYFEWYLPNDGNHWNELRSDASNLKDKGITAVWIPPAWKGASQNDVGYGAYDLYDLGEFNQKGTVRTKYGTRNQLQAAVTALKSNGIQVYGDVVMNHKGGADATEWVRAVEVNPSNRNQEVSGDYTIEAWTKFDFPGRGNTHSNFKWRWYHFDGVDWDQSRQLQNRIYKFRGKGWDWEVDTENGNYDYLMYADIDMDHPEVVNELRNWGVWYTNTLGLDGFRIDAVKHIKYSFTRDWLTHVRNTTGKNMFAVAEFWKNDIGAIENYLSKTNWNHSVFDVPLHYNLYNASRSGGNYDMRQIFNGTVVQRHPTHAVTFVDNHDSQPEEALESFVEEWFKPLAYALTLTRDQGYPSVFYGDYYGIPTHGVPAMKSKIDPILEARQKYAYGTQRDYLDHPDVIGWTREGDGVHADSGLATLMSDGPGGSKWMEVGKNNAGEVWYDITGNQTNTVTINKDGWGQFHVSGGSVSIYVQQ

SEQ ID NO: 24923 - protein, 483 aa, Bacillus licheniformis
HHNGTNGTMMQYFEWYLPNDGNHWNRLRSDASNLKDKGITAVWIPPAWKGASQNDVGYGAYDLYDLGEFNQKGTVRTKYGTRNQLQAAVTALKSNGIQVYGDVVMNHKGGADATEWPRAVEVNPSNRNQEVSGDYTIEAWTKFDFPGRGNTHSNFKWRWYHFDGVDWDQSRQLQNRIYKFRGKGWDWEVDTENGNYDYLMYADIDMDHPEVVNELRNWGVWYTNTLGLDGFRIDAVKHIKYSFTRDWLTHVRNTTGKNMFAVAEFWKNDIGAIENYLSKTNWNHSVFDVPLHYNLYNASRSGGNYDMRQIFNGTVVQRHPTHAVTFVDNHDSQPEEALESFVEEWFKPLAYALTLTRDQGYPSVFYGDYYGIPTHGVPAMKSKIDPILEARQKYAYGTQRDYLDHPDVIGWTREGDGVHADSGLATLMSDGPGGSKWMEVGKNNAGEVWYDITGNQTNTVTINKDGWGQFHVSGGSVSIYVQQ

SEQ ID NO: 24924 - protein, 483 aa, Bacillus licheniformis
HHNGTNGTMMQYFEWYLPNDGNHWNRLRSDASNLKDKGITAVWIPPAWKGASQNDVGYGAYDLYDLGEFNQKGTVRTKYGTRNQLQAAVTALKSNGIQVYGDVVMNHKGGADATEWVRAVEVNPSNRNQEVSGDYTIEAWTKFDFPGRGNTHSNFKWRWYHFDGVDWDQSRQLQNRIYKFRGKGWDWEVDTENGNYDYLMYADIDMDHPEVVNELRNWGVWYYNTLGLDGFRIDAVKHIKYSFTRDWLTHVRNTTGKNMFAVAEFWKNDIGAIENYLSKTNWNHSVFDVPLHYNLYNASRSGGNYDMRQIFNGTVVQRHPTHAVTFVDNHDSQPEEALESFVEEWFKPLAYALTLTRDQGYPSVFYGDYYGIPTHGVPAMKSKIDPILEARQKYAYGTQRDYLDHPDVIGWTREGDGVHADSGLATLMSDGPGGSKWMEVGKNNAGEVWYDITGNQTNTVTINKDGWGQFHVSGGSVSIYVQQ

SEQ ID NO: 24925 - protein, 483 aa, Bacillus licheniformis
HHNGTNGTMMQYFEWYLPNDGNHWNRLRSDASNLKDKGITAVWIPPAWKGASQNDVGYGAYDLYDLGEFNQKGTVRTKYGHRNQLQAAVTALKSNGIQVYGDVVMNHKGGADATEWVRAVEVNPSNRNQEVSGDYTIEAWTKFDFPGRGNTHSNFKWRWYHFDGVDWDQSRQLQNRIYKFRGKGWDWEVDTENGNYDYLMYADIDMDHPEVVNELRNWGVWYTNTLGLDGFRIDAVKHIKYSFTRDWLTHVRNTTGKNMFAVAEFWKNDIGAIENYLSKTNWNHSVFDVPLHYNLYNASRSGGNYDMRQIFNGTVVQRHPTHAVTFVDNHDSQPEEALESFVEEWFKPLAYALTLTRDQGYPSVFYGDYYGIPTHGVPAMKSKIDPILEARQKYAYGTQRDYLDHPDVIGWTREGDGVHADSGLATLMSDGPGGSKWMEVGKNNAGEVWYDITGNQTNTVTINKDGWGQFHVSGGSVSIYVQQ

SEQ ID NO: 24926 - protein, 483 aa, Bacillus licheniformis
HHNGTNGTMMQYFEWYLPNDGNHWNRLRSDASNLKDKGITAVWIPPAWKGASQNDVGYGAYDLYDLGEFNQKGTVRTKYGTRNQLQAAVTALKSNGIQVYGDVVMNHKGGADATEWVRAVEVNPSNRNQEVSGDYTIEAWTKFDFPGRGNTHSNFKWRWYHFDGVDWDQSRQLQNRIYKFRGKGWDWEVDTENGNYDYLMYADIDMDHPEVVNELRNWGVWYTNTLGLDGFRIDAVKHIKYSFTRDWLTHVRNTTGKNMFAVAEFWKNDIAAIENYLSKTNWNHSVFDVPLHYNLYNASRSGGNYDMRQIFNGTVVQRHPTHAVTFVDNHDSQPEEALESFVEEWFKPLAYALTLTRDQGYPSVFYGDYYGIPTHGVPAMKSKIDPILEARQKYAYGTQRDYLDHPDVIGWTREGDGVHADSGLATLMSDGPGGSKWMEVGKNNAGEVWYDITGNQTNTVTINKDGWGQFHVSGGSVSIYVQQ

SEQ ID NO: 24927 - protein, 483 aa, Bacillus licheniformis
HHNGTNGTMMQYFEWYLPNDGNHWNRIRSDASNLKDKGITAVWIPPAWKGASQNDVGYGAYDLYDLGEFNQKGTVRTKYGTRNQLQAAVTALKSNGIQVYGDVVMNHKGGADATEWVRAVEVNPSNRNQEVSGDYTIEAWTKFDFPGRGNTHSNFKWRWYHFDGVDWDQSRQLQNRIYKFRGKGWDWEVDTENGNYDYLMYADIDMDHPEVVNELRNWGVWYTNTLGLDGFRIDAVKHIKYSFTRDWLTHVRNTTGKNMFAVAEFWKNDIGAIENYLSKTNWNHSVFDVPLHYNLYNASRSGGNYDMRQIFNGTVVQRHPTHAVTFVDNHDSQPEEALESFVEEWFKPLAYALTLTRDQGYPSVFYGDYYGIPTHGVPAMKSKIDPILEARQKYAYGTQRDYLDHPDVIGWTREGDGVHADSGLATLMSDGPGGSKWMEVGKNNAGEVWYDITGNQTNTVTINKDGWGQFHVSGGSVSIYVQQ

SEQ ID NO: 24928 - protein, 483 aa, Bacillus licheniformis
HHNGTNGTMMQYFEWYLPNDGNHWNRLRSDASNLKDKGITAVWIPPAWKGASQNDVGYGAYDLYDLGEFNQKGTVRTKYGTRNQLQAAVTALKSNGIQVYGDVVMNHKGGADATKWVRAVEVNPSNRNQEVSGDYTIEAWTKFDFPGRGNTHSNFKWRWYHFDGVDWDQSRQLQNRIYKFRGKGWDWEVDTENGNYDYLMYADIDMDHPEVVNELRNWGVWYTNTLGLDGFRIDAVKHIKYSFTRDWLTHVRNTTGKNMFAVAEFWKNDIGAIENYLSKTNWNHSVFDVPLHYNLYNASRSGGNYDMRQIFNGTVVQRHPTHAVTFVDNHDSQPEEALESFVEEWFKPLAYALTLTRDQGYPSVFYGDYYGIPTHGVPAMKSKIDPILEARQKYAYGTQRDYLDHPDVIGWTREGDGVHADSGLATLMSDGPGGSKWMEVGKNNAGEVWYDITGNQTNTVTINKDGWGQFHVSGGSVSIYVQQ

SEQ ID NO: 24929 - protein, 483 aa, Bacillus licheniformis
HHNGTNGTMMQYFEWYLPNDGNHWNRLRSDASNLKDKGITAVWIPPAWKGASQNDVGYGAYDLYDLGEFNQKGTVRTKYGTRNQLQAAVTALKSNGIQVYGDVVMNHKGGADATEWVRAVEVNPSNRNQEVSGDYTIEAWTKFDFPGRGNTHSNFKWRWYHFDGVDWDQSRQLQNRIYKFRGKGWDWEVDTENGNYDYLMYADIDMDHPEVVNELRNWGVWYTNTLGLDGFRIDAVKHIKYSFTRDWLTHVRNTTQKNMFAVAEFWKNDIGAIENYLSKTNWNHSVFDVPLHYNLYNASRSGGNYDMRQIFNGTVVQRHPTHAVTFVDNHDSQPEEALESFVEEWFKPLAYALTLTRDQGYPSVFYGDYYGIPTHGVPAMKSKIDPILEARQKYAYGTQRDYLDHPDVIGWTREGDGVHADSGLATLMSDGPGGSKWMEVGKNNAGEVWYDITGNQTNTVTINKDGWGQFHVSGGSVSIYVQQ

SEQ ID NO: 24930 - protein, 483 aa, Bacillus licheniformis
HHNGTNGTMMQYFEWYLPNWGNHWNRLRSDASNLKDKGITAVWIPPAWKGASQNDVGYGAYDLYDLGEFNQKGTVRTKYGTRNQLQAAVTALKSNGIQVYGDVVMNHKGGADATEWVRAVEVNPSNRNQEVSGDYTIEAWTKFDFPGRGNTHSNFKWRWYHFDGVDWDQSRQLQNRIYKFRGKGWDWEVDTENGNYDYLMYADIDMDHPEVVNELRNWGVWYTNTLGLDGFRIDAVKHIKYSFTRDWLTHVRNTTGKNMFAVAEFWKNDIGAIENYLSKTNWNHSVFDVPLHYNLYNASRSGGNYDMRQIFNGTVVQRHPTHAVTFVDNHDSQPEEALESFVEEWFKPLAYALTLTRDQGYPSVFYGDYYGIPTHGVPAMKSKIDPILEARQKYAYGTQRDYLDHPDVIGWTREGDGVHADSGLATLMSDGPGGSKWMEVGKNNAGEVWYDITGNQTNTVTINKDGWGQFHVSGGSVSIYVQQ

SEQ ID NO: 24931 - protein, 483 aa, Bacillus licheniformis
HHNGTNGTMMQYFEWYLPNDGNHWHRLRSDASNLKDKGITAVWIPPAWKGASQNDVGYGAYDLYDLGEFNQKGTVRTKYGTRNQLQAAVTALKSNGIQVYGDVVMNHKGGADATEWVRAVEVNPSNRNQEVSGDYTIEAWTKFDFPGRGNTHSNFKWRWYHFDGVDWDQSRQLQNKIYKFRGKEWDWEVDTENGNYDYLMYADIDMDHPEVVNELRNWGVWYTNTLGLDGFRIDAVKHIKYSFTRDWLTHVRNTTGKNMFAVAEFWKNDIGAIENYLSKTNWNHSVFDVPLHYNLYNASRSGGNYDMRQIFNGTVVQRHPTHAVTFVDNHDSQPEEALESFVEEWFKPLAYALTLTRDQGYPSVFYGDYYGIPTHGVPAMKSKIDPILEARQKYAYGTQRDYLDHPDVIGWTREGDGVHADSGLATLMSDGPGGSKWMEVGKNNAGEVWYDITGNQTGTVTINKDGWGQFHVSGGSVSIYVQQ

SEQ ID NO: 24932 - protein, 483 aa, Bacillus licheniformis
HHNGTNGTMMQYFEWYLPNDGNHWNRLRSDASNLKDKGITAVWIPPAWKGASQNDVGYGAYDLYDLGEFNQKGTVRTKYGTRNQLQAAVTALKSNGIQVYGDVVMNHKGGADATEWVRAVEVNPSNRNQEVSGDYTIEAWTKFDFPGRGNTHSNFKWRWYHFDGVDWDQSRQLQNRIYKFRGKGWDWEVDTENGNYDYLMYADIDMDHPEVVNELRNWGVWYTNTLGLDGFRIDAVKHIKYSFTRDWLTHVRNTTGKNMFAVAEFWKNDIGAIENYLSKTNWNHSVFDVPLHYNLYNAFRSGGNYDMRQIFNGTVVQRHPTHAVTFVDNHDSQPEEALESFVEEWFKPLAYALTLTRDQGYPSVFYGDYYGIPTHGVPAMKSKIDPILEARQKYAYGTQRDYLDHPDVIGWTREGDGVHADSGLATLMSDGPGGSKWMEVGKNNAGEVWYDITGNQTNTVTINKDGWGQFHVSGGSVSIYVQQ

SEQ ID NO: 24933 - protein, 483 aa, Bacillus licheniformis
HHNGTNGTMMQYFEWYLPLDGNHWNRLRSDASNLKDKGITAVWIPPAWKGASQNDVGYGAYDLYDLGEFNQKGTVRTKYGTRNQLQAAVTALKSNGIQVYGDVVMNHKGGADATEWVRAVEVNPSNRNQEVSGDYTIEAWTKFDFPGRGNTHSNFKWRWYHFDGVDWDQSRQLQNRIYKFRGKGWDWEVDTENGNYDYLMYADIDMDHPEVVNELRNWGVWYTNTLGLDGFRIDAVKHIKYSFTRDWLTHVRNTTGKNMFAVAEFWKNDIGAIENYLSKTNWNHSVFDVPLHYNLYNASRSGGNYDMRQIFNGTVVQRHPTHAVTFVDNHDSQPEEALESFVEEWFKPLAYALTLTRDQGYPSVFYGDYYGIPTHGVPAMKSKIDPILEARQKYAYGTQRDYLDHPDVIGWTREGDGVHADSGLATLMSDGPGGSKWMEVGKNNAGEVWYDITGNQTNTVTINKDGWGQFHVSGGSVSIYVQQ

SEQ ID NO: 24934 - protein, 483 aa, Bacillus licheniformis
HHNGTNGTMMQYFEWYLPNDGNHWNRLRSDASNLKDKGITAVWIPPAWKGASQNDVGYGAYDLYDLGEFNQKGTVRTKYGTRNQLQAAVTALKSNGIQVYGDVVMNHKGGADATEWVRAVEVNPSNRNQEVSGDYTIEAWTKFDFPGRGNTHSNFKWRWYHFDGVDWDQSRQLQNRIYKFRGKGWDWEVDTENGNYDYLMYADIDMDHPEVVNELRNWGVWYTNTLGLDGFRIDAVKHIKYSFTRDWLTHVRNTTGKNMFAVAEFWKNDIGAIENYLSKTNWNHSVFDVPLHYNLYNASRSGGNYDMRQIFNGTVIQRHPTHAVTFVDNHDSQPEEALESFVEEWFKPLAYALTLTRDQGYPSVFYGDYYGIPTHGVPAMKSKIDPILEARQKYAYGTQRDYLDHPDVIGWTREGDGVHADSGLATLMSDGPGGSKWMEVGKNNAGEVWYDITGNQTNTVTINKDGWGQFHVSGGSVSIYVQQ

SEQ ID NO: 24935 - protein, 483 aa, Bacillus licheniformis
HHNGTNGTMMQYFEWYLPNDGNHWNRLRSDASNLKDKGITAVWIPPAWKGASQNDVGYGAYDLYDLGEFNQKGTVRTKYGTRNQLQAAVTALKSNGIQVYGDVVMNHKGGADATEWVRAVEVNPSNRNQEVSGDYTIEAWTKFDFPGRGNTHSNFKWRWYHFDGVDWDQSRQLQNRIYKFRGKGWDWEVDTENGNYDYLMYADIDMDHPEVVNELRNWGVWYTNTLGLDGFRIDAVKHIKYSFTRDWLFHVRNTTGKNMFAVAEFWKNDIGAIENYLSKTNWNHSVFDVPLHYNLYNASRSGGNYDMRQIFNGTVVQRHPTHAVTFVDNHDSQPEEALESFVEEWFKPLAYALTLTRDQGYPSVFYGDYYGIPTHGVPAMKSKIDPILEARQKYAYGTQRDYLDHPDVIGWTREGDGVHADSGLATLMSDGPGGSKWMEVGKNNAGEVWYDITGNQTNTVTINKDGWGQFHVSGGSVSIYVQQ

SEQ ID NO: 24936 - protein, 483 aa, Bacillus licheniformis
HHNGTNGTMMQYFEWYLPNDGNHWNRLRSDASNLKDKGITAVWIPPAWKGASQNDVGYGAYDLYDLGEFNQKGTVRTKYGTRNQLQAAVTALKSNGIQVYGDVVMNHKGGADATEWVRAVEVNPSNRNQEVSGDYTIEAWTKFDFPGRGNTHSNFKWRWYHFDGVDWDQSRQLQNRIYKFRGKGWDWEVDTENGNYDYLMYADIDMDHPEVVNELRNWGVWYTNTLGLDGFRIDAVKHIKYSFTRDWLTHVRNTTGKNMFAVAEFWKNDIGAIENYLSKTNHNHSVFDVPLHYNLYNASRSGGNYDMRQIFNGTVVQRHPTHAVTFVDNHDSQPEEALESFVEEWFKPLAYALTLTRDQGYPSVFYGDYYGIPTHGVPAMKSKIDPILEARQKYAYGTQRDYLDHPDVIGWTREGDGVHADSGLATLMSDGPGGSKWMEVGKNNAGEVWYDITGNQTNTVTINKDGWGQFHVSGGSVSIYVQQ

SEQ ID NO: 24937 - protein, 483 aa, Bacillus licheniformis
HHNGTNGTMMQYFEWYLPNDGNHWNRLRSDASNLKDKGITAVWIPPAWKGASQNDVGYGAYDLYDLGEFNQKGTVRTKYGTRNQLQAAVTALKSNGIQVYGDVVMNHKGGADATEWVRAVEVNPSNRNQEVSGDYTIEAWTKFDFPGRGNTHSNFKWRWYHFDGVDWDQSRQLQNRIYKFRGKGADWEVDTENGNYDYLMYADIDMDHPEVVNELRNWGVWYTNTLGLDGFRIDAVKHIKYSFTRDWLTHVRNTTGKNMFAVAEFWKNDIGAIENYLSKTNWNHSVFDVPLHYNLYNASRSGGNYDMRQIFNGTVVQRHPTHAVTFVDNHDSQPEEALESFVEEWFKPLAYALTLTRDQGYPSVFYGDYYGIPTHGVPAMKSKIDPILEARQKYAYGTQRDYLDHPDVIGWTREGDGVHADSGLATLMSDGPGGSKWMEVGKNNAGEVWYDITGNQTNTVTINKDGWGQFHVSGGSVSIYVQQ

SEQ ID NO: 24938 - protein, 483 aa, Bacillus licheniformis
HHNGTNGTMMQYFEWYLPNDGNHWNRLRSDASNLKDKGITAVWIPPAWKGASQNDVGYGAYDLYDLGEFNQKGTVRTKYGTRNQLQAAVTALKSNGIQVYGDVVMNHKGGADATEWVRAVEVNPSNRNQEVSGDYTIEAWTKFDFPGRGNTHSNFKWRWYHFDGVDWDQSRQLQNRIYKFRGKGWDWEVDTENGNYDYLMYADIDMDHPEVVNELRNWGVWYTNTLGLDGFRIDAVKHIKYSFTRDWLTHVRNTTGKNMFAVAEFWKNDIGAIENYLSKTNWNHSVFDVPLHYNLYNASRSGGNYDMRQIFNGTVVQRHPTHAVTFVDNHDSQPEEALESFVEEWFKPMAYALTLTRDQGYPSVFYGDYYGIPTHGVPAMKSKIDPILEARQKYAYGTQRDYLDHPDVIGWTREGDGVHADSGLATLMSDGPGGSKWMEVGKNNAGEVWYDITGNQTNTVTINKDGWGQFHVSGGSVSIYVQQ

SEQ ID NO: 24939 - protein, 483 aa, Bacillus licheniformis
HHNGTNGTMMQYFEWYLPNDGNHWNRLRSDASNLKDKGITAVWIPPAWKGASQNDVGYGAYDLYDLGEFNQKGTVRTKYGTRNQLQAAVTALKSNGIQVYGDVVMNHKGGADATEWVRAVEVNPSNRNQEVSGDYTIEAWTKFDFPGRGNTHSNFKWRWYHFDGVDWDQSRQLQNRIYKFRGKGWDWEVDTENGNYDYLMYADIDMDHPEVVNELKNWGVWYTNTLGLDGFRIDAVKHIKYSFTRDWLTHVRNTTGKNMFAVAEFWKNDIGAIENYLSKTNWNHSVFDVPLHYNLYNASRSGGNYDMRQIFNGTVVQRHPTHAVTFVDNHDSQPEEALESFVEEWFKPLAYALTLTRDQGYPSVFYGDYYGIPTHGVPAMKSKIDPILEARQKYAYGTQRDYLDHPDVIGWTREGDGVHADSGLATLMSDGPGGSKWMEVGKNNAGEVWYDITGNQTNTVTINKDGWGQFHVSGGSVSIYVQQ

SEQ ID NO: 24940 - protein, 483 aa, Bacillus licheniformis
HHNGTNGTMMQYFEWYLPNDGNHWNRLRSDASNLKDKGITAVWIPPAWKGASQNDVGYGAYDLYDLGEFNQKGTVRTKYGTRNQLQAAVTALKSNGIQVYGDVVMNHKGGADATEWVRAVEVNPSNRNQEVSGDYTIEAWTKFDFPGRGETHSNFKWRWYHFDGVDWDQSRQLQNRIYKFRGKGWDWEVDTENGNYDYLMYADIDMDHPEVVNELRNWGVWYTNTLGLDGFRIDAVKHIKYSFTRDWLTHVRNTTGKNMFAVAEFWKNDIGAIENYLSKTNWNHSVFDVPLHYNLYNASRSGGNYDMRQIFNGTVVQRHPTHAVTFVDNHDSQPEEALESFVEEWFKPLAYALTLTRDQGYPSVFYGDYYGIPTHGVPAMKSKIDPILEARQKYAYGTQRDYLDHPDVIGWTREGDGVHADSGLATLMSDGPGGSKWMEVGKNNAGEVWYDITGNQTNTVTINKDGWGQFHVSGGSVSIYVQQ

SEQ ID NO: 24941 - protein, 483 aa, Bacillus licheniformis
HHNGTNGTMMQYFEWYLPNDGNHWNRLRSDASNLKDKGITAVWIPPAWKGASQNDVGYGAYDLYDLGEFNQKGTVRTKYGTRNQLQAAVTALKSNGIQVYGDVVMNHKGGADATEWVRAVEVNPSNRNQEVSGDYTIEAWTKFDFPGRGNTHSNFKWRWYHFDGVDWDQSRQLQNRIYKFRGKGWDWEVDTENGNYDYLMYADIDMDHPEVVNELRNWGVWYTNTLGLDGFRIDAVKHIKYSFTRDWLMHVRNTTGKNMFAVAEFWKNDIGAIENYLSKTNWNHSVFDVPLHYNLYNASRSGGNYDMRQIFNGTVVQRHPTHAVTFVDNHDSQPEEALESFVEEWFKPLAYALTLTRDQGYPSVFYGDYYGIPTHGVPAMKSKIDPILEARQKYAYGTQRDYLDHPDVIGWTREGDGVHADSGLATLMSDGPGGSKWMEVGKNNAGEVWYDITGNQTNTVTINKDGWGQFHVSGGSVSIYVQQ

SEQ ID NO: 24942 - protein, 483 aa, Bacillus licheniformis
HHNGTNGTMMQYFEWYLPNDGNHWNRLRSYASNLKDKGITAVWIPPAWKGASQNDVGYGAYDLYDLGEFNQKGTVRTKYGTRNQLQAAVTALKSNGIQVYGDVVMNHKGGADATEWVRAVEVNPSNRNQEVSGDYTIEAWTKFDFPGRGNTHSNFKWRWYHFDGVDWDQSRQLQNRIYKFRGKGWDWEVDTENGNYDYLMYADIDMDHPEVVNELRNWGVWYTNTLGLDGFRIDAVKHIKYSFTRDWLTHVRNTTGKNMFAVAEFWKNDIGAIENYLSKTNWNHSVFDVPLHYNLYNASRSGGNYDMRQIFNGTVVQRHPTHAVTFVDNHDSQPEEALESFVEEWFKPLAYALTLTRDQGYPSVFYGDYYGIPTHGVPAMKSKIDPILEARQKYAYGTQRDYLDHPDVIGWTREGDGVHADSGLATLMSDGPGGSKWMEVGKNNAGEVWYDITGNQTNTVTINKDGWGQFHVSGGSVSIYVQQ

SEQ ID NO: 24943 - protein, 483 aa, Bacillus licheniformis
HHNGTNGTMMQYFEWYLPNDGNHWNRLRSDASNLKDKGITAVWIPPAWKGASQNDVGYGAYDLYDLGEFNQKGTVRTKYGTRNQLQAAVTALKSNGIQVYGDVVMNHKGGADATEWVRAVEVNPSNRNQEVSGDYTIEAWTKFCFPGRGNTHSNFKWRWYHFDGVDWDQSRQLQNRIYKFRGKGWDWEVDTENGNYDYLMYADIDMDHPEVVNELRNWGVWYTNTLGLDGFRIDAVKHIKYSFTRDWLTHVRNTTGKNMFAVAEFWKNDIGAIENYLSKTNWNHSVFDVPLHYNLYNASRSGGNYDMRQIFNGTVVQRHPTHAVTFVDNHDSQPEEALESFVEEWFKPLAYALTLTRDQGYPSVFYGDYYGIPTHGVPAMKSKIDPILEARQKYAYGTQRDYLDHPDVIGWTREGDGVHADSGLATLMSDGPGGSKWMEVGKNNAGEVWYDITGNQTNTVTINKDGWGQFHVSGGSVSIYVQQ

SEQ ID NO: 24944 - protein, 483 aa, Bacillus licheniformis
HHNGTNGTMMQYFEWYLPNDGNHWNRLRSDASNLKDKGITAVWIPPAWKGASQNDVGYGAYDLYDLGEFNQKGTVRTKYGTRNQLQAAVTALKSNGIQVYGDVVMNHKGGADATEWVRAVEVNPSNRNQEVSGDYTIEAWTKFDFPGRGNTHSNFKWRWYHFDGVDWDQSRQLQNRIYKFRGKGWDWEVDTENGNYDYLMYADIDMDHAEVVNELRNWGVWYTNTLGLDGFRIDAVKHIKYSFTRDWLTHVRNTTGKNMFAVAEFWKNDIGAIENYLSKTNWNHSVFDVPLHYNLYNASRSGGNYDMRQIFNGTVVQRHPTHAVTFVDNHDSQPEEALESFVEEWFKPLAYALTLTRDQGYPSVFYGDYYGIPTHGVPAMKSKIDPILEARQKYAYGTQRDYLDHPDVIGWTREGDGVHADSGLATLMSDGPGGSKWMEVGKNNAGEVWYDITGNQTNTVTINKDGWGQFHVSGGSVSIYVQQ

SEQ ID NO: 24945 - protein, 483 aa, Bacillus licheniformis
HHNGTNGTMMQYFEWYLPNDGNHWNRLRSDASNLKDKGITAVWIPPAWKGASQNDVGYGAYDLYDLGEFNQKGTVRTKYGTRNQLQAAVTALKSNGIQVYGDVVMNHKGGADATEWVRAVEVNPSNRNQEVSGDYTIEAWTKFDFPGRGNTHSNFKWRWYHFDGVDWDQSRQLQNRIYKFRGKGWDWEVDTENGNYDYLMYADIDMDHPEVVNELRNWGVWYTNTLGLDGFRIDAVKHIKYSFTRDWLTHVRNTTGKNMFAVAEFWKNDIGAIENYLSKTNWNHSVFDVPLHYNLYNASRSGGNYDMRQIFNGTVVQRHPTHAVTFVDNHDSQPEEALESFVEEWFKPLAYALTLTRDQGGPSVFYGDYYGIPTHGVPAMKSKIDPILEARQKYAYGTQRDYLDHPDVIGWTREGDGVHADSGLATLMSDGPGGSKWMEVGKNNAGEVWYDITGNQTNTVTINKDGWGQFHVSGGSVSIYVQQ

SEQ ID NO: 24946 - protein, 483 aa, Bacillus licheniformis
HHNGTNGTMMQYFEWYLPNDGNHWNRLRSDASNLKDKGITAVWIPPAWKGASQNDVGYGAYDLYDLGEFNQKGTVRTKYGTRNQLQAAVTALKSNGIQVYGDVVMNHKGGADATEWVRAVEVNPSNRNQEVSGDYTIEAWTKFDFPGRGNTHSNFKWRWYHFDGVDWDQSRQLQNRIYKFRGKGWDWEVDTENGNYDYLMYADIDMDHPEVVNELRNWGVWYTNTLGLDGFRIDAVKHIKYSFTRDWLTHVRNTTGLNMFAVAEFWKNDIGAIENYLSKTNWNHSVFDVPLHYNLYNASRSGGNYDMRQIFNGTVVQRHPTHAVTFVDNHDSQPEEALESFVEEWFKPLAYALTLTRDQGYPSVFYGDYYGIPTHGVPAMKSKIDPILEARQKYAYGTQRDYLDHPDVIGWTREGDGVHADSGLATLMSDGPGGSKWMEVGKNNAGEVWYDITGNQTNTVTINKDGWGQFHVSGGSVSIYVQQ

SEQ ID NO: 24947 - protein, 483 aa, Bacillus licheniformis
HHNGTNGTMMQYFEWYLPNDGNHWNRLRSDASNLKDKGITAVWIPPAWKGASQNDVGYGAYDLYDLGEFNQKGTVRTKYGTRNQLQAAVTALKSNGIQVYGDVVMNHKGGADATEWVRAVEVNPSNRNQEVSGDYTIEAWTKFDFPGRGNTHSNFKWRWYHFDGVDWDQSRQLQNRIYKFRGKGWDWEVDTENGNYDYLMYADIDMDHPEVVNELRNWGVWYTMTLGLDGFRIDAVKHIKYSFTRDWLTHVRNTTGKNMFAVAEFWKNDIGAIENYLSKTNWNHSVFDVPLHYNLYNASRSGGNYDMRQIFNGTVVQRHPTHAVTFVDNHDSQPEEALESFVEEWFKPLAYALTLTRDQGYPSVFYGDYYGIPTHGVPAMKSKIDPILEARQKYAYGTQRDYLDHPDVIGWTREGDGVHADSGLATLMSDGPGGSKWMEVGKNNAGEVWYDITGNQTNTVTINKDGWGQFHVSGGSVSIYVQQ

SEQ ID NO: 24948 - protein, 483 aa, Bacillus licheniformis
HHNGTNGTMMQYFEWYLPNDGNHWNRLRSDASNLKDKGITAVWIPPAWKGASQNDVGYGAYDLYDLGEFNQKGTVRTKYGTRNQLQAAVTALKSNGIQVYGDVVMNHKGGADATEWVRAVEVNPSNRNQEVSGDYTIEAWTKFDFPGRGNTHSNFKWRWYHFDGVDWDQSRQLQNRIYKFRGKGWDWEVDTENGNYDYLMYADIDMDHPEVVNELRNWGVWYTNTLGLDGFRIDAVKHIKYSFTRDWLTHVRNTTGKNMFAVAEFWKNDIGAIENYLSKTNWNHSVFDVPLHYNLYNASRSEGNYDMRQIFNGTVVQRHPTHAVTFVDNHDSQPEEALESFVEEWFKPLAYALTLTRDQGYPSVFYGDYYGIPTHGVPAMKSKIDPILEARQKYAYGTQRDYLDHPDVIGWTREGDGVHADSGLATLMSDGPGGSKWMEVGKNNAGEVWYDITGNQTNTVTINKDGWGQFHVSGGSVSIYVQQ

SEQ ID NO: 24949 - protein, 483 aa, Bacillus licheniformis
HHNGTNGTMMQYFEWYLPNMGNHWNRLRSDASNLKDKGITAVWIPPAWKGASQNDVGYGAYDLYDLGEFNQKGTVRTKYGTRNQLQAAVTALKSNGIQVYGDVVMNHKGGADATEWVRAVEVNPSNRNQEVSGDYTIEAWTKFDFPGRGNTHSNFKWRWYHFDGVDWDQSRQLQNRIYKFRGKGWDWEVDTENGNYDYLMYADIDMDHPEVVNELRNWGVWYTNTLGLDGFRIDAVKHIKYSFTRDWLTHVRNTTGKNMFAVAEFWKNDIGAIENYLSKTNWNHSVFDVPLHYNLYNASRSGGNYDMRQIFNGTVVQRHPTHAVTFVDNHDSQPEEALESFVEEWFKPLAYALTLTRDQGYPSVFYGDYYGIPTHGVPAMKSKIDPILEARQKYAYGTQRDYLDHPDVIGWTREGDGVHADSGLATLMSDGPGGSKWMEVGKNNAGEVWYDITGNQTNTVTINKDGWGQFHVSGGSVSIYVQQ

SEQ ID NO: 24950 - protein, 483 aa, Bacillus licheniformis
HHNGTNGTMMQYFEWYLPNDGNHWNRLRSDASNLKDKGITAVWIPPAWKGASQNDVGYGAYDLYDLGEFNQKGTVRTKYGTRNQLQAAVTALKSNGIQVYGDVVMNHKGGADATEWVRAVEVNPSNRNQEVSGDYTIEAWTKFDFPGRGNTHSNFKWRWYHFDGVDWDQSRQLQNRIYKFRGKGWDWEVDTENGNYDYLMYADIDMDHPEVVNELRNWGVWYTNTLGLDGFRIDAVKHIKYSFTRDWLTHVRNTTGKNMFAVAEFWKNDIGAIENYLSKTNWNHHVFDVPLHYNLYNASRSGGNYDMRQIFNGTVVQRHPTHAVTFVDNHDSQPEEALESFVEEWFKPLAYALTLTRDQGYPSVFYGDYYGIPTHGVPAMKSKIDPILEARQKYAYGTQRDYLDHPDVIGWTREGDGVHADSGLATLMSDGPGGSKWMEVGKNNAGEVWYDITGNQTNTVTINKDGWGQFHVSGGSVSIYVQQ

SEQ ID NO: 24951 - protein, 483 aa, Bacillus licheniformis
HHNGTNGTMMQYFEWYLPNDGNHWNRLRSDASNLKDKGITAVWIPPAWKGASQNDVGYGAYDLYDLGEFNQKGTVRTKYGTRNQLQAAVTALKSNGIQVYGDVVMNHKGGADATEWVRAVEVNPSNRNQEVSGDYTIEAWTKFDFPGRGNTHSNFKWRWYHFDGVDWDQSRQLQNRIYKFRQKGWDWEVDTENGNYDYLMYADIDMDHPEVVNELRNWGVWYTNTLGLDGFRIDAVKHIKYSFTRDWLTHVRNTTGKNMFAVAEFWKNDIGAIENYLSKTNWNHSVFDVPLHYNLYNASRSGGNYDMRQIFNGTVVQRHPTHAVTFVDNHDSQPEEALESFVEEWFKPLAYALTLTRDQGYPSVFYGDYYGIPTHGVPAMKSKIDPILEARQKYAYGTQRDYLDHPDVIGWTREGDGVHADSGLATLMSDGPGGSKWMEVGKNNAGEVWYDITGNQTNTVTINKDGWGQFHVSGGSVSIYVQQ

SEQ ID NO: 24952 - protein, 483 aa, Bacillus licheniformis
HHNGTNGTMMQYFEWYLPNDGNHWNRLRSDASNLKDKGITAVWIPPAWKGASQNDVGYGAYDLYDLGEFNQKGTVRTKYGTRNQLQAAVTALKSNGIQVYGDVVMNHKGGADATEWVRAVEVNPSNRNQEVSGDYTIEAWTKFDFPGRGNTHSNFKWRWYHFDGVDWDQSRQLQNRIYKFRGKGWDWEVDTENGNYDYLMYADIDMDHPEVVNELRNWGVWYTNTLGLDGFRIDAVKHIKYSFTRDWLTHVRNTTGKNMFAVAEFWKNDIGAIENYLSKTNWNHSVFDVPLHYNLYNASRSGGNYDMRQIFNGTVVQRHPTHAVTFVDNHDSQPEEALESFVEEWFKPLAYALTLTEDQGYPSVFYGDYYGIPTHGVPAMKSKIDPILEARQKYAYGTQRDYLDHPDVIGWTREGDGVHADSGLATLMSDGPGGSKWMEVGKNNAGEVWYDITGNQTNTVTINKDGWGQFHVSGGSVSIYVQQ

SEQ ID NO: 24953 - protein, 483 aa, Bacillus licheniformis
HHNGTNGTMMQYFEWYLPNDGNHWNRLRSDASNLKDKGITAVWIPPAWKGASQNDVGYGAYDLYDLGEFNQKGTVRTKYGTRNQLQAAVTALKSNGIQVYGDVVMNHKGGADATEWVRAVEVNPSNRNQEVSGDYTIEAWTKFDFPGRGNTHSNFKWRWYHFDGVDWDQSRQLQNRIYKFRGKGWDWEVDTENGNYDYLMYADIDMDHPEVVNELRNWGVWYTNTLGLDGFRIDAVKHIKYSFTRDWLTHVRNTTGKNMFAVAEFWKNDIGAIENYLSKTNWNHSVFDVPLHYNLYNASRSGGNYDMRQIFNGTVVQRHPTHAVTFVDNHDSQPEEALESFVEEWFKPLAYALTLTRDQGYPSVFYGDYYGIPTHGVPAMKSKIDPILEARQKYAYGTQRDYLDHPDVIGWTREGDGVHADSGLATLMSDGPGGSKWMEVGKNNAGEVWYDITGNQTNTVTIPKDGWGQFHVSGGSVSIYVQQ

SEQ ID NO: 24954 - protein, 483 aa, Bacillus licheniformis
HHNGTNGTMMQYFEWYLPNDGNHWNRLRSDASNLKDKGITAVWIPPAWKGASQNDVGYGAYDLYDLGEFNQKGTVRTKYGTRNQLQAAVTALKSNGIQVYGDVVMNHKGGADAIEWVRAVEVNPSNRNQEVSGDYTIEAWTKFDFPGRGNTHSNFKWRWYHFDGVDWDQSRQLQNRIYKFRGKGWDWEVDTENGNYDYLMYADIDMDHPEVVNELRNWGVWYTNTLGLDGFRIDAVKHIKYSFTRDWLTHVRNTTGKNMFAVAEFWKNDIGAIENYLSKTNWNHSVFDVPLHYNLYNASRSGGNYDMRQIFNGTVVQRHPTHAVTFVDNHDSQPEEALESFVEEWFKPLAYALTLTRDQGYPSVFYGDYYGIPTHGVPAMKSKIDPILEARQKYAYGTQRDYLDHPDVIGWTREGDGVHADSGLATLMSDGPGGSKWMEVGKNNAGEVWYDITGNQTNTVTINKDGWGQFHVSGGSVSIYVQQ

SEQ ID NO: 24955 - protein, 483 aa, Bacillus licheniformis
HHNGTNGTMMQYFEWYLPNDGNHWNRLRSDASNLKDKGITAVWIPPAWKGASQNDVGYGAYDLYDLGEFNQKGTVRTKYGTRNQLQAAVTALKSNGIQVYGDVVMNHKGGADATEWVRAVEVNPSNRNQEVSGDYTIEAWTKFDFPGRGNTHSNFKWRWYHFDGVDWDQSRQLQNRIYKFRGKGWDWEVDTENGNYDYLMYADIDMDHPEVVNELRNWGVWYTNTLGLDGFRIDAVKHIKYSFTRDWLTHVRNTTGKNMFAVAEFWKNDIGAIENYLSKTNWNHSVFDVPLHYNLYNASRSGGNYDMRQIFNGTVVQRHPTHAVTFVDNHDSQPEEALESFVEEWFKPLAYALTLTRDQGYPSVFYGDYYGIPTHGVPAMKSKIDPILEARQKYAYGTQRDYLDHPDVIGWTREGDGVHADSGLATLMSDGPGGSKWMEVGKQNAGEVWYDITGNQTNTVTINKDGWGQFHVSGGSVSIYVQQ

SEQ ID NO: 24956 - protein, 483 aa, Bacillus licheniformis
HHNGTNGTMMQYFEWYLPNDGNHWNRLRSDASNLKDKGITAVWIPPAWKGASQNDVGYGAYDLYDLGEFNQKGTVRTKYGTRNQLQAAVTALKSNGIQVYGDVVMNHKGGADATEWVRAVEVNPSNRNQEVSGDYTIEAWTKFDFPGRGNTHSNFKWRWYHFDGVDWDQSRQLQNRIYKFRGKGWDWEVDTENGNYDYLMYADIDMDHPEVVNELRNWGVWYTNKLGLDGFRIDAVKHIKYSFTRDWLTHVRNTTGKNMFAVAEFWKNDIGAIENYLSKTNWNHSVFDVPLHYNLYNASRSGGNYDMRQIFNGTVVQRHPTHAVTFVDNHDSQPEEALESFVEEWFKPLAYALTLTRDQGYPSVFYGDYYGIPTHGVPAMKSKIDPILEARQKYAYGTQRDYLDHPDVIGWTREGDGVHADSGLATLMSDGPGGSKWMEVGKNNAGEVWYDITGNQTNTVTINKDGWGQFHVSGGSVSIYVQQ

SEQ ID NO: 24957 - protein, 483 aa, Bacillus licheniformis
HHNGTNGTMMQYFEWYLPNDGNHWNRLRSDASNLKDKGITAVWIPPAWKGASQNDVGYGAYDLYDLGEFNQKGTVRTKYGTRNQLQAAVTALKSNGIQVYGDVVMNHKGGADATEWVRAVEVNPSNRNQEVSGDYTIEAWTKFDFLGRGNTHSNFKWRWYHFDGVDWDQSRQLQNRIYKFRGKGWDWEVDTENGNYDYLMYADIDMDHPEVVNELRNWGVWYTNTLGLDGFRIDAVKHIKYSFTRDWLTHVRNTTGKNMFAVAEFWKNDIGAIENYLSKTNWNHSVFDVPLHYNLYNASRSGGNYDMRQIFNGTVVQRHPTHAVTFVDNHDSQPEEALESFVEEWFKPLAYALTLTRDQGYPSVFYGDYYGIPTHGVPAMKSKIDPILEARQKYAYGTQRDYLDHPDVIGWTREGDGVHADSGLATLMSDGPGGSKWMEVGKNNAGEVWYDITGNQTNTVTINKDGWGQFHVSGGSVSIYVQQ

SEQ ID NO: 24958 - protein, 483 aa, Bacillus licheniformis
HHNGTNGTMMQYFEWYLPNDGNHWNRLRSDASLLKDKGITAVWIPPAWKGASQNDVGYGAYDLYDLGEFNQKGTVRTKYGTRNQLQAAVTALKSNGIQVYGDVVMNHKGGADATEWVRAVEVNPSNRNQEVSGDYTIEAWTKFDFPGRGNTHSNFKWRWYHFDGVDWDQSRQLQNRIYKFRGKGWDWEVDTENGNYDYLMYADIDMDHPEVVNELRNWGVWYTNTLGLDGFRIDAVKHIKYSFTRDWLTHVRNTTGKNMFAVAEFWKNDIGAIENYLSKTNWNHSVFDVPLHYNLYNASRSGGNYDMRQIFNGTVVQRHPTHAVTFVDNHDSQPEEALESFVEEWFKPLAYALTLTRDQGYPSVFYGDYYGIPTHGVPAMKSKIDPILEARQKYAYGTQRDYLDHPDVIGWTREGDGVHADSGLATLMSDGPGGSKWMEVGKNNAGEVWYDITGNQTNTVTINKDGWGQFHVSGGSVSIYVQQ

SEQ ID NO: 24959 - protein, 483 aa, Bacillus licheniformis
HHNGTNGTMMQYFEWYLPNDGNHWNRLRSDASNLKDKGITAVWIPPAWKGASQNDVGYGAYDLYDLGEFNQKGTVRTKYGTRNQLQAAVTALKSNGIQVYGDVVMNHKGGADRTEWVRAVEVNPSNRNQEVSGDYTIEAWTKFDFPGRGNTHSNFKWRWYHFDGVDWDQSRQLQNRIYKFRGKGWDWEVDTENGNYDYLMYADIDMDHPEVVNELRNWGVWYTNTLGLDGFRIDAVKHIKYSFTRDWLTHVRNTTGKNMFAVAEFWKNDIGAIENYLSKTNWNHSVFDVPLHYNLYNASRSGGNYDMRQIFNGTVVQRHPTHAVTFVDNHDSQPEEALESFVEEWFKPLAYALTLTRDQGYPSVFYGDYYGIPTHGVPAMKSKIDPILEARQKYAYGTQRDYLDHPDVIGWTREGDGVHADSGLATLMSDGPGGSKWMEVGKNNAGEVWYDITGNQTNTVTINKDGWGQFHVSGGSVSIYVQQ

SEQ ID NO: 24960 - protein, 483 aa, Bacillus licheniformis
HHNGTNGTMMQYFEWYLPNDGNHWNRLRSDASNLKDKGITAVWIPPAWKGASQNDVGYGAYDLYDLGEFNQKGTVRTKYGTRNQLQAAVTALKSNGIQVYGDVVMNHKGGADATEWVRAVEVNPSNRNQEVSGDYTIEAWTKFDFPGRGNTHSNFKWRWYHFDGVDWDQSRQLQNRIYKFRGKGWDWEVDTENGNYDYLMYADIDMDHPEVVNELRNWGVWYTNTLGLDGFRIDAVKHIKYSFTRDWLTHVRNTTGKNMFAVAEFWKNDIGAIENYLSKTNWNHSVFDVPLHYNLYNASRHGGNYDMRQIFNGTVVQRHPTHAVTFVDNHDSQPEEALESFVEEWFKPLAYALTLTRDQGYPSVFYGDYYGIPTHGVPAMKSKIDPILEARQKYAYGTQRDYLDHPDVIGWTREGDGVHADSGLATLMSDGPGGSKWMEVGKNNAGEVWYDITGNQTNTVTINKDGWGQFHVSGGSVSIYVQQ

SEQ ID NO: 24961 - protein, 483 aa, Bacillus licheniformis
HHNGTNGTMMQYFEWYLPNDGNHWNRLRSDASNLKDKGITAVWIPPAMKGASQNDVGYGAYDLYDLGEFNQKGTVRTKYGTRNQLQAAVTALKSNGIQVYGDVVMNHKGGADATEWVRAVEVNPSNRNQEVSGDYTIEAWTKFDFPGRGNTHSNFKWRWYHFDGVDWDQSRQLQNRIYKFRGKGWDWEVDTENGNYDYLMYADIDMDHPEVVNELRNWGVWYTNTLGLDGFRIDAVKHIKYSFTRDWLTHVRNTTGKNMFAVAEFWKNDIGAIENYLSKTNWNHSVFDVPLHYNLYNASRSGGNYDMRQIFNGTVVQRHPTHAVTFVDNHDSQPEEALESFVEEWFKPLAYALTLTRDQGYPSVFYGDYYGIPTHGVPAMKSKIDPILEARQKYAYGTQRDYLDHPDVIGWTREGDGVHADSGLATLMSDGPGGSKWMEVGKNNAGEVWYDITGNQTNTVTINKDGWGQFHVSGGSVSIYVQQ

SEQ ID NO: 24962 - protein, 483 aa, Bacillus licheniformis
HHNGTNGTMMQYFEWYLPNDGNHWNRLRSDASNLKDKGITAVWIPPAWKGASQNDVGYGAYDLYDLGEFNQKGTVRTKYGTRNQLQAAVTALKSNGIQVYGDVVMNHKGGADATEWVRAVEVNPSNRNQEVSGDYTIEAWTKFDFPGRGNTHSNFKWRWYHFDGVDWDQSRQLQNRIYKFRGKGWDWEVDTENGNYDYLMYADIDMDHPEVVNELRNWGVWYTNTLGLDGFRIDAVKHIKYSFTRDWLTHVRNTTGKNMFAVAEFWKNDIGAIENYLSKTNWNHSVFDVPLHYNLYNASRSGGNYDMRQIFNGTVVQRHPTHAVTFVDNHDSQPEEALESFVEHWFKPLAYALTLTRDQGYPSVFYGDYYGIPTHGVPAMKSKIDPILEARQKYAYGTQRDYLDHPDVIGWTREGDGVHADSGLATLMSDGPGGSKWMEVGKNNAGEVWYDITGNQTNTVTINKDGWGQFHVSGGSVSIYVQQ

SEQ ID NO: 24963 - protein, 483 aa, Bacillus licheniformis
HHNGTNGTMMQYFEWYLPNDGNHWNRLRSDASNLKDKGITAVWIPPAWKGASQNDVGYGAYDLYDLGEFNQKGTVRTKYGTRNQLQAAVTALKSNGIQVYGDVVMNHKGGADATEWVRAVEVNPSNRNQEVSGDYTIEAWTKFDFPGRGNTHSNFKWRWYHFDGVDWDQSRQLQNRIYKFRGKGWDWEVDTENGNYDYLMYADIDMDHPEVVNELRNWGVWYTNTLGLDGFRIDAVKHIKYSFTRDWLTHVRNTTGKNMFAVAEFWKNDIGAIENYLSKTNWNHSVFDVPLHYNLYNASRSGGNYDMRQIFNGTVVQRHPTHAVTFVDNHDSQPEEALESFVEEWFKPLAYALTLTRDQGYPSVFYGDYYGIPTHGVPAMKSKIDPILEARQKYAYGTQRDYLDHPDVIGWTREGDGVHADSGLATLMSDGPGGSKWMEVGKNNAGEVWYDITGSQTNTVTINKDGWGQFHVSGGSVSIYVQQ

SEQ ID NO: 24964 - protein, 483 aa, Bacillus licheniformis
HHNGTNGFMMQYFEWYLPNDGNHWNRLRSDASNLKDKGITAVWIPPAWKGASQNDVGYGAYDLYDLGEFNQKGTVRTKYGTRNQLQAAVTALKSNGIQVYGDVVMNHKGGADATEWVRAVEVNPSNRNQEVSGDYTIEAWTKFDFPGRGNTHSNFKWRWYHFDGVDWDQSRQLQNRIYKFRGKGWDWEVDTENGNYDYLMYADIDMDHPEVVNELRNWGVWYTNTLGLDGFRIDAVKHIKYSFTRDWLTHVRNTTGKNMFAVAEFWKNDIGAIENYLSKTNWNHSVFDVPLHYNLYNASRSGGNYDMRQIFNGTVVQRHPTHAVTFVDNHDSQPEEALESFVEEWFKPLAYALTLTRDQGYPSVFYGDYYGIPTHGVPAMKSKIDPILEARQKYAYGTQRDYLDHPDVIGWTREGDGVHADSGLATLMSDGPGGSKWMEVGKNNAGEVWYDITGNQTNTVTINKDGWGQFHVSGGSVSIYVQQ

SEQ ID NO: 24965 - protein, 483 aa, Bacillus licheniformis
HHNGTNGTMMQYFEWYLPNDGNHWNRLRSDASNLKDKGITAVWIPPAWKGASQNDVGYGAYDLYDLGEFNQKGTVRTKYGTRNQLQDAVTALKSNGIQVYGDVVMNHKGGADATEWVRAVEVNPSNRNQEVSGDYTIEAWTKFDFPGRGNTHSNFKWRWYHFDGVDWDQSRQLQNRIYKFRGKEWDWEVDTENGNYDYLMYADIDMDHPEVVNELRNWGVWYTNTLGLDGFRIDAVKHIKYSFTRDWLTHVRNTTGKNMFAVAEFWKNDIGAIENYLSKTNWNHSVFDVPLHYNLYNASRSGGNYDMRQIFNKTVVQRHPTHAVTFVDNHDSQPEEALESFVEEWFKPLAYALTLTRDQGYPSVFYGDYYGIPTHGVPAMKSKIDPILEARQKYAYGTQRDYLDHPDVIGWTREGDGKHADSGLATLMSDGPGGSKWMEVGKNNAGEVWYDITGNQTNTVTINKDGWGQFHVSGGSVSIYVQQ

SEQ ID NO: 24966 - protein, 483 aa, Bacillus licheniformis
HHNGTNGTMMQYFEWYLPNDGNHWNRLRSDASNLKDKGITAVWIPPAWKGASQNDVGYGAYDLYDLGEFNQKGTVRTKYGTRNQLQAAVTALKSNGIQVYGDVVMNHKGGADATEWVRAVEVNPSNRNQEVSGDYTIEAWTKFDFPGRGNTHSNFKWRWYHFDGVDWDQSRQLQNRIYKFRGKGWDWEVDTENGNYDYLMYADIDMDHPEVVNELRNWGVWYTNTLGLDGFRIDAVKHIKYSFTRDWLTHVRNTTGKNMFAVAEFWKNDIGAIENYLSKTNWNHSVFDVPLHYNLYNASRSGGNYDMRQIFNGTVVQRHPTHAVTFVDNHDSQPEEALESFVEEWFKKLAYALTLTRDQGYPSVFYGDYYGIPTHGVPAMKSKIDPILEARQKYAYGTQRDYLDHPDVIGWTREGDGVHADSGLATLMSDGPGGSKWMEVGKNNAGEVWYDITGNQTNTVTINKDGWGQFHVSGGSVSIYVQQ

SEQ ID NO: 24967 - protein, 483 aa, Bacillus licheniformis
HHNGTNGTMMQYFEWYLPNDGNHWNRLRSDASNLKDKGITAVWIPPAWKGASQNDVGYGAYDLYDLGEFNQKGTVRTKYGTRNQLQAAVTALKSNGIQVYGDVVMNHKGGADATEWVRAVEVNPSNRNQEVSGDYTIEAWTKFDFPGRGNTHSNFKWRWYHFDGVDWDQSRQLQNRIYKFRGKGWDWEVDTENGNYDYLMYADIDMDHPEVVNELRNWGVWYTNTLGLDGFRIDAVKHIKYSFTRDWLTHVRNTTGKNMFAVAEFWKNDIGAIENYLSKTNWNHSVFDVPLHYNLYNASRSGGNYDMRQIFNGTVVQRHPTHAVTFVDNHDSQPEEALESFVEEWFKPLAYALTLTRDQGYTSVFYGDYYGIPTHGVPAMKSKIDPILEARQKYAYGTQRDYLDHPDVIGWTREGDGVHADSGLATLMSDGPGGSKWMEVGKNNAGEVWYDITGNQTNTVTINKDGWGQFHVSGGSVSIYVQQ

SEQ ID NO: 24968 - protein, 483 aa, Bacillus licheniformis
HHNGTNGTMMQYFEWYLPNDGNHWNRLRSFASNLKDKGITAVWIPPAWKGASQNDVGYGAYDLYDLGEFNQKGTVRTKYGTRNQLQAAVTALKSNGIQVYGDVVMNHKGGADATEWVRAVEVNPSNRNQEVSGDYTIEAWTKFDFPGRGNTHSNFKWRWYHFDGVDWDQSRQLQNRIYKFRGKGWDWEVDTENGNYDYLMYADIDMDHPEVVNELRNWGVWYTNTLGLDGFRIDAVKHIKYSFTRDWLTHVRNTTGKNMFAVAEFWKNDIGAIENYLSKTNWNHSVFDVPLHYNLYNASRSGGNYDMRQIFNGTVVQRHPTHAVTFVDNHDSQPEEALESFVEEWFKPLAYALTLTRDQGYPSVFYGDYYGIPTHGVPAMKSKIDPILEARQKYAYGTQRDYLDHPDVIGWTREGDGVHADSGLATLMSDGPGGSKWMEVGKNNAGEVWYDITGNQTNTVTINKDGWGQFHVSGGSVSIYVQQ

SEQ ID NO: 24969 - protein, 483 aa, Bacillus licheniformis
HHNGTNGTMMQYFEWYLPNDGNHWNRLRSDASNLKDKGITAVWIPPAWKGASQNDVGYGAYDLYDLGEFNQKGTVRTKYGTRNQLQAAVTALKSNGIQVYGDVVMNHKGGADATEWVRAVEVNPSDRNQEVSGDYTIEAWTKFDFPGRGNTHSNFKWRWYHFDGVDWDQSRQLQNRIYKFRGKGWDWEVDTENGNYDYLMYADIDMDHPEVVNELRNWGVWYTNTLGLDGFRIDAVKHIKYSFTRDWLTHVRNTTGKNMFAVAEFWKNDIGAIENYLSKTNWNHSVFDVPLHYNLYNASRSGGNYDMRQIFNGTVVQRHPTHAVTFVDNHDSQPEEALESFVEEWFKPLAYALTLTRDQGYPSVFYGDYYGIPTHGVPAMKSKIDPILEARQKYAYGTQRDYLDHPDVIGWTREGDGVHADSGLATLMSDGPGGSKWMEVGKNNAGEVWYDITGNQTNTVTINKDGWGQFHVSGGSVSIYVQQ

SEQ ID NO: 24970 - protein, 483 aa, Bacillus licheniformis
HHNGTNGTMMQYFEWYLPNDGNHWNRLRSDASNLKDKGITAVWIPPAWKGASQNDVGYGAYDLYDLGEFNQKGTVRTKYGTRNQLQAAVTALKSNGIQVYGDVVMNHKGGADATEWVRAVEVNPSNRNQEVSGDYTIEAWTKFDFPGRGNTHSNFKWRWYHFDGVDWDQSRQLQNRIYKFRGKGWDWEVDTENGNYDYLMYADIDMDHPEVVNELRNWGVWYTNTLGLDGFRIDAVKHIKYSFTRDWLTHVRNTTGKNMFAVAEFWKNDIGAIENYLSKTNWNHSVFDVPLHYNLYNASRSGGNYDMRQIFNGTVVQRHPTHAVTFVDNHDSQPEEALESFVEEWFKPLAYALTLTRDQGYPSVFYGDYYGIPTHGVPAMKSKIDPILEARQKYAYGTQRDYLDHPDVIGWTREGDGVHADSGLATLMSDGPGGSKWMEVGKNNAGEVWYDITGNQTNTKTINKDGWGQFHVSGGSVSIYVQQ

SEQ ID NO: 24971 - protein, 483 aa, Bacillus licheniformis
HHNGTNGTMMQYFEWYLPNDGNHWNRLRSDASNLKDKGITAVWIPPAWKGASQNDVGYGAYDLYDLGEFNQKGTVRTKYGTRNQLQAAVTALKSNGIGVYGDVVMNHKGGADATEWVRAVEVNPSNRNQEVSGDYTIEAWTKFDFPGRGNTHSNFKWRWYHFDGVDWDQSRQLQNRIYKFRGKGWDWEVDTENGNYDYLMYADIDMDHPEVVNELRNWGVWYTNTLGLDGFRIDAVKHIKYSFTRDWLTHVRNTTGKNMFAVAEFWKNDIGAIENYLSKTNWNHSVFDVPLHYNLYNASRSGGNYDMRQIFNGTVVQRHPTHAVTFVDNHDSQPEEALESFVEEWFKPLAYALTLTRDQGYPSVFYGDYYGIPTHGVPAMKSKIDPILEARQKYAYGTQRDYLDHPDVIGWTREGDGVHADSGLATLMSDGPGGSKWMEVGKNNAGEVWYDITGNQTNTVTINKDGWGQFHVSGGSVSIYVQQ

SEQ ID NO: 24972 - protein, 483 aa, Bacillus licheniformis
HHNGTNGTMMQYFEWYLPNDGNHWNRLRSDASNLKDKGITAVWIPPAWKGASQNDVGYGAYDLYDLGEFNQKLTVRTKYGTRNQLQAAVTALKSNGIQVYGDVVMNHKGGADATEWVRAVEVNPSNRNQEVSGDYTIEAWTKFDFPGRGNTHSNFKWRWYHFDGVDWDQSRQLQNRIYKFRGKGWDWEVDTENGNYDYLMYADIDMDHPEVVNELRNWGVWYTNTLGLDGFRIDAVKHIKYSFTRDWLTHVRNTTGKNMFAVAEFWKNDIGAIENYLSKTNWNHSVFDVPLHYNLYNASRSGGNYDMRQIFNGTVVQRHPTHAVTFVDNHDSQPEEALESFVEEWFKPLAYALTLTRDQGYPSVFYGDYYGIPTHGVPAMKSKIDPILEARQKYAYGTQRDYLDHPDVIGWTREGDGVHADSGLATLMSDGPGGSKWMEVGKNNAGEVWYDITGNQTNTVTINKDGWGQFHVSGGSVSIYVQQ

SEQ ID NO: 24973 - protein, 483 aa, Bacillus licheniformis
HHNGTNGTMMQYFEWYLPNDGNHWNRLRSDASNLKDKGITAVWIPPAWKGASQNDVGYGAYDLYDLGEFNQKGTVRTKYGTRNQLQAAVTALKSNGIQVYGDVVMNHKGGADATEWVRAVEVNPSNRNQEVSGDYTIEAWTKFDFPGRGNTHSNFKWRWYHFDGVDWDQSRQLQNRIYKFRGKGWDWEVDTENGNYDYLMYADIDMDHPEVVNELVNWGVWYTNTLGLDGFRIDAVKHIKYSFTRDWLTHVRNTTGKNMFAVAEFWKNDIGAIENYLSKTNWNHSVFDVPLHYNLYNASRSGGNYDMRQIFNGTVVQRHPTHAVTFVDNHDSQPEEALESFVEEWFKPLAYALTLTRDQGYPSVFYGDYYGIPTHGVPAMKSKIDPILEARQKYAYGTQRDYLDHPDVIGWTREGDGVHADSGLATLMSDGPGGSKWMEVGKNNAGEVWYDITGNQTNTVTINKDGWGQFHVSGGSVSIYVQQ

SEQ ID NO: 24974 - protein, 483 aa, Bacillus licheniformis
HHNGTNGTMMQYFEWYLPNDGNHWNRLRSDASNLKDKGITAVWIPPAWKGASQNDVGYGAYDLYDLGEFNQKGTVRTKYGTRNQLQAAVTALKSNGIQVYGDVVMNHKGGADATEWVRAVEVNPSNRNQEVSGDYTIEAWTKFDFPGRGNTHSNFKWRWYHFDGVDWDQSRQLQNRIYKFRGKGWDWEVDTENGNYDYLMYADIDMDHPEVVNELRNWGVWYTNTLGLDGFRIDAVKHIKYSFTRDWLTHVRNTTGKNMFAVAEFWKNDIGAIENYLSKTNWNHSVFDVPLHYNLYNASRSGGNYDMRQIFNGTVVQRHPTHAVTFVDNHDSQPEEALESFVEEWFKPLAYALTLTRDQGYPSVFYGDYCGIPTHGVPAMKSKIDPILEARQKYAYGTQRDYLDHPDVIGWTREGDGVHADSGLATLMSDGPGGSKWMEVGKNNAGEVWYDITGNQTNTVTINKDGWGQFHVSGGSVSIYVQQ

SEQ ID NO: 24975 - protein, 483 aa, Bacillus licheniformis
HHNGTNGTMMQYFEWYLPNDGNHWNRLRSDASNLKDKGITAVWIPPAWKGASQNDVGYGAYDLYDLGEFNQKGTVRTKYGTRNQLQAAVTALKSNGIQVYGDVVMNHKGGADAWEWVRAVEVNPSNRNQEVSGDYTIEAWTKFDFPGRGNTHSNFKWRWYHFDGVDWDQSRQLQNRIYKFRGKGWDWEVDTENGNYDYLMYADIDMDHPEVVNELRNWGVWYTNTLGLDGFRIDAVKHIKYSFTRDWLTHVRNTTGKNMFAVAEFWKNDIGAIENYLSKTNWNHSVFDVPLHYNLYNASRSGGNYDMRQIFNGTVVQRHPTHAVTFVDNHDSQPEEALESFVEEWFKPLAYALTLTRDQGYPSVFYGDYYGIPTHGVPAMKSKIDPILEARQKYAYGTQRDYLDHPDVIGWTREGDGVHADSGLATLMSDGPGGSKWMEVGKNNAGEVWYDITGNQTNTVTINKDGWGQFHVSGGSVSIYVQQ

SEQ ID NO: 24976 - protein, 483 aa, Bacillus licheniformis
HHNGTNGTMMQYFEWYLPNDGNHWNRLRSDASNLKDKGITAVWIPPAWKGASQNDVGYGAYDLYDLGEFNQKGTVRTKYGTRNQLQAAVTALKSNGIQVYGDVVMNHKGGADATEWVRAVEVNPSNRNQEVSGDYTIEAWTKFDFPGRGNTHSNFKWRWYHFDGVDWDQSRQLQNRIYKFRGKGWDWEVDTENGNYDYLMYADIDMDHPEVVNELRNWGVWYTNTLGLDGFRIDAVKHIKYSFTRDWLTHVRNTTGKNMFAVAEFWKNDIGAIENYLSKTNWNHSVFDVPLHYNLYNASRSGGNYDMRQIFNGTVVQRKPTHAVTFVDNHDSQPEEALESFVEEWFKPLAYALTLTRDQGYPSVFYGDYYGIPTHGVPAMKSKIDPILEARQKYAYGTQRDYLDHPDVIGWTREGDGVHADSGLATLMSDGPGGSKWMEVGKNNAGEVWYDITGNQTNTVTINKDGWGQFHVSGGSVSIYVQQ

SEQ ID NO: 24977 - protein, 483 aa, Bacillus licheniformis
HHNGTNGTMMQYFEWYLPNDGNHWNRLRSDASNLKDKGITAVWIPPAWKGASQNDVGYGAYDLYDLGEFNQKGTVRTKYGTRNQLQAAVTALKSNGIQVYGDVVMNHKGGADATEWVRAVEVNPSNRNQEVSGDYTIEAWTKFDFPGRGNTHSNFKWRWYHFDGVDWDQSRQLQNRIYKFRGKGWDWEVDTENGNYDYLMYADIDMDHPEVVNELRNWGVWYTGTLGLDGFRIDAVKHIKYSFTRDWLTHVRNTTGKNMFAVAEFWKNDIGAIENYLSKTNWNHSVFDVPLHYNLYNASRSGGNYDMRQIFNGTVVQRHPTHAVTFVDNHDSQPEEALESFVEEWFKPLAYALTLTRDQGYPSVFYGDYYGIPTHGVPAMKSKIDPILEARQKYAYGTQRDYLDHPDVIGWTREGDGVHADSGLATLMSDGPGGSKWMEVGKNNAGEVWYDITGNQTNTVTINKDGWGQFHVSGGSVSIYVQQ

SEQ ID NO: 24978 - protein, 483 aa, Bacillus licheniformis
HHNGTNGTMMQYFEWYLPNDGNHWNRLRSDASNLKDKGITAVWIPPAWKGASQNDVGYGAYDLYDLGEFNQKGTVRTKYGTRNQLQAAVTALKSNGIQVYGDVVMNHKGGADATEWVRAVEVNPSNRNQEVSGDYTIEAWTKFDFPGRGNTHSNFKWRWYHFDGVDWDQSRQLQNRIYKFRGKGWDWEVDTENGNYDYLMYADIDMDHPEVVNELRNWGVWYTNTLGLNGFRIDAVKHIKYSFTRDWLTHVRNTTGKNMFAVAEFWKNDIGAIENYLSKTNWNHSVFDVPLHYNLYNASRSGGNYDMRQIFNGTVVQRHPTHAVTFVDNHDSQPEEALESFVEEWFKPLAYALTLTRDQGYPSVFYGDYYGIPTHGVPAMKSKIDPILEARQKYAYGTQRDYLDHPDVIGWTREGDGVHADSGLATLMSDGPGGSKWMEVGKNNAGEVWYDITGNQTNTVTINKDGWGQFHVSGGSVSIYVQQ

SEQ ID NO: 24979 - protein, 483 aa, Bacillus licheniformis
HHNGTNGTMMQYFEWYLPNDGNHWNRLRSDASNLKDKGITAVWIPPAWKGASQNDVGYGAYDLYDLGEFNQKGTVRTKYGTRNQLQAAVTALKSNGIQVYGDVVMNHKGGADATEWVRAVEVNPSNRNQEVSGDYTIEAWTKFDFPGRGNTHSNFKWRWYHFDGVDWDQSRQLQNRIYKFRGKGWDWEVDTENGNYDYLMYADIDMDHPEVVNELRNWGVWYTNTLGLDGFRIDAVKHIKYSFTRDWLTHVRNTTGKNMFAVAEFWKNDIGAIENYLSKTNWNHSVFDVPLHYNLYNASRSGGNYDMRQIFNGTVVQRHPTHAVTFVDNHDSQPEEALESFVEEWFKPLCYALTLTRDQGYPSVFYGDYYGIPTHGVPAMKSKIDPILEARQKYAYGTQRDYLDHPDVIGWTREGDGVHADSGLATLMSDGPGGSKWMEVGKNNAGEVWYDITGNQTNTVTINKDGWGQFHVSGGSVSIYVQQ

SEQ ID NO: 24980 - protein, 483 aa, Bacillus licheniformis
HHNGTNGTMMQYFEWYLPNDGNHWNRLRSDASNLKDKGITAVWIPPAWKGASQNDVGYGAYDLYDLGEFNQKGTVRTKYGTRNQLQAAVTALKSNGIQVYGDVVMNHKGGADATEWVRAVEVNPSNRNQEVSGDYTIEAWTKFDFPGRGNTHSNFKWRWYHFDGVDWDESRQLQNRIYKFRGKGWDWEVDTENGNYDYLMYADIDMDHPEVVNELRNWGVWYTNTLGLDGFRIDAVKHIKYSFTRDWLTHVRNTTGKNMFAVAEFWKNDIGAIENYLSKTNWNHSVFDVPLHYNLYNASRSGGNYDMRQIFNGTVVQRHPTHAVTFVDNHDSQPEEALESFVEEWFKPLAYALTLTRDQGYPSVFYGDYYGIPTHGVPAMKSKIDPILEARQKYAYGTQRDYLDHPDVIGWTREGDGVHADSGLATLMSDGPGGSKWMEVGKNNAGEVWYDITGNQTNTVTINKDGWGQFHVSGGSVSIYVQQ

SEQ ID NO: 24981 - protein, 483 aa, Bacillus licheniformis
HHNGTNGTMMQYFEWYLPNDGNHWNRLRSDASNLKDKGITAVWIPPAWKGASQNDVGYGAYDLYDLGEFNQKGTVRTKYGTRNQLQAAVTALKSNGIQVYGDVVMNHKGGADATEWVRAVEVNPSNRNQEVSGDYTIEAWTKFDFPGRGNTHSNFKWRWYHFDGVDWDQSRQLQNRIYKFRGKEWDWEVDTENGNYDYLMYADIDMDHPEVVNELRNWGVWYTNTLGLDGFRIDAVKHIKYSFTRDWLEHVRNTTGKNMFAVAEFWKNDIGAIENYLSKTNWNHSVFDVPLHYNLYNASRSGGNYDMRQIFNGTVVQRHPTHAVTFVDNHDSQPEEALESFVEEWFKPLAYALTLTRDQGYPSVFYGDYYGIPTHGVPAMKSKIDPILEARQKYAYGTQRDYLDHPDVIGWTREGDGVHADSGLATLMSDGPGGSKWMEVGKNNAGEVWYDITGNQTNTVTINKDGWGQFHVSGGSVSIYVQQ

SEQ ID NO: 24982 - protein, 483 aa, Bacillus licheniformis
HHNGTNGTMMQYFEWYLPNDGNHWNRLRSDASNLKDKGITAVWIPPAWKGASQNDVGYGAYDLYDLGEFNQKGTVRTKYGTRNQLQAAVTALKSNGIQVYGDVVMNHKGGADAEEWVRAVEVNPSNRNQEVSGDYTIEAWTKFDFPGRGNTHSNFKWRWYHFDGVDWDQSRQLQNRIYKFRGKGWDWEVDTENGNYDYLMYADIDMDHPEVVNELRNWGVWYTNTLGLDGFRIDAVKHIKYSFTRDWLTHVRNTTGKNMFAVAEFWKNDIGAIENYLSKTNWNHSVFDVPLHYNLYNASRSGGNYDMRQIFNGTVVQRHPTHAVTFVDNHDSQPEEALESFVEEWFKPLAYALTLTRDQGYPSVFYGDYYGIPTHGVPAMKSKIDPILEARQKYAYGTQRDYLDHPDVIGWTREGDGVHADSGLATLMSDGPGGSKWMEVGKNNAGEVWYDITGNQTNTVTINKDGWGQFHVSGGSVSIYVQQ

SEQ ID NO: 24983 - protein, 483 aa, Bacillus licheniformis
HHNGTNYTMMQYFEWYLPNDGNHWNRLRSDASNLKDKGITAVWIPPAWKGASQNDVGYGAYDLYDLGEFNQKGTVRTKYGTRNQLQAAVTALKSNGIQVYGDVVMNHKGGADATEWVRAVEVNPSNRNQEVSGDYTIEAWTKFDFPGRGNTHSNFKWRWYHFDGVDWDQSRQLQNRIYKFRGKGWDWEVDTENGNYDYLMYADIDMDHPEVVNELRNWGVWYTNTLGLDGFRIDAVKHIKYSFTRDWLTHVRNTTGKNMFAVAEFWKNDIGAIENYLSKTNWNHSVFDVPLHYNLYNASRSGGNYDMRQIFNGTVVQRHPTHAVTFVDNHDSQPEEALESFVEEWFKPLAYALTLTRDQGYPSVFYGDYYGIPTHGVPAMKSKIDPILEARQKYAYGTQRDYLDHPDVIGWTREGDGVHADSGLATLMSDGPGGSKWMEVGKNNAGEVWYDITGNQTNTVTINKDGWGQFHVSGGSVSIYVQQ

SEQ ID NO: 24984 - protein, 483 aa, Bacillus licheniformis
HHNGTNGTMMQYFEWYLPNDGNHWNRLRSDASNLKDKGITAVWIPPAWKGASQNDVGYGAYDLYDLGEFNQKGTVGTKYGTRNQLQAAVTALKSNGIQVYGDVVMNHKGGADATEWVRAVEVNPSNRNQEVSGDYTIEAWTKFDFPGRGNTHSNFKWRWYHFDGVDWDQSRQLQNRIYKFRGKGWDWEVDTENGNYDYLMYADIDMDHPEVVNELRNWGVWYTNTLGLDGFRIDAVKHIKYSFTRDWLTHVRNTTGKNMFAVAEFWKNDIGAIENYLSKTNWNHSVFDVPLHYNLYNASRSGGNYDMRQIFNGTVVQRHPTHAVTFVDNHDSQPEEALESFVEEWFKPLAYALTLTRDQGYPSVFYGDYYGIPTHGVPAMKSKIDPILEARQKYAYGTQRDYLDHPDVIGWTREGDGVHADSGLATLMSDGPGGSKWMEVGKNNAGEVWYDITGNQTNTVTINKDGWGQFHVSGGSVSIYVQQ

SEQ ID NO: 24985 - protein, 483 aa, Bacillus licheniformis
HHNGTNGTMMQYFEWYLPNDGNHWNRLRSDASNLKDKGITAVWIPPAWKGASQNDVGYGAYDLYDLGEFNQTGTVRTKYGTRNQLQAAVTALKSNGIQVYGDVVMNHKGGADATEWVRAVEVNPSNRNQEVSGDYTIEAWTKFDFPGRGNTHSNFKWRWYHFDGVDWDQSRQLQNRIYKFRGKGWDWEVDTENGNYDYLMYADIDMDHPEVVNELRNWGVWYTNTLGLDGFRIDAVKHIKYSFTRDWLTHVRNTTGKNMFAVAEFWKNDIGAIENYLSKTNWNHSVFDVPLHYNLYNASRSGGNYDMRQIFNGTVVQRHPTHAVTFVDNHDSQPEEALESFVEEWFKPLAYALTLTRDQGYPSVFYGDYYGIPTHGVPAMKSKIDPILEARQKYAYGTQRDYLDHPDVIGWTREGDGVHADSGLATLMSDGPGGSKWMEVGKNNAGEVWYDITGNQTNTVTINKDGWGQFHVSGGSVSIYVQQ

SEQ ID NO: 24986 - protein, 483 aa, Bacillus licheniformis
HHNGTNGTMMQYFEWYLPNDGNHWNRLRSDASNLKDKGITAVWIPPAWKGASQNDVGYGAYDLYDLGEFNQKGTVRTKYGTRNQLQAAVTALKSNGIQVYGDVVMNHKGGADATEWVRAVEVNPSNRNQEVSGDYTIEAWTKFDFPGRGNTHSNFKWRWYHFDGVDWDQSRQLQNRIYKFRGKGWDWEVDTENGNYDYLMYADIDMDHPEVVNELRNWGVWYTNTLGLDGFRIDAVKHIKYSFTRDWLTHVRNTTGKNMFAVAEFWKNDIGAIENYLSKTNWNHSVFDVPLHYNLYNASRSGGNYDMRQIFNGTVVQRHPTHAVTFVDNHDSQPEEALESFVEEWFKPLAYALTLTRDQGYPSVFYGDYYGIPTHGVPAMKSWIDPILEARQKYAYGTQRDYLDHPDVIGWTREGDGVHADSGLATLMSDGPGGSKWMEVGKNNAGEVWYDITGNQTNTVTINKDGWGQFHVSGGSVSIYVQQ

SEQ ID NO: 24987 - protein, 483 aa, Bacillus licheniformis
HHNGTNGTMMQYFEWYLPNDGNHWNRLRSDASNLKDKGITAVWIPPAWKGASQNDVGYGAYDLYDLGEFNQKGTVRTKYGTRNQLQAAVTALKSNGIQVYGDVVMNHKGGADATEWVRAVEVNPSNRNQEVSGDYTIEAWTKFDFPGRGNTHSNFKWRWYHFDGVDWDQSRQLQNRIYKFRDKGWDWEVDTENGNYDYLMYADIDMDHPEVVNELRNWGVWYTNTLGLDGFRIDAVKHIKYSFTRDWLTHVRNTTGKNMFAVAEFWKNDIGAIENYLSKTNWNHSVFDVPLHYNLYNASRSGGNYDMRQIFNGTVVQRHPTHAVTFVDNHDSQPEEALESFVEEWFKPLAYALTLTRDQGYPSVFYGDYYGIPTHGVPAMKSKIDPILEARQKYAYGTQRDYLDHPDVIGWTREGDGVHADSGLATLMSDGPGGSKWMEVGKNNAGEVWYDITGNQTNTVTINKDGWGQFHVSGGSVSIYVQQ

SEQ ID NO: 24988 - protein, 483 aa, Bacillus licheniformis
HHNGTNGTMMQYFEWYLPNDGNHWNRLRSDASNLKDKGITAVWIPPAWKGASQNDVGYGAYDLYDLGEFNQKGTVRTKYGTRNQLQAAVTALKSNGIQVYGDVVMNHKGGADATEWVRAVEVNPSNRNQEVSGDYTIEAWTKFDFPGRGNTHSNFKWRWYHFDGVDWDQSRQLQNRIYKFRGKGWDWEVDTENGNYDYLMYADIDMDHPEVVNELRNWGVWYTNTLGLDGFRIDAVKHIKYSFTRDWLTHVRNTTGKNMFAVAEFWKNDIGAIENYLSKTNWNHSVFDVPLHYNLYNASRSGGNYDMRQIFNGTVVQRHPTHAVTFVDNHDSQPEEALESFVEEWFKPLAYALTLTRDQGSPSVFYGDYYGIPTHGVPAMKSKIDPILEARQKYAYGTQRDYLDHPDVIGWTREGDGVHADSGLATLMSDGPGGSKWMEVGKNNAGEVWYDITGNQTNTVTINKDGWGQFHVSGGSVSIYVQQ

SEQ ID NO: 24989 - protein, 483 aa, Bacillus licheniformis
HHNGTNGTMMQYFEWYLPNDGNHWNRLRSDASNLKDKGITAVWIPPAWKGASQNDVGYGAYDLYDLGEFNQKGTVRTKYGTRNQLQAAVTALKSNGIQVYGDVVMNHKGGADATEWVRAVEVNPSNRNQEVSGDYTIEAWTKFDFPGRGNTHSNFKWRWYHFDGVDWDQSRQLQNRIYKFRGKGWDWEVDTENGNYDYLMYADIDMDHPEVVNELRNWGVWYTSTLGLDGFRIDAVKHIKYSFTRDWLTHVRNTTGKNMFAVAEFWKNDIGAIENYLSKTNWNHSVFDVPLHYNLYNASRSGGNYDMRQIFNGTVVQRHPTHAVTFVDNHDSQPEEALESFVEEWFKPLAYALTLTRDQGYPSVFYGDYYGIPTHGVPAMKSKIDPILEARQKYAYGTQRDYLDHPDVIGWTREGDGVHADSGLATLMSDGPGGSKWMEVGKNNAGEVWYDITGNQTNTVTINKDGWGQFHVSGGSVSIYVQQ

SEQ ID NO: 24990 - protein, 483 aa, Bacillus licheniformis
HHNGTNGTMMQYFEWYLPNDGNHWNRLRSDASNLKDKGITAVWIPPAWKGASQNDVGYGAYDLYDLGEFNQKGTVRTKYGTRNQLQAAVTALKSNGIQVYGDVVMNHKGGADATEWVRAVEVNPSNRNQEVSGDYTIEAWTKFEFPGRGNTHSNFKWRWYHFDGVDWDQSRQLQNRIYKFRGKGWDWEVDTENGNYDYLMYADIDMDHPEVVNELRNWGVWYTNTLGLDGFRIDAVKHIKYSFTRDWLTHVRNTTGKNMFAVAEFWKNDIGAIENYLSKTNWNHSVFDVPLHYNLYNASRSGGNYDMRQIFNGTVVQRHPTHAVTFVDNHDSQPEEALESFVEEWFKPLAYALTLTRDQGYPSVFYGDYYGIPTHGVPAMKSKIDPILEARQKYAYGTQRDYLDHPDVIGWTREGDGVHADSGLATLMSDGPGGSKWMEVGKNNAGEVWYDITGNQTNTVTINKDGWGQFHVSGGSVSIYVQQ

SEQ ID NO: 24991 - protein, 483 aa, Bacillus licheniformis
HHNGTNGTMMQYFEWYLPNDGNHWNRLRSDASNLKDKGITAVWIPPAWKGASQNDVGYGAYDLYDLGEFNQKGTVRTKYGTRNQLQAAVTALKSNGIQVYGDVVMNHKGGADATEWVRAVEVNPSNRNQEVSGDYTIEAWTKFDFPGRGNTHSNFKWRWYHFDGVDWDQSRQLQNRIYKFRGKGWDWEVDTENGNYDYLMYADIDMDHPEVVNELRNWGVWYTNTLGLDGFRIDAVKHIKYSFTRDWLTHVRNTTGKNMFAVAEFWKNDIGAIENYLSKTNWNHSVFDVPLHYNLYNASRSGGNYDMRQIFNGTVTQRHPTHAVTFVDNHDSQPEEALESFVEEWFKPLAYALTLTRDQGYPSVFYGDYYGIPTHGVPAMKSKIDPILEARQKYAYGTQRDYLDHPDVIGWTREGDGVHADSGLATLMSDGPGGSKWMEVGKNNAGEVWYDITGNQTNTVTINKDGWGQFHVSGGSVSIYVQQ

SEQ ID NO: 24992 - protein, 483 aa, Bacillus licheniformis
HHNGTNGTMMQYFEWYLPNDGNHWNRLRSDASNLKDKGITAVWIPPAWKGASQNDVGYGAYDLYDLGEFNQKGTVRTKYGTRNQLQAAVTALKSNGIQVYGDVVMNHKGGADACEWVRAVEVNPSNRNQEVSGDYTIEAWTKFDFPGRGNTHSNFKWRWYHFDGVDWDQSRQLQNRIYKFRGKGWDWEVDTENGNYDYLMYADIDMDHPEVVNELRNWGVWYTNTLGLDGFRIDAVKHIKYSFTRDWLTHVRNTTGKNMFAVAEFWKNDIGAIENYLSKTNWNHSVFDVPLHYNLYNASRSGGNYDMRQIFNGTVVQRHPTHAVTFVDNHDSQPEEALESFVEEWFKPLAYALTLTRDQGYPSVFYGDYYGIPTHGVPAMKSKIDPILEARQKYAYGTQRDYLDHPDVIGWTREGDGVHADSGLATLMSDGPGGSKWMEVGKNNAGEVWYDITGNQTNTVTINKDGWGQFHVSGGSVSIYVQQ

SEQ ID NO: 24993 - protein, 483 aa, Bacillus licheniformis
HHNGTNGTMMQYFEWYLPNDGNHWNRLRSDASNLKDKGITAVWIPPAWKGASQNDVGYGAYDLYDLGEFNQKGTVRTKYGTRNQLQAAVTALKSNGIQVYGDVVMNHKGGADATEWVRAVEVNPSNRNQEVSGDYTIEAWTKFDFPGRGNTHSNFKWRWYHFDGVDWDQSRQLQNRIYKFRGKGWDWEVDTENGNYDYLMYADIDMDHPEVVNELRNWGVWYTNTLGLDGFRIDAVKHIKYSFTRDWLTHVRNTTGKNMFAVAEFWKNDIGAIENYLSKTNWNHSVFDVPLHYNLYNASRSGGSYDMRQIFNGTVVQRHPTHAVTFVDNHDSQPEEALESFVEEWFKPLAYALTLTRDQGYPSVFYGDYYGIPTHGVPAMKSKIDPILEARQKYAYGTQRDYLDHPDVIGWTREGDGVHADSGLATLMSDGPGGSKWMEVGKNNAGEVWYDITGNQTNTVTINKDGWGQFHVSGGSVSIYVQQ

SEQ ID NO: 24994 - protein, 483 aa, Bacillus licheniformis
HHNQTNGTMMQYFEWYLPNDGNHWNRLRSDASNLKDKGITAVWIPPAWKGASQNDVGYGAYDLYDLGEFNQKGTVRTKYGTRNQLQAAVTALKSNGIQVYGDVVMNHKGGADATEWVRAVEVNPSNRNQEVSGDYTIEAWTKFDFPGRGNTHSNFKWRWYHFDGVDWDQSRQLQNRIYKFRGKEWDWEVDTENGNYDYLMYADYDMDHPEVVNELRNWGVWYTNTLGLDGFRIDAVKHIKYSFTRDWLTHVRNTTGKNMFAVAEFWKNDIGAIENYLSKTNWNHSVFDVPLHYNLYNASRSGGNYDMRQIFNGTVVQRHPTHAVTFVDNHDSQPEEALESFVEEWFKPLAYALTLTRDQGYPSVFYGDYYGIPTHGVPAMKSKIDPILEARQKYAYGTQRDYLDHPDVIGWTREGDGVHADSGLATLMSDGPGGSKWMEVGKNNAGEVWYDITGNQTNTVTINKDGWGQFHVSGGSVSIYVQQ

SEQ ID NO: 24995 - protein, 483 aa, Bacillus licheniformis
HHNGTNGTMMQYFEWYLPNDGWHWNRLRSDASNLKDKGITAVWIPPAWKGASQNDVGYGAYDLYDLGEFNQKGTVRTKYGTRNQLQAAVTALKSNGIQVYGDVVMNHKGGADATEWVRAVEVNPSNRNQEVSGDYTIEAWTKFDFPGRGNTHSNFKWRWYHFDGVDWDQSRQLQNRIYKFRGKGWDWEVDTENGNYDYLMYADIDMDHPEVVNELRNWGVWYTNTLGLDGFRIDAVKHIKYSFTRDWLTHVRNTTGKNMFAVAEFWKNDIGAIENYLSKTNWNHSVFDVPLHYNLYNASRSGGNYDMRQIFNGTVVQRHPTHAVTFVDNHDSQPEEALESFVEEWFKPLAYALTLTRDQGYPSVFYGDYYGIPTHGVPAMKSKIDPILEARQKYAYGTQRDYLDHPDVIGWTREGDGVHADSGLATLMSDGPGGSKWMEVGKNNAGEVWYDITGNQTNTVTINKDGWGQFHVSGGSVSIYVQQ

SEQ ID NO: 24996 - protein, 483 aa, Bacillus licheniformis
HHNGTNGTMMQYFEWYLPNDGNHWFRLRSDASNLKDKGITAVWIPPAWKGASQNDVGYGAYDLYDLGEFNQKGTVRTKYGTRNQLQAAVTALKSNGIQVYGDVVMNHKGGADATEWVRAVEVNPSNRNQEVSGDYTIEAWTKFDFPGRGNTHSNFKWRWYHFDGVDWDQSRQLQNRIYKFRGKGWDWEVDTENGNYDYLMYADIDMDHPEVVNELRNWGVWYTNTLGLDGFRIDAVKHIKYSFTRDWLTHVRNTTGKNMFAVAEFWKNDIGAIENYLSKTNWNHSVFDVPLHYNLYNASRSGGNYDMRQIFNGTVVQRHPTHAVTFVDNHDSQPEEALESFVEEWFKPLAYALTLTRDQGYPSVFYGDYYGIPTHGVPAMKSKIDPILEARQKYAYGTQRDYLDHPDVIGWTREGDGVHADSGLATLMSDGPGGSKWMEVGKNNAGEVWYDITGNQTNTVTINKDGWGQFHVSGGSVSIYVQQ

SEQ ID NO: 24997 - protein, 483 aa, Bacillus licheniformis
HHNGTNGTMMQNFEWYLPNDGNHWNRLRSDASNLKDKGITAVWIPPAWKGASQNDVGYGAYDLYDLGEFNQKGTVRTKYGTRNQLQAAVTALKSNGIQVYGDVVMNHKGGADATEWVRAVEVNPSNRNQEVSGDYTIEAWTKFDFPGRGNTHSNFKWRWYHFDGVDWDQSRQLQNRIYKFRGKGWDWEVDTENGNYDYLMYADIDMDHPEVVNELRNWGVWYTNTLGLDGFRIDAVKHIKYSFTRDWLTHVRNTTGKNMFAVAEFWKNDIGAIENYLSKTNWNHSVFDVPLHYNLYNASRSGGNYDMRQIFNGTVVQRHPTHAVTFVDNHDSQPEEALESFVEEWFKPLAYALTLTRDQGYPSVFYGDYYGIPTHGVPAMKSKIDPILEARQKYAYGTQRDYLDHPDVIGWTREGDGVHADSGLATLMSDGPGGSKWMEVGKNNAGEVWYDITGNQTNTVTINKDGWGQFHVSGGSVSIYVQQ

SEQ ID NO: 24998 - protein, 483 aa, Bacillus licheniformis
HHNGTNGTMMQYFEWYLTNDGNHWNRLRSDASNLKDKGITAVWIPPAWKGASQNDVGYGAYDLYDLGEFNQKGTVRTKYGTRNQLQAAVTALKSNGIQVYGDVVMNHKGGADATEWVRAVEVNPSNRNQEVSGDYTIEAWTKFDFPGRGNTHSNFKWRWYHFDGVDWDQSRQLQNRIYKFRGKGWDWEVDTENGNYDYLMYADIDMDHPEVVNELRNWGVWYTNTLGLDGFRIDAVKHIKYSFTRDWLTHVRNTTGKNMFAVAEFWKNDIGAIENYLSKTNWNHSVFDVPLHYNLYNASRSGGNYDMRQIFNGTVVQRHPTHAVTFVDNHDSQPEEALESFVEEWFKPLAYALTLTRDQGYPSVFYGDYYGIPTHGVPAMKSKIDPILEARQKYAYGTQRDYLDHPDVIGWTREGDGVHADSGLATLMSDGPGGSKWMEVGKNNAGEVWYDITGNQTNTVTINKDGWGQFHVSGGSVSIYVQQ

SEQ ID NO: 24999 - protein, 483 aa, Bacillus licheniformis
HHNGTNGTMMQYFEWYLPNDGNHWNRLRSDASNLKDKGITAVWIPPAWKGASQNDVGYGAYDLYDLGEFNQKGTVRTKYGTRNQLQAAVTALKSNGIQVYGDVVMNHKGGADATEWVRAVEVNPSNRNQEVSGDYTIEAWTKFDFPGRGNTHSNFKWRWYHFDGVDWDQSRQLQNRIYKFRGKGWDWEVDTENGNYDYLMYADIDMDHPEVVNELRNWGVWYTNTLGLDGFRIDAVKHIKYSFTRDWLTHVRNTTGKNMFAVAEFWKNDIGAIENYLSKTNFNHSVFDVPLHYNLYNASRSGGNYDMRQIFNGTVVQRHPTHAVTFVDNHDSQPEEALESFVEEWFKPLAYALTLTRDQGYPSVFYGDYYGIPTHGVPAMKSKIDPILEARQKYAYGTQRDYLDHPDVIGWTREGDGVHADSGLATLMSDGPGGSKWMEVGKNNAGEVWYDITGNQTNTVTINKDGWGQFHVSGGSVSIYVQQ

SEQ ID NO: 25000 - protein, 483 aa, Bacillus licheniformis
HHNGTNGTMMQYFEWYLPNDGNHWNRLRSDASNLKDKGITAVWIPPAWKGASQNDVGYGAYDLYDLGEFNQKGTVRTKYGTRNQLQAAVTALKSNGIQVYGDVVMNHKGGADATEWVRAVEVNPSNRNQEVSGDYTIEAWTKFDFPGRGNTHSNFKWRWYHFDGVDWDQSRQLQNRIYKFRGKGWDWEVDTENGNYDYLMYADIDMDHPEVVNELRNWGVWYTNTLGLDGFRIDAVKHIKYSFTRDWLTHVRNTTGKNMFAVAEFWKNDIGAIENYLSKTNWNHSVFDVPLHYNLYNASRSGGNYDMRQIFNGTVVQRHPTHAVTFVDNHDSQPESALESFVEEWFKPLAYALTLTRDQGYPSVFYGDYYGIPTHGVPAMKSKIDPILEARQKYAYGTQRDYLDHPDVIGWTREGDGVHADSGLATLMSDGPGGSKWMEVGKNNAGEVWYDITGNQTNTVTINKDGWGQFHVSGGSVSIYVQQ

SEQ ID NO: 25001 - protein, 483 aa, Bacillus licheniformis
HHNGTNGTMMQYFEWYLPNDGNHWNRLRSDASNLKDKGITAVWIPPAWKGASQNDVGYGAYDLYDLGEFNQKGTVRTKYGTRNQLQAAVTALKSNGIQVYGDVVMNHKGGADATEWVRAVEVNPSNRNQEVSGDYTIEAWTKFDFPGRGNTHSNFKWRWYHFDGVDWDQSRQLQNRIYKFRGKGWDWEVDTENGNYDYLMYADIDMDHPEVVNELRNWGVWYTNTLGLDGFRIDAVKHIKYSFTRDWLTHVRNTTGKNMFAVAEFWKNDIGAIENYLSKTNWNHSVFDVPLHYNLYNASRSGGNYDMRQIFNGTVVQRHPTHAVTFVDNHDSQPEEALESFVEEWFKPLAYALTLTRDQGYPSVFYGDYYGIPTHGVPAMKSKIDPILEARQKYAYGTQRDYLDHPDVIGWTREGDGVHADSGLATLMSDGPGGSKWMEVGKNNAGEVWYDITVNQTNTVTINKDGWGQFHVSGGSVSIYVQQ

SEQ ID NO: 25002 - protein, 483 aa, Bacillus licheniformis
HHNGTNGTMMQYFEWYLPNDGNHWNRLRSDASNLKDKGITAVWIPPAWKGASQNDVGYGAYDLYDLGEFNQKGTVRTKYGTRNQLQAAVTALKSNGIQVYGDVVMNHKGGADATEWVRAVEVNPSNRNQEVSGDYTIEAWTKFDFPGRGNTHSNFKWRWYHFDGVDWDQSRQLQNRIYKFRGKGWDWEVDTENGNYDYLMYADIDMDHPEVVNELRNWGVWYTNTLGLDGFRIDAVKHIKYSFTRDWLTHVRNTTGKNMFAVAEFWKNDIGAIENYLSKTNWNHSVFDVPLHYNLYNASRSGGNYDMRQIFNGTVVQRHPTHAVTFVDNHDSQPEEALESFVEEWFKPLAYALTLTRDQGYPSVFYGDYYGIPTHGVPAMKSKIDPILEARQKYAYGTQRDYLDHPDVIGWTREGDGVHADSGLATLMSDGPGGSKWMEVGKNNAEEVWYDITGNQTNTVTINKDGWGQFHVSGGSVSIYVQQ

SEQ ID NO: 25003 - protein, 483 aa, Bacillus licheniformis
HHNGTNGTMMQYFEWYLPNDGNHWNRLRSDASNLKDKGITAVWIPPAWKGASQNDVGYGAYDLYDLGEFNQKGTVRTKYGTRNQLQAAVTALKSNGIQVYGDVVMNHKGGADATEWVRAVEVNPSNRNQEVSGWYTIEAWTKFDFPGRGNTHSNFKWRWYHFDGVDWDQSRQLQNRIYKFRGKGWDWEVDTENGNYDYLMYADIDMDHPEVVNELRNWGVWYTNTLGLDGFRIDAVKHIKYSFTRDWLTHVRNTTGKNMFAVAEFWKNDIGAIENYLSKTNWNHSVFDVPLHYNLYNASRSGGNYDMRQIFNGTVVQRHPTHAVTFVDNHDSQPEEALESFVEEWFKPLAYALTLTRDQGYPSVFYGDYYGIPTHGVPAMKSKIDPILEARQKYAYGTQRDYLDHPDVIGWTREGDGVHADSGLATLMSDGPGGSKWMEVGKNNAGEVWYDITGNQTNTVTINKDGWGQFHVSGGSVSIYVQQ

SEQ ID NO: 25004 - protein, 483 aa, Bacillus licheniformis
HHNGTNVTMMQYFEWYLPNDGNHWNRLRSDASNLKDKGITAVWIPPAWKGASQNDVGYGAYDLYDLGEFNQKGTVRTKYGTRNQLQAAVTALKSNGIQVYGDVVMNHKGGADATEWVRAVEVNPSNRNQEVSGDYTIEAWTKFDFPGRGNTHSNFKWRWYHFDGVDWDQSRQLQNRIYKFRGKGWDWEVDTENGNYDYLMYADIDMDHPEVVNELRNWGVWYTNTLGLDGFRIDAVKHIKYSFTRDWLTHVRNTTGKNMFAVAEFWKNDIGAIENYLSKTNWNHSVFDVPLHYNLYNASRSGGNYDMRQIFNGTVVQRHPTHAVTFVDNHDSQPEEALESFVEEWFKPLAYALTLTRDQGYPSVFYGDYYGIPTHGVPAMKSKIDPILEARQKYAYGTQRDYLDHPDVIGWTREGDGVHADSGLATLMSDGPGGSKWMEVGKNNAGEVWYDITGNQTNTVTINKDGWGQFHVSGGSVSIYVQQ

SEQ ID NO: 25005 - protein, 483 aa, Bacillus licheniformis
HHNGTNGTMMQYFEWYLPNDGNHWNRLRSDASNLKDKGITAVWIPPAWKGASQNDVGYGAYDLYDLGEFNQKGTVRTKYGTRNQLQAAVTALKSNGIQVYGDVVMNHKGGADATEWVRAVEVNPSNRNQEVSGDYTIEAWTKFDFPGRGNTHSNFKWRWWHFDGVDWDQSRQLQNRIYKFRGKEWDWEVDTENGNYDYLMYADIDMDHPEVVNELRNWGVWYTNTLGLDGFRIDAVKHIKYSFTRDWLTHVRNTTGKNMFAVAEFWKNDIGAIENYLSKTNWNHSVFDVPLHYNLYNASRSGGNYDMRQIFNGTVVQRHPTHAVTFVDNHDSQPEEALESFVEEWFKPLAYALTLTRDQGYPSVFYGDYYGIPTHGVPAMKSKIDPILEARQKYAYGTQRDYMDHPDVIGWTREGDGVHADSGLATLMSDGPGGSKWMEVGKNNAGEVWYDITGNQTNTVTINKDGWGQFHVSGGSVSIYVQQ

SEQ ID NO: 25006 - protein, 483 aa, Bacillus licheniformis
HHNGTNGTMMQYFEWYLPNDGNHWNRLRSDASNLKDKGITAVWIPPAWKGASQNDVGYGAYDLYDLGEFNQKGTVRTKYGTRNQLQAAVTALKSNGIQVYGDVVMNHKGGADATEWVRAVEVNPSNRNQEVSGDYAIEAWTKFDFPGRGNTHSNFKWRWYHFDGVDWDQSRQLQNRIYKFRGKGWDWEVDTENGNYDYLMYADIDMDHPEVVNELRNWGVWYTNTLGLDGFRIDAVKHIKYSFTRDWLTHVRNTTGKNMFAVAEFWKNDIGAIENYLSKTNWNHSVFDVPLHYNLYNASRSGGNYDMRQIFNGTVVQRHPTHAVTFVDNHDSQPEEALESFVEEWFKPLAYALTLTRDQGYPSVFYGDYYGIPTHGVPAMKSKIDPILEARQKYAYGTQRDYLDHPDVIGWTREGDGVHADSGLATLMSDGPGGSKWMEVGKNNAGEVWYDITGNQTNTVTINKDGWGQFHVSGGSVSIYVQQ

SEQ ID NO: 25007 - protein, 483 aa, Bacillus licheniformis
HHNGTNGTMMQYFEWYLPNDGNHWNRLRSDASNLKDKGITAVWIPPAWKGASQNDVGYGAYDLYDLGEFNQKGTVRTKYGTRNQLQAAVTALKSNGIQVYGDVVMNHKGGADATEWVRAVEVNPSNRNQEVSGDYTIEAWTKFYFPGRGNTHSNFKWRWYHFDGVDWDQSRQLQNRIYKFRGKGWDWEVDTENGNYDYLMYADIDMDHPEVVNELRNWGVWYTNTLGLDGFRIDAVKHIKYSFTRDWLTHVRNTTGKNMFAVAEFWKNDIGAIENYLSKTNWNHSVFDVPLHYNLYNASRSGGNYDMRQIFNGTVVQRHPTHAVTFVDNHDSQPEEALESFVEEWFKPLAYALTLTRDQGYPSVFYGDYYGIPTHGVPAMKSKIDPILEARQKYAYGTQRDYLDHPDVIGWTREGDGVHADSGLATLMSDGPGGSKWMEVGKNNAGEVWYDITGNQTNTVTINKDGWGQFHVSGGSVSIYVQQ

SEQ ID NO: 25008 - protein, 483 aa, Bacillus licheniformis
HHNGTNGTMMQYFEWYLPNDGNHWNRLRSDASNLKDKGITAVWIPPAWKGASQNDVGYGAYDLYDLGEFNQKGTVRTKYGTRNQLQAAVTALKSNGIQVYGDVVMNHKGGADATEWVRAVEVNPSNRNQEVSGDYTIEAWTKFDFPGRGNTHSNFKWRWYHFDGVDWDQSRQLQNRIYKFRGKGWDWEVDTENGNYDYLMYADIDMDHPEVVNELRNWGVWYTCTLGLDGFRIDAVKHIKYSFTRDWLTHVRNTTGKNMFAVAEFWKNDIGAIENYLSKTNWNHSVFDVPLHYNLYNASRSGGNYDMRQIFNGTVVQRHPTHAVTFVDNHDSQPEEALESFVEEWFKPLAYALTLTRDQGYPSVFYGDYYGIPTHGVPAMKSKIDPILEARQKYAYGTQRDYLDHPDVIGWTREGDGVHADSGLATLMSDGPGGSKWMEVGKNNAGEVWYDITGNQTNTVTINKDGWGQFHVSGGSVSIYVQQ

SEQ ID NO: 25009 - protein, 483 aa, Bacillus licheniformis
HHNGTNGTMMQYFEWYLPNDGNHWNRLRSDASNLKDKGITAVWIPPAWKGASQNDVGYGAYDLYDLGEFNQKGTVRTKYGTRNQLQAAVTALKSNGIQVYGDVVMNHKGGADATEWVRAVEVNPSNRNQEVSGDYTIEAWTKFDFPGRGNTHSNFKWRWYHFDGVDWDQSRQLQNRIYKFRGKGWDWEVDTENGNYDYLMYADIDMDHPEVVNELRNWGVWYTNTLGLDGFRIDAVKHIKYSFTRDWLTHVRNTTGKNMFAVAEFWKNDIGAIENYLSKTNWNHSVFDVPLHYNLYNASRSGGNYDMRQIFNGTVVQRHPTHAVTFVDNHDSQPEEALESFVEEWFKPLAYALTLTRDQGYPSVFYGDYYGIPTHGVPAMKSKIDPILEARQKYAYGTQRDYLDHPDVIGWTREGDGVHADSGLATLMSDGPGGSKWMEVGKNNADEVWYDITGNQTNTVTINKDGWGQFHVSGGSVSIYVQQ

SEQ ID NO: 25010 - protein, 483 aa, Bacillus licheniformis
HHNGTNGTMMQYFEWYLPNDGNHWNRLRSDASNLKDKGITAVWIPPAWKGASQNDVGYGAYDLYDLGEFNQKGTVRTKYGTRNQLQAAVTALKSNGIQVYGDVVMNHKGGADATEWVRAVEVNPSNRNQEVSGDYTIEAWTKFDFPGRGNTHSNFKWRWYHFDGVDWDQSRQLQNRIYKFRGKGWDWEVDTENGNYDYLMYADIDMDHPEVVNELRNWGVWYTNTLGLDGFRIDAVKHIKYSFTRDWLTHVRNTTGKNMFAVAEFWKNDIGAIENYLSKTNWNHSVFDVPLHYNLYNASRSGGNYDMRQIFNGTVVQRHPTHAVTFVDNHDSQPEEALESFVEEWFKPLAYALTLTRDQGYPSVFYGDYYGIPTHGVPAMKSKIDYILEARQKYAYGTQRDYLDHPDVIGWTREGDGVHADSGLATLMSDGPGGSKWMEVGKNNAGEVWYDITGNQTNTVTINKDGWGQFHVSGGSVSIYVQQ

SEQ ID NO: 25011 - protein, 483 aa, Bacillus licheniformis
HHNSTNGTMMQYFEWYLPNDGNHWNRLRSDASNLKDKGITAVWIPPAWKGASQNDVGYGAYDLYDLGEFNQKGTVRTKYGTRNQLQAAVTALKSNGIQVYGDVVMNHKGGADATEWVRAVEVNPSNRNQEVSGDYTIEAWTKFDFPGRGNTHSNFKWRWYHFDGVDWDQSRQLQNRIYKFRGKGWDWEVDTENGNYDYLMYADIDMDHPEVVNELRNWGVWYTNTLGLDGFRIDAVKHIKYSFTRDWLTHVRNTTGKNMFAVAEFWKNDIGAIENYLSKTNWNHSVFDVPLHYNLYNASRSGGNYDMRQIFNGTVVQRHPTHAVTFVDNHDSQPEEALESFVEEWFKPLAYALTLTRDQGYPSVFYGDYYGIPTHGVPAMKSKIDPILEARQKYAYGTQRDYLDHPDVIGWTREGDGVHADSGLATLMSDGPGGSKWMEVGKNNAGEVWYDITGNQTNTVTINKDGWGQFHVSGGSVSIYVQQ

SEQ ID NO: 25012 - protein, 483 aa, Bacillus licheniformis
HHNGTNGTMMQYFEWYLPNDGNHWNRLRSDASNLKDKGITAVWIPPAWKGASQNDVGYGAYDLYDLGEFNQKGTVRTKYGTRNQLQAAVTALKSNGIQVYGDVVMNHKGGADATEWVRAVEVNPSNRNQEVSGDYTIEAWTKFDFPGRGNTHSNFKWRWYHFDGVDWDQSRQLQNRIYKFRGKGWDWEMDTENGNYDYLMYADIDMDHPEVVNELRNWGVWYTNTLGLDGFRIDAVKHIKYSFTRDWLTHVRNTTGKNMFAVAEFWKNDIGAIENYLSKTNWNHSVFDVPLHYNLYNASRSGGNYDMRQIFNGTVVQRHPTHAVTFVDNHDSQPEEALESFVEEWFKPLAYALTLTRDQGYPSVFYGDYYGIPTHGVPAMKSKIDPILEARQKYAYGTQRDYLDHPDVIGWTREGDGVHADSGLATLMSDGPGGSKWMEVGKNNAGEVWYDITGNQTNTVTINKDGWGQFHVSGGSVSIYVQQ

SEQ ID NO: 25013 - protein, 483 aa, Bacillus licheniformis
HHNGTNGTMMQYFEWYLPNDGNHWNRLRSDASNLKDKGITAVWIPPAWKGASQNDVGYGAYDLYDLGEFNQKGTVRTKYGTRNQLQAAVTALKSNGIQVYGDVVMNHKGGADATEWVRAVEVNPSNRNQEVSGDYTIEAWTKFDFPGRGNTHSNFKWRWYHFDGVDWDQSRQLHNRIYKFRGKGWDWEVDTENGNYDYLMYADIDMDHPEVVNELRNWGVWYTNTLGLDGFRIDAVKHIKYSFTRDWLTHVRNTTGKNMFAVAEFWKNDIGAIENYLSKTNWNHSVFDVPLHYNLYNASRSGGNYDMRQIFNGTVVQRHPTHAVTFVDNHDSQPEEALESFVEEWFKPLAYALTLTRDQGYPSVFYGDYYGIPTHGVPAMKSKIDPILEARQKYAYGTQRDYLDHPDVIGWTREGDGVHADSGLATLMSDGPGGSKWMEVGKNNAGEVWYDITGNQTNTVTINKDGWGQFHVSGGSVSIYVQQ

SEQ ID NO: 25014 - protein, 483 aa, Bacillus licheniformis
HHNGTNGTMMQYFEWYLPNDGNHWNRLRSDASNLKDKGITAVWIPPAWKGASQNDVGYGAYDLYDLGEFNQKGTVRTKYGTRNQLQAAVTALKSNGIQVYGDVVMNHKGGADATEWVRAVEVNPSNRNQEVSGDYTIEAWTKFDFPGRGNTHSNFKWRWYHFDGVDWDQSRQLQNRIYKFRGKGWDWEVDTENGNYDYLMYADIDMDHPEVVNELRNWGVWYTNTLGLDGFRIDAVKHIKYSFTRDWLTHVRNTTGKNMFAVAEFWKNDIGAIENYLSKTNWNHSVFDVPLHYNLYNASRSGGNYDMRQIFNGTVVQRHPTHAVTFVDNHDSQPEEALESFVEEWFKPLAYALTLTCDQGYPSVFYGDYYGIPTHGVPAMKSKIDPILEARQKYAYGTQRDYLDHPDVIGWTREGDGVHADSGLATLMSDGPGGSKWMEVGKNNAGEVWYDITGNQTNTVTINKDGWGQFHVSGGSVSIYVQQ

SEQ ID NO: 25015 - protein, 483 aa, Bacillus licheniformis
HHNGTNGTMMQYFEWYLPNDGNHWNRLRSDASNLKDKGITAVWIPPAWKGASQNDVGYGAYDLYDLGEFNQKGTVRTKYGTRNQLQAAVTALKSNGIQVYGDVVMNHKGGADATEWVRAVEVNPSNRNQEVSGDYTIEAWTKFDFPGRGNTHSNFKWRWYHFDGVDWDQSRQLQNKIYKFRGKEWDWEVDTENGNYDYLMYADIDMDHPEVVNELRNWGVWYTNTLGLDGFRIDAVKHIKYSFTRDWLTHVRNTTGKNMFAVAEFWKNDIGAIENYLSKTNWNHSVFDVPLHYNLYNASRSGGNYDMRQIFNGTVVQRHPTHAVTFVDNHDSQPEEALESFVEEWFKPLAYALTLTRDQGYPSVFYGDYYGIPTHGVPAMKSKIDPILEARQKYAYGTQRDYMDHPDVIGWTREGDGVHADSGLATLMSDGPGGSKWMEVGKNNAGEVWYDITGNQTNTVTINKDGWGQFHVSGGSVSIYVQQ

SEQ ID NO: 25016 - protein, 483 aa, Bacillus licheniformis
HHNGTNGTMMQYFEWYLPNDGNHWNRLRSDASNLKDKGITAVWIPPAWKGASQNDVGYGAYDLYDLGEFNQKGTVRTKYGTRNQLQAAVTALKSNGIQVYGDVVMNHKGGADATEWVRAVEVNPSNRNQEVSGDYTIEAWTKFDFPGRGQTHSNFKWRWYHFDGVDWDQSRQLQNRIYKFRGKGWDWEVDTENGNYDYLMYADIDMDHPEVVNELRNWGVWYTNTLGLDGFRIDAVKHIKYSFTRDWLTHVRNTTGKNMFAVAEFWKNDIGAIENYLSKTNWNHSVFDVPLHYNLYNASRSGGNYDMRQIFNGTVVQRHPTHAVTFVDNHDSQPEEALESFVEEWFKPLAYALTLTRDQGYPSVFYGDYYGIPTHGVPAMKSKIDPILEARQKYAYGTQRDYLDHPDVIGWTREGDGVHADSGLATLMSDGPGGSKWMEVGKNNAGEVWYDITGNQTNTVTINKDGWGQFHVSGGSVSIYVQQ

SEQ ID NO: 25017 - protein, 483 aa, Bacillus licheniformis
HHNGTNGTMMQYFEWYLPNDGNHWNRLRSDASNLKDKGITAVWIPPAWKGASQNDVGYGAYDLYDLGEFNQKGTVRTKYGTRNQLQAAVTALKSNGIQVYGDVVMNHKGGADATEWVRAVEVNPSNRNQEVSGDYTIEAWTKFDFPGRGNTHSNFKWRWYHFDGVDWDQSRQLQNRIYKFRGKGWDWEVDTENGNYDYLMYADIDMDHPEVVNELRNWGVWYTNTLGLDGFRIDAVKHIKYSFTRDWLTHVRNTTGKNMFAVAEFWKNDIGFIENYLSKTNWNHSVFDVPLHYNLYNASRSGGNYDMRQIFNGTVVQRHPTHAVTFVDNHDSQPEEALESFVEEWFKPLAYALTLTRDQGYPSVFYGDYYGIPTHGVPAMKSKIDPILEARQKYAYGTQRDYLDHPDVIGWTREGDGVHADSGLATLMSDGPGGSKWMEVGKNNAGEVWYDITGNQTNTVTINKDGWGQFHVSGGSVSIYVQQ

SEQ ID NO: 25018 - protein, 483 aa, Bacillus licheniformis
HHNGTNGTMMQYFEWYLPNDGNHWNRLRSDASNLKDKGITAVWIPPAWKGASQNDVGYGAYDLYDLGEFNQKGTVRTKYGTRNQLQAAVTALKSNGIQVYGDVVMNHKGGADATEWVRAVEVNPSNRNQEVSGDYTIEAWTKFDFPGRGNTHSNFKWRWYHFDGVDWDQSRQLQNRIYKFRGKGWDWEVDTENGNYDYLMYADIDMDHPEVVNELRNWGVWYTNTLGLDGFRIDAVKHIKYSFTRDWLTHVRNTTGKNMFAVAEFWKNDIGAIENYLSKTNWNHSVFDVPLHYNLYNASRSGGNYDMRQIFNGTVVQRHPTHAVTFVDNHDSQPEEALESFVEEWFKPLAYALTLTRDQGYPSVFYGDYYGIPTHGVPAMKSKIDPILEARQKYAYGTQRDYLDHPDVIGWTREGDGVHADSGLATLMSDGPGGSKWMEVGKNNAGEVWYDITLNQTNTVTINKDGWGQFHVSGGSVSIYVQQ

SEQ ID NO: 25019 - protein, 483 aa, Bacillus licheniformis
HHNGTNGTMMQYFEWYLPNDGNHWNRLRSDASNLKDKGITAVWIPPAWKGASQNDVGYGAYDLYDLGEFNQKGTVRTKYGTRNQLQAAVTALKSNGIQVYGDVVMNHKGGADATEWVRAVEVNPSNRNQEVSGDYTIEAWTKFDFPGRGNTHSNFKWRWYHFDGVDWDQSRQLQNRIYKFRGKGWDWEVDTENGNYDYLMYADIDMDHPEVVNELRNWGVWYTNTLGLDGFRIDAVKHIKYSFTRDWLTHVRNTTGKNMFAVAEFWKNDIGAIENYLSKTNWNHSVFDVPLHYNLYNASRSGGNYDMRQIFNGTVVQRHPTHAVTFVDNHDSQPEEALESFVEEWFKPLAYALTLTRDQGYPSVFYGDYYGIPTHGVPAMKSKIDPILEARQKYAYGTQRDYLDHPDVIGWTREGDGVHADSGLATLMSDGPGGSKWMEVGKNNAGEVWYDITGNQTNEVTINKDGWGQFHVSGGSVSIYVQQ

SEQ ID NO: 25020 - protein, 483 aa, Bacillus licheniformis
HHNGTNGTMMQYFEWYLPNDGNHWNRLRSDASNLKDKGITAVWIPPAWKGASQNDVGYGAYDLYDLGEFNQKGTVRTKYGTRNQLQAAVTALKSNGIQVYGDVVMNHKGGADATEWVRAVEVNPSNRNQEVSGDYTIEAWTKFDFPGRGNTHSNFKWRWWHFDGVDWDQSRQLQNRIYKFRGKEWDWEVDTENGNYDYLMYADIDMDHPEVVNELRNWGVWYTNTLGLDGFRIDAVKHIKYSFTRDWLTHVRNTTGKNMFAVAEFWKNDIGAIENYLSKTNWNHSVFDVPLHYNLYNASRSGGNYDMRQIFNGTVVQRHPTHAVTFVDNHDSQPEEALESFVEEWFKPLAYALTLTRDQGYPSVFYGDYYGIPTHGVPAMKSKIDPILEARQKYAYGTQRDYLDHPDVIGWTREGDGVHADSGLATLMSDGPGGSKWMEVGKNNAGEVWYDITGNQTNTVTINKDGWGQFHVSGGSVSIYVQQ

SEQ ID NO: 25021 - protein, 483 aa, Bacillus licheniformis
HHNGTNGTMMQYFEWYLPNDGNHWNRLRSDASNLKDKGITAVWIPPAWKGASQNDVGYGAYDLYDLGEFNQKGTVRTKYGTRNQLQAAVTALKSNGIQVYGDVVMNHKGGADATEWVRAVEVNPSNRNQEVSGDYTIEAWTKFDFPGRGNTHSNFKWRWYHFDGVDWDQSRQLQNRIYKFRGKGWDWEVDTENGNYDYLMYADIDMDHPEVVNELRNWGVWYTNTLGLDGFRIDAVKHIKYSFTRDWLTHVRNTTGKNMFAVAEFWKNDIGAIENYLSKTNWNHSVFDVPLHYNLYNASRSGGNYDMRQIFNGTVVQRHPTHAVTFVDNHDSQPEEALESFVEEWFKPLAYALTLTRDQGYPSVFYGDYYGIPTHGVPAMKSKIDPILEARQKYAYGTQRDYLDHPDVIGWTREGDGVHADSGLATLMSDGPGGSKWMEVGKANAGEVWYDITGNQTNTVTINKDGWGQFHVSGGSVSIYVQQ

SEQ ID NO: 25022 - protein, 483 aa, Bacillus licheniformis
HHNGTNGTMMQYFEWYLPNDGNHWNRLRSDASNLKDKGITAVWIPPAWKGASQNDVGYGAYDLYDLGEFNQKGTVRTKYGTRNQLQAAVTALKSNGIQVYGDVVMNHKGGADATEWVRAVEVNPSNRNQEVSGDYTIEAWTKFDFPGRGNTHSNFKWRWYHFDGVDWDQSRQLQNRIYKFRGKGWDWEVDTENGNYDYLMYADIDMDHPEVVNELRNWGVWYTNTLGLDGFRIDAVKHIKYSFTRDWLTHVRNTTGKNMFAVAEFWKNDIGAIENYLSKTNWNHSVFDVPLHYNLYNASRSGGNYDMRQIFNGTVVQRHPTHAVTFVDNHDSQPEEALESFVEEWFKPLAYALTLTRDQGYPSVFYGDYYGIPTHGVPAMKSKIDPILEARQKYAYGTQRDYLDHPDVIGWTREGDGVHADSGLATLMSDGPGGSKWMEVGKNNAGEVWYDITGAQTNTVTINKDGWGQFHVSGGSVSIYVQQ

SEQ ID NO: 25023 - protein, 483 aa, Bacillus licheniformis
HHNGTNGTMMQYFEWYLPNDGNHWNRLRSDASNLKDKGITAVWIPPAWKGASQNDVGYGAYDLYDLGEFNQKGTVRTKYGTLNQLQAAVTALKSNGIQVYGDVVMNHKGGADATEWVRAVEVNPSNRNQEVSGDYTIEAWTKFDFPGRGNTHSNFKWRWYHFDGVDWDQSRQLQNRIYKFRGKGWDWEVDTENGNYDYLMYADIDMDHPEVVNELRNWGVWYTNTLGLDGFRIDAVKHIKYSFTRDWLTHVRNTTGKNMFAVAEFWKNDIGAIENYLSKTNWNHSVFDVPLHYNLYNASRSGGNYDMRQIFNGTVVQRHPTHAVTFVDNHDSQPEEALESFVEEWFKPLAYALTLTRDQGYPSVFYGDYYGIPTHGVPAMKSKIDPILEARQKYAYGTQRDYLDHPDVIGWTREGDGVHADSGLATLMSDGPGGSKWMEVGKNNAGEVWYDITGNQTNTVTINKDGWGQFHVSGGSVSIYVQQ

SEQ ID NO: 25024 - protein, 483 aa, Bacillus licheniformis
HHNGTNGTMMQYFEWYLPNDGNHWNRLRSDASNLKDKGITAVWIPPAWKGASQNDVGYGAYDLYDLGEFNQKGTVRTKYGTRNQLQAAVTALKSNGIQVYGDVVMNHKGGADATEWVRAVEVNPSNRNQEVSGDYTIEAWTKFDFPGRGNTHSNFKWRWYHFDGVDWDQSRQLQNRIYKFRGKGWHWEVDTENGNYDYLMYADIDMDHPEVVNELRNWGVWYTNTLGLDGFRIDAVKHIKYSFTRDWLTHVRNTTGKNMFAVAEFWKNDIGAIENYLSKTNWNHSVFDVPLHYNLYNASRSGGNYDMRQIFNGTVVQRHPTHAVTFVDNHDSQPEEALESFVEEWFKPLAYALTLTRDQGYPSVFYGDYYGIPTHGVPAMKSKIDPILEARQKYAYGTQRDYLDHPDVIGWTREGDGVHADSGLATLMSDGPGGSKWMEVGKNNAGEVWYDITGNQTNTVTINKDGWGQFHVSGGSVSIYVQQ

SEQ ID NO: 25025 - protein, 483 aa, Bacillus licheniformis
HHNGTNGTMMQYFEWYLPNDGNHWNRLRSDASNLKDKGITAVWIPPAWKGASQNDVGYGAYDLYDLGEFNQKGTVRTKYGTRNQLQAAVTALKSNGIQVYGDVVMNHKGGADATEWVRAVEVNPSNRNQEVSGDYTIEAWTKFDFPGRGNTHSNFKWRWYHFDGVDWDQFRQLQNRIYKFRGKGWDWEVDTENGNYDYLMYADIDMDHPEVVNELRNWGVWYTNTLGLDGFRIDAVKHIKYSFTRDWLTHVRNTTGKNMFAVAEFWKNDIGAIENYLSKTNWNHSVFDVPLHYNLYNASRSGGNYDMRQIFNGTVVQRHPTHAVTFVDNHDSQPEEALESFVEEWFKPLAYALTLTRDQGYPSVFYGDYYGIPTHGVPAMKSKIDPILEARQKYAYGTQRDYLDHPDVIGWTREGDGVHADSGLATLMSDGPGGSKWMEVGKNNAGEVWYDITGNQTNTVTINKDGWGQFHVSGGSVSIYVQQ

SEQ ID NO: 25026 - protein, 483 aa, Bacillus licheniformis
HHNGTNGTMMQYFEWYLPNDGNHWNRDRSDASNLKDKGITAVWIPPAWKGASQNDVGYGAYDLYDLGEFNQKGTVRTKYGTRNQLQAAVTALKSNGIQVYGDVVMNHKGGADATEWVRAVEVNPSNRNQEVSGDYTIEAWTKFDFPGRGNTHSNFKWRWYHFDGVDWDQSRQLQNRIYKFRGKGWDWEVDTENGNYDYLMYADIDMDHPEVVNELRNWGVWYTNTLGLDGFRIDAVKHIKYSFTRDWLTHVRNTTGKNMFAVAEFWKNDIGAIENYLSKTNWNHSVFDVPLHYNLYNASRSGGNYDMRQIFNGTVVQRHPTHAVTFVDNHDSQPEEALESFVEEWFKPLAYALTLTRDQGYPSVFYGDYYGIPTHGVPAMKSKIDPILEARQKYAYGTQRDYLDHPDVIGWTREGDGVHADSGLATLMSDGPGGSKWMEVGKNNAGEVWYDITGNQTNTVTINKDGWGQFHVSGGSVSIYVQQ

SEQ ID NO: 25027 - protein, 483 aa, Bacillus licheniformis
HHNGTNGTMMQYFEWYLPNDGNHWNRLRSDASNLKDKGITAVWIPPAWKGASQNDVGYGAYDLYDLGEFNQKGTVRTKYGTRNQLQAAVTALKSNGIAVYGDVVMNHKGGADATEWVRAVEVNPSNRNQEVSGDYTIEAWTKFDFPGRGNTHSNFKWRWYHFDGVDWDQSRQLQNRIYKFRGKGWDWEVDTENGNYDYLMYADIDMDHPEVVNELRNWGVWYTNTLGLDGFRIDAVKHIKYSFTRDWLTHVRNTTGKNMFAVAEFWKNDIGAIENYLSKTNWNHSVFDVPLHYNLYNASRSGGNYDMRQIFNGTVVQRHPTHAVTFVDNHDSQPEEALESFVEEWFKPLAYALTLTRDQGYPSVFYGDYYGIPTHGVPAMKSKIDPILEARQKYAYGTQRDYLDHPDVIGWTREGDGVHADSGLATLMSDGPGGSKWMEVGKNNAGEVWYDITGNQTNTVTINKDGWGQFHVSGGSVSIYVQQ

SEQ ID NO: 25028 - protein, 483 aa, Bacillus licheniformis
HHNGTNGTMMQYFEWYLPNDGNHWNRLRSDASNLKDKGITAVWIPPAWKGASQNDVGYGAYDLYDLGEFNQKGTVRTKYGTRNQLQAAVTCLKSNGIQVYGDVVMNHKGGADATEWVRAVEVNPSNRNQEVSGDYTIEAWTKFDFPGRGNTHSNFKWRWYHFDGVDWDQSRQLQNRIYKFRGKGWDWEVDTENGNYDYLMYADIDMDHPEVVNELRNWGVWYTNTLGLDGFRIDAVKHIKYSFTRDWLTHVRNTTGKNMFAVAEFWKNDIGAIENYLSKTNWNHSVFDVPLHYNLYNASRSGGNYDMRQIFNGTVVQRHPTHAVTFVDNHDSQPEEALESFVEEWFKPLAYALTLTRDQGYPSVFYGDYYGIPTHGVPAMKSKIDPILEARQKYAYGTQRDYLDHPDVIGWTREGDGVHADSGLATLMSDGPGGSKWMEVGKNNAGEVWYDITGNQTNTVTINKDGWGQFHVSGGSVSIYVQQ

SEQ ID NO: 25029 - protein, 483 aa, Bacillus licheniformis
HHNGTNGTMMQYFEWYLPNDGNHWNRLRSDASNLKDKGITAVWIPPAWKGASQNDVGYGAYDLYDLGEFNQKGTVRTKYGTRNQLQAAVTALKSNGIQVYGDVVMNHKGGADATEWVRAVEVNPSNRNQEVSGDYTIEAWTKFDFPGRGNTHSNFKWRWYHFDGVDWDQSRQLQNRIYKFRGKGWDWEVDTENGNYDYLMYADIDMDHPEVVNELRNWGVWYTNTLGLDGFRIDAVKHIKYSFTRDWLTHVRNTTGKNMFAVAEFWKNDIGAIENYLSKTNWNHSVFDVPLHYNLYNASRSGGNYDMRQIFNGTVVQRHPTHAVTFVDNHDSQPEEALESFVEEWFKPLAYALTLTRDQGYPSVFYGDYYGIPTHGAPAMKSKIDPILEARQKYAYGTQRDYLDHPDVIGWTREGDGVHADSGLATLMSDGPGGSKWMEVGKNNAGEVWYDITGNQTNTVTINKDGWGQFHVSGGSVSIYVQQ

SEQ ID NO: 25030 - protein, 483 aa, Bacillus licheniformis
HHNGTNGTMMQYFEWYLPNDGNHWNRLRSDASNLKDKGITAVWIPPAWKGASQNDVGYGAYDLYDLGEFNQKGTVRTKYGTRNQLQAAVTALKSNGIQVYGDVVMNHKGGADATEWVRAVEVNPSNRNQEVSGDYTIEAWTKFDFPGRGNTHSNFKWRWYHFDGVDWDQSRQLQNRIYKFRGKGWDWEVDTENGNYDYLMYADIDMDHPEVVNELRNWGVWYTNTLGLDGFRIDAVKHIKYSFTRDWLTHVRNTTGKNMFAVAEFWKNDIGAIENYLSKTNWNHSVFDVPLHYNLYNASRSGGNYDMRQIFNATVVQRHPTHAVTFVDNHDSQPEEALESFVEEWFKPLAYALTLTRDQGYPSVFYGDYYGIPTHGVPAMKSKIDPILEARQKYAYGTQRDYLDHPDVIGWTREGDGVHADSGLATLMSDGPGGSKWMEVGKNNAGEVWYDITGNQTNTVTINKDGWGQFHVSGGSVSIYVQQ

SEQ ID NO: 25031 - protein, 483 aa, Bacillus licheniformis
HHNGTNGTMMQYFEWYLPNLGNHWNRLRSDASNLKDKGITAVWIPPAWKGASQNDVGYGAYDLYDLGEFNQKGTVRTKYGTRNQLQAAVTALKSNGIQVYGDVVMNHKGGADATEWVRAVEVNPSNRNQEVSGDYTIEAWTKFDFPGRGNTHSNFKWRWYHFDGVDWDQSRQLQNRIYKFRGKGWDWEVDTENGNYDYLMYADIDMDHPEVVNELRNWGVWYTNTLGLDGFRIDAVKHIKYSFTRDWLTHVRNTTGKNMFAVAEFWKNDIGAIENYLSKTNWNHSVFDVPLHYNLYNASRSGGNYDMRQIFNGTVVQRHPTHAVTFVDNHDSQPEEALESFVEEWFKPLAYALTLTRDQGYPSVFYGDYYGIPTHGVPAMKSKIDPILEARQKYAYGTQRDYLDHPDVIGWTREGDGVHADSGLATLMSDGPGGSKWMEVGKNNAGEVWYDITGNQTNTVTINKDGWGQFHVSGGSVSIYVQQ

SEQ ID NO: 25032 - protein, 483 aa, Bacillus licheniformis
HHNGTNGTMMQYFEWYLPNDGNHWNRLRSDASNLKDKGITAVWIPPAWKGASQNDVGYGAYDLYDLGEFNQKGTVRTKYGTRNQLQAAVTALKSNGIQVYGDVVMNHKGGADATEWVRAVEVNPSNRNQEVSGDYTIEAWTKFDFPGRGNTHSNFKWRWYHFDGVDWDQSRQLQNRIYKFRGKGWDWEVDTENGNYDYLMYADIDMDHPEVVNELRNWGVWYTNTLGLDGFRIDAVKHIKYSFTRDWLTHVRNTTFKNMFAVAEFWKNDIGAIENYLSKTNWNHSVFDVPLHYNLYNASRSGGNYDMRQIFNGTVVQRHPTHAVTFVDNHDSQPEEALESFVEEWFKPLAYALTLTRDQGYPSVFYGDYYGIPTHGVPAMKSKIDPILEARQKYAYGTQRDYLDHPDVIGWTREGDGVHADSGLATLMSDGPGGSKWMEVGKNNAGEVWYDITGNQTNTVTINKDGWGQFHVSGGSVSIYVQQ

SEQ ID NO: 25033 - protein, 483 aa, Bacillus licheniformis
HHNGTNGTMMQYFEWYLPNDGNHWNRLRSDASNLKDKGITAVWIPPAWKGASQNDVGYGAYDLYDLGEFNQKGTVRTKYGTRNQLQAAVTALKSNGIQVYGDVVMNHKGGADATEWVRAVEVNPSNRNQEVSGDYTIEAWTKFDFPGRGNTHSNFKWRWYHFDGVDWDQSRQLQNRIYKFRGKGWDWEVDTENGNYDYLMYADIDMDHPEVVNELRNWGVWYTNTLGLDGFRIDAVKHIKYSFTRDWLTHVRNTTGKNMFAVAEFWKNDIGAIENYLSKTNWNHSVFDVPLHYNLYNASRSGGNYDMRQIFNGTVVQRHPTHAVTFVDNHDSQPEEALESFVEEWFKPLAYALTLTRDQGYPSVFYGDYYGIPTHGVPAMKSKIDEILEARQKYAYGTQRDYLDHPDVIGWTREGDGVHADSGLATLMSDGPGGSKWMEVGKNNAGEVWYDITGNQTNTVTINKDGWGQFHVSGGSVSIYVQQ

SEQ ID NO: 25034 - protein, 483 aa, Bacillus licheniformis
HHNGTNGTMMQYFEWYLPNDGNHWNRLRSDASNLKDKGITAVWIPPAWKGASQNDVGYGAYDLYDLGEFNQKGTVRTKYGTRNQLQAAVTALKSNGIQVYGDVVMNHKGGADATEWVRAVEVNPSNRNQEVSGDYTIEAWTKFDFPGRGNTHSNFKWRWYHFDGVDWDQSRQLQNRIYKFRGKGWDWEVDTENGNYDYLMYADIDMDHPEVVNELRNWGVWYTNTLGLDGFRIDAVKHIKYSFTRDWLTHVRNTTGKNMFAVAEFWKNDIGAIENYLSKTNWNHSVFDVPLHYNLYNASRSGGNYDMRQIFNGTVVQRHPTHAVTFVDNHDSQPEEALESFVEEWFKPLAYALTLTRDQGYPSVFYGDYYGIPTHGVPAMKSKIDPILEARQKYAYGTQRDYLDHPDVIGWTREGDGVHADSGLATLMSDGPGGSKWMEVGKNNAGEVWYDITRNQTNTVTINKDGWGQFHVSGGSVSIYVQQ

SEQ ID NO: 25035 - protein, 483 aa, Bacillus licheniformis
HHNGTNGTMMQYFEWYLPNDGNHWNRLRSDASNLKDKGITAVWIPPAWKGASQNDVGYGAYDLYDLGEFNQKGTVRTKYGTRNQLQAAVTALKSNGIQVYGDVVMNHKGGADATEWVRAVEVNPSNRNQEVSGDYTIEAWTKFDFPGRGNTHSNFKWRWYHFDGVDWDQSRQLQNRIYKFRGKGWDWEVDTENGNYDYLMYADIDMDHPEVVNELRNWGVWYTNMLGLDGFRIDAVKHIKYSFTRDWLTHVRNTTGKNMFAVAEFWKNDIGAIENYLSKTNWNHSVFDVPLHYNLYNASRSGGNYDMRQIFNGTVVQRHPTHAVTFVDNHDSQPEEALESFVEEWFKPLAYALTLTRDQGYPSVFYGDYYGIPTHGVPAMKSKIDPILEARQKYAYGTQRDYLDHPDVIGWTREGDGVHADSGLATLMSDGPGGSKWMEVGKNNAGEVWYDITGNQTNTVTINKDGWGQFHVSGGSVSIYVQQ

SEQ ID NO: 25036 - protein, 483 aa, Bacillus licheniformis
HHNGTNGTMMQYFEWYLPNDGNHWNRLRSDASNLKDKGITAVWIPPAWKGASQNDVGYGAYDLYDLGEFNQKGTVRTKYGTRNQLQAAVTALKSNGIQVYGDVVMNHKGGADATEWVRAVEVNPSNRNQEVSGDYTIEAWTKFDFPGRGNTHSNFKWRWYHFDGVDWDQSRQLQNRIYKFRGKGWDWEVDTENGNYDYLMYADIDMDHPIVVNELRNWGVWYTNTLGLDGFRIDAVKHIKYSFTRDWLTHVRNTTGKNMFAVAEFWKNDIGAIENYLSKTNWNHSVFDVPLHYNLYNASRSGGNYDMRQIFNGTVVQRHPTHAVTFVDNHDSQPEEALESFVEEWFKPLAYALTLTRDQGYPSVFYGDYYGIPTHGVPAMKSKIDPILEARQKYAYGTQRDYLDHPDVIGWTREGDGVHADSGLATLMSDGPGGSKWMEVGKNNAGEVWYDITGNQTNTVTINKDGWGQFHVSGGSVSIYVQQ

SEQ ID NO: 25037 - protein, 483 aa, Bacillus licheniformis
HHNGTNGTMMQYFEWYLPNDGNHWNRLRSDASNLKDKGITAVWIPPAWKGASQNDVGYGAYDLYDLGEFNQKGTVRTKYGTRNQLQAAVTADKSNGIQVYGDVVMNHKGGADATEWVRAVEVNPSNRNQEVSGDYTIEAWTKFDFPGRGNTHSNFKWRWYHFDGVDWDQSRQLQNRIYKFRGKGWDWEVDTENGNYDYLMYADIDMDHPEVVNELRNWGVWYTNTLGLDGFRIDAVKHIKYSFTRDWLTHVRNTTGKNMFAVAEFWKNDIGAIENYLSKTNWNHSVFDVPLHYNLYNASRSGGNYDMRQIFNGTVVQRHPTHAVTFVDNHDSQPEEALESFVEEWFKPLAYALTLTRDQGYPSVFYGDYYGIPTHGVPAMKSKIDPILEARQKYAYGTQRDYLDHPDVIGWTREGDGVHADSGLATLMSDGPGGSKWMEVGKNNAGEVWYDITGNQTNTVTINKDGWGQFHVSGGSVSIYVQQ

SEQ ID NO: 25038 - protein, 483 aa, Bacillus licheniformis
HHNGTNGTMMQYFEWYLPNDGNHWNRLRSDASNLKDKGITAVWIPPAWKGASQNDVGYGAYDLYDLGEFNQKGTVRTKYGTRNQLQAAVTALKSNGIQVYGDVVMNHKGGADATEWVRAVEVNPSNRNQEVSGDYTIEAWTKFDFPGRGNTHSNFKWRWYHFDGVDWDQSRQLQNRIYKFRGKGWDWEVDTENGNYDYLMYADIDMDHPEVVNELRNWGVWYTNTLGADGFRIDAVKHIKYSFTRDWLTHVRNTTGKNMFAVAEFWKNDIGAIENYLSKTNWNHSVFDVPLHYNLYNASRSGGNYDMRQIFNGTVVQRHPTHAVTFVDNHDSQPEEALESFVEEWFKPLAYALTLTRDQGYPSVFYGDYYGIPTHGVPAMKSKIDPILEARQKYAYGTQRDYLDHPDVIGWTREGDGVHADSGLATLMSDGPGGSKWMEVGKNNAGEVWYDITGNQTNTVTINKDGWGQFHVSGGSVSIYVQQ

SEQ ID NO: 25039 - protein, 483 aa, Bacillus licheniformis
HHNGTNGTMMQYFEWYLPNDGNHWNRLRSDASNLKDKGITAVWIPPAWKGASQNDVGYGAYDLYDLGEFNQKGTVRTKYGTRNQLQAAVTALKSNGIQVYGDVVMNHKGGADATEWVRAVEVNPSNRNQEVSGDYTIEAWTKFDFPGRGNTHSNFKWRWYHFDGVDWDQSRQLQNRIYKFRGKGWDWEVDTENGNYDYLMYADIDMDHPEVVNELRNWGVWYTNTLGLDGFRIDAVKHIKYSFTRDWLTHVRNTTGKNMFAVAEFWKNDIGAIENYLSKTNWNHSVFDVPLHYNLYNASRSGGNYDMRQIFNGTVVDRHPTHAVTFVDNHDSQPEEALESFVEEWFKPLAYALTLTRDQGYPSVFYGDYYGIPTHGVPAMKSKIDPILEARQKYAYGTQRDYLDHPDVIGWTREGDGVHADSGLATLMSDGPGGSKWMEVGKNNAGEVWYDITGNQTNTVTINKDGWGQFHVSGGSVSIYVQQ

SEQ ID NO: 25040 - protein, 483 aa, Bacillus licheniformis
HHNGTNGTMMQYFEWYLPNDGNHWNRQRSDASNLKDKGITAVWIPPAWKGASQNDVGYGAYDLYDLGEFNQKGTVRTKYGTRNQLQAAVTALKSNGIQVYGDVVMNHKGGADATEWVRAVEVNPSNRNQEVSGDYTIEAWTKFDFPGRGNTHSNFKWRWYHFDGVDWDQSRQLQNRIYKFRGKGWDWEVDTENGNYDYLMYADIDMDHPEVVNELRNWGVWYTNTLGLDGFRIDAVKHIKYSFTRDWLTHVRNTTGKNMFAVAEFWKNDIGAIENYLSKTNWNHSVFDVPLHYNLYNASRSGGNYDMRQIFNGTVVQRHPTHAVTFVDNHDSQPEEALESFVEEWFKPLAYALTLTRDQGYPSVFYGDYYGIPTHGVPAMKSKIDPILEARQKYAYGTQRDYLDHPDVIGWTREGDGVHADSGLATLMSDGPGGSKWMEVGKNNAGEVWYDITGNQTNTVTINKDGWGQFHVSGGSVSIYVQQ

SEQ ID NO: 25041 - protein, 483 aa, Bacillus licheniformis
HHNGTNGTMMQYFEWYLPNDGNHWNRLRSDASNLKDKGITAVWIPPAWKGASQNDVGYGAYDLYDLGEFNQKGTVRTKYGTRNQLQAAVTALKSNGIQVYGDVVMNHKGGADATEWVRAVEVNPSNRNQEVSGDYTIEAWTKFDFPGRGNTHSNFKWRWYHFDGVDWDQSRQLQNRIYKFRGKGWDWEVDTENGNYDYLMYADIDMDHPEVVNELRNWGVWYTNTLGLDGFRIDAVKHIKYSFTRDWLTHVRNTTGKNMFAVAEFWKNDIGAIENYLSKTNWNHSVFDVPLHYNLYNASRSGGNYDMRQIFNGTVVQRHPTHAVTFVDNHDSQPEEALESFVEEWFKPLAYALTLTRDQGYPSVFYGDYYGIPTHGVPAMKSKIDPILEARQKYAYGTQRDYLDHPDVIGWTREGDGVHADSGLATLMSDGPGGSKWMEVGKNNAGEVWYDITSNQTNTVTINKDGWGQFHVSGGSVSIYVQQ

SEQ ID NO: 25042 - protein, 483 aa, Bacillus licheniformis
HHNGTNETMMQYFEWYLPNDGNHWNRLRSDASNLKDKGITAVWIPPAWKGASQNDVGYGAYDLYDLGEFNQKGTVRTKYGTRNQLQAAVTALKSNGIQVYGDVVMNHKGGADATEWVRAVEVNPSNRNQEVSGDYTIEAWTKFDFPGRGNTHSNFKWRWYHFDGVDWDQSRQLQNRIYKFRGKGWDWEVDTENGNYDYLMYADIDMDHPEVVNELRNWGVWYTNTLGLDGFRIDAVKHIKYSFTRDWLTHVRNTTGKNMFAVAEFWKNDIGAIENYLSKTNWNHSVFDVPLHYNLYNASRSGGNYDMRQIFNGTVVQRHPTHAVTFVDNHDSQPEEALESFVEEWFKPLAYALTLTRDQGYPSVFYGDYYGIPTHGVPAMKSKIDPILEARQKYAYGTQRDYLDHPDVIGWTREGDGVHADSGLATLMSDGPGGSKWMEVGKNNAGEVWYDITGNQTNTVTINKDGWGQFHVSGGSVSIYVQQ

SEQ ID NO: 25043 - protein, 483 aa, Bacillus licheniformis
HHNGTNGTMMQYFEWYLPNDGAHWNRLRSDASNLKDKGITAVWIPPAWKGASQNDVGYGAYDLYDLGEFNQKGTVRTKYGTRNQLQAAVTALKSNGIQVYGDVVMNHKGGADATEWVRAVEVNPSNRNQEVSGDYTIEAWTKFDFPGRGNTHSNFKWRWYHFDGVDWDQSRQLQNRIYKFRGKGWDWEVDTENGNYDYLMYADIDMDHPEVVNELRNWGVWYTNTLGLDGFRIDAVKHIKYSFTRDWLTHVRNTTGKNMFAVAEFWKNDIGAIENYLSKTNWNHSVFDVPLHYNLYNASRSGGNYDMRQIFNGTVVQRHPTHAVTFVDNHDSQPEEALESFVEEWFKPLAYALTLTRDQGYPSVFYGDYYGIPTHGVPAMKSKIDPILEARQKYAYGTQRDYLDHPDVIGWTREGDGVHADSGLATLMSDGPGGSKWMEVGKNNAGEVWYDITGNQTNTVTINKDGWGQFHVSGGSVSIYVQQ

SEQ ID NO: 25044 - protein, 483 aa, Bacillus licheniformis
HHNGTNGTMMQYFEWYLPNDGNHWNRLRSDASNLKDKGITAVWIPPAWKGASQNDVGYGAYDLYDLGEFNQKGTVRTKYGTRNQLQAAVTALKSNGIQVYGDVVMNHKGGADATEWVRAVEVNPSNRNQEVSGDYTIEAWTKFDFPGRGNTHSNFKWRWYHFDGVDWDQSRQLQNRIYKFRGKGWDWEVDTENGNYDYLMYADIDMDHPEVVNELRNWGVWYTNTLGLDGFRIDAVKHIKYSFTRDWLTHVRNTTGKNMFAVAEFWKNDIGAIENYLSKTNWNHSVFDVPRHYNLYNASRSGGNYDMRQIFNGTVVQRHPTHAVTFVDNHDSQPEEALESFVEEWFKPLAYALTLTRDQGYPSVFYGDYYGIPTHGVPAMKSKIDPILEARQKYAYGTQRDYLDHPDVIGWTREGDGVHADSGLATLMSDGPGGSKWMEVGKNNAGEVWYDITGNQTNTVTINKDGWGQFHVSGGSVSIYVQQ

SEQ ID NO: 25045 - protein, 483 aa, Bacillus licheniformis
HHNGTNGTMMQYFEWYLPNDGNHWNRLRSDVSNLKDKGITAVWIPPAWKGASQNDVGYGAYDLYDLGEFNQKGTVRTKYGTRNQLQAAVTALKSNGIQVYGDVVMNHKGGADATEWVRAVEVNPSNRNQEVSGDYTIEAWTKFDFPGRGNTHSNFKWRWYHFDGVDWDQSRQLQNRIYKFRGKGWDWEVDTENGNYDYLMYADIDMDHPEVVNELRNWGVWYTNTLGLDGFRIDAVKHIKYSFTRDWLTHVRNTTGKNMFAVAEFWKNDIGAIENYLSKTNWNHSVFDVPLHYNLYNASRSGGNYDMRQIFNGTVVQRHPTHAVTFVDNHDSQPEEALESFVEEWFKPLAYALTLTRDQGYPSVFYGDYYGIPTHGVPAMKSKIDPILEARQKYAYGTQRDYLDHPDVIGWTREGDGVHADSGLATLMSDGPGGSKWMEVGKNNAGEVWYDITGNQTNTVTINKDGWGQFHVSGGSVSIYVQQ

SEQ ID NO: 25046 - protein, 483 aa, Bacillus licheniformis
HHNGTNGTMMQYFEWYLPNDGNHWNRLRSDASNLKDKGITAVWIPPAWKGASQNDVGYGAYDLYDLGEFNQKGTVRTKYGTRNQLQAAVTALKSNGIQVYGDVVMNHKGGADATEWVRAVEVNPSNRNQEVSGDYTIEAWTKFDFPGRGNTHSNFKWRWYHFDGVDWDQSRQLQNRIYKFRGKGWDWEVDTENGNYDYLMYADIDMDHPEVVNELRNWGVWYTNTLGLDGIRIDAVKHIKYSFTRDWLTHVRNTTGKNMFAVAEFWKNDIGAIENYLSKTNWNHSVFDVPLHYNLYNASRSGGNYDMRQIFNGTVVQRHPTHAVTFVDNHDSQPEEALESFVEEWFKPLAYALTLTRDQGYPSVFYGDYYGIPTHGVPAMKSKIDPILEARQKYAYGTQRDYLDHPDVIGWTREGDGVHADSGLATLMSDGPGGSKWMEVGKNNAGEVWYDITGNQTNTVTINKDGWGQFHVSGGSVSIYVQQ

SEQ ID NO: 25047 - protein, 483 aa, Bacillus licheniformis
HHNGTNGTMMQYFEWYLPNDGNHWNRLRSDASNLKDKGITAVWIPPAWKGASQNDVGYGAYDLYDLGEFNQKGTVRTKYGTRNQLQAAVTALKSNGIQVYGDVVMNHKGGADATEWVRAVEVNPSNRNQEVSGDYTIEAWTKFDFPGRGNTHSNFKWRWYHFDGVDWDQSRQLQNRSYKFRGKGWDWEVDTENGNYDYLMYADIDMDHPEVVNELRNWGVWYTNTLGLDGFRIDAVKHIKYSFTRDWLTHVRNTTGKNMFAVAEFWKNDIGAIENYLSKTNWNHSVFDVPLHYNLYNASRSGGNYDMRQIFNGTVVQRHPTHAVTFVDNHDSQPEEALESFVEEWFKPLAYALTLTRDQGYPSVFYGDYYGIPTHGVPAMKSKIDPILEARQKYAYGTQRDYLDHPDVIGWTREGDGVHADSGLATLMSDGPGGSKWMEVGKNNAGEVWYDITGNQTNTVTINKDGWGQFHVSGGSVSIYVQQ

SEQ ID NO: 25048 - protein, 483 aa, Bacillus licheniformis
HHNGTNGTMMQYFEWYLPNDGNHWNRLRSDASNLKDKGITAVWIPPAWKGASQNDVGYGAYDLYDLGEFNQKGTVRTKYGTRNQLQAAVTALKSNGIQVYGDVVMNHKGGADATEWVRAVEVNPSNRNQEVSGDYTIEAWTKFDFPGRGNTHSNFKWRWYHFDGVDWDQSRQLQNRIYKFRGKGWDWEVDTENGNYDYLMYADIDMDHPEVVNELLNWGVWYTNTLGLDGFRIDAVKHIKYSFTRDWLTHVRNTTGKNMFAVAEFWKNDIGAIENYLSKTNWNHSVFDVPLHYNLYNASRSGGNYDMRQIFNGTVVQRHPTHAVTFVDNHDSQPEEALESFVEEWFKPLAYALTLTRDQGYPSVFYGDYYGIPTHGVPAMKSKIDPILEARQKYAYGTQRDYLDHPDVIGWTREGDGVHADSGLATLMSDGPGGSKWMEVGKNNAGEVWYDITGNQTNTVTINKDGWGQFHVSGGSVSIYVQQ

SEQ ID NO: 25049 - protein, 483 aa, Bacillus licheniformis
HHNGTNGTMMQYFEWYLPNDGNHWNRLRSDASNLKDKGITAVWIPPAWKGASQNDVGYGAYDLYDLGEFNQKGTVRTKYGTRNQLQAAVTALKSNGIQVYGDVVMNHKGGADATEWVRAVEVNPSNRNQEVSGDYTIEAWTKFDFPGRGNTHSNFKWRWYHFDGVDWDQSRQLQNRIYKFRGKGWDWEVDTENGNYDYLMYADIDMDHPEVVNELRNWFVWYTNTLGLDGFRIDAVKHIKYSFTRDWLTHVRNTTGKNMFAVAEFWKNDIGAIENYLSKTNWNHSVFDVPLHYNLYNASRSGGNYDMRQIFNGTVVQRHPTHAVTFVDNHDSQPEEALESFVEEWFKPLAYALTLTRDQGYPSVFYGDYYGIPTHGVPAMKSKIDPILEARQKYAYGTQRDYLDHPDVIGWTREGDGVHADSGLATLMSDGPGGSKWMEVGKNNAGEVWYDITGNQTNTVTINKDGWGQFHVSGGSVSIYVQQ

SEQ ID NO: 25050 - protein, 483 aa, Bacillus licheniformis
HHNGTNGTMMQYFEWYLPNDGNHWNRLRSTASNLKDKGITAVWIPPAWKGASQNDVGYGAYDLYDLGEFNQKGTVRTKYGTRNQLQAAVTALKSNGIQVYGDVVMNHKGGADATEWVRAVEVNPSNRNQEVSGDYTIEAWTKFDFPGRGNTHSNFKWRWYHFDGVDWDQSRQLQNRIYKFRGKGWDWEVDTENGNYDYLMYADIDMDHPEVVNELRNWGVWYTNTLGLDGFRIDAVKHIKYSFTRDWLTHVRNTTGKNMFAVAEFWKNDIGAIENYLSKTNWNHSVFDVPLHYNLYNASRSGGNYDMRQIFNGTVVQRHPTHAVTFVDNHDSQPEEALESFVEEWFKPLAYALTLTRDQGYPSVFYGDYYGIPTHGVPAMKSKIDPILEARQKYAYGTQRDYLDHPDVIGWTREGDGVHADSGLATLMSDGPGGSKWMEVGKNNAGEVWYDITGNQTNTVTINKDGWGQFHVSGGSVSIYVQQ

SEQ ID NO: 25051 - protein, 483 aa, Bacillus licheniformis
HHNGTNGTMMQYFEWYLPNDGNHWNRLRSDASNLKDKGITAVWIPPAWKGASQNDVGYGAYDLYDLGEFNQKGTVRTKYGTRNQLQAAVTALKSNGIQVYGDVVMNHKGGADATEWVRAVEVNPSNRNQEVSGDYTIEAWTKFDFPGRGNTHSNFKWRWYHFDGVDWDQSRQLQNRIYKFRGKGWDWEVDTENGNYDYLMYADIDMDHPEVVNELRNWGVWYTNTLGLDGFRIDAVKHIKYSFTRDWLTHVRNTTGKNMFAVAEFWKNDIGAIENYLSKTNWNHSVFDVPLHYNLYNASRSGGNYDMRQIFNGTVVQRHPTHAVTFVDNHDSQPEEALESFVEEWFKPLAYALTLPRDQGYPSVFYGDYYGIPTHGVPAMKSKIDPILEARQKYAYGTQRDYLDHPDVIGWTREGDGVHADSGLATLMSDGPGGSKWMEVGKNNAGEVWYDITGNQTNTVTINKDGWGQFHVSGGSVSIYVQQ

SEQ ID NO: 25052 - protein, 483 aa, Bacillus licheniformis
HHNGTNGTMMQYFEWYLPNDGNHWNRLRSDASNLKDKGITAVWIPPAWKGASQNDVGYGAYDLYDLGEFNQKGTVRTKYGTRNQLQAAVTALKSNGIQVYGDVVMNHKGGADATEWVRAVEVNPSNRNQEVSGDYTIEAWTKFDFPGRGNTHSNFKWRWYHFDGVDWDQSRQLQNRIYKFRGKGWDWEVDTENGNYDYLMYADIDMDHPEVVNELRNWGVWYTNTLGLDGFRIDAVKHIKYSFTRDWLTHVRNTTGKNMFAVAEFWKNDIGAIENYLSKTNWNHSVFDVPLHYNLYNASRSGGNYDMRQIFNGTVVQRHPTHAVTFVDNHDSQPEEALESFVEEWFKPLAYALTLTRDQGYPSVFYGDYYGIPTHGVPAMKSKIDPILEARQKYAYGTQRDYLDHPDVIGWTREGDGVHADSGLATLMSDGPGGSKWMEVGKNNAGEVWYDITGNQTNTVTINKDGWGQFHVSGGSVYIYVQQ

SEQ ID NO: 25053 - protein, 483 aa, Bacillus licheniformis
HHNGTNGTMMQYFEWYLPNDGNHWNRLRSDASNLKDKGITAVWIPPAWKGASQNDVGYGAYDLYDLGEFNQKGTVRTKYGTRNQLQAAVTALKSNGIQVYGDVVMNHKGGADATEWVRAVEVNPSNRNQEVSGDYTIEAWTKFDFPGRGNTHSNFKWRWYHFDGVDWDQSRQLQNRIYKFRGKGWDWEVDTENGNYDYLMYADIDMDHPEVVNELRNWGVWYTNTLGLDGFRIDAVKHIKYSFTRDWLTHVRNTTGKNMFAVAEFWKNDIGAIENYLSKTNWNHSVFDVPLHYNLYNASRSGGNYDMRQIFNGTVVQRHPTHAVTFVDNHDSQPEEALESFVEEWFKPLAYALTLTRDQGHPSVFYGDYYGIPTHGVPAMKSKIDPILEARQKYAYGTQRDYLDHPDVIGWTREGDGVHADSGLATLMSDGPGGSKWMEVGKNNAGEVWYDITGNQTNTVTINKDGWGQFHVSGGSVSIYVQQ

SEQ ID NO: 25054 - protein, 483 aa, Bacillus licheniformis
HSNGTNGTMMQYFEWYLPNDGNHWNRLRSDASNLKDKGITAVWIPPAWKGASQNDVGYGAYDLYDLGEFNQKGTVRTKYGTRNQLQAAVTALKSNGIQVYGDVVMNHKGGADATEWVRAVEVNPSNRNQEVSGDYTIEAWTKFDFPGRGNTHSNFKWRWYHFDGVDWDQSRQLQNRIYKFRGKGWDWEVDTENGNYDYLMYADIDMDHPEVVNELRNWGVWYTNTLGLDGFRIDAVKHIKYSFTRDWLTHVRNTTGKNMFAVAEFWKNDIGAIENYLSKTNWNHSVFDVPLHYNLYNASRSGGNYDMRQIFNGTVVQRHPTHAVTFVDNHDSQPEEALESFVEEWFKPLAYALTLTRDQGYPSVFYGDYYGIPTHGVPAMKSKIDPILEARQKYAYGTQRDYLDHPDVIGWTREGDGVHADSGLATLMSDGPGGSKWMEVGKNNAGEVWYDITGNQTNTVTINKDGWGQFHVSGGSVSIYVQQ

SEQ ID NO: 25055 - protein, 483 aa, Bacillus licheniformis
HHNGTNGTMMQYFEWYLPSDGNHWNRLRSDASNLKDKGITAVWIPPAWKGASQNDVGYGAYDLYDLGEFNQKGTVRTKYGTRNQLQAAVTALKSNGIQVYGDVVMNHKGGADATEWVRAVEVNPSNRNQEVSGDYTIEAWTKFDFPGRGNTHSNFKWRWYHFDGVDWDQSRQLQNRIYKFRGKGWDWEVDTENGNYDYLMYADIDMDHPEVVNELRNWGVWYTNTLGLDGFRIDAVKHIKYSFTRDWLTHVRNTTGKNMFAVAEFWKNDIGAIENYLSKTNWNHSVFDVPLHYNLYNASRSGGNYDMRQIFNGTVVQRHPTHAVTFVDNHDSQPEEALESFVEEWFKPLAYALTLTRDQGYPSVFYGDYYGIPTHGVPAMKSKIDPILEARQKYAYGTQRDYLDHPDVIGWTREGDGVHADSGLATLMSDGPGGSKWMEVGKNNAGEVWYDITGNQTNTVTINKDGWGQFHVSGGSVSIYVQQ

SEQ ID NO: 25056 - protein, 483 aa, Bacillus licheniformis
HHNGTNGTMMQYFEWYLPNDGNHWNRLRSDASNLKDKGITAVWIPPAWKGASQNDVGYGAYDLYDLGEFNQKGTVRTKYGTRNQLQAAVTALKSNGIQVYGDVVMNHKGGADATEWVRAVEVNPSNRNQEVSGDYTIECWTKFDFPGRGNTHSNFKWRWYHFDGVDWDQSRQLQNRIYKFRGKGWDWEVDTENGNYDYLMYADIDMDHPEVVNELRNWGVWYTNTLGLDGFRIDAVKHIKYSFTRDWLTHVRNTTGKNMFAVAEFWKNDIGAIENYLSKTNWNHSVFDVPLHYNLYNASRSGGNYDMRQIFNGTVVQRHPTHAVTFVDNHDSQPEEALESFVEEWFKPLAYALTLTRDQGYPSVFYGDYYGIPTHGVPAMKSKIDPILEARQKYAYGTQRDYLDHPDVIGWTREGDGVHADSGLATLMSDGPGGSKWMEVGKNNAGEVWYDITGNQTNTVTINKDGWGQFHVSGGSVSIYVQQ

SEQ ID NO: 25057 - protein, 483 aa, Bacillus licheniformis
HHNGTNGTMMQYFEWYLPNDGNHWNRLRSDASNLKDKGITTVWIPPAWKGASQNDVGYGAYDLYDLGEFNQKGTVRTKYGTRNQLQAAVTALKSNGIQVYGDVVMNHKGGADATEWVRAVEVNPSNRNQEVSGDYTIEAWTKFDFPGRGNTHSNFKWRWYHFDGVDWDQSRQLQNRIYKFRGKGWDWEVDTENGNYDYLMYADIDMDHPEVVNELRNWGVWYTNTLGLDGFRIDAVKHIKYSFTRDWLTHVRNTTGKNMFAVAEFWKNDIGAIENYLSKTNWNHSVFDVPLHYNLYNASRSGGNYDMRQIFNGTVVQRHPTHAVTFVDNHDSQPEEALESFVEEWFKPLAYALTLTRDQGYPSVFYGDYYGIPTHGVPAMKSKIDPILEARQKYAYGTQRDYLDHPDVIGWTREGDGVHADSGLATLMSDGPGGSKWMEVGKNNAGEVWYDITGNQTNTVTINKDGWGQFHVSGGSVSIYVQQ

SEQ ID NO: 25058 - protein, 483 aa, Bacillus licheniformis
HHNGTNGTMMQYFEWYLPNDGNHWNRLRSDASNLKDKGITAVWIPPAWKGASQNDVGYGAYDLYDLGEFNQKGTVRTKYGTRNQLQAAVTALKSNGIQVYGDVVMNHKGGADATEWVRAVEVNPSNRNQEVSGDYTIEAWTKFDFPGRGNTHSNFKWRWYHFDGVDWDQSRQLQNRIYKFRGKGWDWEVDTENGNYDYLMYADIDMDHPEVVNELRNWGVWYTNTLGLDGFRIDAVKHIKYSFTRDWLTHVRNTTGKNMFAVAEFWKNDIGAIENYLSKTNWNHSVFDVPLHYNLYNASRSGGNYDMRQIFNGTVVQRHPTHAVTFVDNHDSQPEEALESFVEEWFKPLAYALTLTRDQGYNSVFYGDYYGIPTHGVPAMKSKIDPILEARQKYAYGTQRDYLDHPDVIGWTREGDGVHADSGLATLMSDGPGGSKWMEVGKNNAGEVWYDITGNQTNTVTINKDGWGQFHVSGGSVSIYVQQ

SEQ ID NO: 25059 - protein, 483 aa, Bacillus licheniformis
HHNGTNGTMMQYFEWYLPNDGNHWNRLRSDASNLKDKGITAVWIPPAWKGASQNDVGYGAYDLYDLGEFNQKGTVRTKYGTRNQLQAAVTALKSNGIQVYGDVVMNHKGGADATEWVRAVEVNPSNRNQEVSGDYTIEAWTKFDFPGRGNTHSNFKWRWYHFDGVDWDQSRQLQNRIYKFRGKGWDWEVDTENGNYDYLMYADIDMDDPEVVNELRNWGVWYTNTLGLDGFRIDAVKHIKYSFTRDWLTHVRNTTGKNMFAVAEFWKNDIGAIENYLSKTNWNHSVFDVPLHYNLYNASRSGGNYDMRQIFNGTVVQRHPTHAVTFVDNHDSQPEEALESFVEEWFKPLAYALTLTRDQGYPSVFYGDYYGIPTHGVPAMKSKIDPILEARQKYAYGTQRDYLDHPDVIGWTREGDGVHADSGLATLMSDGPGGSKWMEVGKNNAGEVWYDITGNQTNTVTINKDGWGQFHVSGGSVSIYVQQ

SEQ ID NO: 25060 - protein, 483 aa, Bacillus licheniformis
HHNGTNGIMMQYFEWYLPNDGNHWNRLRSDASNLKDKGITAVWIPPAWKGASQNDVGYGAYDLYDLGEFNQKGTVRTKYGTRNQLQAAVTALKSNGIQVYGDVVMNHKGGADATEWVRAVEVNPSNRNQEVSGDYTIEAWTKFDFPGRGNTHSNFKWRWYHFDGVDWDQSRQLQNRIYKFRGKGWDWEVDTENGNYDYLMYADIDMDHPEVVNELRNWGVWYTNTLGLDGFRIDAVKHIKYSFTRDWLTHVRNTTGKNMFAVAEFWKNDIGAIENYLSKTNWNHSVFDVPLHYNLYNASRSGGNYDMRQIFNGTVVQRHPTHAVTFVDNHDSQPEEALESFVEEWFKPLAYALTLTRDQGYPSVFYGDYYGIPTHGVPAMKSKIDPILEARQKYAYGTQRDYLDHPDVIGWTREGDGVHADSGLATLMSDGPGGSKWMEVGKNNAGEVWYDITGNQTNTVTINKDGWGQFHVSGGSVSIYVQQ

SEQ ID NO: 25061 - protein, 483 aa, Bacillus licheniformis
HHNGTNGTMMQYFEWYLPNDGNHWNRLRSDALNLKDKGITAVWIPPAWKGASQNDVGYGAYDLYDLGEFNQKGTVRTKYGTRNQLQAAVTALKSNGIQVYGDVVMNHKGGADATEWVRAVEVNPSNRNQEVSGDYTIEAWTKFDFPGRGNTHSNFKWRWYHFDGVDWDQSRQLQNRIYKFRGKGWDWEVDTENGNYDYLMYADIDMDHPEVVNELRNWGVWYTNTLGLDGFRIDAVKHIKYSFTRDWLTHVRNTTGKNMFAVAEFWKNDIGAIENYLSKTNWNHSVFDVPLHYNLYNASRSGGNYDMRQIFNGTVVQRHPTHAVTFVDNHDSQPEEALESFVEEWFKPLAYALTLTRDQGYPSVFYGDYYGIPTHGVPAMKSKIDPILEARQKYAYGTQRDYLDHPDVIGWTREGDGVHADSGLATLMSDGPGGSKWMEVGKNNAGEVWYDITGNQTNTVTINKDGWGQFHVSGGSVSIYVQQ

SEQ ID NO: 25062 - protein, 483 aa, Bacillus licheniformis
HHNGTNGTMMQYFEWYLPNDGNHWDRLRSDASNLKDKGITAVWIPPAWKGASQNDVGYGAYDLYDLGEFNQKGTVRTKYGTRNQLQAAVTALKSNGIQVYGDVVMNHKGGADATEWVRAVEVNPSNRNQEVSGDYTIEAWTKFDFPGRGNTHSNFKWRWYHFDGVDWDQSRQLQNRIYKFRGKGWDWEVDTENGNYDYLMYADIDMDHPEVVNELRNWGVWYTNTLGLDGFRIDAVKHIKYSFTRDWLTHVRNTTGKNMFAVAEFWKNDIGAIENYLSKTNWNHSVFDVPLHYNLYNASRSGGNYDMRQIFNGTVVQRHPTHAVTFVDNHDSQPEEALESFVEEWFKPLAYALTLTRDQGYPSVFYGDYYGIPTHGVPAMKSKIDPILEARQKYAYGTQRDYLDHPDVIGWTREGDGVHADSGLATLMSDGPGGSKWMEVGKNNAGEVWYDITGNQTNTVTINKDGWGQFHVSGGSVSIYVQQ

SEQ ID NO: 25063 - protein, 483 aa, Bacillus licheniformis
HHNGTNGTMMQYFEWYLPNDGNHWNRLRSDASNLKDKGITAVWIPPAWKGASQNDVGYGAYDLYDLGEFNQKGTVRTKYGTRNQLQAAVTALKSNGIQVYGDVVMNHKGGADATEWVRAVEVNPSNRNQEVSGDYTIEAWTKFDFPGRGNTHSNFKWRWYHFDGVDWDQSRQLQNRIYKFRGKGWDWEVDTENGNYDYLMYADIDMDHPEVVNELRNWGVWYTNTLGLDGFRIDAVKHIKYSFTRDWLTHVRNTTGKNMFAVAEFWKNDIGAIENYLSKTNWNHSVFDVPLHYNLYNASRSGGNYDMRQIFNGTVVSRHPTHAVTFVDNHDSQPEEALESFVEEWFKPLAYALTLTRDQGYPSVFYGDYYGIPTHGVPAMKSKIDPILEARQKYAYGTQRDYLDHPDVIGWTREGDGVHADSGLATLMSDGPGGSKWMEVGKNNAGEVWYDITGNQTNTVTINKDGWGQFHVSGGSVSIYVQQ

SEQ ID NO: 25064 - protein, 483 aa, Bacillus licheniformis
HHNGTNGTMMQYFEWYLPNDGNHWNRLRSDASNLKDKGITAVWIPPAWKGASQNDVGYGAYDLYDLGEFNQDGTVRTKYGTRNQLQAAVTALKSNGIQVYGDVVMNHKGGADATEWVRAVEVNPSNRNQEVSGDYTIEAWTKFDFPGRGNTHSNFKWRWYHFDGVDWDQSRQLQNRIYKFRGKGWDWEVDTENGNYDYLMYADIDMDHPEVVNELRNWGVWYTNTLGLDGFRIDAVKHIKYSFTRDWLTHVRNTTGKNMFAVAEFWKNDIGAIENYLSKTNWNHSVFDVPLHYNLYNASRSGGNYDMRQIFNGTVVQRHPTHAVTFVDNHDSQPEEALESFVEEWFKPLAYALTLTRDQGYPSVFYGDYYGIPTHGVPAMKSKIDPILEARQKYAYGTQRDYLDHPDVIGWTREGDGVHADSGLATLMSDGPGGSKWMEVGKNNAGEVWYDITGNQTNTVTINKDGWGQFHVSGGSVSIYVQQ

SEQ ID NO: 25065 - protein, 483 aa, Bacillus licheniformis
HHNGTNGTMMQYFEWYLPNDGNHWNRLRSDASNLKDKGITGVWIPPAWKGASQNDVGYGAYDLYDLGEFNQKGTVRTKYGTRNQLQAAVTALKSNGIQVYGDVVMNHKGGADATEWVRAVEVNPSNRNQEVSGDYTIEAWTKFDFPGRGNTHSNFKWRWYHFDGVDWDQSRQLQNRIYKFRGKGWDWEVDTENGNYDYLMYADIDMDHPEVVNELRNWGVWYTNTLGLDGFRIDAVKHIKYSFTRDWLTHVRNTTGKNMFAVAEFWKNDIGAIENYLSKTNWNHSVFDVPLHYNLYNASRSGGNYDMRQIFNGTVVQRHPTHAVTFVDNHDSQPEEALESFVEEWFKPLAYALTLTRDQGYPSVFYGDYYGIPTHGVPAMKSKIDPILEARQKYAYGTQRDYLDHPDVIGWTREGDGVHADSGLATLMSDGPGGSKWMEVGKNNAGEVWYDITGNQTNTVTINKDGWGQFHVSGGSVSIYVQQ

SEQ ID NO: 25066 - protein, 483 aa, Bacillus licheniformis
HHNGTNGTMMQYFEWYLPNDGNHWNRLRSDASNLKDKGITAVWIPPAWKGASQNDVGYGAYDLYDLGEFNQKGTVRTKYGTRNQLQAAVTALKSNGIQVYGDVVMNHKGGADATEWVRAVEVNPSNRNQEVSGDYTIEAWTKFDFPGRGNTHSNFKWRWYHFDGVDWDQSRQLQNRIYKFRGKGWDWEVDTENGNYDYLMYADIDMDHPEVVNELRNWGVWYTNTLGLDGFRIDAVKHIKYSFTRDWLTHVRNTTGKNMFAVAEFWKNDIGAIENYLSKTNWNHSVFDVPLHYNLYNASRSGGNYDMRQIFNGTVVQRHPTHAVTFVDNHDSQPEEALESFVEEWFKPLAYALTLTRDQGYPSVFYGDYYGIPTHGVPAMKSKIDPILEARQKYAYGLQRDYLDHPDVIGWTREGDGVHADSGLATLMSDGPGGSKWMEVGKNNAGEVWYDITGNQTNTVTINKDGWGQFHVSGGSVSIYVQQ

SEQ ID NO: 25067 - protein, 483 aa, Bacillus licheniformis
HHNGTNGTMMQYFEWYLPNDGNHWNRLRSDASNLKDKGITAVWIPPAWKGASQNDVGYGAYDLYDLGEFNQKGTVRTKYGTRNQLQAAVTALKSNGIQVYGDVVMNHKGGADATEWVRAVEVNPSNRNQEVSGDYTIEAWTKFDFPGRGNTHSNFKWRWYHFDGVDWDQSRQLQNRIYKFRGKGWDWEVDTENGNYDYLMYADIDMDHPEVVNELRNWGVWYTNTLGLDGFRIDAVKHIKYSFTRDWLTHVRNTTGKNMFAVAEFWKNDIGAIENYLSKTNWNHSVFDVPLHYNLYNASRSDGNYDMRQIFNGTVVQRHPTHAVTFVDNHDSQPEEALESFVEEWFKPLAYALTLTRDQGYPSVFYGDYYGIPTHGVPAMKSKIDPILEARQKYAYGTQRDYLDHPDVIGWTREGDGVHADSGLATLMSDGPGGSKWMEVGKNNAGEVWYDITGNQTNTVTINKDGWGQFHVSGGSVSIYVQQ

SEQ ID NO: 25068 - protein, 483 aa, Bacillus licheniformis
HHNGTNGTMMQYFEWYLPNDGNHWNRLRSDASNLKDKGITAVWIPPAWKGASQNDVGYGAYDLYDLGEFNQKGTVRTKYGTRNQLQAAVTALKSNGIQVYGDVVMNHKGGADATEWVRAVEVNPSNRNQEVSGDYTIEAWTKFDFPGRGNTHSNFKWRWYHFDGVDWDQSRQLQNRIYKFRGKGWDWEVDTENGNYDYLMYADIDMDHPEVVNELRNWGVWYTNTLGLDGFRIDAVKHIKYSFTRDWLTHVRNTTGKNMFAVAEFWKNDIGAIENYLSKTNWNHSVFDVPLHYNLYGASRSGGNYDMRQIFNGTVVQRHPTHAVTFVDNHDSQPEEALESFVEEWFKPLAYALTLTRDQGYPSVFYGDYYGIPTHGVPAMKSKIDPILEARQKYAYGTQRDYLDHPDVIGWTREGDGVHADSGLATLMSDGPGGSKWMEVGKNNAGEVWYDITGNQTNTVTINKDGWGQFHVSGGSVSIYVQQ

SEQ ID NO: 25069 - protein, 483 aa, Bacillus licheniformis
HHNGTNGTMMQYFEWYLPNDGNHWNRLTSDASNLKDKGITAVWIPPAWKGASQNDVGYGAYDLYDLGEFNQKGTVRTKYGTRNQLQAAVTALKSNGIQVYGDVVMNHKGGADATEWVRAVEVNPSNRNQEVSGDYTIEAWTKFDFPGRGNTHSNFKWRWYHFDGVDWDQSRQLQNRIYKFRGKGWDWEVDTENGNYDYLMYADIDMDHPEVVNELRNWGVWYTNTLGLDGFRIDAVKHIKYSFTRDWLTHVRNTTGKNMFAVAEFWKNDIGAIENYLSKTNWNHSVFDVPLHYNLYNASRSGGNYDMRQIFNGTVVQRHPTHAVTFVDNHDSQPEEALESFVEEWFKPLAYALTLTRDQGYPSVFYGDYYGIPTHGVPAMKSKIDPILEARQKYAYGTQRDYLDHPDVIGWTREGDGVHADSGLATLMSDGPGGSKWMEVGKNNAGEVWYDITGNQTNTVTINKDGWGQFHVSGGSVSIYVQQ

SEQ ID NO: 25070 - protein, 483 aa, Bacillus licheniformis
HHNGTNGTMMQYFEWYLPNDGNHWNRLRSDASNLKDKGITAVWIPPAWKGASQNDVGYGAYDLYDLGEFNQKGTVRTKYGTRNQLQAAVTALKSNGIQVYGDVVMNHKGGADATEWVRAVEVNPSNRNQEVSGDYTIEAWTKFDFPGRGNTHSNFKWRWYHFDGVDWDQSRQLQNRIYKFRGKGWDWEVDTENGNYDYLMYADIDMDHPEVVNELRNWGVWYTNTLGLDGFRIDAVKHIKYSFTRDWLTHVRNTTGKNMFAVAEFWKNDIGAIENYLSKTNWNHSVFDVPLHYNLYNASRSGGNYDMRQIFNGTVVQRHPTHAVTFVDNHDSQPEEALESFVEEWFKPLAYALTLTRDQGYPSVFYGDYYGIPTHGVPAMKSKIDPILEARQKYAYGTQRDYLDHPDVIGWTREGDGVHADSGWATLMSDGPGGSKWMEVGKNNAGEVWYDITGNQTNTVTINKDGWGQFHVSGGSVSIYVQQ

SEQ ID NO: 25071 - protein, 483 aa, Bacillus licheniformis
HHNGTNGTMMQYFEWYLPNDGNHWNVLRSDASNLKDKGITAVWIPPAWKGASQNDVGYGAYDLYDLGEFNQKGTVRTKYGTRNQLQAAVTALKSNGIQVYGDVVMNHKGGADATEWVRAVEVNPSNRNQEVSGDYTIEAWTKFDFPGRGNTHSNFKWRWYHFDGVDWDQSRQLQNRIYKFRGKGWDWEVDTENGNYDYLMYADIDMDHPEVVNELRNWGVWYTNTLGLDGFRIDAVKHIKYSFTRDWLTHVRNTTGKNMFAVAEFWKNDIGAIENYLSKTNWNHSVFDVPLHYNLYNASRSGGNYDMRQIFNGTVVQRHPTHAVTFVDNHDSQPEEALESFVEEWFKPLAYALTLTRDQGYPSVFYGDYYGIPTHGVPAMKSKIDPILEARQKYAYGTQRDYLDHPDVIGWTREGDGVHADSGLATLMSDGPGGSKWMEVGKNNAGEVWYDITGNQTNTVTINKDGWGQFHVSGGSVSIYVQQ

SEQ ID NO: 25072 - protein, 483 aa, Bacillus licheniformis
HHNGTNGTMMQYFEWYLPNDGNHWNRLRSDASNLKDKGITAVWIPPAWKGASQNDVGYGAYDLYDLGEFNQKGTVRTKYGTRNQLQAAVTALKSNGIQVYGDVVMNHKGGADATEWVRAVEVNPSNRNQEVSGDYTIEAWTKFDFPGRGNTHSNFKWRWYHFDGVDWDQSRQLQNRIYKFRGKGWDWEVDTENGNYDYLMYADIDMDHPEVVNELRNWGVWYTNTLGLDGFRIDAVKHIKYSFTRDWLTHVRNTTGKNMFAVAEFWKNDIGAIENYLSKTNWNHSVFDVTLHYNLYNASRSGGNYDMRQIFNGTVVQRHPTHAVTFVDNHDSQPEEALESFVEEWFKPLAYALTLTRDQGYPSVFYGDYYGIPTHGVPAMKSKIDPILEARQKYAYGTQRDYLDHPDVIGWTREGDGVHADSGLATLMSDGPGGSKWMEVGKNNAGEVWYDITGNQTNTVTINKDGWGQFHVSGGSVSIYVQQ

SEQ ID NO: 25073 - protein, 483 aa, Bacillus licheniformis
HHNGTNGTMMQYFEWYLPNDGNHWNRLRSDASNLKDKGITAVWIPPAWKGASQNDVGYGAYDLYDLGEFNQKGTVRTKYGTRNQLQAAVTALKSNGIQVYGDVVMNHKGGADATEWVRAVEVNPSNRNQEVSGDYTIEAWTKFDFPGRGNTHSNFKWRWYHFDGVDWDQSRQLQNRIYKFRGKGWDWEVDTENGNYDYLMYADIDMDHPEVVNELWNWGVWYTNTLGLDGFRIDAVKHIKYSFTRDWLTHVRNTTGKNMFAVAEFWKNDIGAIENYLSKTNWNHSVFDVPLHYNLYNASRSGGNYDMRQIFNGTVVQRHPTHAVTFVDNHDSQPEEALESFVEEWFKPLAYALTLTRDQGYPSVFYGDYYGIPTHGVPAMKSKIDPILEARQKYAYGTQRDYLDHPDVIGWTREGDGVHADSGLATLMSDGPGGSKWMEVGKNNAGEVWYDITGNQTNTVTINKDGWGQFHVSGGSVSIYVQQ

SEQ ID NO: 25074 - protein, 483 aa, Bacillus licheniformis
HHKGTNGTMMQYFEWYLPNDGNHWNRLRSDASNLKDKGITAVWIPPAWKGASQNDVGYGAYDLYDLGEFNQKGTVRTKYGTRNQLQAAVTALKSNGIQVYGDVVMNHKGGADATEWVRAVEVNPSNRNQEVSGDYTIEAWTKFDFPGRGNTHSNFKWRWYHFDGVDWDQSRQLQNRIYKFRGKGWDWEVDTENGNYDYLMYADIDMDHPEVVNELRNWGVWYTNTLGLDGFRIDAVKHIKYSFTRDWLTHVRNTTGKNMFAVAEFWKNDIGAIENYLSKTNWNHSVFDVPLHYNLYNASRSGGNYDMRQIFNGTVVQRHPTHAVTFVDNHDSQPEEALESFVEEWFKPLAYALTLTRDQGYPSVFYGDYYGIPTHGVPAMKSKIDPILEARQKYAYGTQRDYLDHPDVIGWTREGDGVHADSGLATLMSDGPGGSKWMEVGKNNAGEVWYDITGNQTNTVTINKDGWGQFHVSGGSVSIYVQQ

SEQ ID NO: 25075 - protein, 483 aa, Bacillus licheniformis
HHNGTNGTMMQYFEWYLPNDGNHWNRLRSDASNLKDKGITAVWIPPAWKGASQNDVGYGAYDLYDLGEFNQKGTVRTKYGTRNQLQAAVTALKSNGIQVYGDVVMNHKGGADATEWVRAVEVNPSNRNQEVSGDYTIEAWTKFDFPGRGNTHSNFKWRWYHFDGVDWDQSRQLQNRIYKFRGKGWDWEVDTENGNYDYLMYADIDMDHPEVVNELRNWGVWYTNTLGLDGFRIDAVKHIKYSFTRDWLTHVRNTTGKNMFAVAEFWKNDIGAIENYASKTNWNHSVFDVPLHYNLYNASRSGGNYDMRQIFNGTVVQRHPTHAVTFVDNHDSQPEEALESFVEEWFKPLAYALTLTRDQGYPSVFYGDYYGIPTHGVPAMKSKIDPILEARQKYAYGTQRDYLDHPDVIGWTREGDGVHADSGLATLMSDGPGGSKWMEVGKNNAGEVWYDITGNQTNTVTINKDGWGQFHVSGGSVSIYVQQ

SEQ ID NO: 25076 - protein, 483 aa, Bacillus licheniformis
HHNGTNGTMMQYFEWYLPNDGNHWNRLRSDASNLKDKGITAVWIPPAWKGASQNDVGYGAYDLYDLGEFNQKGTVRTKYGTRNQLQAAVTALKSNGIQVYGDVVMNHKGGADATEWVRAVEVNPSNRNQEVSGDYTIEAWTKFDFPGRGNTHSNFKWRWYHFDGVDWDQSRQLQNRIYKFRGKGWDWEVDTENGNYDYLMYADIDMDHPEVVNELRNWGVWYTNTLGLDGFRIDAVKHIKYSFTRDWLTHVRNTTGKNMFAVAEFWKNDIGAIENYLSKTNWNHSVFDVPLHYNLYNASRSGGNYDMRQIFNGTVVMRHPTHAVTFVDNHDSQPEEALESFVEEWFKPLAYALTLTRDQGYPSVFYGDYYGIPTHGVPAMKSKIDPILEARQKYAYGTQRDYLDHPDVIGWTREGDGVHADSGLATLMSDGPGGSKWMEVGKNNAGEVWYDITGNQTNTVTINKDGWGQFHVSGGSVSIYVQQ

SEQ ID NO: 25077 - protein, 483 aa, Bacillus licheniformis
HHNGTNGTMMQYFEWYLPNDGNHWNRLRSDASNLKDKGITAVWIPPAWKGASQNDVGYGAYDLYDLGEFNQKGTVRTKYGTRNQLQAAVTALKSNGIQVYGDVVMNHKGGADATEWVRAVEVNPSNRNQEVSGDYTIEAWTKFDFPGRGNTHSNFKWRWYHFDGVDWDQSRQLQNRIYKFRGKGWDWEVDTENGNYDYLMYADIDMDHPEVVDELRNWGVWYTNTLGLDGFRIDAVKHIKYSFTRDWLTHVRNTTGKNMFAVAEFWKNDIGAIENYLSKTNWNHSVFDVPLHYNLYNASRSGGNYDMRQIFNGTVVQRHPTHAVTFVDNHDSQPEEALESFVEEWFKPLAYALTLTRDQGYPSVFYGDYYGIPTHGVPAMKSKIDPILEARQKYAYGTQRDYLDHPDVIGWTREGDGVHADSGLATLMSDGPGGSKWMEVGKNNAGEVWYDITGNQTNTVTINKDGWGQFHVSGGSVSIYVQQ

SEQ ID NO: 25078 - protein, 483 aa, Bacillus licheniformis
HHNGTNGTMMQYFEWYLPNDGNHWNRARSDASNLKDKGITAVWIPPAWKGASQNDVGYGAYDLYDLGEFNQKGTVRTKYGTRNQLQAAVTALKSNGIQVYGDVVMNHKGGADATEWVRAVEVNPSNRNQEVSGDYTIEAWTKFDFPGRGNTHSNFKWRWYHFDGVDWDQSRQLQNRIYKFRGKGWDWEVDTENGNYDYLMYADIDMDHPEVVNELRNWGVWYTNTLGLDGFRIDAVKHIKYSFTRDWLTHVRNTTGKNMFAVAEFWKNDIGAIENYLSKTNWNHSVFDVPLHYNLYNASRSGGNYDMRQIFNGTVVQRHPTHAVTFVDNHDSQPEEALESFVEEWFKPLAYALTLTRDQGYPSVFYGDYYGIPTHGVPAMKSKIDPILEARQKYAYGTQRDYLDHPDVIGWTREGDGVHADSGLATLMSDGPGGSKWMEVGKNNAGEVWYDITGNQTNTVTINKDGWGQFHVSGGSVSIYVQQ

SEQ ID NO: 25079 - protein, 483 aa, Bacillus licheniformis
HHNGTNGTMMQYFEWYLPNDGNHWNRLRSDASNLKDKGITAVWIPPAWKGASQNDVGYGAYDLYDLGEFNQKGTVRTKYGTRNQLQAAVTALKSAGIQVYGDVVMNHKGGADATEWVRAVEVNPSNRNQEVSGDYTIEAWTKFDFPGRGNTHSNFKWRWYHFDGVDWDQSRQLQNRIYKFRGKGWDWEVDTENGNYDYLMYADIDMDHPEVVNELRNWGVWYTNTLGLDGFRIDAVKHIKYSFTRDWLTHVRNTTGKNMFAVAEFWKNDIGAIENYLSKTNWNHSVFDVPLHYNLYNASRSGGNYDMRQIFNGTVVQRHPTHAVTFVDNHDSQPEEALESFVEEWFKPLAYALTLTRDQGYPSVFYGDYYGIPTHGVPAMKSKIDPILEARQKYAYGTQRDYLDHPDVIGWTREGDGVHADSGLATLMSDGPGGSKWMEVGKNNAGEVWYDITGNQTNTVTINKDGWGQFHVSGGSVSIYVQQ

SEQ ID NO: 25080 - protein, 483 aa, Bacillus licheniformis
HHNGTNGTMMQYFEWYLPNDGNHWNRLRSDASNLKDKGITAVWIPPAWKGASQNDVGYGAYDLYDLGEFNQKGTVRTKYGTCNQLQAAVTALKSNGIQVYGDVVMNHKGGADATEWVRAVEVNPSNRNQEVSGDYTIEAWTKFDFPGRGNTHSNFKWRWYHFDGVDWDQSRQLQNRIYKFRGKGWDWEVDTENGNYDYLMYADIDMDHPEVVNELRNWGVWYTNTLGLDGFRIDAVKHIKYSFTRDWLTHVRNTTGKNMFAVAEFWKNDIGAIENYLSKTNWNHSVFDVPLHYNLYNASRSGGNYDMRQIFNGTVVQRHPTHAVTFVDNHDSQPEEALESFVEEWFKPLAYALTLTRDQGYPSVFYGDYYGIPTHGVPAMKSKIDPILEARQKYAYGTQRDYLDHPDVIGWTREGDGVHADSGLATLMSDGPGGSKWMEVGKNNAGEVWYDITGNQTNTVTINKDGWGQFHVSGGSVSIYVQQ

SEQ ID NO: 25081 - protein, 483 aa, Bacillus licheniformis
HHNGTNGTMMQYFEWYLPNDGNHWNRLRSDASNLKDKGITAVWIPPAWKGASQNDVGYGAYDLYDLGEFNQKGTVRTKYGTRNQLQAAVTALKSNGIQVYGDVVMNHKGGADATEWVRAVEVNPSNRNQEVSGDYTIEAWTKFDFPGRGNTHSNFKWRWYHFDGVDWDQSRQLQNRIYKFRGKGWDWEVDTENGNYDYLMYADIDMDAPEVVNELRNWGVWYTNTLGLDGFRIDAVKHIKYSFTRDWLTHVRNTTGKNMFAVAEFWKNDIGAIENYLSKTNWNHSVFDVPLHYNLYNASRSGGNYDMRQIFNGTVVQRHPTHAVTFVDNHDSQPEEALESFVEEWFKPLAYALTLTRDQGYPSVFYGDYYGIPTHGVPAMKSKIDPILEARQKYAYGTQRDYLDHPDVIGWTREGDGVHADSGLATLMSDGPGGSKWMEVGKNNAGEVWYDITGNQTNTVTINKDGWGQFHVSGGSVSIYVQQ

SEQ ID NO: 25082 - protein, 483 aa, Bacillus licheniformis
HHNGTNGTMMQYFEWYLPNDGNHWNRLRSDASNLKDKGITAVWIPPAWKGASQNDVGYGAYDLYDLGEFNQKGTVRTKYGTRNQLQAAVTALKSNGIQVYGDVVMNHKGGADATEWVRAVEVNPSNRNQEVSGDYTIEAWTKFDFPGRGNTHSNFKWRWYHFDGVDWDQSRQLQNRIYKFRGKGWDWEVDTENGNYDYLMYADIDMDHPEVVNELRNWGVWYTNTLGLDGFRIDAVKHIKYSFTRDWLTHVRNTTGKNMFAVAEFWKNDIGAIENYLSKTNWNHSVFDVPLHYNLYNASRSGGNYDMRQIFNGTVVQRHPTHAVTFVDNHDSQPEEALEPFVEEWFKPLAYALTLTRDQGYPSVFYGDYYGIPTHGVPAMKSKIDPILEARQKYAYGTQRDYLDHPDVIGWTREGDGVHADSGLATLMSDGPGGSKWMEVGKNNAGEVWYDITGNQTNTVTINKDGWGQFHVSGGSVSIYVQQ

SEQ ID NO: 25083 - protein, 483 aa, Bacillus licheniformis
HHNGTNGTMMQYFEWYLPNDGNHWNRLRSDASNLKDKGITAVWIPPAWKGASQNDVGYGAYDLYDLGEFNQKGTVRTKYGTRNQLQAAVTALKSNGIQVYGDVVMNHKGGADATEWVRAVEVNPSNRNQEVSGDYTIEAWTKFDFPGRGNTHSNFKWRWYHFDGVDWDQSRQLQNRIYKFRGKGWDWEVDTENGNYDYLMYADIDMDHPEVVNELRNWGVWYTHTLGLDGFRIDAVKHIKYSFTRDWLTHVRNTTGKNMFAVAEFWKNDIGAIENYLSKTNWNHSVFDVPLHYNLYNASRSGGNYDMRQIFNGTVVQRHPTHAVTFVDNHDSQPEEALESFVEEWFKPLAYALTLTRDQGYPSVFYGDYYGIPTHGVPAMKSKIDPILEARQKYAYGTQRDYLDHPDVIGWTREGDGVHADSGLATLMSDGPGGSKWMEVGKNNAGEVWYDITGNQTNTVTINKDGWGQFHVSGGSVSIYVQQ

SEQ ID NO: 25084 - protein, 483 aa, Bacillus licheniformis
HHNGTNGTMMQYFEWYLPNDGNHWNRLRSDASNLKDKGITAVWIPPAWKGASQNDVGYGAYDLYDLGEFNQKGTVRTKYGTRNQLQAAVTALKSNGIQVYGDVVMNHKGGADATEWVRAVEVNPSNRNQEVSGDYTIEAWTKFDFPGRGNTHSNFKWRWYHFDGVDWDQSRQLQNRIYKFRGKGWDWEVDTENGNYDYLMYADIDMDHPEVVNELRNWGVWYTNTLGLDGFRIDAVKHIKYSFTRDWLTHVRNTTGKNMFAVAEFWKNDIGAIENYLSKTNWNHSVFDVPLHYNLYNASRSGGNYDMRQIFNGTVVQRHPTHAVTFVDNHDSQPEEALESFVEEWFKPLAYALTLTRDQGYPSVFYGDYYGIPTHGVPAMKSKIDPILEARQKYAYGTQRDYLDHPDVIGWTREGDGVHADSGLATLMSDGRGGSKWMEVGKNNAGEVWYDITGNQTNTVTINKDGWGQFHVSGGSVSIYVQQ

SEQ ID NO: 25085 - protein, 483 aa, Bacillus licheniformis
HHNGTNGTMMQYFEWYLPNDGNHWNRLRSDASNLKDKGITAVWIPPAWKGASQNDVGYGAYDLYDLGEFNQKGTVRTKYGTRNQLQAAVTALKSNGIQVYGDVVMNHKGGADATEWVRAVEVNPSNRNQEVSGDYTIEAWTKFDFPGRGNTHSNFKWRWYHFDGVDWDQSRQLQNRIYKFRGKGWDWEVDTENGNYDYLMYADIDMDHPEVVNELRNWGVWYTNTLGLDGFRIDAVKHIKYSFTRDWLTHVRNTTGKNMFAVAEFWKNDIGAIENYLSKTNWNHSVFDVPLHYNLYNASRSGGNYDMRQIFNGTVVQRHPTHAVTFVDNHDSQPEEALESFVEEWFKPLAYALTLTRDQGYPSVFYGDYYGIPTHGVPAMKSKIDPILEARQKYAYGTQRDYLDHPDVIGWTREGDGVHADSGLSTLMSDGPGGSKWMEVGKNNAGEVWYDITGNQTNTVTINKDGWGQFHVSGGSVSIYVQQ

SEQ ID NO: 25086 - protein, 483 aa, Bacillus licheniformis
HHNGTNGTMMQYFEWYLPNDGNHWNDLRSDASNLKDKGITAVWIPPAWKGASQNDVGYGAYDLYDLGEFNQKGTVRTKYGTRNQLQAAVTALKSNGIQVYGDVVMNHKGGADATEWVRAVEVNPSNRNQEVSGDYTIEAWTKFDFPGRGNTHSNFKWRWYHFDGVDWDQSRQLQNRIYKFRGKGWDWEVDTENGNYDYLMYADIDMDHPEVVNELRNWGVWYTNTLGLDGFRIDAVKHIKYSFTRDWLTHVRNTTGKNMFAVAEFWKNDIGAIENYLSKTNWNHSVFDVPLHYNLYNASRSGGNYDMRQIFNGTVVQRHPTHAVTFVDNHDSQPEEALESFVEEWFKPLAYALTLTRDQGYPSVFYGDYYGIPTHGVPAMKSKIDPILEARQKYAYGTQRDYLDHPDVIGWTREGDGVHADSGLATLMSDGPGGSKWMEVGKNNAGEVWYDITGNQTNTVTINKDGWGQFHVSGGSVSIYVQQ

SEQ ID NO: 25087 - protein, 483 aa, Bacillus licheniformis
HHNGTNGTMMQYFEWYLPNDGNHWNRLRSDASNLKDKGITAVWIPPAWKGASQNDVGYGAYDLYDLGEFNQKGTVRTKYGTRNQLQAAVTALKSNGIQVYGDVVMNHKGGADATEWVRAVEVNPSNRNQEVSGDYTIEAWTKFDFPGRGNTHSNFKWRWYHFDGVDWDQSRQLQNRIYKFRGKGWDWEVDTENGNYDYLMYADIDMDHPEVVNELRNWGVWYTNTLGLDGFRIDAVKHIKYSFTRDWLTHVRNTTGKNMFAVAEFWKNDIGAIENYLSKTNWNHSVFDVPLHYNLYNASRSGGNYDMRQIFNGTVVQREPTHAVTFVDNHDSQPEEALESFVEEWFKPLAYALTLTRDQGYPSVFYGDYYGIPTHGVPAMKSKIDPILEARQKYAYGTQRDYLDHPDVIGWTREGDGVHADSGLATLMSDGPGGSKWMEVGKNNAGEVWYDITGNQTNTVTINKDGWGQFHVSGGSVSIYVQQ

SEQ ID NO: 25088 - protein, 483 aa, Bacillus licheniformis
HHNGTNGTMMQYFEWYLPNDGNHWNRLRSDASNLKDKGITAVWIPPAWKGASQNDVGYGAYDLYDLGEFNQKGTVRTKYGTRNQLQAAVTALKSNGIQVYGDVVMNHKGGADATEWVRAVEVNPSNRNQEVSGDYTIEAWTKFDFPGRGNTHSNFKWRWYHFDGVDWDQSRQLQNRIYKFRGKGWDWEVDTENGNYDYLMYADIDMDHPEVVNELRNWGVWYTNTLGLDGFRIDAVKHIKYSFTRDWLTHVRNTTGKNMFAVAEFWKNDIGAIENYLSKTNWNHSVFDVPLHYNLYNASRSGGNYDMRQIFNGTVVIRHPTHAVTFVDNHDSQPEEALESFVEEWFKPLAYALTLTRDQGYPSVFYGDYYGIPTHGVPAMKSKIDPILEARQKYAYGTQRDYLDHPDVIGWTREGDGVHADSGLATLMSDGPGGSKWMEVGKNNAGEVWYDITGNQTNTVTINKDGWGQFHVSGGSVSIYVQQ

SEQ ID NO: 25089 - protein, 483 aa, Bacillus licheniformis
HHNGTNGTMMQYFEWYLPNDGNHWNRLRSDASNLKDKGITAVWIPPAWKGASQNDVGYGAYDLYDLGEFNQKGTVRTKYGTRNQLQAAVTALKSNGIQVYGDVVMNHKGGADATEWVRAVEVNPSNRNQEVSGDYTIEAWTKFDFPGRGNTHSNFKWRWYHFDGVDWDQSRQLQNRIYKFRGKGWDWEVDTENGNYDYLMYADIDMDHPEVVNELRNWGVWYTNTLGLDGFRIDAVKHIKYSFTRDWLTHVRNTTGKNMFAVAEFWKNDIGAIENYLSKTNWNHSVFDVPLHYNLYYASRSGGNYDMRQIFNGTVVQRHPTHAVTFVDNHDSQPEEALESFVEEWFKPLAYALTLTRDQGYPSVFYGDYYGIPTHGVPAMKSKIDPILEARQKYAYGTQRDYLDHPDVIGWTREGDGVHADSGLATLMSDGPGGSKWMEVGKNNAGEVWYDITGNQTNTVTINKDGWGQFHVSGGSVSIYVQQ

SEQ ID NO: 25090 - protein, 483 aa, Bacillus licheniformis
HHNGTNGTMMQYFEWYLPNDGNHWWRLRSDASNLKDKGITAVWIPPAWKGASQNDVGYGAYDLYDLGEFNQKGTVRTKYGTRNQLQAAVTALKSNGIQVYGDVVMNHKGGADATEWVRAVEVNPSNRNQEVSGDYTIEAWTKFDFPGRGNTHSNFKWRWYHFDGVDWDQSRQLQNRIYKFRGKGWDWEVDTENGNYDYLMYADIDMDHPEVVNELRNWGVWYTNTLGLDGFRIDAVKHIKYSFTRDWLTHVRNTTGKNMFAVAEFWKNDIGAIENYLSKTNWNHSVFDVPLHYNLYNASRSGGNYDMRQIFNGTVVQRHPTHAVTFVDNHDSQPEEALESFVEEWFKPLAYALTLTRDQGYPSVFYGDYYGIPTHGVPAMKSKIDPILEARQKYAYGTQRDYLDHPDVIGWTREGDGVHADSGLATLMSDGPGGSKWMEVGKNNAGEVWYDITGNQTNTVTINKDGWGQFHVSGGSVSIYVQQ

SEQ ID NO: 25091 - protein, 483 aa, Bacillus licheniformis
HHNGTNGTMMQYFEWYLPNDGNHWNRLRSDASNLKDKGITAVWIPPAWKGASQNDVGYGAYDLYDLGEFNQKGTVRTKYGTRNQLQAAVTALKSNGIQVYGDVVMNHKGGADATEWVRAVEVNPSNRNQEVSGDYTIEAWTKFDFPGRGNTHSNFKWRWYHFDGVDWDQSRQLQNRIYKFRGKGWDWEVDTENGNYDYLMYADIDMDHPEVVNELRNWGVWYTNTLGLDGFRIDAVKHIKYSFTRDWLTHVRNTTGKNMFAVAEFWKNDIGAIENYLSKTNWNHSVFDVPLHYNLYNASRSGGNYDMRQIFNTTVVQRHPTHAVTFVDNHDSQPEEALESFVEEWFKPLAYALTLTRDQGYPSVFYGDYYGIPTHGVPAMKSKIDPILEARQKYAYGTQRDYLDHPDVIGWTREGDGVHADSGLATLMSDGPGGSKWMEVGKNNAGEVWYDITGNQTNTVTINKDGWGQFHVSGGSVSIYVQQ

SEQ ID NO: 25092 - protein, 483 aa, Bacillus licheniformis
HHNGTNGTMMQYFEWYLPNDGNHWNRLRSDASNLKDKGITAVWIPPAWKGASQNDVGYGAYDLYDLGEFNQKGTVRTKYGTRNQLQAAVTALKSNGIVVYGDVVMNHKGGADATEWVRAVEVNPSNRNQEVSGDYTIEAWTKFDFPGRGNTHSNFKWRWYHFDGVDWDQSRQLQNRIYKFRGKGWDWEVDTENGNYDYLMYADIDMDHPEVVNELRNWGVWYTNTLGLDGFRIDAVKHIKYSFTRDWLTHVRNTTGKNMFAVAEFWKNDIGAIENYLSKTNWNHSVFDVPLHYNLYNASRSGGNYDMRQIFNGTVVQRHPTHAVTFVDNHDSQPEEALESFVEEWFKPLAYALTLTRDQGYPSVFYGDYYGIPTHGVPAMKSKIDPILEARQKYAYGTQRDYLDHPDVIGWTREGDGVHADSGLATLMSDGPGGSKWMEVGKNNAGEVWYDITGNQTNTVTINKDGWGQFHVSGGSVSIYVQQ

SEQ ID NO: 25093 - protein, 483 aa, Bacillus licheniformis
HHNGTNGTMMQYFEWYLPNDGNHWNRLRSAASNLKDKGITAVWIPPAWKGASQNDVGYGAYDLYDLGEFNQKGTVRTKYGTRNQLQAAVTALKSNGIQVYGDVVMNHKGGADATEWVRAVEVNPSNRNQEVSGDYTIEAWTKFDFPGRGNTHSNFKWRWYHFDGVDWDQSRQLQNRIYKFRGKGWDWEVDTENGNYDYLMYADIDMDHPEVVNELRNWGVWYTNTLGLDGFRIDAVKHIKYSFTRDWLTHVRNTTGKNMFAVAEFWKNDIGAIENYLSKTNWNHSVFDVPLHYNLYNASRSGGNYDMRQIFNGTVVQRHPTHAVTFVDNHDSQPEEALESFVEEWFKPLAYALTLTRDQGYPSVFYGDYYGIPTHGVPAMKSKIDPILEARQKYAYGTQRDYLDHPDVIGWTREGDGVHADSGLATLMSDGPGGSKWMEVGKNNAGEVWYDITGNQTNTVTINKDGWGQFHVSGGSVSIYVQQ

SEQ ID NO: 25094 - protein, 483 aa, Bacillus licheniformis
HHNGTNGTMMQYFEWYLPNDGNHWNRLRSDASNLKDKGITAVWIPPAWKGASQNDVGYGAYDLYDLGEFNQKGTVRTKYGTRNQLQAAVTALKSNGIQVYGDVVMNHKGGADATEWVRAVEVNPSNRNQEVSGDYTIEAWTKFDFPGRGNTHSNFKWRWYHFDGVDWDQSRQLQNRIYKFRGKGWDWEVDTENGNYDYLMYADIDMDHPEVVNELRNWGVWYTNTLGLDGFRIDAVKHIKYSFTRDWLTHVRNTTGKNMFAVAEFWKNDIGAIENYLSKTNWNHSVFDVPLHYNLYNASRSGGNYDMRQIFNGTVVQRHPTHAVTFVDNHDSQPEEALESFVEEWFKPLAYALTLTRDQGYPSVFYGDYYGIPTHGVPAMKSKIDPILEARQKYAYGTQRDYLDHPDVIGWTREGDGVHADSGLATLMSDGPGGSKWMEVGKNNAGEVWYDITGNQTNTVTINKDGWGQFHVSGGEVSIYVQQ

SEQ ID NO: 25095 - protein, 483 aa, Bacillus licheniformis
HHNGTNGTMMQYFEWYLPNDGNHWNRLRSDASNLKDKGITAVWIPPAWKGASQNDVGYGAYDLYDLGEFNQKGTVRTKYGTRNQLQAAVTALKSNGIQVYGDVVMNHKGGADATEWVRAVEVNPSNRNQEVSGDYTIEAWTKFDFPGRGNTHSNFKWRWYHFDGVDWDQSRQLQNRIYKFRGKGWDWEVDTENGNYDYLMYADIDMDHPEVVNELRNWGVWYTNFLGLDGFRIDAVKHIKYSFTRDWLTHVRNTTGKNMFAVAEFWKNDIGAIENYLSKTNWNHSVFDVPLHYNLYNASRSGGNYDMRQIFNGTVVQRHPTHAVTFVDNHDSQPEEALESFVEEWFKPLAYALTLTRDQGYPSVFYGDYYGIPTHGVPAMKSKIDPILEARQKYAYGTQRDYLDHPDVIGWTREGDGVHADSGLATLMSDGPGGSKWMEVGKNNAGEVWYDITGNQTNTVTINKDGWGQFHVSGGSVSIYVQQ

SEQ ID NO: 25096 - protein, 483 aa, Bacillus licheniformis
HHNGTNGTMMQYFEWYLPNDGNHWNRLRSDASNLKDKGITAVWIPPAWKGASQNDVGYGAYDLYDLGEFNQKGTVRTKYGTRNQLQAAVTALKSNGIQVYGDVVMNHKGGADATEWVRAVEVNPSNRNQEVSGDYTIEAWTKFDFPGRGNTHSNFKWRWYHFDGVDWDQSRQLQNRIYKFRGKGWDWEVDTENGNYDYLMYADIDMDHPEVVNELRNWGVWYTNTLGLDGFRIDAVKHIKYSFTRDWLTHVRNTTGKNMFAVAEFWKNDIGAIENYLSKTNWNHSVFDVPLHYNLYNASRSGGNYDMRQIFNGTVVQRHPTHAVTFVDNHDSQPEEALESFVEEWFKPLAYALTLTRDQGYPSVFYGDYTGIPTHGVPAMKSKIDPILEARQKYAYGTQRDYLDHPDVIGWTREGDGVHADSGLATLMSDGPGGSKWMEVGKNNAGEVWYDITGNQTNTVTINKDGWGQFHVSGGSVSIYVQQ

SEQ ID NO: 25097 - protein, 483 aa, Bacillus licheniformis
HHNGTNGTMMQYFEWYLPNDGNHWCRLRSDASNLKDKGITAVWIPPAWKGASQNDVGYGAYDLYDLGEFNQKGTVRTKYGTRNQLQAAVTALKSNGIQVYGDVVMNHKGGADATEWVRAVEVNPSNRNQEVSGDYTIEAWTKFDFPGRGNTHSNFKWRWYHFDGVDWDQSRQLQNRIYKFRGKGWDWEVDTENGNYDYLMYADIDMDHPEVVNELRNWGVWYTNTLGLDGFRIDAVKHIKYSFTRDWLTHVRNTTGKNMFAVAEFWKNDIGAIENYLSKTNWNHSVFDVPLHYNLYNASRSGGNYDMRQIFNGTVVQRHPTHAVTFVDNHDSQPEEALESFVEEWFKPLAYALTLTRDQGYPSVFYGDYYGIPTHGVPAMKSKIDPILEARQKYAYGTQRDYLDHPDVIGWTREGDGVHADSGLATLMSDGPGGSKWMEVGKNNAGEVWYDITGNQTNTVTINKDGWGQFHVSGGSVSIYVQQ

SEQ ID NO: 25098 - protein, 483 aa, Bacillus licheniformis
HHNGTNGTMMQYFEWYLPNDGNHWNRLRSDASNLKDKGITAVWIPPAWKGASQNDVGYGAYDLYDLGEFNQKGTVRTKYGTRNQLQAAVTALKSNGIQVYGDVVMNHKGGADATEWVRAVEVNPSNRNQEVSGDYTIEAWTKFDFPGRGNTHSNFKWRWYHFDGVDWDQSRQLQNRIYKFRGKGWDWEVDTENGNYDYLMYADIDMDHPEVVNELRNWGVWYTNTLGLDGFRIDAVKHIKYSETRDWLTHVRNTTGKNMFAVAEFWKNDIGAIENYLSKTNWNHSVFDVPLHYNLYNASRSGGNYDMRQIFNGTVVQRHPTHAVTFVDNHDSQPEEALESFVEEWFKPLAYALTLTRDQGYPSVFYGDYYGIPTHGVPAMKSKIDPILEARQKYAYGTQRDYLDHPDVIGWTREGDGVHADSGLATLMSDGPGGSKWMEVGKNNAGEVWYDITGNQTNTVTINKDGWGQFHVSGGSVSIYVQQ

SEQ ID NO: 25099 - protein, 483 aa, Bacillus licheniformis
HHNGTNGTMMQYFEWYLPNDGNHWNRLRSDASNLKDKGITAVWIPPAWKGASQNDVGYGAYDLYDLGEFNQKGTVRTKYGTRNQLQAAVTLLKSNGIQVYGDVVMNHKGGADATEWVRAVEVNPSNRNQEVSGDYTIEAWTKFDFPGRGNTHSNFKWRWYHFDGVDWDQSRQLQNRIYKFRGKGWDWEVDTENGNYDYLMYADIDMDHPEVVNELRNWGVWYTNTLGLDGFRIDAVKHIKYSFTRDWLTHVRNTTGKNMFAVAEFWKNDIGAIENYLSKTNWNHSVFDVPLHYNLYNASRSGGNYDMRQIFNGTVVQRHPTHAVTFVDNHDSQPEEALESFVEEWFKPLAYALTLTRDQGYPSVFYGDYYGIPTHGVPAMKSKIDPILEARQKYAYGTQRDYLDHPDVIGWTREGDGVHADSGLATLMSDGPGGSKWMEVGKNNAGEVWYDITGNQTNTVTINKDGWGQFHVSGGSVSIYVQQ

SEQ ID NO: 25100 - protein, 483 aa, Bacillus licheniformis
HHNGTNGTMMQYFEWYLPNDGNHWNRLRSDASNLKDKGITAVWIPPAWKGASQNDVGYGAYDLYDLGEFNQKGTVRTKYGTRNQLQAAVTALKSNGIQVYGDVVMNHKGGADMTEWVRAVEVNPSNRNQEVSGDYTIEAWTKFDFPGRGNTHSNFKWRWYHFDGVDWDQSRQLQNRIYKFRGKGWDWEVDTENGNYDYLMYADIDMDHPEVVNELRNWGVWYTNTLGLDGFRIDAVKHIKYSFTRDWLTHVRNTTGKNMFAVAEFWKNDIGAIENYLSKTNWNHSVFDVPLHYNLYNASRSGGNYDMRQIFNGTVVQRHPTHAVTFVDNHDSQPEEALESFVEEWFKPLAYALTLTRDQGYPSVFYGDYYGIPTHGVPAMKSKIDPILEARQKYAYGTQRDYLDHPDVIGWTREGDGVHADSGLATLMSDGPGGSKWMEVGKNNAGEVWYDITGNQTNTVTINKDGWGQFHVSGGSVSIYVQQ

SEQ ID NO: 25101 - protein, 483 aa, Bacillus licheniformis
HHNGTQGTMMQYFEWYLPNDGNHWNRLRSDASNLKDKGITAVWIPPAWKGASQNDVGYGAYDLYDLGEFNQKGTVRTKYGTRNQLQAAVTALKSNGIQVYGDVVMNHKGGADATEWVRAVEVNPSNRNQEVSGDYTIEAWTKFDFPGRGNTHSNFKWRWYHFDGVDWDQSRQLQNRIYKFRGKGWDWEVDTENGNYDYLMYADIDMDHPEVVNELRNWGVWYTNTLGLDGFRIDAVKHIKYSFTRDWLTHVRNTTGKNMFAVAEFWKNDIGAIENYLSKTNWNHSVFDVPLHYNLYNASRSGGNYDMRQIFNGTVVQRHPTHAVTFVDNHDSQPEEALESFVEEWFKPLAYALTLTRDQGYPSVFYGDYYGIPTHGVPAMKSKIDPILEARQKYAYGTQRDYLDHPDVIGWTREGDGVHADSGLATLMSDGPGGSKWMEVGKNNAGEVWYDITGNQTNTVTINKDGWGQFHVSGGSVSIYVQQ

SEQ ID NO: 25102 - protein, 483 aa, Bacillus licheniformis
HHNGTNGTMMQYFEWYLPNDGNHWNRLRSEASNLKDKGITAVWIPPAWKGASQNDVGYGAYDLYDLGEFNQKGTVRTKYGTRNQLQAAVTALKSNGIQVYGDVVMNHKGGADATEWVRAVEVNPSNRNQEVSGDYTIEAWTKFDFPGRGNTHSNFKWRWYHFDGVDWDQSRQLQNRIYKFRGKGWDWEVDTENGNYDYLMYADIDMDHPEVVNELRNWGVWYTNTLGLDGFRIDAVKHIKYSFTRDWLTHVRNTTGKNMFAVAEFWKNDIGAIENYLSKTNWNHSVFDVPLHYNLYNASRSGGNYDMRQIFNGTVVQRHPTHAVTFVDNHDSQPEEALESFVEEWFKPLAYALTLTRDQGYPSVFYGDYYGIPTHGVPAMKSKIDPILEARQKYAYGTQRDYLDHPDVIGWTREGDGVHADSGLATLMSDGPGGSKWMEVGKNNAGEVWYDITGNQTNTVTINKDGWGQFHVSGGSVSIYVQQ

SEQ ID NO: 25103 - protein, 483 aa, Bacillus licheniformis
HHNGTNGTMMQYFEWYLPNDGNHWNRLRSDASNLKDKGITAVWIPPAWKGASQNDVGYGAYDLYDLGEFNQKGTVRTKYGTRNQLQAAVTALKSNGIQVYGDVVMNHKGGADATEWCRAVEVNPSNRNQEVSGDYTIEAWTKFDFPGRGNTHSNFKWRWYHFDGVDWDQSRQLQNRIYKFRGKGWDWEVDTENGNYDYLMYADIDMDHPEVVNELRNWGVWYTNTLGLDGFRIDAVKHIKYSFTRDWLTHVRNTTGKNMFAVAEFWKNDIGAIENYLSKTNWNHSVFDVPLHYNLYNASRSGGNYDMRQIFNGTVVQRHPTHAVTFVDNHDSQPEEALESFVEEWFKPLAYALTLTRDQGYPSVFYGDYYGIPTHGVPAMKSKIDPILEARQKYAYGTQRDYLDHPDVIGWTREGDGVHADSGLATLMSDGPGGSKWMEVGKNNAGEVWYDITGNQTNTVTINKDGWGQFHVSGGSVSIYVQQ

SEQ ID NO: 25104 - protein, 483 aa, Bacillus licheniformis
HHNGTNGTMMQYFEWYLPDDGNHWNRLRSDASNLKDKGITAVWIPPAWKGASQNDVGYGAYDLYDLGEFNQKGTVRTKYGTRNQLQAAVTALKSNGIQVYGDVVMNHKGGADATEWVRAVEVNPSNRNQEVSGDYTIEAWTKFDFPGRGNTHSNFKWRWYHFDGVDWDQSRQLQNRIYKFRGKGWDWEVDTENGNYDYLMYADIDMDHPEVVNELRNWGVWYTNTLGLDGFRIDAVKHIKYSFTRDWLTHVRNTTGKNMFAVAEFWKNDIGAIENYLSKTNWNHSVFDVPLHYNLYNASRSGGNYDMRQIFNGTVVQRHPTHAVTFVDNHDSQPEEALESFVEEWFKPLAYALTLTRDQGYPSVFYGDYYGIPTHGVPAMKSKIDPILEARQKYAYGTQRDYLDHPDVIGWTREGDGVHADSGLATLMSDGPGGSKWMEVGKNNAGEVWYDITGNQTNTVTINKDGWGQFHVSGGSVSIYVQQ

SEQ ID NO: 25105 - protein, 483 aa, Bacillus licheniformis
HHNGTNGTMMQYFEWYLPNDGNHWNRLRSDASNLKDKGITAVWIPPAWKGASQNDVGYGAYDLYDLGEFNQKGTVRTKYGTRNQLQAAVTALKSNGIQVYGDVVMNHKAGADATEWVRAVEVNPSNRNQEVSGDYTIEAWTKFDFPGRGNTHSNFKWRWYHFDGVDWDQSRQLQNRIYKFRGKGWDWEVDTENGNYDYLMYADIDMDHPEVVNELRNWGVWYTNTLGLDGFRIDAVKHIKYSFTRDWLTHVRNTTGKNMFAVAEFWKNDIGAIENYLSKTNWNHSVFDVPLHYNLYNASRSGGNYDMRQIFNGTVVQRHPTHAVTFVDNHDSQPEEALESFVEEWFKPLAYALTLTRDQGYPSVFYGDYYGIPTHGVPAMKSKIDPILEARQKYAYGTQRDYLDHPDVIGWTREGDGVHADSGLATLMSDGPGGSKWMEVGKNNAGEVWYDITGNQTNTVTINKDGWGQFHVSGGSVSIYVQQ

SEQ ID NO: 25106 - protein, 483 aa, Bacillus licheniformis
HHNGTNGTMMQYFEWYKPNDGNHWNRLRSDASNLKDKGITAVWIPPAWKGASQNDVGYGAYDLYDLGEFNQKGTVRTKYGTRNQLQAAVTALKSNGIQVYGDVVMNHKGGADATEWVRAVEVNPSNRNQEVSGDYTIEAWTKFDFPGRGNTHSNFKWRWYHFDGVDWDQSRQLQNRIYKFRGKGWDWEVDTENGNYDYLMYADIDMDHPEVVNELRNWGVWYTNTLGLDGFRIDAVKHIKYSFTRDWLTHVRNTTGKNMFAVAEFWKNDIGAIENYLSKTNWNHSVFDVPLHYNLYNASRSGGNYDMRQIFNGTVVQRHPTHAVTFVDNHDSQPEEALESFVEEWFKPLAYALTLTRDQGYPSVFYGDYYGIPTHGVPAMKSKIDPILEARQKYAYGTQRDYLDHPDVIGWTREGDGVHADSGLATLMSDGPGGSKWMEVGKNNAGEVWYDITGNQTNTVTINKDGWGQFHVSGGSVSIYVQQ

SEQ ID NO: 25107 - protein, 483 aa, Bacillus licheniformis
HHNGTNGTMMQYFEWYLPNDGNHWNRLRSDASNLKDKGITAVWIPPAWKGASQNDVGYGAYDLYDLGEFNQKGTVRTKYGTRNQLQAAVTALKSNGIQVYGDVVMNHKGGADATEWVRAVEVNPSNRNQEVSGDYTIEAWTKFDFPGRGNTHSNFKWRWYHFDGVDWDQSRQLQNRIYKFRGKGWDWEVDTENGNYDYLMYADIDMDHPEVVNELRNWGVWYTNTLGLDGFRIDAVKHIKYSFTRDWLTHVRNTTGKNMFAVAEFWKNDIGAIENYLSKTNWNHSVFDVPLHYNLYNASRSGGNYDMRQIFNGTVVQRHPTHAVTFVDNHDSQPEEALESFVEEWFKPLAYALTLTRDQGYPSVFYGDYYGIPTHGVPAMKSKIDPILEARQKYAYGTQRDYLDHPDVIGWTREGDGVHADSGLATLMSDGPGGSKWMEVGKNNANEVWYDITGNQTNTVTINKDGWGQFHVSGGSVSIYVQQ

SEQ ID NO: 25108 - protein, 483 aa, Bacillus licheniformis
HHNGTNGTMMQYFEWYLPNDGNHWNRLRSDASNLKDKGITAVWIPPAWKGASQNDVGYGAYDLYDLGEFNQKGTVRTKYGTRNQLQAAVTALKSNGIQVYGDVVMNHKGGADATEWVRAVEVNPSNRNQEVSGDYTIEAWTKFDFPGRGNTHSNFKWRWYHFDGVDWDQSRQLQNRIYKFRGKGWDWEVDTENGNYDYLMYADIDMDHPEVVNELRNWGVWYTNTLGLDGFRIDAVKHIKYSFTRDWLTHVRNTTGKNMFAVAEFWKNDIGAIENYLSKTNWNHSVFDVPLHYNLYNASRSGGNYDMRQIFNGTVVQRHPTHAVTFVDNHDSQPEEALESFVEEWFKHLAYALTLTRDQGYPSVFYGDYYGIPTHGVPAMKSKIDPILEARQKYAYGTQRDYLDHPDVIGWTREGDGVHADSGLATLMSDGPGGSKWMEVGKNNAGEVWYDITGNQTNTVTINKDGWGQFHVSGGSVSIYVQQ

SEQ ID NO: 25109 - protein, 483 aa, Bacillus licheniformis
HHNGTNGTMMQYFEWYLPNDGNHWNRLRSDASNLKDKGITAVWIPPAWKGASQNDVGYGAYDLYDLGEFNQKGTVRTKYGTRNQLQAAVTALKSNGIQVYGDVVMNHKGGADATEWVRAVEVNPSNRNQEVSGDYTIEAWTKFDFPGRGNTHSNFKWRWYHFDGVDWDQSRQLQNRIYKFRGKGWDWEVDTENGNYDYLMYADIDMDHPEVVNELRNWGVWYTNTLGLDGFRIDAVKHIKYSFTRDWLTHVRNTTGKNMFAVAEFWKNDIGAIENYLSKTNWNHSVFDVPLHYNLYNASRSGGNYDMRQIFNGTVVQRHPTHAVTFVDNHDSQPEEALESFVEEWFKPLAYALTLTRDQGYPSVFYGDYYGIPTHGVPAMKSKIDPILEARQKYAYGTQRDYLDHPDVIGWTREGDGVHADSGLRTLMSDGPGGSKWMEVGKNNAGEVWYDITGNQTNTVTINKDGWGQFHVSGGSVSIYVQQ

SEQ ID NO: 25110 - protein, 483 aa, Bacillus licheniformis
HHNGTNGTMMQYFEWYLPNDGNHWNRLRSDASNLKDKGITAVWIPPAWKGASQNDVGYGAYDLYDLGEFNQKGTVRTKYGTRNQLQAAVTALKSNGIQVYGDVVMNHKGGADATEWVRAVEVNPSNRNQEVSGDYTIEAWTKFDFPGRGNTHSNFKWRWYHFDGVDWDQSRQLQNRIYKFRGKGWDWEVDTENGNYDYLMYADIDMDHPEVVNELRNWGVWYENTLGLDGFRIDAVKHIKYSFTRDWLTHVRNTTGKNMFAVAEFWKNDIGAIENYLSKTNWNHSVFDVPLHYNLYNASRSGGNYDMRQIFNGTVVQRHPTHAVTFVDNHDSQPEEALESFVEEWFKPLAYALTLTRDQGYPSVFYGDYYGIPTHGVPAMKSKIDPILEARQKYAYGTQRDYLDHPDVIGWTREGDGVHADSGLATLMSDGPGGSKWMEVGKNNAGEVWYDITGNQTNTVTINKDGWGQFHVSGGSVSIYVQQ

SEQ ID NO: 25111 - protein, 483 aa, Bacillus licheniformis
HHNGTEGTMMQYFEWYLPNDGNHWNRLRSDASNLKDKGITAVWIPPAWKGASQNDVGYGAYDLYDLGEFNQKGTVRTKYGTRNQLQAAVTALKSNGIQVYGDVVMNHKGGADATEWVRAVEVNPSNRNQEVSGDYTIEAWTKFDFPGRGNTHSNFKWRWYHFDGVDWDQSRQLQNRIYKFRGKGWDWEVDTENGNYDYLMYADIDMDHPEVVNELRNWGVWYTNTLGLDGFRIDAVKHIKYSFTRDWLTHVRNTTGKNMFAVAEFWKNDIGAIENYLSKTNWNHSVFDVPLHYNLYNASRSGGNYDMRQIFNGTVVQRHPTHAVTFVDNHDSQPEEALESFVEEWFKPLAYALTLTRDQGYPSVFYGDYYGIPTHGVPAMKSKIDPILEARQKYAYGTQRDYLDHPDVIGWTREGDGVHADSGLATLMSDGPGGSKWMEVGKNNAGEVWYDITGNQTNTVTINKDGWGQFHVSGGSVSIYVQQ

SEQ ID NO: 25112 - protein, 483 aa, Bacillus licheniformis
HHNGTNGTMMQYFEWYLPNDGNHWNYLRSDASNLKDKGITAVWIPPAWKGASQNDVGYGAYDLYDLGEFNQKGTVRTKYGTRNQLQAAVTALKSNGIQVYGDVVMNHKGGADATEWVRAVEVNPSNRNQEVSGDYTIEAWTKFDFPGRGNTHSNFKWRWYHFDGVDWDQSRQLQNRIYKFRGKGWDWEVDTENGNYDYLMYADIDMDHPEVVNELRNWGVWYTNTLGLDGFRIDAVKHIKYSFTRDWLTHVRNTTGKNMFAVAEFWKNDIGAIENYLSKTNWNHSVFDVPLHYNLYNASRSGGNYDMRQIFNGTVVQRHPTHAVTFVDNHDSQPEEALESFVEEWFKPLAYALTLTRDQGYPSVFYGDYYGIPTHGVPAMKSKIDPILEARQKYAYGTQRDYLDHPDVIGWTREGDGVHADSGLATLMSDGPGGSKWMEVGKNNAGEVWYDITGNQTNTVTINKDGWGQFHVSGGSVSIYVQQ

SEQ ID NO: 25113 - protein, 483 aa, Bacillus licheniformis
HHNGTNGTMMQYFEWYLPNDGNHWNRLRSDASNLKDKGITAVWIPPAWKGASQNDVGYGAYDLYDLGEFNQKGTVRTKYGTRNQLQAAVTALKSNGIQVYGDVVMNHKGGADATEWVRAVEVNPSNRYQEVSGDYTIEAWTKFDFPGRGNTHSNFKWRWYHFDGVDWDQSRQLQNRIYKFRGKGWDWEVDTENGNYDYLMYADIDMDHPEVVNELRNWGVWYTNTLGLDGFRIDAVKHIKYSFTRDWLTHVRNTTGKNMFAVAEFWKNDIGAIENYLSKTNWNHSVFDVPLHYNLYNASRSGGNYDMRQIFNGTVVQRHPTHAVTFVDNHDSQPEEALESFVEEWFKPLAYALTLTRDQGYPSVFYGDYYGIPTHGVPAMKSKIDPILEARQKYAYGTQRDYLDHPDVIGWTREGDGVHADSGLATLMSDGPGGSKWMEVGKNNAGEVWYDITGNQTNTVTINKDGWGQFHVSGGSVSIYVQQ

SEQ ID NO: 25114 - protein, 483 aa, Bacillus licheniformis
HHNGTNGTMMQYFEWYLPNDGNHWNRLRSDASNLKDKGITAVWIPPAWKGASQNDVGYGAYDLYDLGEFNQKGTVRTKYGTRNQLQAAVTALKSNGIQVYGDVVMNHKGGADATEWVRAVEVNPSNRNQEVSGDYTIEAWTKFDFPGRGNTHSNFKWRWYHFDGVDWDQSRQLQNRIYKFRGKGWDWEVDTENGNYDYLMYADIDMDHPEVVNELRNWGVWYTNTLGLDGFRIDAVKHIKYSFTRDWLTHVRNTTGKNMFAVAEFWKNDIGAIENYLSKTNWNHSVFDVPLHYNLYNASRSGGNYDMRQIFNGTVVQRHPTHAVTFVDNHDSQPEEALESFVEEWFKPLAYALTLTRDQGMPSVFYGDYYGIPTHGVPAMKSKIDPILEARQKYAYGTQRDYLDHPDVIGWTREGDGVHADSGLATLMSDGPGGSKWMEVGKNNAGEVWYDITGNQTNTVTINKDGWGQFHVSGGSVSIYVQQ

SEQ ID NO: 25115 - protein, 483 aa, Bacillus licheniformis
HHNGTNGTMMQYFEWYLPNDGNHWNRLRSDASNLKDKGITAVWIPPAWKGASQNDVGYGAYDLYDLGEFNQKGTVRTKYGTRNQLQAAVTNLKSNGIQVYGDVVMNHKGGADATEWVRAVEVNPSNRNQEVSGDYTIEAWTKFDFPGRGNTHSNFKWRWYHFDGVDWDQSRQLQNRIYKFRGKGWDWEVDTENGNYDYLMYADIDMDHPEVVNELRNWGVWYTNTLGLDGFRIDAVKHIKYSFTRDWLTHVRNTTGKNMFAVAEFWKNDIGAIENYLSKTNWNHSVFDVPLHYNLYNASRSGGNYDMRQIFNGTVVQRHPTHAVTFVDNHDSQPEEALESFVEEWFKPLAYALTLTRDQGYPSVFYGDYYGIPTHGVPAMKSKIDPILEARQKYAYGTQRDYLDHPDVIGWTREGDGVHADSGLATLMSDGPGGSKWMEVGKNNAGEVWYDITGNQTNTVTINKDGWGQFHVSGGSVSIYVQQ

SEQ ID NO: 25116 - protein, 483 aa, Bacillus licheniformis
HHNGTNGTMMQYFEWYLPNDGNHWNRLRSDASNLKDKGITAVWIPPAWKGASQNDVGYGAYDLYDLGEFNQKGTVRTKYGTRNQLQAAVTALKSNGIQVYGDVVMNHKGGADATEWVRAVEVNPSNRNQEVSGDYTIEAWTKFDFPGRGNTHSNFKWRWYHFDGVDWDQSRQLQNRIYKFRGKGWDWEVDTENGNYDYLMYADIDMDHPEVVNELRNWGVWYTNTLGLDGFRIDAVKHIKYSFTRDWLTHVRNTTGKNMFAVAEFWKNDIGAIENYLSKTNWNHSVFDVPLHYNLYNASRSGGNYDMRQIFNGTVVQRHPTHAVTFVDNHDSQPEEALESFVEEWFKPLAYALTLTRDQGYPSVFYGDYYGIPTHGVPAMKSKIDPILEARQKYAYGTQRDYLDHPDVIGWTREGDGVHADSGLATLMSDGPGGSKWMEVGKNNAGEVWYDILGNQTNTVTINKDGWGQFHVSGGSVSIYVQQ

SEQ ID NO: 25117 - protein, 483 aa, Bacillus licheniformis
HHNGTNGTMMQYFEWYLPNDGNHWNRLRSDASNLKDKGITAVWIPPAWKGASQNDVGYGAYDLYDLGEFNQKGTVRTKYGTRNQLQAAVTALKSNGIQVYGDVVMNHKGGADATEWVRAVEVNPSNRNQEVSGDYTIEAWTKFDFPGRGNTHSNFKWRWYHFDGVDWDQSRQLQNRIYKFRGKGWDWEVDTENGNYDYLMRADIDMDHPEVVNELRNWGVWYTNTLGLDGFRIDAVKHIKYSFTRDWLTHVRNTTGKNMFAVAEFWKNDIGAIENYLSKTNWNHSVFDVPLHYNLYNASRSGGNYDMRQIFNGTVVQRHPTHAVTFVDNHDSQPEEALESFVEEWFKPLAYALTLTRDQGYPSVFYGDYYGIPTHGVPAMKSKIDPILEARQKYAYGTQRDYLDHPDVIGWTREGDGVHADSGLATLMSDGPGGSKWMEVGKNNAGEVWYDITGNQTNTVTINKDGWGQFHVSGGSVSIYVQQ

SEQ ID NO: 25118 - protein, 483 aa, Bacillus licheniformis
HHNGTNGTMMQYFEWYLPNDGNHWNRLRSDASNLKDKGITAVWIPPAWKGASQNDVGYGAYDLYDLGEFNQKGTVRTKYGTRNQLQAAVTALKSNGIQVYGDVVMNHKGGADATEWVRAVEVNPSNRNQEVSGDYTIEAWTKFDFPGRGNTHSNFKWRWYHFDGVDWDQSRQLQNRIYKFRGKGWDWEVDTENGNYDYLMYADIDMDHPEVVNELRNWGVWYTNTLGLDGFRIDAVKHIKYSFTRDWLTHVRNTTGKNMFAVAEFWKNDIGAIENYLSKTNWNHSVFDVPLHYNLYNASRSYGNYDMRQIFNGTVVQRHPTHAVTFVDNHDSQPEEALESFVEEWFKPLAYALTLTRDQGYPSVFYGDYYGIPTHGVPAMKSKIDPILEARQKYAYGTQRDYLDHPDVIGWTREGDGVHADSGLATLMSDGPGGSKWMEVGKNNAGEVWYDITGNQTNTVTINKDGWGQFHVSGGSVSIYVQQ

SEQ ID NO: 25119 - protein, 483 aa, Bacillus licheniformis
HHNGTNGTMMQYFEWYLPNDGNHWNRLRSDASNLKDKGITAVWIPPAWKGASQNDVGYGAYDLYDLGEFNQKGTVRTKYGTRNQLQAAVTALKSNGIQVYGDVVMNHKGGADATEWVRAVEVNPSNRNQEVSGDYTIEAWTKFDFPGRGNTHSNFKWRWYHFDGVDWDQSRQLQNRIYKFRGKGWDWEVDTENGNYDYLMYADIDMDHPEVVNELRNWGVWYTNTLGLDGFRIDAVKHIKYSFTRDWLTHVRNTTGKNMFAVAEFWKNDIGAIENYLSKTNWNHSVFDVPLHYNLYNASRSGGNYDMRQIFNGTVVQRHPTWAVTFVDNHDSQPEEALESFVEEWFKPLAYALTLTRDQGYPSVFYGDYYGIPTHGVPAMKSKIDPILEARQKYAYGTQRDYLDHPDVIGWTREGDGVHADSGLATLMSDGPGGSKWMEVGKNNAGEVWYDITGNQTNTVTINKDGWGQFHVSGGSVSIYVQQ

SEQ ID NO: 25120 - protein, 483 aa, Bacillus licheniformis
HHNGTNGTMMQYFEWYLPNDGNHWNRLRSDASNLKDKGITAVWIPPAWKGASQNDVGYGAYDLYDLGEFNQKGTVRTKYGTRNQLQAAVTALKSNGIQVYGDVVMNHKGGADATEWVRAVEVNPSNRNQEVSGDYTIEAWTKFDFPGRGNTHSNFKWRWYHFDGVDWDQSRQLQNRIYKFRGKGWDWEVDTENGNYDYLMYADIDMDHPEVVNELRNWGVWYTNTLGLDGFRIDAVKHIKYSFTRDWLTHVRNTTGKNMFAVAEFWKNDIGAIENYLSKTNWNHSVFDVPLHYNLYNASRSGGNYDMRQIFNGTVVQRHPTHAVTFVDNHDSQPEEALESFVEEWFKPLAYALTLTRDQGYPSVFYGDYYGIPTHGVPAMKSKIDPILEARQKYAYGTQRDYLDHPDVIGWTREGDGVHADAGLATLMSDGPGGSKWMEVGKNNAGEVWYDITGNQTNTVTINKDGWGQFHVSGGSVSIYVQQ

SEQ ID NO: 25121 - protein, 483 aa, Bacillus licheniformis
HHNGTNGTMMQYFEWYLPNDGNHWNRLRSDASNLKDKGITAVWIPPAWKGASQNDVGYGAYDLYDLGEFNQKGTVRTKYGTRNQLQAAVTALKSNGIQVYGDVVMNHKGGADATEWVRAVEVNPSNRNQEVSDDYTIEAWTKFDFPGRGNTHSNFKWRWYHFDGVDWDQSRQLQNRIYKFRGKGWDWEVDTENGNYDYLMYADIDMDHPEVVNELRNWGVWYTNTLGLDGFRIDAVKHIKYSFTRDWLTHVRNTTGKNMFAVAEFWKNDIGAIENYLSKTNWNHSVFDVPLHYNLYNASRSGGNYDMRQIFNGTVVQRHPTHAVTFVDNHDSQPEEALESFVEEWFKPLAYALTLTRDQGYPSVFYGDYYGIPTHGVPAMKSKIDPILEARQKYAYGTQRDYLDHPDVIGWTREGDGVHADSGLATLMSDGPGGSKWMEVGKNNAGEVWYDITGNQTNTVTINKDGWGQFHVSGGSVSIYVQQ

SEQ ID NO: 25122 - protein, 483 aa, Bacillus licheniformis
HHNGTNGTMMQYFEWYLPNDGNHWNRLRSDASNLKDKGITAVWIPPAWKGASQNDVGYGAYDLYDLGEFNQKGTVRTKYGTRNQLQAAVTALKSNGIQVYGDVVMNHKGGADATEWVRAVEVNPSNRNQEVSGDYTIEAWTKFDFPGRGNTHSNFKWRWYHFDGVDWDQSRQLQNRIYKFRGKGWDWEVDTENGNYDYLMYADIDMDHPEVVNELRNWGVWYTNTLGLDGFRIDAVKHIKYSFTRDWLTHVRNTTGKNMFAVAEFWKNDIGAIENYLSKTNWNHSVFDVPLHYNLYNASRSGGNYDMRQIFNGTVVQRHPTHAVTFVDNHDSQPEEALESFVEEWFKPLAYALTLTRDQGYKSVFYGDYYGIPTHGVPAMKSKIDPILEARQKYAYGTQRDYLDHPDVIGWTREGDGVHADSGLATLMSDGPGGSKWMEVGKNNAGEVWYDITGNQTNTVTINKDGWGQFHVSGGSVSIYVQQ

SEQ ID NO: 25123 - protein, 483 aa, Bacillus licheniformis
HHNGTNGTMMQYFEWYLPNDGNHWNRLRSDASNLKDKGITAVWIPPAWKGASQNDVGYGAYDLYDLGEFNQKGTHRTKYGTRNQLQAAVTALKSNGIQVYGDVVMNHKGGADATEWVRAVEVNPSNRNQEVSGDYTIEAWTKFDFPGRGNTHSNFKWRWYHFDGVDWDQSRQLQNRIYKFRGKGWDWEVDTENGNYDYLMYADIDMDHPEVVNELRNWGVWYTNTLGLDGFRIDAVKHIKYSFTRDWLTHVRNTTGKNMFAVAEFWKNDIGAIENYLSKTNWNHSVFDVPLHYNLYNASRSGGNYDMRQIFNGTVVQRHPTHAVTFVDNHDSQPEEALESFVEEWFKPLAYALTLTRDQGYPSVFYGDYYGIPTHGVPAMKSKIDPILEARQKYAYGTQRDYLDHPDVIGWTREGDGVHADSGLATLMSDGPGGSKWMEVGKNNAGEVWYDITGNQTNTVTINKDGWGQFHVSGGSVSIYVQQ

SEQ ID NO: 25124 - protein, 483 aa, Bacillus licheniformis
HHNGTNGTMMQYFEWYLPNDGNHWNRLRSDASNLKDKGITAVWIPPAWKGASQNDVGYGAYDLYDLGEFNQKGTVRTKYGTRNQLQAAVTALKSNGIQVYGDVVMNHKGGADATEWVRAVEVNPSNRNQEVSGDYTIEAWTKFDFPGRGNTHSNFKWRWYHFDGVDWDQSRQLQNRIYKFRGKGWDWEVDTENGNYDYLMYADIDMDHPEVVNELRNWGVWYTNTLGLDGFRIDAVKHIKYSFTRDWLTHVRNTTGKNMFAVAEFWKNDIGAIENYLSKTNWNHSVFDVPLHYNLYNASRSGGIYDMRQIFNGTVVQRHPTHAVTFVDNHDSQPEEALESFVEEWFKPLAYALTLTRDQGYPSVFYGDYYGIPTHGVPAMKSKIDPILEARQKYAYGTQRDYLDHPDVIGWTREGDGVHADSGLATLMSDGPGGSKWMEVGKNNAGEVWYDITGNQTNTVTINKDGWGQFHVSGGSVSIYVQQ

SEQ ID NO: 25125 - protein, 483 aa, Bacillus licheniformis
HHNGTNGTMMQYFEWYLPNDGNHWNRLRSDASNLKDKGITAVWIPPAWKGASQNDVGYGAYDLYDLGEFNQKGTVRTKYGTRNQLQAAVTALKSNGIQVYGDVVMNHKGGADATEWVRAVEVNPSNRNQEVSGDYTIEAWTKFDFPGRGNTHSNFKWRWYHFDGVDWDQSRQLQNRIYKFRGKGWDWEVDTENGNYDYLMYADIDMDHPEVVNELRNWGVWYTNTLGLDGFRIDAVKHIKYSFTRDWLTHVRNTTGKNMFAVAEFWKNDIGAIENYLSKTNWNHSAFDVPLHYNLYNASRSGGNYDMRQIFNGTVVQRHPTHAVTFVDNHDSQPEEALESFVEEWFKPLAYALTLTRDQGYPSVFYGDYYGIPTHGVPAMKSKIDPILEARQKYAYGTQRDYLDHPDVIGWTREGDGVHADSGLATLMSDGPGGSKWMEVGKNNAGEVWYDITGNQTNTVTINKDGWGQFHVSGGSVSIYVQQ

SEQ ID NO: 25126 - protein, 483 aa, Bacillus licheniformis
HHNGTNGTMMQYFEWYLPNDGNHWNRLRSDATNLKDKGITAVWIPPAWKGASQNDVGYGAYDLYDLGEFNQKGTVRTKYGTRNQLQAAVTALKSNGIQVYGDVVMNHKGGADATEWVRAVEVNPSNRNQEVSGDYTIEAWTKFDFPGRGNTHSNFKWRWYHFDGVDWDQSRQLQNRIYKFRGKGWDWEVDTENGNYDYLMYADIDMDHPEVVNELRNWGVWYTNTLGLDGFRIDAVKHIKYSFTRDWLTHVRNTTGKNMFAVAEFWKNDIGAIENYLSKTNWNHSVFDVPLHYNLYNASRSGGNYDMRQIFNGTVVQRHPTHAVTFVDNHDSQPEEALESFVEEWFKPLAYALTLTRDQGYPSVFYGDYYGIPTHGVPAMKSKIDPILEARQKYAYGTQRDYLDHPDVIGWTREGDGVHADSGLATLMSDGPGGSKWMEVGKNNAGEVWYDITGNQTNTVTINKDGWGQFHVSGGSVSIYVQQ

SEQ ID NO: 25127 - protein, 483 aa, Bacillus licheniformis
HHNGTNGTMMQYFEWYLPNDGNHWNRLRSDASNLKDKGITAVWIPPAWKGASQNDVGYGAYDLYDLGEFNQKGTVRTKYGTRNQLQAAVTALKSNGIQVYGDVVMNHKGGADATEWVRAVEVNPSNRNQEVTGDYTIEAWTKFDFPGRGNTHSNFKWRWYHFDGVDWDQSRQLQNRIYKFRGKGWDWEVDTENGNYDYLMYADIDMDHPEVVNELRNWGVWYTNTLGLDGFRIDAVKHIKYSFTRDWLTHVRNTTGKNMFAVAEFWKNDIGAIENYLSKTNWNHSVFDVPLHYNLYNASRSGGNYDMRQIFNGTVVQRHPTHAVTFVDNHDSQPEEALESFVEEWFKPLAYALTLTRDQGYPSVFYGDYYGIPTHGVPAMKSKIDPILEARQKYAYGTQRDYLDHPDVIGWTREGDGVHADSGLATLMSDGPGGSKWMEVGKNNAGEVWYDITGNQTNTVTINKDGWGQFHVSGGSVSIYVQQ

SEQ ID NO: 25128 - protein, 483 aa, Bacillus licheniformis
HHNGTNGTMMQYFEWYLPNDGNHWNRLRSDASNLKDKGITAVWIPPAWKGASQNDVGYGAYDLYDLGEFNQKGTVRTKYGTRNQLQAAVTALKSNGIQVYGDVVMNHKGGADATEWVRAVEVNPSNRNQEVSGDYTIEAWTKFDFPGRGNTHSNFKWRWYHFDGVDWDQSRQLQNRIYKFRGKGWDWEVDTENGNYDYLMYADIDMDHPEVVNELRNWGVWYTNTLGLDGFRIDAVKHIKYSFTRDWLTHVRNTTGKNMFAVAEFWKNDIGAIENYLSKTNWNHSVFDVPLHYNLYNASRSGGNYDMRQIFNGTVVQRHPTHAVTFVDNHDSQPEEALESFVEEWFKPLAYALTLTRDQGLPSVFYGDYYGIPTHGVPAMKSKIDPILEARQKYAYGTQRDYLDHPDVIGWTREGDGVHADSGLATLMSDGPGGSKWMEVGKNNAGEVWYDITGNQTNTVTINKDGWGQFHVSGGSVSIYVQQ

SEQ ID NO: 25129 - protein, 483 aa, Bacillus licheniformis
HHNGTNGTMMQYFEWYLPNDGNHWNRLRSDASNLKDKGITAVWIPPAWKGASQNDVGYGAYDLYDLGEFNQKGTVRTKYGTRNQLQAAVTALKSNGIQVYGDVVMNHKGGADATEWNRAVEVNPSNRNQEVSGDYTIEAWTKFDFPGRGNTHSNFKWRWYHFDGVDWDQSRQLQNRIYKFRGKGWDWEVDTENGNYDYLMYADIDMDHPEVVNELRNWGVWYTNTLGLDGFRIDAVKHIKYSFTRDWLTHVRNTTGKNMFAVAEFWKNDIGAIENYLSKTNWNHSVFDVPLHYNLYNASRSGGNYDMRQIFNGTVVQRHPTHAVTFVDNHDSQPEEALESFVEEWFKPLAYALTLTRDQGYPSVFYGDYYGIPTHGVPAMKSKIDPILEARQKYAYGTQRDYLDHPDVIGWTREGDGVHADSGLATLMSDGPGGSKWMEVGKNNAGEVWYDITGNQTNTVTINKDGWGQFHVSGGSVSIYVQQ

SEQ ID NO: 25130 - protein, 483 aa, Bacillus licheniformis
HHNGTNGTMMQYFEWYLPNDGNHWNRLRSDASNLKDKGITAVWIPPAWKGASQNDVGYTAYDLYDLGEFNQKGTVRTKYGTRNQLQAAVTALKSNGIQVYGDVVMNHKGGADATEWVRAVEVNPSNRNQEVSGDYTIEAWTKFDFPGRGNTHSNFKWRWYHFDGVDWDQSRQLQNRIYKFRGKGWDWEVDTENGNYDYLMYADIDMDHPEVVNELRNWGVWYTNTLGLDGFRIDAVKHIKYSFTRDWLTHVRNTTGKNMFAVAEFWKNDIGAIENYLSKTNWNHSVFDVPLHYNLYNASRSGGNYDMRQIFNGTVVQRHPTHAVTFVDNHDSQPEEALESFVEEWFKPLAYALTLTRDQGYPSVFYGDYYGIPTHGVPAMKSKIDPILEARQKYAYGTQRDYLDHPDVIGWTREGDGVHADSGLATLMSDGPGGSKWMEVGKNNAGEVWYDITGNQTNTVTINKDGWGQFHVSGGSVSIYVQQ

SEQ ID NO: 25131 - protein, 483 aa, Bacillus licheniformis
HHNGTNGTMMQYFEWYLPNDGNHWNRLRSDASNLKDKGITAVWIPPAWKGASQNDVGYGAYDLYDLGEFNQKGTVRTKYGTRNQLQAAVTALKSNGIQVYGDVVMNHKGGADATEWVRAVEVNPSNRNQEVSGDYTIEAWTKFDFPGRGNTHSNFKWRWYHFDGVDWDQSRQLQNRIYKFRGKGWDWEVDTENGNYDYLMYADIDMDHPEVVNELCNWGVWYTNTLGLDGFRIDAVKHIKYSFTRDWLTHVRNTTGKNMFAVAEFWKNDIGAIENYLSKTNWNHSVFDVPLHYNLYNASRSGGNYDMRQIFNGTVVQRHPTHAVTFVDNHDSQPEEALESFVEEWFKPLAYALTLTRDQGYPSVFYGDYYGIPTHGVPAMKSKIDPILEARQKYAYGTQRDYLDHPDVIGWTREGDGVHADSGLATLMSDGPGGSKWMEVGKNNAGEVWYDITGNQTNTVTINKDGWGQFHVSGGSVSIYVQQ

SEQ ID NO: 25132 - protein, 483 aa, Bacillus licheniformis
HHNGTNGTMMQYFEWYLPNDGNHWNRLRSDASNLKDKGITAVWIPPAWKGASQNDVGYGAYDLYDLGEFNQKGTVRTKYGTRNQLQAAVTALKSNGIQVYGDVVMNHKGGADADEWVRAVEVNPSNRNQEVSGDYTIEAWTKFDFPGRGNTHSNFKWRWYHFDGVDWDQSRQLQNRIYKFRGKGWDWEVDTENGNYDYLMYADIDMDHPEVVNELRNWGVWYTNTLGLDGFRIDAVKHIKYSFTRDWLTHVRNTTGKNMFAVAEFWKNDIGAIENYLSKTNWNHSVFDVPLHYNLYNASRSGGNYDMRQIFNGTVVQRHPTHAVTFVDNHDSQPEEALESFVEEWFKPLAYALTLTRDQGYPSVFYGDYYGIPTHGVPAMKSKIDPILEARQKYAYGTQRDYLDHPDVIGWTREGDGVHADSGLATLMSDGPGGSKWMEVGKNNAGEVWYDITGNQTNTVTINKDGWGQFHVSGGSVSIYVQQ

SEQ ID NO: 25133 - protein, 483 aa, Bacillus licheniformis
HHNGTNGTMMQYFEWYLPKDGNHWNRLRSDASNLKDKGITAVWIPPAWKGASQNDVGYGAYDLYDLGEFNQKGTVRTKYGTRNQLQAAVTALKSNGIQVYGDVVMNHKGGADATEWVRAVEVNPSNRNQEVSGDYTIEAWTKFDFPGRGNTHSNFKWRWYHFDGVDWDQSRQLQNRIYKFRGKGWDWEVDTENGNYDYLMYADIDMDHPEVVNELRNWGVWYTNTLGLDGFRIDAVKHIKYSFTRDWLTHVRNTTGKNMFAVAEFWKNDIGAIENYLSKTNWNHSVFDVPLHYNLYNASRSGGNYDMRQIFNGTVVQRHPTHAVTFVDNHDSQPEEALESFVEEWFKPLAYALTLTRDQGYPSVFYGDYYGIPTHGVPAMKSKIDPILEARQKYAYGTQRDYLDHPDVIGWTREGDGVHADSGLATLMSDGPGGSKWMEVGKNNAGEVWYDITGNQTNTVTINKDGWGQFHVSGGSVSIYVQQ

SEQ ID NO: 25134 - protein, 483 aa, Bacillus licheniformis
HHNGTNGTMMQYFEWYLPNDGNHWNRLRSDASNLKDKGITAVWIPPAWKGASQNDVGYGAYDLYDLGEFNQKGTVRTKYGTRNQLQAAVTAMKSNGIQVYGDVVMNHKGGADATEWVRAVEVNPSNRNQEVSGDYTIEAWTKFDFPGRGNTHSNFKWRWYHFDGVDWDQSRQLQNRIYKFRGKGWDWEVDTENGNYDYLMYADIDMDHPEVVNELRNWGVWYTNTLGLDGFRIDAVKHIKYSFTRDWLTHVRNTTGKNMFAVAEFWKNDIGAIENYLSKTNWNHSVFDVPLHYNLYNASRSGGNYDMRQIFNGTVVQRHPTHAVTFVDNHDSQPEEALESFVEEWFKPLAYALTLTRDQGYPSVFYGDYYGIPTHGVPAMKSKIDPILEARQKYAYGTQRDYLDHPDVIGWTREGDGVHADSGLATLMSDGPGGSKWMEVGKNNAGEVWYDITGNQTNTVTINKDGWGQFHVSGGSVSIYVQQ

SEQ ID NO: 25135 - protein, 483 aa, Bacillus licheniformis
HHNGTNGTMMQYFEWYLPNDGNHWNRLRSDASNLKDKGITAVWIPPAWKGASQNDVGYGAYDLYDLGEFNQKGTVRTKYGTRNQLQAAVTALKSNGIQVYGDVVMNHKGGADATEWVRAVEVNPSNRNQEVSGDYTIEAWTKFDFPGRGNTHSNFKWRWYHFDGVDWDQSRQLQNRPYKFRGKGWDWEVDTENGNYDYLMYADIDMDHPEVVNELRNWGVWYTNTLGLDGFRIDAVKHIKYSFTRDWLTHVRNTTGKNMFAVAEFWKNDIGAIENYLSKTNWNHSVFDVPLHYNLYNASRSGGNYDMRQIFNGTVVQRHPTHAVTFVDNHDSQPEEALESFVEEWFKPLAYALTLTRDQGYPSVFYGDYYGIPTHGVPAMKSKIDPILEARQKYAYGTQRDYLDHPDVIGWTREGDGVHADSGLATLMSDGPGGSKWMEVGKNNAGEVWYDITGNQTNTVTINKDGWGQFHVSGGSVSIYVQQ

SEQ ID NO: 25136 - protein, 483 aa, Bacillus licheniformis
HHNGTNGTMMQYFEWYLPNDGNHWNRLRSDASNLKDKGITAVWIPPAWKGASQNDVGYGAYDLYDLGEFNQKGTVRTKYGTRNQLQAAVTALKSNGIQVYGDVVMNHKGGADATEWVRAVEVNPSNRNQEVSGDYTIEAWTKFDFPGRGNEHSNFKWRWYHFDGVDWDQSRQLQNRIYKFRGKGWDWEVDTENGNYDYLMYADIDMDHPEVVNELRNWGVWYTNTLGLDGFRIDAVKHIKYSFTRDWLTHVRNTTGKNMFAVAEFWKNDIGAIENYLSKTNWNHSVFDVPLHYNLYNASRSGGNYDMRQIFNGTVVQRHPTHAVTFVDNHDSQPEEALESFVEEWFKPLAYALTLTRDQGYPSVFYGDYYGIPTHGVPAMKSKIDPILEARQKYAYGTQRDYLDHPDVIGWTREGDGVHADSGLATLMSDGPGGSKWMEVGKNNAGEVWYDITGNQTNTVTINKDGWGQFHVSGGSVSIYVQQ

SEQ ID NO: 25137 - protein, 483 aa, Bacillus licheniformis
HHNGTNGTMMQYFEWYLPNDGNHWNRLRSDASNLKDKGITAVWIPPAWKGASQNDVGYGAYDLYDLGEFNQKGTVRTKYGTRNQLQAAVTALKSNGIQVYGDVVMNHKGGADATEWVRAVEVNPSNRNQEVSGDYTIEAWTKFDFPGRGNTHSNFKWRWYHFDGVDWDQSRQLQNRIYKFRGKGWDWEVDTENGNYDYLMYADIDMDHPEVVNELRNWGVWYTNTLGLDGFRIDAVKHIKYSFTRDWLTHVRNTTGKNMFAVAEFWKNDIGAIENYLSKTNWNHSVFDVPLHYNLYNASRSGGNYDMRQIFNGTVVQRHPTYAVTFVDNHDSQPEEALESFVEEWFKPLAYALTLTRDQGYPSVFYGDYYGIPTHGVPAMKSKIDPILEARQKYAYGTQRDYLDHPDVIGWTREGDGVHADSGLATLMSDGPGGSKWMEVGKNNAGEVWYDITGNQTNTVTINKDGWGQFHVSGGSVSIYVQQ

SEQ ID NO: 25138 - protein, 483 aa, Bacillus licheniformis
HHNGTNGTMMQYFEWYLPNDGDHWNRLRSDASNLKDKGITAVWIPPAWKGASQNDVGYGAYDLYDLGEFNQKGTVRTKYGTRNQLQAAVTALKSNGIQVYGDVVMNHKGGADATEWVRAVEVNPSNRNQEVSGDYTIEAWTKFDFPGRGNTHSNFKWRWYHFDGVDWDQSRQLQNRIYKFRGKGWDWEVDTENGNYDYLMYADIDMDHPEVVNELRNWGVWYTNTLGLDGFRIDAVKHIKYSFTRDWLTHVRNTTGKNMFAVAEFWKNDIGAIENYLSKTNWNHSVFDVPLHYNLYNASRSGGNYDMRQIFNGTVVQRHPTHAVTFVDNHDSQPEEALESFVEEWFKPLAYALTLTRDQGYPSVFYGDYYGIPTHGVPAMKSKIDPILEARQKYAYGTQRDYLDHPDVIGWTREGDGVHADSGLATLMSDGPGGSKWMEVGKNNAGEVWYDITGNQTNTVTINKDGWGQFHVSGGSVSIYVQQ

SEQ ID NO: 25139 - protein, 483 aa, Bacillus licheniformis
HHNGTNGTMMQYFEWYLPNDGNHWNRLRSDASNLKDKGITAVWIPPAWKGASQNDVGYGAYDLYDLGEFNQKGTVRTKYGTRNQLQAAVTALKSNGIQVYGDVVMNHKGGADATEWVRAVEVNPSNRNQEVSGDYTIEAWTKFDFPGRGNTHSNFKWRWYHFTGVDWDQSRQLQNRIYKFRGKGWDWEVDTENGNYDYLMYADIDMDHPEVVNELRNWGVWYTNTLGLDGFRIDAVKHIKYSFTRDWLTHVRNTTGKNMFAVAEFWKNDIGAIENYLSKTNWNHSVFDVPLHYNLYNASRSGGNYDMRQIFNGTVVQRHPTHAVTFVDNHDSQPEEALESFVEEWFKPLAYALTLTRDQGYPSVFYGDYYGIPTHGVPAMKSKIDPILEARQKYAYGTQRDYLDHPDVIGWTREGDGVHADSGLATLMSDGPGGSKWMEVGKNNAGEVWYDITGNQTNTVTINKDGWGQFHVSGGSVSIYVQQ

SEQ ID NO: 25140 - protein, 483 aa, Bacillus licheniformis
HHNGTNGTMMQYFEWYLPNDGNHWHRLRSDASNLKDKGITAVWIPPAWKGASQNDVGYGAYDLYDLGEFNQKGTVRTKYGTRNQLQAAVTALKSNGIQVYGDVVMNHKGGADATEWVRAVEVNPSNRNQEVSGDYTIEAWTKFDFPGRGNTHSNFKWRWYHFDGVDWDQSRQLQNKIYKFRGKEWDWEVDTENGNYDYLMYADIDMDHPEVVNELRNWGVWYTNTLGLDGFRIDAVKHIKYSFTRDWLTHVRNTTGKNMFAVAEFWKNDIGAIENYLSKTNWNHSVFDVPLHYNLYNASRSGGNYDMRQIFNGTVVQRHPTHAVTFVDNHDSQPEEALESFVEEWFKPLAYALTLTRDQGYPSVFYGDYYGIPTHGVPAMKSKIDPILEARQKYAYGTQRDYLDHPDVIGWTREGDGVHADSGLATLMSDGPGGSKWMEVGKNNAGEVWYDITGNQTNTVTINKDGWGQFHVSGGSVSIWVQQ

SEQ ID NO: 25141 - protein, 483 aa, Bacillus licheniformis
HHNGTNGTMMQYFEWYLPNDGNHWNRLRSDASNLKDKGITAVWIPPAWKGASQNDVGYGAYDLYDLGEFNQKGTVRTKYGTRNQLQAAVTALKSNGIQVYGDVVMNHKGGADATEWVRAVEVNPSNRNQEVSGDYTIEAWTKFDFPGRGNTHSNFKWRWYHFDGVDWDQSRQLQNRIYKFRGKGWDWEVDTENGNYDYLMYADIDMDHPEVVNELRNWGVWYTNTLGLDGFRIDAVKHIKYSFTRDWLTHVRNTTGKNMFAVAEFWKNDIGAIENYLSKTNWNHSVFDVPLHYNLYNASRSGGNYDMRQIFNKTVVQRHPTHAVTFVDNHDSQPEEALESFVEEWFKPLAYALTLTRDQGYPSVFYGDYYGIPTHGVPAMKSKIDPILEARQKYAYGTQRDYLDHPDVIGWTREGDGVHADSGLATLMSDGPGGSKWMEVGKNNAGEVWYDITGNQTNTVTINKDGWGQFHVSGGSVSIYVQQ

SEQ ID NO: 25142 - protein, 483 aa, Bacillus licheniformis
HHNGTNGTMMQYFEWYLPNDGNHWNRLRSDASNLKDKGITAVWIPPAWKGASQNDVGYGAYDLYDLGEFNQKGTVRTKYGTRNQLQAAVTALKSNGIQVYGDVVMNHKGGADATEWVRAVEVNPSNRNQEVSGDYTIEAWTKFDFPGRGNTHSNFKWRWYHFDGVDWDQSRQLQNRIYKFRGKGWDWEVDTENGNYDYLMYADIDMDHPEVVNELRNWGVWYTNTLGLDGFRIDAVKHIKYSFTRDWLTHVRNTTGKNMFAVAEFWKNDIGAIENYLSKTNWNHSVFDVPLHYNLYNASRSGGNYDMRQIFNGTVVQRHPTHAVTFVDNHDSQPEEALESFVEEWFKPLAYALTLTRDQGPPSVFYGDYYGIPTHGVPAMKSKIDPILEARQKYAYGTQRDYLDHPDVIGWTREGDGVHADSGLATLMSDGPGGSKWMEVGKNNAGEVWYDITGNQTNTVTINKDGWGQFHVSGGSVSIYVQQ

SEQ ID NO: 25143 - protein, 483 aa, Bacillus licheniformis
HHNGTNGTMMQYFEWYLPNDGNHWNRLRSDASNLKDKGITAVWIPPAWKGASQNDVGYGAYDLYDLGEFNQKGTVRTKYGTRNQLQAAVTALKSNGIQVYGDVVMNHKGGADATEWYRAVEVNPSNRNQEVSGDYTIEAWTKFDFPGRGNTHSNFKWRWYHFDGVDWDQSRQLQNRIYKFRGKGWDWEVDTENGNYDYLMYADIDMDHPEVVNELRNWGVWYTNTLGLDGFRIDAVKHIKYSFTRDWLTHVRNTTGKNMFAVAEFWKNDIGAIENYLSKTNWNHSVFDVPLHYNLYNASRSGGNYDMRQIFNGTVVQRHPTHAVTFVDNHDSQPEEALESFVEEWFKPLAYALTLTRDQGYPSVFYGDYYGIPTHGVPAMKSKIDPILEARQKYAYGTQRDYLDHPDVIGWTREGDGVHADSGLATLMSDGPGGSKWMEVGKNNAGEVWYDITGNQTNTVTINKDGWGQFHVSGGSVSIYVQQ

SEQ ID NO: 25144 - protein, 483 aa, Bacillus licheniformis
HHNGHNGTMMQYFEWYLPNDGNHWNRLRSDASNLKDKGITAVWIPPAWKGASQNDVGYGAYDLYDLGEFNQKGTVRTKYGTRNQLQAAVTALKSNGIQVYGDVVMNHKGGADATEWVRAVEVNPSNRNQEVSGDYTIEAWTKFDFPGRGNTHSNFKWRWYHFDGVDWDQSRQLQNRIYKFRGKGWDWEVDTENGNYDYLMYADIDMDHPEVVNELRNWGVWYTNTLGLDGFRIDAVKHIKYSFTRDWLTHVRNTTGKNMFAVAEFWKNDIGAIENYLSKTNWNHSVFDVPLHYNLYNASRSGGNYDMRQIFNGTVVQRHPTHAVTFVDNHDSQPEEALESFVEEWFKPLAYALTLTRDQGYPSVFYGDYYGIPTHGVPAMKSKIDPILEARQKYAYGTQRDYLDHPDVIGWTREGDGVHADSGLATLMSDGPGGSKWMEVGKNNAGEVWYDITGNQTNTVTINKDGWGQFHVSGGSVSIYVQQ

SEQ ID NO: 25145 - protein, 483 aa, Bacillus licheniformis
HHNGTNGTMMQYFEWYLPNDGNHWNRLRSDASNLKDKGITAVWIPPAWKGASQNDVGYGAYDLYDLGEFNQKGTVRTKYGTRNQLQAAVTALKSNGIQVYGDVVMNHKGGADATEWVRAVEVNPSNRNQEVSGDYTIEAWTKFDFPGRGNTHSNFKWRWYHFDGVDWDQSRQLQNRIYKFRGKGWDWEVDTENGNYDYLMYADIDMDHPEVVNELRNWGVWYTNTLGLDGFRIDAVKHIKYSFTRDWLTHVRNTTGKNMFAVAEFWKNDIGAIENYLSKTNNNHSVFDVPLHYNLYNASRSGGNYDMRQIFNGTVVQRHPTHAVTFVDNHDSQPEEALESFVEEWFKPLAYALTLTRDQGYPSVFYGDYYGIPTHGVPAMKSKIDPILEARQKYAYGTQRDYLDHPDVIGWTREGDGVHADSGLATLMSDGPGGSKWMEVGKNNAGEVWYDITGNQTNTVTINKDGWGQFHVSGGSVSIYVQQ

SEQ ID NO: 25146 - protein, 483 aa, Bacillus licheniformis
HHNGTNGTMMQYFEWYLPNDGNHWNRLRSDASNLKDKGITAVWIPPAWKGASQNDVGYGAYDLYDLGEFNQKGTVRTKYGTRNQLQAAVTALKSNGIQVYGDVVMNHKGGADATEWVRAVEVNPSNRNQEVSGDYTIEAWTKFDFPGRGNTHSNFKWRWYHFDGVDWDQSRQLQNRIYKFRGKGWDWEVDTENGNYDYLMYADIDMDHPEVVNELRNWGVWYTNTLGLDGFRIDAVKHIKYSFTRDWLTHVRNTTGKNMFAVAEFWKNDIGAIENYLSKTNWNHSVFDVPLHYNLYNASRKGGNYDMRQIFNGTVVQRHPTHAVTFVDNHDSQPEEALESFVEEWFKPLAYALTLTRDQGYPSVFYGDYYGIPTHGVPAMKSKIDPILEARQKYAYGTQRDYLDHPDVIGWTREGDGVHADSGLATLMSDGPGGSKWMEVGKNNAGEVWYDITGNQTNTVTINKDGWGQFHVSGGSVSIYVQQ

SEQ ID NO: 25147 - protein, 483 aa, Bacillus licheniformis
HHNGTNGTMMQYFEWYLPNDGNHWNRTRSDASNLKDKGITAVWIPPAWKGASQNDVGYGAYDLYDLGEFNQKGTVRTKYGTRNQLQAAVTALKSNGIQVYGDVVMNHKGGADATEWVRAVEVNPSNRNQEVSGDYTIEAWTKFDFPGRGNTHSNFKWRWYHFDGVDWDQSRQLQNRIYKFRGKGWDWEVDTENGNYDYLMYADIDMDHPEVVNELRNWGVWYTNTLGLDGFRIDAVKHIKYSFTRDWLTHVRNTTGKNMFAVAEFWKNDIGAIENYLSKTNWNHSVFDVPLHYNLYNASRSGGNYDMRQIFNGTVVQRHPTHAVTFVDNHDSQPEEALESFVEEWFKPLAYALTLTRDQGYPSVFYGDYYGIPTHGVPAMKSKIDPILEARQKYAYGTQRDYLDHPDVIGWTREGDGVHADSGLATLMSDGPGGSKWMEVGKNNAGEVWYDITGNQTNTVTINKDGWGQFHVSGGSVSIYVQQ

SEQ ID NO: 25148 - protein, 483 aa, Bacillus licheniformis
HHNGTNGTMMQYFEWYLPNDGNHWNRLRSDASNLKDKGITAVWIPPAWKGASQNDVGYGAYDLYDLGEFNQKGTVRTKYGTRNQLQAAVTALKSNGIQVYGDVVMNHKGGADATEWVRAVEVNPSNRNQEVSGDYTIEAWTKFDFPGRGNTHSNFKWRWYHFDGVDWDQSRQLQNRIYKFRGKGWDWEVDTENGNYDYLMYADIDMDHPEVVNELRNWGVWYTNTLGLDGFRIDAVKHIKYSFTRDWLTHVRNTTGKNMFAVAEFWKNDIGAIENYLSKTNWNHSVFDVPLHYNLYSASRSGGNYDMRQIFNGTVVQRHPTHAVTFVDNHDSQPEEALESFVEEWFKPLAYALTLTRDQGYPSVFYGDYYGIPTHGVPAMKSKIDPILEARQKYAYGTQRDYLDHPDVIGWTREGDGVHADSGLATLMSDGPGGSKWMEVGKNNAGEVWYDITGNQTNTVTINKDGWGQFHVSGGSVSIYVQQ

SEQ ID NO: 25149 - protein, 483 aa, Bacillus licheniformis
HHNGTNGTMMQYFEWYLPNDGNHWNRLRSDASNLKDKGITAVWIPPAWKGASQNDVGYGAYDLYDLGEFNQKGTVRTKYGTRNQLQAAVTALKSNGIQVYGDVVMNHKGGADATEWVRAVEVNPSNRNQEVSGEYTIEAWTKFDFPGRGNTHSNFKWRWYHFDGVDWDQSRQLQNRIYKFRGKGWDWEVDTENGNYDYLMYADIDMDHPEVVNELRNWGVWYTNTLGLDGFRIDAVKHIKYSFTRDWLTHVRNTTGKNMFAVAEFWKNDIGAIENYLSKTNWNHSVFDVPLHYNLYNASRSGGNYDMRQIFNGTVVQRHPTHAVTFVDNHDSQPEEALESFVEEWFKPLAYALTLTRDQGYPSVFYGDYYGIPTHGVPAMKSKIDPILEARQKYAYGTQRDYLDHPDVIGWTREGDGVHADSGLATLMSDGPGGSKWMEVGKNNAGEVWYDITGNQTNTVTINKDGWGQFHVSGGSVSIYVQQ

SEQ ID NO: 25150 - protein, 483 aa, Bacillus licheniformis
HHNGTNGTMMQYFEWYLPNDGNHWNRLRSDASNLKDKGITAVWIPPAWKGASQNDVGYGAYDLYDLGEFNQKGTVRTKYGTRNQLQAAVTALKSNGIQVYGDVVMNHKGGADATEWVRAVEVNPSNRNQEVSGDYTIEAWTKFDFPGRGNTHSNFKWRWYHFDGVDWDQSRQLQNRIYKFRGKGWDWEVDTENGNYDYLMYADIDMDHPEVVNELRNWGVWYTNTLGLDGFRIDAVKHIKYSFTRDWLTHVRNTTGKNMFAVAEFWKNDIGAIENYLSKTNWNHSVFDVPLHYNLYNASRSGGNYDMRQIFNGTVVWRHPTHAVTFVDNHDSQPEEALESFVEEWFKPLAYALTLTRDQGYPSVFYGDYYGIPTHGVPAMKSKIDPILEARQKYAYGTQRDYLDHPDVIGWTREGDGVHADSGLATLMSDGPGGSKWMEVGKNNAGEVWYDITGNQTNTVTINKDGWGQFHVSGGSVSIYVQQ

SEQ ID NO: 25151 - protein, 483 aa, Bacillus licheniformis
HHNGTNGTMMQYFEWYLPNDGNHWNRLRSDASNLKDKGITAVWIPPAWKGASQNDVGYGAYDLYDLGEFNQKGTVRTKYGTRNQLQAAVTALKSNGIQVYGDVVMNHKGGADATEWVRAVEVNPSNRNQEVSGDYTIEAWTKFDFPGRGNTHSNFKWRWYHFDGVDWDQSRQLQNRIYKFRGKGDDWEVDTENGNYDYLMYADIDMDHPEVVNELRNWGVWYTNTLGLDGFRIDAVKHIKYSFTRDWLTHVRNTTGKNMFAVAEFWKNDIGAIENYLSKTNWNHSVFDVPLHYNLYNASRSGGNYDMRQIFNGTVVQRHPTHAVTFVDNHDSQPEEALESFVEEWFKPLAYALTLTRDQGYPSVFYGDYYGIPTHGVPAMKSKIDPILEARQKYAYGTQRDYLDHPDVIGWTREGDGVHADSGLATLMSDGPGGSKWMEVGKNNAGEVWYDITGNQTNTVTINKDGWGQFHVSGGSVSIYVQQ

SEQ ID NO: 25152 - protein, 483 aa, Bacillus licheniformis
HHNGTNGTMMQYFEWYLPNDGNHWNRLRSDASNLKDKGITAVWIPPAWKGASQNDVGYGAYDLYDLGEFNQKCTVRTKYGTRNQLQAAVTALKSNGIQVYGDVVMNHKGGADATEWVRAVEVNPSNRNQEVSGDYTIEAWTKFDFPGRGNTHSNFKWRWYHFDGVDWDQSRQLQNRIYKFRGKGWDWEVDTENGNYDYLMYADIDMDHPEVVNELRNWGVWYTNTLGLDGFRIDAVKHIKYSFTRDWLTHVRNTTGKNMFAVAEFWKNDIGAIENYLSKTNWNHSVFDVPLHYNLYNASRSGGNYDMRQIFNGTVVQRHPTHAVTFVDNHDSQPEEALESFVEEWFKPLAYALTLTRDQGYPSVFYGDYYGIPTHGVPAMKSKIDPILEARQKYAYGTQRDYLDHPDVIGWTREGDGVHADSGLATLMSDGPGGSKWMEVGKNNAGEVWYDITGNQTNTVTINKDGWGQFHVSGGSVSIYVQQ

SEQ ID NO: 25153 - protein, 483 aa, Bacillus licheniformis
HHNGTNGTMMQYFEWYLPNDGNHWNRLRSDASNLKDKGITAVWIPPAWKGASQNDVGYGAYDLYDLGEFNQKGTVRTKYGTRNQLQAAVTALKSNGIQVYGDVVMNHKGGADATEWVRAVEVNPSNRNQEVSGDYTIEAWTKFDFPGRGNTHSNFKWRWYHFDGVDWDQSRQLQNRIYKFRGKGWDWEVDTENGNYDYLMYADIDMDHPEVVNELRNWGVWYTNTLGLDGFRIDAVKHIKYSFTRDWLTHVRNTTGKNMFAVAEFWKNDIGAIENYLSKTNWNHSVFDVPLHYNLYNASRSGGNYDMRQIFNGTVVQRHPTHAVTFVDNHDSQPEEALESFVEEWFKPLAYALTLTRDQGYPSVQYGDYYGIPTHGVPAMKSKIDPILEARQKYAYGTQRDYLDHPDVIGWTREGDGVHADSGLATLMSDGPGGSKWMEVGKNNAGEVWYDITGNQTNTVTINKDGWGQFHVSGGSVSIYVQQ

SEQ ID NO: 25154 - protein, 483 aa, Bacillus licheniformis
HHNGTNGTMMQYFEWYLPNDGNHWNRLRSDASNLKDKGITAVWIPPAWKGASQNDVGYGAYDLYDLGEFNQKGTVRTKYGTRNQLQAAVTALKSNGIQVYGDVVMNHKGGADATEWVRAVEVNPSNRNQEVSEDYTIEAWTKFDFPGRGNTHSNFKWRWYHFDGVDWDQSRQLQNRIYKFRGKGWDWEVDTENGNYDYLMYADIDMDHPEVVNELRNWGVWYTNTLGLDGFRIDAVKHIKYSFTRDWLTHVRNTTGKNMFAVAEFWKNDIGAIENYLSKTNWNHSVFDVPLHYNLYNASRSGGNYDMRQIFNGTVVQRHPTHAVTFVDNHDSQPEEALESFVEEWFKPLAYALTLTRDQGYPSVFYGDYYGIPTHGVPAMKSKIDPILEARQKYAYGTQRDYLDHPDVIGWTREGDGVHADSGLATLMSDGPGGSKWMEVGKNNAGEVWYDITGNQTNTVTINKDGWGQFHVSGGSVSIYVQQ

SEQ ID NO: 25155 - protein, 483 aa, Bacillus licheniformis
HHNGTNGTMMQYFEWYLPNDGNHWNRLRSDASNLKDKGITAVWIPPAWKGASQNDVGYGAYDLYDLGEFNQKGTVRTKYGTRNQLQAAVTALKSNGIQVYGDVVMNHKGGADATEWVRAVEVNPSNRNQEVSGDYTIEAWTKFDFPGRGNTHSNFKWRWYHFDGVDWDQSRQLQNRIYKFRGKGWDWEVDTENGNYDYLMYADIDMDHPEVVNELRNWGVWYTNTLGLDGFRIDAVKHIKYSFTRDWLTHVRNTTGKNMFAVAEFWKNDIGAIENYLSDTNWNHSVFDVPLHYNLYNASRSGGNYDMRQIFNGTVVQRHPTHAVTFVDNHDSQPEEALESFVEEWFKPLAYALTLTRDQGYPSVFYGDYYGIPTHGVPAMKSKIDPILEARQKYAYGTQRDYLDHPDVIGWTREGDGVHADSGLATLMSDGPGGSKWMEVGKNNAGEVWYDITGNQTNTVTINKDGWGQFHVSGGSVSIYVQQ

SEQ ID NO: 25156 - protein, 483 aa, Bacillus licheniformis
HHNGTNGTMMQYFEWYLPNDGNHWNRLRSDASNLKDKGITAVWIPPAWKGASQNDVGYGAYDLYDLGEFNQKGTVRTKYGTRNQLQAAVTALKSNGIQVYGDVVMNHKGGADATEWVRAVEVNPSNRNQEVSGDYTIEAWTKFDFPGRGNTHSNFKWRWYHFDGVDWDQSRQLQNRIYKFRGKGWDWEVDTENGNYDYLMYADIDMDHCEVVNELRNWGVWYTNTLGLDGFRIDAVKHIKYSFTRDWLTHVRNTTGKNMFAVAEFWKNDIGAIENYLSKTNWNHSVFDVPLHYNLYNASRSGGNYDMRQIFNGTVVQRHPTHAVTFVDNHDSQPEEALESFVEEWFKPLAYALTLTRDQGYPSVFYGDYYGIPTHGVPAMKSKIDPILEARQKYAYGTQRDYLDHPDVIGWTREGDGVHADSGLATLMSDGPGGSKWMEVGKNNAGEVWYDITGNQTNTVTINKDGWGQFHVSGGSVSIYVQQ

SEQ ID NO: 25157 - protein, 483 aa, Bacillus licheniformis
HHNGTNGTMMQYFEWYLPNDGNHWNRLRSDASNLKDKGITAVWIPPAWKGASQNDVGYGAYDLYDLGEFNQKGTVRTKYGTRNQLQAAVTALKSNGIQVYGDVVMNHKGGADATEWVRAVEVNPSNRNQEVSGDYTIEAWTKFDFPGRGNTHSNFKWRWYHFDGVDWDQSRQLQNRIYKFRGKGWDWEVDTENGNYDYLMYADIDMDHPEVVNELRNWGVWYTNTLGLDGFRIDAVKHIKYSFTRDWLSHVRNTTGKNMFAVAEFWKNDIGAIENYLSKTNWNHSVFDVPLHYNLYNASRSGGNYDMRQIFNGTVVQRHPTHAVTFVDNHDSQPEEALESFVEEWFKPLAYALTLTRDQGYPSVFYGDYYGIPTHGVPAMKSKIDPILEARQKYAYGTQRDYLDHPDVIGWTREGDGVHADSGLATLMSDGPGGSKWMEVGKNNAGEVWYDITGNQTNTVTINKDGWGQFHVSGGSVSIYVQQ

SEQ ID NO: 25158 - protein, 483 aa, Bacillus licheniformis
HHNGTNGTMMQYFEWYLPNDGNHWNRLRSDASNLKDKGITAVWIPPAWKGASQNDVGYGAYDLYDLGEFNQKGTVRTKYGTRNQLQAAVTALKSNGIQVYGDVVMNHKGGADATEWVRAVEVNPSNRNQEVSGDYTIEAWTKFDFPGRGNTHSNFKWRWYHFDGVDWDQSRQLQNRIYKFRGKGWDWEVDTENGNYDYLMYADIDMDHPEVVNELRNWGVWYTNTLGLDGFRIDAVKHIKYSFTRDWLTHVRNTTGKNMFAVAEFWKNDIGAINNYLSKTNWNHSVFDVPLHYNLYNASRSGGNYDMRQIFNGTVVQRHPTHAVTFVDNHDSQPEEALESFVEEWFKPLAYALTLTRDQGYPSVFYGDYYGIPTHGVPAMKSKIDPILEARQKYAYGTQRDYLDHPDVIGWTREGDGVHADSGLATLMSDGPGGSKWMEVGKNNAGEVWYDITGNQTNTVTINKDGWGQFHVSGGSVSIYVQQ

SEQ ID NO: 25159 - protein, 483 aa, Bacillus licheniformis
HHNGTNGTMMQYFEWYLPNDGNHWNRLRSDASNLKDKGITAVWIPPAWKGASQNDVGYGAYDLYDLGEFNQKGTVRTKYGTRNQLQAAVTALKSNGIQVYGDVVMNHKGGADATEWVRAVEVNPSNRNQEVSGDYTIEAWTKFDFPGRGNTHSNFKWRWYHFDGVDWDQSRQLQNRIYKFRGKGWDWEVDTENGNYDYLMYADIDMDHPEVVNELRNWGVWYTNTLGLDGFRIDAVKHIKDSFTRDWLTHVRNTTGKNMFAVAEFWKNDIGAIENYLSKTNWNHSVFDVPLHYNLYNASRSGGNYDMRQIFNGTVVQRHPTHAVTFVDNHDSQPEEALESFVEEWFKPLAYALTLTRDQGYPSVFYGDYYGIPTHGVPAMKSKIDPILEARQKYAYGTQRDYLDHPDVIGWTREGDGVHADSGLATLMSDGPGGSKWMEVGKNNAGEVWYDITGNQTNTVTINKDGWGQFHVSGGSVSIYVQQ

SEQ ID NO: 25160 - protein, 483 aa, Bacillus licheniformis
HHNGTNGTMMQYFEWYLPNDGNHWNRLRSDASNLKDKGITAVWIPPAFKGASQNDVGYGAYDLYDLGEFNQKGTVRTKYGTRNQLQAAVTALKDNGIQVYGDVVMNHKGGADATEWVRAVEVNPSNRNQEVSGDYTIEAWTKFDFPGRGNTHSNFKWRWYHFDGVDWDQSRQLQNRIYKFRGKGWDWEVDTENGNYDYLMYADIDMDHPEVVNELRNWGVWYTNTLGLDGFRIDAVKHIKYSFTRDWLTHVRNTTGKNMFAVAEFWKNDIGAIENYLSKTNWNHSVFDVPLHYNLYNASRSGGNYDMRQIFNGTVVQRHPTHAVTFVDNHDSQPEEALESFVEEWFKPLAYALTLTRDQGYPSVFYGDYYGIPTHGVPAMKSKIDPILEARQKYAYGTQRDYLDHPDVIGWTREGDGVHADSGLATLMSDGPGGSKWMEVGKNNAGEVWYDITGNQTNTVTINKDGWGQFHVSGGSVSIYVQQ

SEQ ID NO: 25161 - protein, 483 aa, Bacillus licheniformis
HHNGTNGTMMQYFEWYLPNDGNHWNRLRSDASNLKDKGITAVWIPPAWKGASQNDVGYGAYDLYDLGEFNQKGTVRTKYGTRNQLQAAVTALKSNGIQVYGDVVMNHKGGADATRWVRAVEVNPSNRNQEVSGDYTIEAWTKFDFPGRGNTHSNFKWRWYHFDGVDWDQSRQLQNRIYKFRGKGWDWEVDTENGNYDYLMYADIDMDHPEVVNELRNWGVWYTNTLGLDGFRIDAVKHIKYSFTRDWLTHVRNTTGKNMFAVAEFWKNDIGAIENYLSKTNWNHSVFDVPLHYNLYNASRSGGNYDMRQIFNGTVVQRHPTHAVTFVDNHDSQPEEALESFVEEWFKPLAYALTLTRDQGYPSVFYGDYYGIPTHGVPAMKSKIDPILEARQKYAYGTQRDYLDHPDVIGWTREGDGVHADSGLATLMSDGPGGSKWMEVGKNNAGEVWYDITGNQTNTVTINKDGWGQFHVSGGSVSIYVQQ

SEQ ID NO: 25162 - protein, 483 aa, Bacillus licheniformis
HHNGTNGTMMQYFEWYLPNDGNHWNRLRSDASNLKDKGITAVWIPPAWKGASQNDVGYGAYDLYDLGEFNQKGTVRTKYGTRNQLQAAVTALKSNGIQVYGDVVMNHKGGADATEWVRAVEVNPSNRNQEVSGDYTIEAWTKFDFHGRGNTHSNFKWRWYHFDGVDWDQSRQLQNRIYKFRGKGWDWEVDTENGNYDYLMYADIDMDHPEVVNELRNWGVWYTNTLGLDGFRIDAVKHIKYSFTRDWLTHVRNTTGKNMFAVAEFWKNDIGAIENYLSKTNWNHSVFDVPLHYNLYNASRSGGNYDMRQIFNGTVVQRHPTHAVTFVDNHDSQPEEALESFVEEWFKPLAYALTLTRDQGYPSVFYGDYYGIPTHGVPAMKSKIDPILEARQKYAYGTQRDYLDHPDVIGWTREGDGVHADSGLATLMSDGPGGSKWMEVGKNNAGEVWYDITGNQTNTVTINKDGWGQFHVSGGSVSIYVQQ

SEQ ID NO: 25163 - protein, 483 aa, Bacillus licheniformis
HHNQTNGTMMQYFEWYLPNDGNHWNRLRSDASNLKDKGITAVWIPPAWKGASQNDVGYGAYDLYDLGEFNQKGTVRTKYGTRNQLQAAVTALKSNGIQVYGDVVMNHKGGADATEWVRAVEVNPSNRNQEVSGDYTIEAWTKFDFPGRGNTHSNFKWRWYHFDGVDWDQSRQLQNRIYKFRGKEWDWEVDEENGNYDYLMYADYDMDHPEVVNELRNWGVWYTNTLGLDGFRIDAVKHIKYSFTRDWLTHVRNTTGKNMFAVAEFWKNDIGAIRNYLSKTNWNHSVFDVPLHYNLYNASRSGGNYDMRQIFNGTVVQRHPTHAVTFVDNHDSQPEEALESFVEEWFKPLAYALTLTRDQGYPSVFYGDYYGIPTHGVPAMKSKIDPILEARQKYAYGTQRDYLDHPDVIGWTREGDGVHADSGLATLMSDGPGGSKWMEVGKNNAGEVWYDITGNQTNTVTINKDGWGQFHVSGGSVSIWVQQ

SEQ ID NO: 25164 - protein, 483 aa, Bacillus licheniformis
HHNGTNGTMMQYFEWYLPNDGNHWNRLRSDASNLKDKGITAVWIPPAWKGASQNDVGYGAYDLYDLGEFNQKGTVRTKYGTRNQLQAAVTALKSNGIQVYGDVVMNHKGGADATEWVRAVEVNPSNRNQEVSGDYTIEAWTKFDFPGRGNTHSNFKWRWYHFDGVDWDQSRQLQNRIYKFRGKGWDWEVDTENGNYDYLMYADIDMDHPEVVNELRNWGVWYTNTLGLDGFRIDAVKHIKYSFTRDWLTHVRNTTGKNMFAVAEFWKNDIGAIENYLSKTNWNHSVFDVPLHYNLYNASRSGGRYDMRQIFNGTVVQRHPTHAVTFVDNHDSQPEEALESFVEEWFKPLAYALTLTRDQGYPSVFYGDYYGIPTHGVPAMKSKIDPILEARQKYAYGTQRDYLDHPDVIGWTREGDGVHADSGLATLMSDGPGGSKWMEVGKNNAGEVWYDITGNQTNTVTINKDGWGQFHVSGGSVSIYVQQ

SEQ ID NO: 25165 - protein, 483 aa, Bacillus licheniformis
HHNGTNGTMMQYFEWYLPNDGNHWNRLRSGASNLKDKGITAVWIPPAWKGASQNDVGYGAYDLYDLGEFNQKGTVRTKYGTRNQLQAAVTALKSNGIQVYGDVVMNHKGGADATEWVRAVEVNPSNRNQEVSGDYTIEAWTKFDFPGRGNTHSNFKWRWYHFDGVDWDQSRQLQNRIYKFRGKGWDWEVDTENGNYDYLMYADIDMDHPEVVNELRNWGVWYTNTLGLDGFRIDAVKHIKYSFTRDWLTHVRNTTGKNMFAVAEFWKNDIGAIENYLSKTNWNHSVFDVPLHYNLYNASRSGGNYDMRQIFNGTVVQRHPTHAVTFVDNHDSQPEEALESFVEEWFKPLAYALTLTRDQGYPSVFYGDYYGIPTHGVPAMKSKIDPILEARQKYAYGTQRDYLDHPDVIGWTREGDGVHADSGLATLMSDGPGGSKWMEVGKNNAGEVWYDITGNQTNTVTINKDGWGQFHVSGGSVSIYVQQ

SEQ ID NO: 25166 - protein, 483 aa, Bacillus licheniformis
HHNGTNGTMMQYFEWYLPNDGNHWNRLRSDANNLKDKGITAVWIPPAWKGASQNDVGYGAYDLYDLGEFNQKGTVRTKYGTRNQLQAAVTALKSNGIQVYGDVVMNHKGGADATEWVRAVEVNPSNRNQEVSGDYTIEAWTKFDFPGRGNTHSNFKWRWYHFDGVDWDQSRQLQNRIYKFRGKGWDWEVDTENGNYDYLMYADIDMDHPEVVNELRNWGVWYTNTLGLDGFRIDAVKHIKYSFTRDWLTHVRNTTGKNMFAVAEFWKNDIGAIENYLSKTNWNHSVFDVPLHYNLYNASRSGGNYDMRQIFNGTVVQRHPTHAVTFVDNHDSQPEEALESFVEEWFKPLAYALTLTRDQGYPSVFYGDYYGIPTHGVPAMKSKIDPILEARQKYAYGTQRDYLDHPDVIGWTREGDGVHADSGLATLMSDGPGGSKWMEVGKNNAGEVWYDITGNQTNTVTINKDGWGQFHVSGGSVSIYVQQ

SEQ ID NO: 25167 - protein, 483 aa, Bacillus licheniformis
HHNGTNGTMMQYFEWYLPNDGNHWNRLRSDASNLKDKGITAVWIPPAWKGASQNDVGYGAYDLYDLGEFNQKGTVRTKYGTRNQLQAAVTALKSNGIQVYGDVVMNHKGGADATEWVRAVEVNPSNRNQEVSGDYTIEAWTKFDFPGRGNTHSNFKWRWYHFDGVDWDQSRQLQNRIYKFRGKGWDWEVDTENGNYDYLMYADIDMDHPEVVNELRNWGVWYTNTLGLDGFRIDAVKHIKYSFTRDWLTHVRNTTGKNMFAVAEFWKNDIGAIENYLSKTNWNHSVFDVPLHYNLYNASRSGGNYDMRQIFNGTVVQRHPTHAVTFVDNHDSQPEEALESFVEEWFKPLAYALTLTRDQGYPSVFYGDYYGIPTHGVPAMKSKIDPILEARQKYAYGTQRDYLDHPDVIGWTREGDGVHADSGLATLMIDGPGGSKWMEVGKNNAGEVWYDITGNQTNTVTINKDGWGQFHVSGGSVSIYVQQ

SEQ ID NO: 25168 - protein, 483 aa, Bacillus licheniformis
HHNGTNGTMMQYFEWYLPNDGNHWNRLRSDASNLKDKGITAVWIPPAWKGASQNDVGYGAYDLYDLGEFNQKGTTRTKYGTRNQLQAAVTALKSNGIQVYGDVVMNHKGGADATEWVRAVEVNPSNRNQEVSGDYTIEAWTKFDFPGRGNTHSNFKWRWYHFDGVDWDQSRQLQNRIYKFRGKGWDWEVDTENGNYDYLMYADIDMDHPEVVNELRNWGVWYTNTLGLDGFRIDAVKHIKYSFTRDWLTHVRNTTGKNMFAVAEFWKNDIGAIENYLSKTNWNHSVFDVPLHYNLYNASRSGGNYDMRQIFNGTVVQRHPTHAVTFVDNHDSQPEEALESFVEEWFKPLAYALTLTRDQGYPSVFYGDYYGIPTHGVPAMKSKIDPILEARQKYAYGTQRDYLDHPDVIGWTREGDGVHADSGLATLMSDGPGGSKWMEVGKNNAGEVWYDITGNQTNTVTINKDGWGQFHVSGGSVSIYVQQ

SEQ ID NO: 25169 - protein, 483 aa, Bacillus licheniformis
HHNGTNGTMMQYFEWYLPNDGNHWNRLRSDAANLKDKGITAVWIPPAWKGASQNDVGYGAYDLYDLGEFNQKGTVRTKYGTRNQLQAAVTALKSNGIQVYGDVVMNHKGGADATEWVRAVEVNPSNRNQEVSGDYTIEAWTKFDFPGRGNTHSNFKWRWYHFDGVDWDQSRQLQNRIYKFRGKGWDWEVDTENGNYDYLMYADIDMDHPEVVNELRNWGVWYTNTLGLDGFRIDAVKHIKYSFTRDWLTHVRNTTGKNMFAVAEFWKNDIGAIENYLSKTNWNHSVFDVPLHYNLYNASRSGGNYDMRQIFNGTVVQRHPTHAVTFVDNHDSQPEEALESFVEEWFKPLAYALTLTRDQGYPSVFYGDYYGIPTHGVPAMKSKIDPILEARQKYAYGTQRDYLDHPDVIGWTREGDGVHADSGLATLMSDGPGGSKWMEVGKNNAGEVWYDITGNQTNTVTINKDGWGQFHVSGGSVSIYVQQ

SEQ ID NO: 25170 - protein, 483 aa, Bacillus licheniformis
HHNGTNGTMMQYFEWYLPNDGNHWNRLRSDASNLKDKGITAVWIPPAWKGASQNDVGYGAYDLYDLGEFNQKGTVRTKYGTRNQLQAAVTALKSNGIQVYGDVVMNHKGGADATEWVRAVEVNPSNRNQEVSGDYTIEAWTKFDFPGRGNTHSNFKWRWYHFDGVDWDQSRQLQNRIYKFRGKGWDWEVDTENGNYDYLMYADIDMDHPEVVNELRNWGVWYTNTLGLDGFRIDAVKHIKYSFTRDWLTHVRNTTGKNMFAVAEFWKNDIGAIENYLSKTNWNHSVFDVPLHYNLYNASRSHGNYDMRQIFNGTVVQRHPTHAVTFVDNHDSQPEEALESFVEEWFKPLAYALTLTRDQGYPSVFYGDYYGIPTHGVPAMKSKIDPILEARQKYAYGTQRDYLDHPDVIGWTREGDGVHADSGLATLMSDGPGGSKWMEVGKNNAGEVWYDITGNQTNTVTINKDGWGQFHVSGGSVSIYVQQ

SEQ ID NO: 25171 - protein, 483 aa, Bacillus licheniformis
HHNGTNGTMMQYFEWYLPNDGNHWNRLRSDASNLKDKGITAVWIPPAWKGASQNDVGYGAYDLYDLGEFNQKGTVRTKYGTRNQLQAAVTALKSNGIQNYGDVVMNHKGGADATEWVRAVEVNPSNRNQEVSGDYTIEAWTKFDFPGRGNTHSNFKWRWYHFDGVDWDQSRQLQNRIYKFRGKGWDWEVDTENGNYDYLMYADIDMDHPEVVNELRNWGVWYTNTLGLDGFRIDAVKHIKYSFTRDWLTHVRNTTGKNMFAVAEFWKNDIGAIENYLSKTNWNHSVFDVPLHYNLYNASRSGGNYDMRQIFNGTVVQRHPTHAVTFVDNHDSQPEEALESFVEEWFKPLAYALTLTRDQGYPSVFYGDYYGIPTHGVPAMKSKIDPILEARQKYAYGTQRDYLDHPDVIGWTREGDGVHADSGLATLMSDGPGGSKWMEVGKNNAGEVWYDITGNQTNTVTINKDGWGQFHVSGGSVSIYVQQ

SEQ ID NO: 25172 - protein, 483 aa, Bacillus licheniformis
HHNGTNGTMMQYFEWYLPNDGNHWNRLRSDASNLKDKGITAVWIPPAWKGASQNDVGYGAYDLYDLGEFNQKGTVRTKYGTRNQLQAAVTALKSNGIQVYGDVVMNHKGGADATEWVRAVEVNPSNRNQEVSGDYTIEAWTKFDAPGRGNTHSNFKWRWYHFDGVDWDQSRQLQNRIYKFRGKGWDWEVDTENGNYDYLMYADIDMDHPEVVNELRNWGVWYTNTLGLDGFRIDAVKHIKYSFTRDWLTHVRNTTGKNMFAVAEFWKNDIGAIENYLSKTNWNHSVFDVPLHYNLYNASRSGGNYDMRQIFNGTVVQRHPTHAVTFVDNHDSQPEEALESFVEEWFKPLAYALTLTRDQGYPSVFYGDYYGIPTHGVPAMKSKIDPILEARQKYAYGTQRDYLDHPDVIGWTREGDGVHADSGLATLMSDGPGGSKWMEVGKNNAGEVWYDITGNQTNTVTINKDGWGQFHVSGGSVSIYVQQ

SEQ ID NO: 25173 - protein, 483 aa, Bacillus licheniformis
HHNGTNGTMMQYFEWYLPNDGNHWNRLRSDASNLKDKGITAVWIPPAWKGASQNDVGYGAYDLYDLGEFNQKGTVRTKYGTRNQLQAAVTALKSNGIQVYGDVVMNHKGGADATEWVRAVEVNPSNRNQEVSGDYTIEAWTKFDFPGRGNTHSNFKWRWYHFDGVDWDQSRQLQNRIYKFRGKGWDWEVDTENGNYDYLMYADIDMDHPEVVNELRNWGVWYTNTLGLDGFRIDAVKHIKYSFTRDWVTHVRNTTGKNMFAVAEFWKNDIGAIENYLSKTNWNHSVFDVPLHYNLYNASRSGGNYDMRQIFNGTVVQRHPTHAVTFVDNHDSQPEEALESFVEEWFKPLAYALTLTRDQGYPSVFYGDYYGIPTHGVPAMKSKIDPILEARQKYAYGTQRDYLDHPDVIGWTREGDGVHADSGLATLMSDGPGGSKWMEVGKNNAGEVWYDITGNQTNTVTINKDGWGQFHVSGGSVSIYVQQ

SEQ ID NO: 25174 - protein, 483 aa, Bacillus licheniformis
HHNGTNGTMMQYFEWYLPNDGNHWNRLRSDASNLKDKGITAVWIPPAWKGASQNDVGYGAYDLYDLGEFNQKGTVRTKYGTRNQLQAAVTALKSNGIQVYGDVVMNHKGGADATEWVRAVEVNPSNRNQEVSGDYTIEAWTKFDFPGRGNTHSNFKWRWYHFDGVDWDQSRQLQNRIYKFRGKGWDWEVDTENGNYDYLMYADIDMDHPEVVNELRNWGVWYTNTLGLDGFRIDAVKHIKYSFTRDWLTHVRNTTGKNMFAVAEFWKNDIGAIENYLSKTNWNHSVFDVPLHYNLYNASRSGGNYDMRQIFNGTVVQRHPTHAVTFVDNHDSQPEEALESFVEEWFKPLAYNLTLTRDQGYPSVFYGDYYGIPTHGVPAMKSKIDPILEARQKYAYGTQRDYLDHPDVIGWTREGDGVHADSGLATLMSDGPGGSKWMEVGKNNAGEVWYDITGNQTNTVTINKDGWGQFHVSGGSVSIYVQQ

SEQ ID NO: 25175 - protein, 483 aa, Bacillus subtilis
HHNGTNGTMMQYFEWYLPNDGNHWNRLRSDASNLKDKGITAVWIPPAWKGASQNDVGYGAYDLYDLGEFNQKGTVRTKYGTRNQLQAAVTALKSNGIQVYGDVVMNHKGGADATEWVRAVEVNPSNRNQEVSGDYTIEAWTKFDFPGRGNTHSNFKWRWYHFDGVDWDQSRQLQNRIYKFRGKGWDWEVDTENGNYDYLMYADIDMDHPEVVNELRNWGVWYTNTLGLDGFRIDAVKHIKYSFTRDWLTHVRNTTGKNMFAVAEFWKNDIGAIENYLSKTNWNHSVFDVPLHYNLYNASRSGGNYDMRQIFNGTVVQRHPTHAVTFVDNHDSQPEEALESFVEEWFKPLAYALTLTRDQGYPSVFYGDYYGIPTHGVPAMKSKIDPILEARQKYAYGTQRDYLDHPDVIGWTREGDDVHADSGLATLMSDGPRGSKWMEVGKNNAGEVWYDITGNQTNTVTINKDGWGQFRVSGGSVSIYVQQ

SEQ ID NO: 25176 - protein, 483 aa, Bacillus licheniformis
HHNGTNGTMMQYFEWYLPNDGNHWNRLRSDASNLKDKGITAVWIPPAWKGASQNDVGYGAYDLYDLGEFNQKGTVRTKYGTRNQLQAAVTALKSNGIQVYGDVVMNHKGGADASEWVRAVEVNPSNRNQEVSGDYTIEAWTKFDFPGRGNTHSNFKWRWYHFDGVDWDQSRQLQNRIYKFRGKGWDWEVDTENGNYDYLMYADIDMDHPEVVNELRNWGVWYTNTLGLDGFRIDAVKHIKYSFTRDWLTHVRNTTGKNMFAVAEFWKNDIGAIENYLSKTNWNHSVFDVPLHYNLYNASRSGGNYDMRQIFNGTVVQRHPTHAVTFVDNHDSQPEEALESFVEEWFKPLAYALTLTRDQGYPSVFYGDYYGIPTHGVPAMKSKIDPILEARQKYAYGTQRDYLDHPDVIGWTREGDGVHADSGLATLMSDGPGGSKWMEVGKNNAGEVWYDITGNQTNTVTINKDGWGQFHVSGGSVSIYVQQ

SEQ ID NO: 25177 - protein, 483 aa, Bacillus licheniformis
HHNGTNGTMMQYFEWYLPNDGNHWNRLRSDASNLKDKGITAVWIPPAWKGASQNDVGYGAYDLYDLGEFNQKGTVRTKYGTRNQLQAAVTALKSNGIQVYGDVVMNHKGGADATEWVRAVEVNPSNRNQEVSGDYTIEAWTKFDFPGRGNTHSNFKWRWYHFDGVDWDQSRQLQNRIYKFRGKGWDWEVDTENGNYDYLMYADIDMDHPEVVNELRNWGVWYTNTLGLDGFRIDAVKHIKYSFTRDWLTHVRNTTGKNMFAVAEFWKNDIGAIENYLSKTNWNHSVFDVPLHYNLYNASRSGGNYDMRQIFNGTVVQRHPTHAVTFVDNHDSQPEEALESFVEEWFKPLAYALTLTRDQGYPSVFYGDYYGIPTHGVPAMKSKIDPILEARQKYAYGTQRDYLDHPDVIGWTREGDGVHADSGLATLMSDGPGGSKWMEVGKNNAGEVWYDITGNQTNSVTINKDGWGQFHVSGGSVSIYVQQ

SEQ ID NO: 25178 - protein, 483 aa, Bacillus licheniformis
HHNGTNGTMMQYFEWYLPNDGNHWNRLRSDASNLKDKGITAVWIPPAWKGASQNDVGYGAYDLYDLGEFNQKGTVRTKYGTRNQLQAAVTALKSNGIQVYGDVVMNHKGGADATEWVRAVEVNPSNRNQEVSGDYTIEAWTKFDFPGRGNTHSNFKWRWYHFDGVDWDQSRQLQNRIYKFRGKGWDWEVDTENGNYDYLMYADIDMDHPEVVNELRNWGVWYTNTLGLDGFRIDAVKHIKYSFTRDWLTHVRNTTGKNMFAVAEFWKNDIGAIENYLSKTNWNHSVFDKPLHYNLYNASRSGGNYDMRQIFNGTVVQRHPTHAVTFVDNHDSQPEEALESFVEEWFKPLAYALTLTRDQGYPSVFYGDYYGIPTHGVPAMKSKIDPILEARQKYAYGTQRDYLDHPDVIGWTREGDGVHADSGLATLMSDGPGGSKWMEVGKNNAGEVWYDITGNQTNTVTINKDGWGQFHVSGGSVSIYVQQ

SEQ ID NO: 25179 - protein, 483 aa, Bacillus licheniformis
HHNGTNGTMMQYFEWYLPNDGNHWNRLRSDASNLKDKGITAVWIPPAWKGASQNDVGYGAYDLYDLGEFNQKGTVRTKYGTREQLQAAVTALKSNGIQVYGDVVMNHKGGADATEWVRAVEVNPSNRNQEVSGDYTIEAWTKFDFPGRGNTHSNFKWRWYHFDGVDWDQSRQLQNRIYKFRGKEWDWEVDTENGNYDYLMYADIDMDHPEVVNELRRWGVWYTDTLGLDGFRIDAVKHIKYSFTRDWLTHVRNTTGKNMFAVAEFWKNDIGAIENYLSKTNWNHSVFDVPLHYNLYNASRSGGNYDMRQIFEGTVVQRHPTHAVTFVDNHDSQPEEALESFVEEWFKPLAYALTLTRDQGYPSVFYGDYYGIPTHGVPAMKSKIDPILEARQKYAYGTQRDYLDHPDVIGWTREGDGVHADSGLATLMSDGPGGSKWMEVGKNNAGEVWRDITGNQTNTVTINKDGWGQFHVSGGSVSIYVQQ

SEQ ID NO: 25180 - protein, 483 aa, Bacillus licheniformis
HHNGTNGTMMQYFEWYLPNDGNHWNRLRSDASNLKDKGITAVWIPPAWKGASQNDVGYGAYDLYDLGEFNQKGTVRTKYGTRNQLQAAVTALKSNGIQVYGDVVMNHKGGADATEWVRASEVNPSNRNQEVSGDYTIEAWTKFDFPGRGNTHSNFKWRWYHFDGVDWDQSRQLQNRIYKFRGKGWDWEVDTENGNYDYLMYADIDMDHPEVVNELRNWGVWYTNTLGLDGFRIDAVKHIKYSFTRDWLTHVRNTTGKNMFAVAEFWKNDIGAIENYLSKTNWNHSVFDVPLHYNLYNASRSGGNYDMRQIFNGTVVQRHPTHAVTFVDNHDSQPEEALESFVEEWFKPLAYALTLTRDQGYPSVFYGDYYGIPTHGVPAMKSKIDPILEARQKYAYGTQRDYLDHPDVIGWTREGDGVHADSGLATLMSDGPGGSKWMEVGKNNAGEVWYDITGNQTNTVTINKDGWGQFHVSGGSVSIYVQQ

SEQ ID NO: 25181 - protein, 483 aa, Bacillus licheniformis
HHNGTNGTMMQYFEWYLPNDGNHWNRGRSDASNLKDKGITAVWIPPAWKGASQNDVGYGAYDLYDLGEFNQKGTVRTKYGTRNQLQAAVTALKSNGIQVYGDVVMNHKGGADATEWVRAVEVNPSNRNQEVSGDYTIEAWTKFDFPGRGNTHSNFKWRWYHFDGVDWDQSRQLQNRIYKFRGKGWDWEVDTENGNYDYLMYADIDMDHPEVVNELRNWGVWYTNTLGLDGFRIDAVKHIKYSFTRDWLTHVRNTTGKNMFAVAEFWKNDIGAIENYLSKTNWNHSVFDVPLHYNLYNASRSGGNYDMRQIFNGTVVQRHPTHAVTFVDNHDSQPEEALESFVEEWFKPLAYALTLTRDQGYPSVFYGDYYGIPTHGVPAMKSKIDPILEARQKYAYGTQRDYLDHPDVIGWTREGDGVHADSGLATLMSDGPGGSKWMEVGKNNAGEVWYDITGNQTNTVTINKDGWGQFHVSGGSVSIYVQQ

SEQ ID NO: 25182 - protein, 483 aa, Bacillus licheniformis
HHNGTNGTMMQYFEWYLPNEGNHWNRLRSDASNLKDKGITAVWIPPAWKGASQNDVGYGAYDLYDLGEFNQKGTVRTKYGTRNQLQAAVTALKSNGIQVYGDVVMNHKGGADATEWVRAVEVNPSNRNQEVSGDYTIEAWTKFDFPGRGNTHSNFKWRWYHFDGVDWDQSRQLQNRIYKFRGKGWDWEVDTENGNYDYLMYADIDMDHPEVVNELRNWGVWYTNTLGLDGFRIDAVKHIKYSFTRDWLTHVRNTTGKNMFAVAEFWKNDIGAIENYLSKTNWNHSVFDVPLHYNLYNASRSGGNYDMRQIFNGTVVQRHPTHAVTFVDNHDSQPEEALESFVEEWFKPLAYALTLTRDQGYPSVFYGDYYGIPTHGVPAMKSKIDPILEARQKYAYGTQRDYLDHPDVIGWTREGDGVHADSGLATLMSDGPGGSKWMEVGKNNAGEVWYDITGNQTNTVTINKDGWGQFHVSGGSVSIYVQQ

SEQ ID NO: 25183 - protein, 483 aa, Bacillus licheniformis
HHNGTNGTMMQYFEWYLPNDGNHWNRLRSDASNLKDKGITAVWIPPAWKGASQNDVGYGAYDLYDLGEFNQKGTVRTKYGTRNQLQAAVTALKSNGIQVYGDVVMNHKGGADATEWVRAVEVNPSNRNQEVSGDYTIEAWTKFDFPGRGNTHSNFKWRWYHFDGVDWDQSRQLQNRIYKFRGKGWDWEVDTENGNYDYLMYADIDMDHPEVVNELRNWGVWYTNTLGLDGFRIDAVKHIKFSFTRDWLTHVRNTTGKNMFAVAEFWKNDIGAIENYLSKTNWNHSVFDVPLHYNLYNASRSGGNYDMRQIFNGTVVQRHPTHAVTFVDNHDSQPEEALESFVEEWFKPLAYALTLTRDQGYPSVFYGDYYGIPTHGVPAMKSKIDPILEARQKYAYGTQRDYLDHPDVIGWTREGDGVHADSGLATLMSDGPGGSKWMEVGKNNAGEVWYDITGNQTNTVTINKDGWGQFHVSGGSVSIYVQQ

SEQ ID NO: 25184 - protein, 483 aa, Bacillus licheniformis
HHNGTNGTMMQYFEWYLPNDGNHWNRLRSDASNLKDKGITAVWIPPAWKGASQNDVGYGAYDLYDLGEFNQKGTVRTKYGTRNQLQAAVTALKSNGIQVYGDVVMNHKGGADATEWVRAVEVNPSNRNQEVSGDYTIEAWTKFDFPGRGNTHSNFKWRWYHFDGVDWDQSRQLQNRIYKFRGKGWDWEVDTENGNYDYLMYADIDMDHPEVVNELRNWGVWYTNTLGLDGFRIDAVKHIKYSFTRDWLTHVRNTTGKNMFAVAEFWKNDIGAIENYLSKTNWNHSVFDVPLHYNLYNASRSGGNYDMRQIFNHTVVQRHPTHAVTFVDNHDSQPEEALESFVEEWFKPLAYALTLTRDQGYPSVFYGDYYGIPTHGVPAMKSKIDPILEARQKYAYGTQRDYLDHPDVIGWTREGDGVHADSGLATLMSDGPGGSKWMEVGKNNAGEVWYDITGNQTNTVTINKDGWGQFHVSGGSVSIYVQQ

SEQ ID NO: 25185 - protein, 483 aa, Bacillus licheniformis
HHNGTNGTMMQYFEWYLPNDGNHWNRLRSDASNLKDKGITAVWIPPAWKGASQNDVGYGAYDLYDLGEFNQKGTVRTKYGTRNQLQAAVTALKSNGIQVYGDVVMNHKGGADATEWVRAVEVNPSNRNQEVSGDYTIEAWTKFDFPGRGNTHSNFKWRWYHFDGVDWDQSRQLQNRIYKFRGKGWDWEKDTENGNYDYLMYADIDMDHPEVVNELRNWGVWYTNTLGLDGFRIDAVKHIKYSFTRDWLTHVRNTTGKNMFAVAEFWKNDIGAIENYLSKTNWNHSVFDVPLHYNLYNASRSGGNYDMRQIFNGTVVQRHPTHAVTFVDNHDSQPEEALESFVEEWFKPLAYALTLTRDQGYPSVFYGDYYGIPTHGVPAMKSKIDPILEARQKYAYGTQRDYLDHPDVIGWTREGDGVHADSGLATLMSDGPGGSKWMEVGKNNAGEVWYDITGNQTNTVTINKDGWGQFHVSGGSVSIYVQQ

SEQ ID NO: 25186 - protein, 483 aa, Bacillus licheniformis
HHNGTFGTMMQYFEWYLPNDGNHWNRLRSDASNLKDKGITAVWIPPAWKGASQNDVGYGAYDLYDLGEFNQKGTVRTKYGTRNQLQAAVTALKSNGIQVYGDVVMNHKGGADATEWVRAVEVNPSNRNQEVSGDYTIEAWTKFDFPGRGNTHSNFKWRWYHFDGVDWDQSRQLQNRIYKFRGKGWDWEVDTENGNYDYLMYADIDMDHPEVVNELRNWGVWYTNTLGLDGFRIDAVKHIKYSFTRDWLTHVRNTTGKNMFAVAEFWKNDIGAIENYLSKTNWNHSVFDVPLHYNLYNASRSGGNYDMRQIFNGTVVQRHPTHAVTFVDNHDSQPEEALESFVEEWFKPLAYALTLTRDQGYPSVFYGDYYGIPTHGVPAMKSKIDPILEARQKYAYGTQRDYLDHPDVIGWTREGDGVHADSGLATLMSDGPGGSKWMEVGKNNAGEVWYDITGNQTNTVTINKDGWGQFHVSGGSVSIYVQQ

SEQ ID NO: 25187 - protein, 483 aa, Bacillus licheniformis
HHNGTNGTMMQYFEWYLPNDGNHWNRLRSDASNLKDKGITAVWIPPAWKGASQNDVGYGAYDLYDLGEFNQKGTVRTKYGTRNQLQAAVTALKSNGIQVYGDVVMNHKGGADATEWVRAVEVNPSNRNQEVSGDYTIEAWTKFDFPGRGNTHSNFKWRWYHFDGVDWDSSRQLQNRIYKFRGKGWDWEVDTENGNYDYLMYADIDMDHPEVVNELRNWGVWYTNTLGLDGFRIDAVKHIKYSFTRDWLTHVRNTTGKNMFAVAEFWKNDIGAIENYLSKTNWNHSVFDVPLHYNLYNASRSGGNYDMRQIFNGTVVQRHPTHAVTFVDNHDSQPEEALESFVEEWFKPLAYALTLTRDQGYPSVFYGDYYGIPTHGVPAMKSKIDPILEARQKYAYGTQRDYLDHPDVIGWTREGDGVHADSGLATLMSDGPGGSKWMEVGKNNAGEVWYDITGNQTNTVTINKDGWGQFHVSGGSVSIYVQQ

SEQ ID NO: 25188 - protein, 483 aa, Bacillus licheniformis
HHNGTNGTMMQYFEWYLPNDGNHWNRLRSDASNLKDKGITAVWIPPAWKGASQNDVGYGAYDLYDLGEFNQKGTVRTKYGTRNQLQAAVTALKSNGIQVYGDVVMNHKGGADATEWVRAVEVNPSNRNQEVSGDYTIEAWTKFDFPGRGNTHSNFKWRWYHFDGVDWDQSRQLQNRIYKFRGKGWDWEVDTENGNYDYLMYADIDMDHPEVVNELRNWGVWYTNTLGLDGFRIDAVKHIKYSFTRDWLTHVRNTTGKNMFAVAEFWKNDIGAIENYLSKTNWNHDVFDVPLHYNLYNASRSGGNYDMRQIFNGTVVQRHPTHAVTFVDNHDSQPEEALESFVEEWFKPLAYALTLTRDQGYPSVFYGDYYGIPTHGVPAMKSKIDPILEARQKYAYGTQRDYLDHPDVIGWTREGDGVHADSGLATLMSDGPGGSKWMEVGKNNAGEVWYDITGNQTNTVTINKDGWGQFHVSGGSVSIYVQQ

SEQ ID NO: 25189 - protein, 483 aa, Bacillus licheniformis
HHNGTNGTMMQYFEWYLPNDGNHWNRLRSDASNLKDKGITAVWIPPAWKGASQNDVGYGAYDLYDLGEFNQKGTVRTKYGTRNQLQAAVTALKSNGIQVYGDVVMNHKGGADATEWVRAVEVNPSNRNQEVSGDYTIEAWTKFDFPGRGNTHSNFKWRWYHFDGVDWDQSRQLQNRIYKFRGKGWDWEVDTENGNYDYLMYADIDMDHPEVVNELRNWGVWYTNTLGLDGFRIDAVKHIKYSFTRDWLTHVRNTTGKNMFAVAEFWKNDIGAIENYLSKTNWNHSVFDVPLHYNLYNASRSGGNYDMRQIFNGTVVQRHPTHAVTFVDNHDSQPEEALESFVEEWTKPLAYALTLTRDQGYPSVFYGDYYGIPTHGVPAMKSKIDPILEARQKYAYGTQRDYLDHPDVIGWTREGDGVHADSGLATLMSDGPGGSKWMEVGKNNAGEVWYDITGNQTNTVTINKDGWGQFHVSGGSVSIYVQQ

SEQ ID NO: 25190 - protein, 483 aa, Bacillus licheniformis
HHNGTNGTMMQYFEWYLPNDGNHWNRLRSDASNLKDKGITAVWIPPAWKGASQNDVGYGAYDLYDLGEFNQKGTVRTKYGTRNQLQAAVTALKSNGIQVYGDVVMNHKGGADATEWVRAVEVNPSNRNQEVSGDYTIEAWTKFDFPGRGNTHSNFKWRWYHFDGVDWDQSRQLQNRIYKFRGKGWDWEVDTENGNYDYLMYADIDMDHPEVVNELRNWGVWYTYTLGLDGFRIDAVKHIKYSFTRDWLTHVRNTTGKNMFAVAEFWKNDIGAIENYLSKTNWNHSVFDVPLHYNLYNASRSGGNYDMRQIFNGTVVQRHPTHAVTFVDNHDSQPEEALESFVEEWFKPLAYALTLTRDQGYPSVFYGDYYGIPTHGVPAMKSKIDPILEARQKYAYGTQRDYLDHPDVIGWTREGDGVHADSGLATLMSDGPGGSKWMEVGKNNAGEVWYDITGNQTNTVTINKDGWGQFHVSGGSVSIYVQQ

SEQ ID NO: 25191 - protein, 483 aa, Bacillus licheniformis
HHNGTPGTMMQYFEWYLPNDGNHWNRLRSDASNLKDKGITAVWIPPAWKGASQNDVGYGAYDLYDLGEFNQKGTVRTKYGTRNQLQAAVTALKSNGIQVYGDVVMNHKGGADATEWVRAVEVNPSNRNQEVSGDYTIEAWTKFDFPGRGNTHSNFKWRWYHFDGVDWDQSRQLQNRIYKFRGKGWDWEVDTENGNYDYLMYADIDMDHPEVVNELRNWGVWYTNTLGLDGFRIDAVKHIKYSFTRDWLTHVRNTTGKNMFAVAEFWKNDIGAIENYLSKTNWNHSVFDVPLHYNLYNASRSGGNYDMRQIFNGTVVQRHPTHAVTFVDNHDSQPEEALESFVEEWFKPLAYALTLTRDQGYPSVFYGDYYGIPTHGVPAMKSKIDPILEARQKYAYGTQRDYLDHPDVIGWTREGDGVHADSGLATLMSDGPGGSKWMEVGKNNAGEVWYDITGNQTNTVTINKDGWGQFHVSGGSVSIYVQQ

SEQ ID NO: 25192 - protein, 483 aa, Bacillus licheniformis
HHNGTNGTMMQYFEWYLPFDGNHWNRLRSDASNLKDKGITAVWIPPAWKGASQNDVGYGAYDLYDLGEFNQKGTVRTKYGTRNQLQAAVTALKSNGIQVYGDVVMNHKGGADATEWVRAVEVNPSNRNQEVSGDYTIEAWTKFDFPGRGNTHSNFKWRWYHFDGVDWDQSRQLQNRIYKFRGKGWDWEVDTENGNYDYLMYADIDMDHPEVVNELRNWGVWYTNTLGLDGFRIDAVKHIKYSFTRDWLTHVRNTTGKNMFAVAEFWKNDIGAIENYLSKTNWNHSVFDVPLHYNLYNASRSGGNYDMRQIFNGTVVQRHPTHAVTFVDNHDSQPEEALESFVEEWFKPLAYALTLTRDQGYPSVFYGDYYGIPTHGVPAMKSKIDPILEARQKYAYGTQRDYLDHPDVIGWTREGDGVHADSGLATLMSDGPGGSKWMEVGKNNAGEVWYDITGNQTNTVTINKDGWGQFHVSGGSVSIYVQQ

SEQ ID NO: 25193 - protein, 483 aa, Bacillus licheniformis
HHNGTNGTMMQYFEWYLPNDGNHWNRLRSDASNLKDKGITAVWIPPAWKGASQNDVGYGAYDLYDLGEFNQKGTVRTKYGTRNQLQAAVTALKSNGIQVYGDVVMNHKGGADATEWVRAVEVNPSNRNQEVSGDYTIEAWTKFDFPGRGNTHSNFKWRWYHFDGVDWDQSRQLQNRIYKFRGKGWDWEVDTENGNYDYLMYADIDMDHPEVVNELRNWGVYYTNTLGLDGFRIDAVKHIKYSFTRDWLTHVRNTTGKNMFAVAEFWKNDIGAIENYLSKTNWNHSVFDVPLHYNLYNASRSGGNYDMRQIFNGTVVQRHPTHAVTFVDNHDSQPEEALESFVEEWFKPLAYALTLTRDQGYPSVFYGDYYGIPTHGVPAMKSKIDPILEARQKYAYGTQRDYLDHPDVIGWTREGDGVHADSGLATLMSDGPGGSKWMEVGKNNAGEVWYDITGNQTNTVTINKDGWGQFHVSGGSVSIYVQQ

SEQ ID NO: 25194 - protein, 483 aa, Bacillus licheniformis
HHNGTNGTMMQYFEWYLPNDGNHWNRLRSDASNLKDKGITAVWIPPAWKGASQNDVGYGAYDLYDLGEFNQKGTVRTKYGTRNQLQAAVTALKSNGIQVYGDVVMNHKGGADATEWVRAVEVNPSNRNQEVSGDYTIEAWTKFDFPGRGNTHSNFKWRWYHFDGVDWDQSRQLQNRIYKFRGKGWDWEVDTENGNYDYLMYADIDMDHPEVVNELRNWGVWYTNTLGLDGFRIDAVKHIKYSFTRDWLTHVRNTTGKNMFAVAEFWKNDIGAIENYLSKTNWLHSVFDVPLHYNLYNASRSGGNYDMRQIFNGTVVQRHPTHAVTFVDNHDSQPEEALESFVEEWFKPLAYALTLTRDQGYPSVFYGDYYGIPTHGVPAMKSKIDPILEARQKYAYGTQRDYLDHPDVIGWTREGDGVHADSGLATLMSDGPGGSKWMEVGKNNAGEVWYDITGNQTNTVTINKDGWGQFHVSGGSVSIYVQQ

SEQ ID NO: 25195 - protein, 483 aa, Bacillus licheniformis
HHNGTNGTMMQYFEWYLPNDGNHWNRLRSDASNLKDKGITAVWIPPAWKGASQNDVGYGAYDLYDLGEFNQKGTVRTKYGTRNQLQAAVTALKSNGIQVYGDVVMNHKGGADATEWVRAVEVNPSNRNQEVSGDYNIEAWTKFDFPGRGNTHSNFKWRWYHFDGVDWDQSRQLQNRIYKFRGKGWDWEVDTENGNYDYLMYADIDMDHPEVVNELRNWGVWYTNTLGLDGFRIDAVKHIKYSFTRDWLTHVRNTTGKNMFAVAEFWKNDIGAIENYLSKTNWNHSVFDVPLHYNLYNASRSGGNYDMRQIFNGTVVQRHPTHAVTFVDNHDSQPEEALESFVEEWFKPLAYALTLTRDQGYPSVFYGDYYGIPTHGVPAMKSKIDPILEARQKYAYGTQRDYLDHPDVIGWTREGDGVHADSGLATLMSDGPGGSKWMEVGKNNAGEVWYDITGNQTNTVTINKDGWGQFHVSGGSVSIYVQQ

SEQ ID NO: 25196 - protein, 483 aa, Bacillus licheniformis
HHNGTNGTMMQYFEWYLPNDGNHWNRLRSDASNLKDKGITAVWIPPAWKGASQNDVGYGAYDLYDLGEFNQKGTVRTKYGTRNQLQAAVTALKSNGIQVYGDVVMNHKGGADATEWVRAVEVNPSNRNQEVSGDYTIEAWTKFDFPGRGNTHSNFKWRWYHFDGVDWDQSRQLQNRIYKFRGKGWDWEVDTENGNYDYLMYADIDMDHPEVVNELRNWGVWYTNTLGLDGMRIDAVKHIKYSFTRDWLTHVRNTTGKNMFAVAEFWKNDIGAIENYLSKTNWNHSVFDVPLHYNLYNASRSGGNYDMRQIFNGTVVQRHPTHAVTFVDNHDSQPEEALESFVEEWFKPLAYALTLTRDQGYPSVFYGDYYGIPTHGVPAMKSKIDPILEARQKYAYGTQRDYLDHPDVIGWTREGDGVHADSGLATLMSDGPGGSKWMEVGKNNAGEVWYDITGNQTNTVTINKDGWGQFHVSGGSVSIYVQQ

SEQ ID NO: 25197 - protein, 483 aa, Bacillus licheniformis
HHNGTNGTMMQYFEWYLPNDGNHWNRLRSDASNLKDKGITAVWIPPAWKGASQNDVGYGAYDLYDLGEFNQKGTVRTKYGTRNQLQAAVTALKSNGIQVYGDVVMNHKGGADATEWVRAVEVNPSNRNQEVSGDYTIEAWTKFDFPGRGNTHSNFKWRWYHFDGVDWDQSRQLQNRIYKFRGKGWDWEVDTENGNYDYLMYADIDMDHPEVVEELRNWGVWYTNTLGLDGFRIDAVKHIKYSFTRDWLTHVRNTTGKNMFAVAEFWKNDIGAIENYLSKTNWNHSVFDVPLHYNLYNASRSGGNYDMRQIFNGTVVQRHPTHAVTFVDNHDSQPEEALESFVEEWFKPLAYALTLTRDQGYPSVFYGDYYGIPTHGVPAMKSKIDPILEARQKYAYGTQRDYLDHPDVIGWTREGDGVHADSGLATLMSDGPGGSKWMEVGKNNAGEVWYDITGNQTNTVTINKDGWGQFHVSGGSVSIYVQQ

SEQ ID NO: 25198 - protein, 483 aa, Bacillus licheniformis
HHNGTNGTMMQYFEWYLPNDGNHWNRLRSDASNLKDKGITAVWIPPAWKGASQNDVGYGAYDLYDLGEFNQKGTVRTKYGTRNQLQAAVTALKSNNIQVYGDVVMNHKGGADATEWVRAVEVNPSNRNQEVSGDYTIEAWTKFDFPGRGNTHSNFKWRWYHFDGVDWDQSRQLQNRIYKFRGKGWDWEVDTENGNYDYLMYADIDMDHPEVVNELRNWGVWYTNTLGLDGFRIDAVKHIKYSFTRDWLTHVRNTTGKNMFAVAEFWKNDIGAIENYLSKTNWNHSVFDVPLHYNLYNASRSGGNYDMRQIFNGTVVQRHPTHAVTFVDNHDSQPEEALESFVEEWFKPLAYALTLTRDQGYPSVFYGDYYGIPTHGVPAMKSKIDPILEARQKYAYGTQRDYLDHPDVIGWTREGDGVHADSGLATLMSDGPGGSKWMEVGKNNAGEVWYDITGNQTNTVTINKDGWGQFHVSGGSVSIYVQQ

SEQ ID NO: 25199 - protein, 483 aa, Bacillus licheniformis
HHNGTNGTMMQYFEWYLPNDGNHWNRLRSDASNLKDKGITAVWIPPAWKGASQNDVGYGAYDLYDLGEFNQKGTVRTKYGTRNQLQAAVTALKSNGIQVYGDVVMNHKGGADATEWVRAVEVNPSNRNQEVSGDYTIEAWTQFDFPGRGNTHSNFKWRWYHFDGVDWDQSRQLQNRIYKFRGKGWDWEVDTENGNYDYLMYADIDMDHPEVVNELRNWGVWYTNTLGLDGFRIDAVKHIKYSFTRDWLTHVRNTTGKNMFAVAEFWKNDIGAIENYLSKTNWNHSVFDVPLHYNLYNASRSGGNYDMRQIFNGTVVQRHPTHAVTFVDNHDSQPEEALESFVEEWFKPLAYALTLTRDQGYPSVFYGDYYGIPTHGVPAMKSKIDPILEARQKYAYGTQRDYLDHPDVIGWTREGDGVHADSGLATLMSDGPGGSKWMEVGKNNAGEVWYDITGNQTNTVTINKDGWGQFHVSGGSVSIYVQQ

SEQ ID NO: 25200 - protein, 483 aa, Bacillus licheniformis
HHNGTNQTMMQYFEWYLPNDGNHWNRLRSDASNLKDKGITAVWIPPAWKGASQNDVGYGAYDLYDLGEFNQKGTVRTKYGTRNQLQAAVTALKSNGIQVYGDVVMNHKGGADATEWVRAVEVNPSNRNQEVSGDYTIEAWTKFDFPGRGNTHSNFKWRWYHFDGVDWDQSRQLQNRIYKFRGKGWDWEVDTENGNYDYLMYADIDMDHPEVVNELRNWGVWYTNTLGLDGFRIDAVKHIKYSFTRDWLTHVRNTTGKNMFAVAEFWKNDIGAIENYLSKTNWNHSVFDVPLHYNLYNASRSGGNYDMRQIFNGTVVQRHPTHAVTFVDNHDSQPEEALESFVEEWFKPLAYALTLTRDQGYPSVFYGDYYGIPTHGVPAMKSKIDPILEARQKYAYGTQRDYLDHPDVIGWTREGDGVHADSGLATLMSDGPGGSKWMEVGKNNAGEVWYDITGNQTNTVTINKDGWGQFHVSGGSVSIYVQQ

SEQ ID NO: 25201 - protein, 483 aa, Bacillus licheniformis
HHNGTNGTMMQYFEWYLPNDGNHWNRLRSDASNLKDKGITAVWIPPAWKGASQNDVGYGAYDLYDLGEFNQKGTVRTKYGTRNQLQAAVTALKSNGIQVYGDVVMNHKGGADATEWVRAVEVNPSNRNQEVSGDYTIEAWTKFDFPGRGNTHSNFKWRWYHFDGVDWDQSRQLQNRIYKFRGKGWDWEVDTENGNYDYLMYADIDMDHPEVVNELRNWGVWYTNTLGLDGFRIDAVKHIKYSFTRDWLTHVRNTTGKNMFAVAEFWKNDIGAIENYLSKTNWNHSVFDVPLHYNLYNASRSGGNYDMRQIFNGTVVQRHPTHAVTFVDNHDSQPEEALESFVEEWFKPLAYALTATRDQGYPSVFYGDYYGIPTHGVPAMKSKIDPILEARQKYAYGTQRDYLDHPDVIGWTREGDGVHADSGLATLMSDGPGGSKWMEVGKNNAGEVWYDITGNQTNTVTINKDGWGQFHVSGGSVSIYVQQ

SEQ ID NO: 25202 - protein, 483 aa, Bacillus licheniformis
HHNGTNGTMMQYFEWYLPNDGNHWNRLRSDASNLKDKGITAVWIPPAWKGASQNDVGYGAYDLYDLGEFNQKGTVRTKYGTRNQLQAAVTALKSNGIQVYGDVVMNHKGGADATEWVRAVEVNPSNRNQEVSGDYTIEAWTKFDFPGRGNTHSNFKWRWYHFDGVDWDQSRQLQNRIYKFRGKGWDWEVDTENGNYDYLMYADIDMDHPEVVNELRNWGVWYTNTLGLDGFRIDAVKHIKYSFTRDWLTHVRNTTGKNMFAVAEFWKNDIGAIENYLSKTNWNHSVFDVPLHYNLYNASRSGGNFDMRQIFNGTVVQRHPTHAVTFVDNHDSQPEEALESFVEEWFKPLAYALTLTRDQGYPSVFYGDYYGIPTHGVPAMKSKIDPILEARQKYAYGTQRDYLDHPDVIGWTREGDGVHADSGLATLMSDGPGGSKWMEVGKNNAGEVWYDITGNQTNTVTINKDGWGQFHVSGGSVSIYVQQ

SEQ ID NO: 25203 - protein, 483 aa, Bacillus licheniformis
HHNGTNGTMMQYFEWYLPNDGNHWNRLRSDASNLKDKGITAVWIPPAWKGASQNDVGYGAYDLYDLGEFNQKGTVRTKYGTRNQLQAAVTALKSNGIQVYGDVVMNHKGGADATEWVRAVEVNPSNRNQEVSGDYTIEAWTKFDFPGRGNTHSNFKWRWYHFDGVDWDQSRQLQNRIYKFRGKGWDWEVDTENGNYDYLMYADIDMDHPEVVNELRNWGVWYTNTLGLDGFRIDAVKHIKYSFTRDWLTHVRNTTGKNMFAVAEFWKNDIGAIENYLSKTNWNHSVFDVPLHYNLYNASRSGGNYDMRQIFNGTVVKRHPTHAVTFVDNHDSQPEEALESFVEEWFKPLAYALTLTRDQGYPSVFYGDYYGIPTHGVPAMKSKIDPILEARQKYAYGTQRDYLDHPDVIGWTREGDGVHADSGLATLMSDGPGGSKWMEVGKNNAGEVWYDITGNQTNTVTINKDGWGQFHVSGGSVSIYVQQ

SEQ ID NO: 25204 - protein, 483 aa, Bacillus licheniformis
HHNGTNGTMMQYFEWYLPNDGNHWNRLRSDASNLKDKGITAVWIPPAWKGASQNDVGYGAYDLYDLGEFNQKGTVRTKYGTRNQLQAAVTALKSNGIQVYGDVVMNHKGGADATEWVRAVEVNPSNRNQEVSGDYTIEAWTKFDFPGRGNTHSNFKWRWYHFDGVDWDQSRQLQNRIYKFRGKGWDWEVDTENGNYDYLMYADIDMDHPEVVNELRNWGVWYTNTLGLDGFRIDAVKHIKYSFTRDWLTHVRNTTGKNMFAVAEFWKNSIGAIENYLSKTNWNHSVFDVPLHYNLYNASRSGGNYDMRQIFNGTVVQRHPTHAVTFVDNHDSQPEEALESFVEEWFKPLAYALTLTRDQGYPSVFYGDYYGIPTHGVPAMKSKIDPILEARQKYAYGTQRDYLDHPDVIGWTREGDGVHADSGLATLMSDGPGGSKWMEVGKNNAGEVWYDITGNQTNTVTINKDGWGQFHVSGGSVSIYVQQ

SEQ ID NO: 25205 - protein, 483 aa, Bacillus licheniformis
HHNGTNGTMMQYFEWYLPNDGNHWNRLRSDASNLKDKGITAVWIPPAWKGASQNDVGYGAYDLYDLGEFNQKGTVRTKYGTRNQLQAAVTALKSNGIQVYGDVVMNHKGGADATEWVRAEEVNPSNRNQEVSGDYTIEAWTKFDFPGRGNTHSNFKWRWYHFDGVDWDQSRQLQNRIYKFRGKGWDWEVDTENGNYDYLMYADIDMDHPEVVNELRNWGVWYTNTLGLDGFRIDAVKHIKYSFTRDWLTHVRNTTGKNMFAVAEFWKNDIGAIENYLSKTNWNHSVFDVPLHYNLYNASRSGGNYDMRQIFNGTVVQRHPTHAVTFVDNHDSQPEEALESFVEEWFKPLAYALTLTRDQGYPSVFYGDYYGIPTHGVPAMKSKIDPILEARQKYAYGTQRDYLDHPDVIGWTREGDGVHADSGLATLMSDGPGGSKWMEVGKNNAGEVWYDITGNQTNTVTINKDGWGQFHVSGGSVSIYVQQ

SEQ ID NO: 25206 - protein, 483 aa, Bacillus licheniformis
HHNGTNGTMMQYFEWYLPNDGNHWNRLRSDASNLKDKGITAVWIPPAWKGASQNDVGYGAYDLYDLGEFNQKGTVRTKYGTRNQLQAAVTALKSNGIQVYGDVVMNHKGGADATEWVRAVEVNPSNRNQEVSGDYTIEAWTKFDFPGRGNTHSNFKWRWYHFDGVDWDQSRQLQNRIYKFRGKGWDWEVDTENGNYDYLMYADIDMDHPEVVNELRNWGVWYTNTLGLDGFRIDAVKHIKYSFTRDWLTHVRNTTGKNMFAVAEFWKNDIGAIENYLSKTNWNHSVFDVPLHYNLYNASRSGGNYDMRQIFNGTVVQRHPTHAVTFVDNHDSQPEGALESFVEEWFKPLAYALTLTRDQGYPSVFYGDYYGIPTHGVPAMKSKIDPILEARQKYAYGTQRDYLDHPDVIGWTREGDGVHADSGLATLMSDGPGGSKWMEVGKNNAGEVWYDITGNQTNTVTINKDGWGQFHVSGGSVSIYVQQ

SEQ ID NO: 25207 - protein, 483 aa, Bacillus licheniformis
HHNGTNGTMMQYFEWYLPNDGNHWNRLRSDASNLKDKGITAVWIPPAWKGASQNDVGYGAYDLYDLGEFNQKGTVRTKYGTRNQLQAAVTALKSNGIQVYGDVVMNHKGGADATEWVRAVEVNPSNRNQEVSGDYTIEAWTKFDFPGRGNTHSNFKWRWYHFDGVDWDQSRQLQNRIYKFRGKGWDWEVDTENGNYDYLMYADIDMDHPEVVNELRNWGVWYTNTLGLDGFRIDAVKHIKYSFTRDWLTHVRNTTGKNMFAVAEFWKNDIGAIENYLSKTNWNHSVFDVPLHYNLYNASRSGGNYDMRQIFNGTVVQRNPTHAVTFVDNHDSQPEEALESFVEEWFKPLAYALTLTRDQGYPSVFYGDYYGIPTHGVPAMKSKIDPILEARQKYAYGTQRDYLDHPDVIGWTREGDGVHADSGLATLMSDGPGGSKWMEVGKNNAGEVWYDITGNQTNTVTINKDGWGQFHVSGGSVSIYVQQ

SEQ ID NO: 25208 - protein, 483 aa, Bacillus licheniformis
HHNGTNGTMMQYFEWYLPNDGNHWNRLRSDASNLKDKGITAVWIPPAWKGASQNDVGYGAYDLYDLGEFNQKGTVRTKYGTRNQLQAAVTALKSNGIQVYGDVVMNHKGGADATEWVRAVEVNPSNRNQEVSGDYTIEAWTKFDFFGRGNTHSNFKWRWYHFDGVDWDQSRQLQNRIYKFRGKGWDWEVDTENGNYDYLMYADIDMDHPEVVNELRNWGVWYTNTLGLDGFRIDAVKHIKYSFTRDWLTHVRNTTGKNMFAVAEFWKNDIGAIENYLSKTNWNHSVFDVPLHYNLYNASRSGGNYDMRQIFNGTVVQRHPTHAVTFVDNHDSQPEEALESFVEEWFKPLAYALTLTRDQGYPSVFYGDYYGIPTHGVPAMKSKIDPILEARQKYAYGTQRDYLDHPDVIGWTREGDGVHADSGLATLMSDGPGGSKWMEVGKNNAGEVWYDITGNQTNTVTINKDGWGQFHVSGGSVSIYVQQ

SEQ ID NO: 25209 - protein, 483 aa, Bacillus licheniformis
HHNGTNGTMMQYFEWYLPNDGNHWNRLRSDASNLKDKGITAVWIPPAWKGASQNDVGYGAYDLYDLGEFNQKGTVRTKYGTRNQLQAAVTALKSNGIQVYGDVVMNHKGGADATEWVRAVEVNPSNRNQEVSGDYTIEAWTKFDFPGRGNTHSNFKWRWYHFDGVDWDQSRQLQNRIYKFRGKGWDWEVDTENGNYDYLMYADIDMDHPEVVNELRNWGVWYTDTLGLDGFRIDAVKHIKYSFTRDWLTHVRNTTGKNMFAVAEFWKNDIGAIENYLSKTNWNHSVFDVPLHYNLYNASRSGGNYDMRQIFNGTVVQRHPTHAVTFVDNHDSQPEEALESFVEEWFKPLAYALTLTRDQGYPSVFYGDYYGIPTHGVPAMKSKIDPILEARQKYAYGTQRDYLDHPDVIGWTREGDGVHADSGLATLMSDGPGGSKWMEVGKNNAGEVWYDITGNQTNTVTINKDGWGQFHVSGGSVSIYVQQ

SEQ ID NO: 25210 - protein, 483 aa, Bacillus licheniformis
HHNGTNGTMMQYFEWYLPNDGNHWNRLRSDASNLKDKGITAVWIPPAWKGVSQNDVGYGAYDLYDLGEFNQKGTVRTKYGTRNQLQAAVTALKSNGIQVYGDVVMNHKGGADATEWVRAVEVNPSNRNQEVSGDYTIEAWTKFDFPGRGNTHSNFKWRWYHFDGVDWDQSRQLQNRIYKFRGKGWDWEVDTENGNYDYLMYADIDMDHPEVVNELKNWGVWYTNTLGLDGFRIDAVKHIKYSFTRDWLTHVRNTTGKNMFAVAEFWKNDIGAIENYLSKTNWNHSVFDVPLHYNLYNASRSGGNYDMRQIFNGTVVQRHPTHAVTFVDNHDSQPEEALESFVEEWFKPLAYALTLTRDQGYPSVFYGDYYGIPTHGVPAMKSKIDPILEARQKYAYGTQRDYLDHPDVIGWTREGDGVHADSGLATLMSDGPGGSKWMEVGKNNAGEVWYDITGNQTNTVTINKDGWGQFHVSGGSVSIYVQQ

SEQ ID NO: 25211 - protein, 483 aa, Bacillus licheniformis
HHNGTNGTMMQYFEWYLPNDGNHWNRLRSDASNLKDKGITAVWIPPAWKGASQNDVGYGAYDLYDLGEFNQKGTVRTKYGTRNQLQAAVTALKSNGIQVYGDVVMNHKGGADATEWVRAVEVNPSNRNQEVSGDYTIEAWTKFDFPGRGNTHSNFKWRWYHFDGVDWDQSRQLQNRIYKFRGKGWDWEVDTENGNYDYLMYADIDMDHPEVVNELRNWGVWYTNTLGLDGFRIDAVKHIKYSFTRDWLTHVRNTTGKNMFAVAEFWKNDIGAIENYLSKTNWNHSVFDVPLHYNLYNASRSGGNYDMRQIFNGTVVQRHPTHAVTFVDNHDSQPEEALESFVEEWFKPLAYALTLTRDQGYPSVFYGDYYGIPTHGVPAMKSKIDPILEARQKYAYGTQRDYLDHPDVIGWTREGDGVHADSGLATLMSDGPGGSKWMEVGKNNAGEVWYDITGWQTNTVTINKDGWGQFHVSGGSVSIYVQQ

SEQ ID NO: 25212 - protein, 483 aa, Bacillus licheniformis
HHNGTNGTMMQYFEWYLPNDGNHWNRLRSDASNLKDKGITAVWIPPAWKGASQNDVGYGAYDLYDLGEFNQKGTVRTKYGTRNQLQAAVTALKSNGIQVYGDVVMNHKGGADATEWVRAVEVNPSNRNQEVSGDYTIEAWTKFDFPGRGNTHSNFKWRWYHFDGVDWDQSRQLQNRIYKFRGKGWDWEVDTENGNYDYLMYADIDMDHPEVVNELRNWGVWYTNTLGLDGFRIDAVKHIKYSFTRDWLTHVRNTTGKNMFAVAEFWKNDIGAIENYLSKTNWNHSVFDVPLHYNLYNASRSGGNYDMRQIFNGTVVQRHPTKAVTFVDNHDSQPEEALESFVEEWFKPLAYALTLTRDQGYPSVFYGDYYGIPTHGVPAMKSKIDPILEARQKYAYGTQRDYLDHPDVIGWTREGDGVHADSGLATLMSDGPGGSKWMEVGKNNAGEVWYDITGNQTNTVTINKDGWGQFHVSGGSVSIYVQQ

SEQ ID NO: 25213 - protein, 483 aa, Bacillus licheniformis
HHNGTNGTMMQYFEWYLPNDGNHWNRLRSDASNLKDKGITAVWIPPAWKGASQNDVGYGAYDLYDLGEFNQKGTVRTKYGTRNQLQAAVTALKSNGIQVYGDVVMNHKGGADATEWVRAVEVNPSNRNQEVSGDYTIEAWTKFDFPGRGNTHSNFKWRWYHFDGVDWDQSRQLQNRIYKFREKGWDWEVDTENGNYDYLMYADIDMDHPEVVNELRNWGVWYTNTLGLDGFRIDAVKHIKYSFTRDWLTHVRNTTGKNMFAVAEFWKNDIGAIENYLSKTNWNHSVFDVPLHYNLYNASRSGGNYDMRQIFNGTVVQRHPTHAVTFVDNHDSQPEEALESFVEEWFKPLAYALTLTRDQGYPSVFYGDYYGIPTHGVPAMKSKIDPILEARQKYAYGTQRDYLDHPDVIGWTREGDGVHADSGLATLMSDGPGGSKWMEVGKNNAGEVWYDITGNQTNTVTINKDGWGQFHVSGGSVSIYVQQ

SEQ ID NO: 25214 - protein, 483 aa, Bacillus licheniformis
HHNGTNGTMMQYFEWYLPNDGNHWNRLRSDASNLKDKGITCVWIPPAWKGASQNDVGYGAYDLYDLGEFNQKGTVRTKYGTRNQLQAAVTALKSNGIQVYGDVVMNHKGGADATEWVRAVEVNPSNRNQEVSGDYTIEAWTKFDFPGRGNTHSNFKWRWYHFDGVDWDQSRQLQNRIYKFRGKGWDWEVDTENGNYDYLMYADIDMDHPEVVNELRNWGVWYTNTLGLDGFRIDAVKHIKYSFTRDWLTHVRNTTGKNMFAVAEFWKNDIGAIENYLSKTNWNHSVFDVPLHYNLYNASRSGGNYDMRQIFNGTVVQRHPTHAVTFVDNHDSQPEEALESFVEEWFKPLAYALTLTRDQGYPSVFYGDYYGIPTHGVPAMKSKIDPILEARQKYAYGTQRDYLDHPDVIGWTREGDGVHADSGLATLMSDGPGGSKWMEVGKNNAGEVWYDITGNQTNTVTINKDGWGQFHVSGGSVSIYVQQ

SEQ ID NO: 25215 - protein, 483 aa, Bacillus licheniformis
HHNGTNGTMMQYFEWYLPNDGNHWNRLRSDASNLKDKGITAVWIPPAWKGASQNDVGYGAYDLYDLGEFNQKGTVRTKYGTRNQLQAAVTALKSNGIQVYGDVVMNHKGGADATEWVRAVEVNPSNRNQEVSGDYTIEAWTKFDFPGRGNTHSNFKWRWYHFDGVDWDQSRQLQNRIYKFRGKGWDWEVDTENGNYDYLMYADIDMDHPEVVNELRNWGVWYNNTLGLDGFRIDAVKHIKYSFTRDWLTHVRNTTGKNMFAVAEFWKNDIGAIENYLSKTNWNHSVFDVPLHYNLYNASRSGGNYDMRQIFNGTVVQRHPTHAVTFVDNHDSQPEEALESFVEEWFKPLAYALTLTRDQGYPSVFYGDYYGIPTHGVPAMKSKIDPILEARQKYAYGTQRDYLDHPDVIGWTREGDGVHADSGLATLMSDGPGGSKWMEVGKNNAGEVWYDITGNQTNTVTINKDGWGQFHVSGGSVSIYVQQ

SEQ ID NO: 25216 - protein, 483 aa, Bacillus licheniformis
HHNGTNGTMMQYFEWYLPNDGNHWNRLRSDASNLKDKGITAVWIPPAWKGASQNDVGYGAYDLYDLGEFNQKGTVRTKYGTRNQLQAAVTALKSNGIQVYGDVVMNHKGGADATEWVRAVEVNPSNRNQEVSGDYTIEAWTKFDFPGRGNTHSNFKWRWYHFDGVDWDQSRQLQNRIYKFRGKGWDWEVDTENGNYDYLMYADIDMDHPEVVNELRNWGVWYTNTLGLDGFRIDAVKHIKYSFTRDWLTHVRNTTGKNMFAVAEFWKNDIGAIENYLSKTNWNHSVFDVPLHYNLYNASRSGGNYDMRQIFNGTVVQRHPTHAVLFVDNHDSQPEEALESFVEEWFKPLAYALTLTRDQGYPSVFYGDYYGIPTHGVPAMKSKIDPILEARQKYAYGTQRDYLDHPDVIGWTREGDGVHADSGLATLMSDGPGGSKWMEVGKNNAGEVWYDITGNQTNTVTINKDGWGQFHVSGGSVSIYVQQ

SEQ ID NO: 25217 - protein, 483 aa, Bacillus licheniformis
HHNGTNGTMMQYFEWYLPNDGNHWNRLRSDASNLKDKGITAVWIPPAWKGASQNDVGYGAYDLYDLGEFNQKGTVRTKYGTRNQLQAAVTALKSNGIQVYGDVVMNHKGGADATEWVRAVEVNPSNRNQEVSGDYTIEAWTKFDFPGRGNTHSNFKWRWYHFDGVDWDQSRQLQNRIYKFRGKGWDWEVDTENGNYDYLMYADIDMDHPEVVNELRNWGVWYTNTLGLDGFRIDAVKHIKYSFTRDWLTHVRNTTGKNMFAVAEFWKNDIGAIENYLSKTNWNHSVFDVPLHYNLYNASRSGGNYDMRQIFNGTVVQRHPTHAVTFVDNHDSQPEEALESFVEEWFKPLAYALTLTRDQGYPSVFYGDYYGIPTHGVPAMKSKIDPILEARQKYAYGTQRDYLDHPDVIGWTREGDGVHADSGLATLMSDGPGGSKWMEVGKNNAGEVWYDITGKQTNTVTINKDGWGQFHVSGGSVSIYVQQ

SEQ ID NO: 25218 - protein, 483 aa, Bacillus licheniformis
HHNGTNGTMMQYFEWYLPNDGNHWNRLRSDASNLKDKGITAVWIPPAWKGASQNDVGYGAYDLYDLGEFNQKGTVRTKYGTRNQLQAAVTALKSNGIQVYGDVVMNHKGGADATEWVRAVEVNPSNRNQEVSGDYTIEAWTKFDFPGRGNTHSNFKWRWYHFDGVDWDQSRQLQNRIYKFRGKGWDWEVDTENGNYDYLMYADIDMDHPEVVNELRNWGVWYTNTLGLDGFRIDAVKHIKYSFTRDWLEHVRNTTGKNMFAVAEFWKNDIGAIENYLSKTNWNHSVFDVPLHYNLYNASRSGGNYDMRQIFNGTVVQRHPTHAVTFVDNHDSQPEEALESFVEEWFKPLAYALTLTRDQGYPSVFYGDYYGIPTHGVPAMKSKIDPILEARQKYAYGTQRDYLDHPDVIGWTREGDGVHADSGLATLMSDGPGGSKWMEVGKNNAGEVWYDITGNQTNTVTINKDGWGQFHVSGGSVSIYVQQ

SEQ ID NO: 25219 - protein, 483 aa, Bacillus licheniformis
HHNGTNGTMMQYFEWYLPNDGNHWNRLRSDASNLKDKGITAVWIPPAWKGASQNDVGYGAYDLYDLGEFNQKGTVRTKYGTRNQLQAAVTALKSNGIQVYGDVVMNHKGGADATEWVRAVEVNPSNRNQEVSGDYTIEAWTKFDFPGRGNTHSNFKWRWYHFDGVDWDQSRQLQNRNYKFRGKGWDWEVDTENGNYDYLMYADIDMDHPEVVNELRNWGVWYTNTLGLDGFRIDAVKHIKYSFTRDWLTHVRNTTGKNMFAVAEFWKNDIGAIENYLSKTNWNHSVFDVPLHYNLYNASRSGGNYDMRQIFNGTVVQRHPTHAVTFVDNHDSQPEEALESFVEEWFKPLAYALTLTRDQGYPSVFYGDYYGIPTHGVPAMKSKIDPILEARQKYAYGTQRDYLDHPDVIGWTREGDGVHADSGLATLMSDGPGGSKWMEVGKNNAGEVWYDITGNQTNTVTINKDGWGQFHVSGGSVSIYVQQ

SEQ ID NO: 25220 - protein, 483 aa, Bacillus licheniformis
HHNGTNGTMMQYFEWYLPYDGNHWNRLRSDASNLKDKGITAVWIPPAWKGASQNDVGYGAYDLYDLGEFNQKGTVRTKYGTRNQLQAAVTALKSNGIQVYGDVVMNHKGGADATEWVRAVEVNPSNRNQEVSGDYTIEAWTKFDFPGRGNTHSNFKWRWYHFDGVDWDQSRQLQNRIYKFRGKGWDWEVDTENGNYDYLMYADIDMDHPEVVNELRNWGVWYTNTLGLDGFRIDAVKHIKYSFTRDWLTHVRNTTGKNMFAVAEFWKNDIGAIENYLSKTNWNHSVFDVPLHYNLYNASRSGGNYDMRQIFNGTVVQRHPTHAVTFVDNHDSQPEEALESFVEEWFKPLAYALTLTRDQGYPSVFYGDYYGIPTHGVPAMKSKIDPILEARQKYAYGTQRDYLDHPDVIGWTREGDGVHADSGLATLMSDGPGGSKWMEVGKNNAGEVWYDITGNQTNTVTINKDGWGQFHVSGGSVSIYVQQ

SEQ ID NO: 25221 - protein, 483 aa, Bacillus licheniformis
HHNGTNGTMMQYFEWYLPNDGNHWNRLRSDASNLKDKGITAVWIPPAWKGASQNDVGYGAYDLYDLGEFNQKGTVRTKYGTRNQLQAAVTALKSNGIQVYGDVVMNHKGGADATEWVRAVEVNPSNRNQEVSGDYTIEAWTKFDFPGRGNTHSNFKWRWYHFDGVDWDQSRQLQNKIYKFRGKEWDWEVDTENGNYDYLMYADYDMDHPEVVNELRNWGVWYTNTLGLDGFRIDAVKHIKYSFTRDWLTHVRNTTGKNMFAVAEFWKNDIGAIENYLSKTNWNHSVFDVPLHYNLYNASRSGGNYDMRQIFNGTVVQRHPTHAVTFVDNHDSQPEEALESFVEEWFKPLAYALTLTRDQGYPSVFYGDYYGIPTHGVPAMKSKIDPILEARQKYAYGTQRDYLDHPDVIGWTREGDGVHADSGLATLMSDGPGGSKWMEVGKNNAGEVWYDITGNQTNTVTINKDGWGQFHVSGGSVSIYVQQ

SEQ ID NO: 25222 - protein, 483 aa, Bacillus licheniformis
HHNGTNGTMMQYFEWYLPNDGNHWNRLRSDASNLKDKGITAVWIPPAWKGASQNDVGYGAYDLYDLGEFNQKGTVRTKYGTRNQLQAAVTALKSNGIQHYGDVVMNHKGGADATEWVRAVEVNPSNRNQEVSGDYTIEAWTKFDFPGRGNTHSNFKWRWYHFDGVDWDQSRQLQNRIYKFRGKGWDWEVDTENGNYDYLMYADIDMDHPEVVNELRNWGVWYTNTLGLDGFRIDAVKHIKYSFTRDWLTHVRNTTGKNMFAVAEFWKNDIGAIENYLSKTNWNHSVFDVPLHYNLYNASRSGGNYDMRQIFNGTVVQRHPTHAVTFVDNHDSQPEEALESFVEEWFKPLAYALTLTRDQGYPSVFYGDYYGIPTHGVPAMKSKIDPILEARQKYAYGTQRDYLDHPDVIGWTREGDGVHADSGLATLMSDGPGGSKWMEVGKNNAGEVWYDITGNQTNTVTINKDGWGQFHVSGGSVSIYVQQ

SEQ ID NO: 25223 - protein, 483 aa, Bacillus licheniformis
HHNGTNGTMMQYFEWYLRNDGNHWNRLRSDASNLKDKGITAVWIPPAWKGASQNDVGYGAYDLYDLGEFNQKGTVRTKYGTRNQLQAAVTALKSNGIQVYGDVVMNHKGGADATEWVRAVEVNPSNRNQEVSGDYTIEAWTKFDFPGRGNTHSNFKWRWYHFDGVDWDQSRQLQNRIYKFRGKGWDWEVDTENGNYDYLMYADIDMDHPEVVNELRNWGVWYTNTLGLDGFRIDAVKHIKYSFTRDWLTHVRNTTGKNMFAVAEFWKNDIGAIENYLSKTNWNHSVFDVPLHYNLYNASRSGGNYDMRQIFNGTVVQRHPTHAVTFVDNHDSQPEEALESFVEEWFKPLAYALTLTRDQGYPSVFYGDYYGIPTHGVPAMKSKIDPILEARQKYAYGTQRDYLDHPDVIGWTREGDGVHADSGLATLMSDGPGGSKWMEVGKNNAGEVWYDITGNQTNTVTINKDGWGQFHVSGGSVSIYVQQ

SEQ ID NO: 25224 - protein, 483 aa, Bacillus licheniformis
HHNGTNGTMMQYFEWYLPNDGNHWNRLRSDASNLKDKGITAVWIPPAWKGASQNDVGYGAYDLYDLGEFNQKGTVRTKYGTRNQLQAAVTALKSNGIQVYGDVVMNHKGGADATEWVRAVEVNPSNRNQEVSGDYTIEAWTKFDFPGRGNTHSNFKWRWYHFDGVDWDQSRQLQNRIYKFRGKGWDWEVDTENGNYDYLMYADIDMDHPEVVNELRNWGVWYTNTLGLDGFRIDAVKHIKYSFTRDWLTHVRNTTGKNMFAVAEFWKNDIGAIENYLSKTNWNHSVFDVPLHYNLYNASRSGGNYDMRQIFNGTVVQRHPTHAVTFVDNHDSQPEEALESFVEEWFKPLAYALTLTRDQGYPSVFYGDYYGIPTHGVPAMKSKIDPILEARQKYAYGTQRDYLDHPDVIGWTREGDGVHADSGLATLMSDGPGGSKWMEVGKNNAGEVWYDITGNQTNFVTINKDGWGQFHVSGGSVSIYVQQ

SEQ ID NO: 25225 - protein, 483 aa, Bacillus licheniformis
HHNGTNGTMMQYFEWYLPNDGNHWNRLRSDASNLKDKGITAVWIPPAWKGASQNDVGYGAYDLYDLGEFNQKGTVRTKYGTRNQLQAAVTALKSNGIQVYGDVVMNHKGGADATEWVRAVEVNPSNRNQEVSGDYTIEAWTKFDFPGRGNTHSNFKWRWYHFDGVDWDQSRQLQNRIYKFRGKGWDWEVDTENGNYDYLMYADIDMDHPEVVNELRNWGVWYTNTLGLDGFRIDAVKHIKYSFTRDWLTHVRNTTGKNMFAVAEFWKYDIGAIENYLSKTNWNHSVFDVPLHYNLYNASRSGGNYDMRQIFNGTVVQRHPTHAVTFVDNHDSQPEEALESFVEEWFKPLAYALTLTRDQGYPSVFYGDYYGIPTHGVPAMKSKIDPILEARQKYAYGTQRDYLDHPDVIGWTREGDGVHADSGLATLMSDGPGGSKWMEVGKNNAGEVWYDITGNQTNTVTINKDGWGQFHVSGGSVSIYVQQ

SEQ ID NO: 25226 - protein, 483 aa, Bacillus licheniformis
HHNGTNGTMMQYFEWYLPNDGNHWNRLRSDASNLKDKGITAVWIPPAWKGASQNDVGYGAYDLYDLGEFNQKGTVRTKYGTRNQLQAAVTALKSNGIQVYGDVVMNHKGGADATEWVRAVEVNPSNRNQEVSGDNTIEAWTKFDFPGRGNTHSNFKWRWYHFDGVDWDQSRQLQNRIYKFRGKGWDWEVDTENGNYDYLMYADIDMDHPEVVNELRNWGVWYTNTLGLDGFRIDAVKHIKYSFTRDWLTHVRNTTGKNMFAVAEFWKNDIGAIENYLSKTNWNHSVFDVPLHYNLYNASRSGGNYDMRQIFNGTVVQRHPTHAVTFVDNHDSQPEEALESFVEEWFKPLAYALTLTRDQGYPSVFYGDYYGIPTHGVPAMKSKIDPILEARQKYAYGTQRDYLDHPDVIGWTREGDGVHADSGLATLMSDGPGGSKWMEVGKNNAGEVWYDITGNQTNTVTINKDGWGQFHVSGGSVSIYVQQ

SEQ ID NO: 25227 - protein, 483 aa, Bacillus licheniformis
HHNGTNGTMMQYFEWYLPNDGNHWNRLRSDASNLKDKGITAVWIPPAWKGASQNDVGYGAYDLYDLGEFNQKGTVRTKYGTRNQLQAAVTALKSNGIQVYGDVVMNHKGGADATEWVRAVEVNPSNRNQEVSGDYTIEAWTKFDFPGRGNTHSNFKWRWYHFDGVDWDQSRQLQHRIYKFRGKGWDWEVDTENGNYDYLMYADIDMDHPEVVNELRNWGVWYTNTLGLDGFRIDAVKHIKYSFTRDWLTHVRNTTGKNMFAVAEFWKNDIGAIENYLSKTNWNHSVFDVPLHYNLYNASRSGGNYDMRQIFNGTVVQRHPTHAVTFVDNHDSQPEEALESFVEEWFKPLAYALTLTRDQGYPSVFYGDYYGIPTHGVPAMKSKIDPILEARQKYAYGTQRDYLDHPDVIGWTREGDGVHADSGLATLMSDGPGGSKWMEVGKNNAGEVWYDITGNQTNTVTINKDGWGQFHVSGGSVSIYVQQ

SEQ ID NO: 25228 - protein, 483 aa, Bacillus licheniformis
HHNGTNGTMMQYFEWYLPNDGNHWNRLRSDASNLKDKGITAVWIPPAWKGASQNDVGYGAYDLYDLGEFNQKGTVRTKYGTRNQLQAAVTALKSNGIQVYGDVVMNHKGGADATEWVRAVEVNPSNRNQEVSGDYTIEAWTKFDFPGRGNTHSNFKWRWYHFDGVDWDQSRQLQNRIYKFRGKGWDWEVDTENGNYDYLMYADIDMDHPEVVNELRNWGVWYTNILGLDGFRIDAVKHIKYSFTRDWLTHVRNTTGKNMFAVAEFWKNDIGAIENYLSKTNWNHSVFDVPLHYNLYNASRSGGNYDMRQIFNGTVVQRHPTHAVTFVDNHDSQPEEALESFVEEWFKPLAYALTLTRDQGYPSVFYGDYYGIPTHGVPAMKSKIDPILEARQKYAYGTQRDYLDHPDVIGWTREGDGVHADSGLATLMSDGPGGSKWMEVGKNNAGEVWYDITGNQTNTVTINKDGWGQFHVSGGSVSIYVQQ

SEQ ID NO: 25229 - protein, 483 aa, Bacillus licheniformis
HHNGTNGTMMQYFEWYLPNDGNHWNRLRSDASDLKDKGITAVWIPPAWKGASQNDVGYGAYDLYDLGEFNQKGTVRTKYGTRNQLQAAVTALKSNGIQVYGDVVMNHKGGADATEWVRAVEVNPSNRNQEVSGDYTIEAWTKFDFPGRGNTHSNFKWRWYHFDGVDWDQSRQLQNRIYKFRGKGWDWEVDTENGNYDYLMYADIDMDHPEVVNELRNWGVWYTNTLGLDGFRIDAVKHIKYSFTRDWLTHVRNTTGKNMFAVAEFWKNDIGAIENYLSKTNWNHSVFDVPLHYNLYNASRSGGNYDMRQIFNGTVVQRHPTHAVTFVDNHDSQPEEALESFVEEWFKPLAYALTLTRDQGYPSVFYGDYYGIPTHGVPAMKSKIDPILEARQKYAYGTQRDYLDHPDVIGWTREGDGVHADSGLATLMSDGPGGSKWMEVGKNNAGEVWYDITGNQTNTVTINKDGWGQFHVSGGSVSIYVQQ

SEQ ID NO: 25230 - protein, 483 aa, Bacillus licheniformis
HHNGTNGTMMQYFEWYLPNDGNHWNRLRSDAPNLKDKGITAVWIPPAWKGASQNDVGYGAYDLYDLGEFNQKGTVRTKYGTRNQLQAAVTALKSNGIQVYGDVVMNHKGGADATEWVRAVEVNPSNRNQEVSGDYTIEAWTKFDFPGRGNTHSNFKWRWYHFDGVDWDQSRQLQNRIYKFRGKGWDWEVDTENGNYDYLMYADIDMDHPEVVNELRNWGVWYTNTLGLDGFRIDAVKHIKYSFTRDWLTHVRNTTGKNMFAVAEFWKNDIGAIENYLSKTNWNHSVFDVPLHYNLYNASRSGGNYDMRQIFNGTVVQRHPTHAVTFVDNHDSQPEEALESFVEEWFKPLAYALTLTRDQGYPSVFYGDYYGIPTHGVPAMKSKIDPILEARQKYAYGTQRDYLDHPDVIGWTREGDGVHADSGLATLMSDGPGGSKWMEVGKNNAGEVWYDITGNQTNTVTINKDGWGQFHVSGGSVSIYVQQ

SEQ ID NO: 25231 - protein, 483 aa, Bacillus licheniformis
HHNGTNGTMMQYFEWYLPNDGNHWNRLRSDASNLKDKGITAVWIPPAWKGASQNDVGYGAYDLYDLGEFNQKGTVRTKYGTRNQLQAAVTALKSNGIQVYGDVVMNHKGGADATEWVRAVEVNPSNRNQEVSGDYTIEAWTKFDFPGRGNTHSNFKWRWYHFDGVDWDQSRQLQNRIYKFRGKGWDWEVDTENGNYDYLMYADIDMDHPEVVNELRNWGVWYTNTLGLDGFRIDAVKHIKYSFTRDWLTHVRNTTGKNMFAVAEFWKNDIGAIENYLSKTNWNHSVFDVPLHYNLYNASRSGGNYDMRQIFNGTVVQRHPTHAVTFVDNHDSQPEEALESFVEEWFKPLAYALTLTRDQGYPSVFYGDYYGIPTHGVPAMKSKIDPILEARQKYAYGTQRDYLDHPDVIGWTREGDGVHADSGLATLMSDGPGGSKWMEVGKDNAGEVWYDITGNQTNTVTINKDGWGQFHVSGGSVSIYVQQ

SEQ ID NO: 25232 - protein, 483 aa, Bacillus licheniformis
HHNGTNGTMMQYFEWYLPNDGNHWNRLRSDASNLKDKGITAVWIPPAWKGASQNDVGYGAYDLYDLGEFNQKGTVRTKYGTRNQLQAAVTALKSNGIQVYGDVVMNHKGGADATEWVRAVEVNPSNRNQEVSGDYTIEAWTKFDFPGRGNTHSNFKWRWDHFDGVDWDQSRQLQNRIYKFRGKEWDWEVDTENGNYDYLMYADIDMDHPEVVNELRNWGVWYTNTLGLDGFRIDAVKHIKYSFTRDWLTHVRNTTGKNMFAVAEFWKNDIGAIENYLSKTNWNHSVFDVPLHYNLYNASRSGGNYDMRQIFNGTVVQRHPTHAVTFVDNHDSQPEEALESFVEEWFKPLAYALTLTRDQGYPSVFYGDYYGIPTHGVPAMKSKIDPILEARQKYAYGTQRDYLDHPDVIGWTREGDGKHADSGLATLMSDGPGGSKWMEVGKNNAGEVWYDITGNQTDTVTINKDGWGQFHVSGGSVSIYVQQ

SEQ ID NO: 25233 - protein, 483 aa, Bacillus licheniformis
HHNGTNGTMMQYFEWYLPNDGNHWNRLRSDASNLKDKGITAVWIPPAWKGASQNDVGYGAYDLYDLGEFNQKGTVRTKYGTRNQLQAAVTALKSNGIQVYGDVVMNHKGGADATEWVRAVEVNPSNRNQEVSGDYTIEAWTKFDFPGRGNTHSNFKWRWYHFDGVDWDQSRQLQNRIYKFRGKGWDWEVDTENGNYDYLMYADIDMDHPEVVNELRNWGVWYTNTLGLDGFRIDAVKHIKYSFTRDWLTHVRNTTGKNMFAVAEFWKNDIGAIENYLSKTNWNHSVFDVPLHYNLYNASRSGGNYDMRQIFNCTVVQRHPTHAVTFVDNHDSQPEEALESFVEEWFKPLAYALTLTRDQGYPSVFYGDYYGIPTHGVPAMKSKIDPILEARQKYAYGTQRDYLDHPDVIGWTREGDGVHADSGLATLMSDGPGGSKWMEVGKNNAGEVWYDITGNQTNTVTINKDGWGQFHVSGGSVSIYVQQ

SEQ ID NO: 25234 - protein, 483 aa, Bacillus licheniformis
HHNGTNGTMMQYFEWYLPNDGNHWNRLVSDASNLKDKGITAVWIPPAWKGASQNDVGYGAYDLYDLGEFNQKGTVRTKYGTRNQLQAAVTALKSNGIQVYGDVVMNHKGGADATEWVRAVEVNPSNRNQEVSGDYTIEAWTKFDFPGRGNTHSNFKWRWYHFDGVDWDQSRQLQNRIYKFRGKGWDWEVDTENGNYDYLMYADIDMDHPEVVNELRNWGVWYTNTLGLDGFRIDAVKHIKYSFTRDWLTHVRNTTGKNMFAVAEFWKNDIGAIENYLSKTNWNHSVFDVPLHYNLYNASRSGGNYDMRQIFNGTVVQRHPTHAVTFVDNHDSQPEEALESFVEEWFKPLAYALTLTRDQGYPSVFYGDYYGIPTHGVPAMKSKIDPILEARQKYAYGTQRDYLDHPDVIGWTREGDGVHADSGLATLMSDGPGGSKWMEVGKNNAGEVWYDITGNQTNTVTINKDGWGQFHVSGGSVSIYVQQ

SEQ ID NO: 25235 - protein, 483 aa, Bacillus licheniformis
HHNGTNGTMMQYFEWYLPNDGNHWNRLRSDASNLKDKGITAVWIPPAWKGASQNDVGYGAYDLYDLGEFNQKGTVRTKYGTRNQLQAAVTALKSNGIQVYGDVVMNHKGGADATEWVRAVEVNPSNRNQEVSGDYTIEAWTKFDFPGRGNTHSNFKWRWYHFDGVDWDQSRQLQNRIYKFRGKGWDWEVDTENGNYDYLMYADIDMDHPEVVNELRNWGVWYTNTLGLDGFRIDAVKHIKYSFTRDWLTHVRNTTGKNMFAVAEFWKNDIGAIENYLSKTNWNHSVFDVPLHYNLYNASRSGGNYDMRQIFNGTVVQRHPTHAVTFVDNHDSQPEEALESFVEEWFKPLAYALTLTRDQGYPSVFYGDYYGIPTHGVPAMKSKIDPILEARQKYMYGTQRDYLDHPDVIGWTREGDGVHADSGLATLMSDGPGGSKWMEVGKNNAGEVWYDITGNQTNTVTINKDGWGQFHVSGGSVSIYVQQ

SEQ ID NO: 25236 - protein, 483 aa, Bacillus licheniformis
HHNGTNGTMMQYFEWYLPNDGNHWNRLRSDASNLKDKGITAVWIPPAWKGASQNDVGYGAYDLYDLGEFNQKGTVRTKYGTRNQLQAAVTELKSNGIQVYGDVVMNHKGGADATEWVRAVEVNPSNRNQEVSGDYTIEAWTKFDFPGRGNTHSNFKWRWYHFDGVDWDQSRQLQNRIYKFRGKGWDWEVDTENGNYDYLMYADIDMDHPEVVNELRNWGVWYTNTLGLDGFRIDAVKHIKYSFTRDWLTHVRNTTGKNMFAVAEFWKNDIGAIENYLSKTNWNHSVFDVPLHYNLYNASRSGGNYDMRQIFNGTVVQRHPTHAVTFVDNHDSQPEEALESFVEEWFKPLAYALTLTRDQGYPSVFYGDYYGIPTHGVPAMKSKIDPILEARQKYAYGTQRDYLDHPDVIGWTREGDGVHADSGLATLMSDGPGGSKWMEVGKNNAGEVWYDITGNQTNTVTINKDGWGQFHVSGGSVSIYVQQ

SEQ ID NO: 25237 - protein, 483 aa, Bacillus licheniformis
HHNGTNGTMMQYFEWYLPNDGNHWNRLRSDASNLKDKGITAVWIPPAWKGASQNDVGYGAYDLYDLGEFNQKGTVRTKYGTRNQLQAAVTALKSNGIQVYGDVVMNHKGGADATEWVRAVEVNPSNRNQEVSGDYTIEAWTKFDFPGRGNTHSNFKWRWYHFDGVDWDQSRQLQNRIYKFRGKGWDWEVDTENGNYDYLMYADIDMDHPEVVNELRNWGVWYTNTLGLDGFRMDAVKHIKYSFTRDWLTHVRNTTGKNMFAVAEFWKNDIGAIENYLSKTNWNHSVFDVPLHYNLYNASRSGGNYDMRQIFNGTVVQRHPTHAVTFVDNHDSQPEEALESFVEEWFKPLAYALTLTRDQGYPSVFYGDYYGIPTHGVPAMKSKIDPILEARQKYAYGTQRDYLDHPDVIGWTREGDGVHADSGLATLMSDGPGGSKWMEVGKNNAGEVWYDITGNQTNTVTINKDGWGQFHVSGGSVSIYVQQ

SEQ ID NO: 25238 - protein, 483 aa, Bacillus licheniformis
HHNGTNGTMMQYFEWYLPNDGNHWNRLRSDASNLKDKGITAVWIPPAWKGASQNDVGYGAYDLYDLGEFNQKGTVRTKYGTRNQLQAAVTALKSNGIQVYGDVVMNHKGGADWTEWVRAVEVNPSNRNQEVSGDYTIEAWTKFDFPGRGNTHSNFKWRWYHFDGVDWDQSRQLQNRIYKFRGKGWDWEVDTENGNYDYLMYADIDMDHPEVVNELRNWGVWYTNTLGLDGFRIDAVKHIKYSFTRDWLTHVRNTTGKNMFAVAEFWKNDIGAIENYLSKTNWNHSVFDVPLHYNLYNASRSGGNYDMRQIFNGTVVQRHPTHAVTFVDNHDSQPEEALESFVEEWFKPLAYALTLTRDQGYPSVFYGDYYGIPTHGVPAMKSKIDPILEARQKYAYGTQRDYLDHPDVIGWTREGDGVHADSGLATLMSDGPGGSKWMEVGKNNAGEVWYDITGNQTNTVTINKDGWGQFHVSGGSVSIYVQQ

SEQ ID NO: 25239 - protein, 483 aa, Bacillus licheniformis
HHNGTNGTMMQYFEWYLPNDGNHWNRLRSDASNLKDKGITAVWIPPAWKGASQNDVGYGAYDLYDLGEFNQKGTVRTKYGTRNQLQAAVTALKSNGIQVYGDVVMNHKGGADATEWVRAVEVNPSNRNQEVSGPYTIEAWTKFDFPGRGNTHSNFKWRWYHFDGVDWDQSRQLQNRIYKFRGKGWDWEVDTENGNYDYLMYADIDMDHPEVVNELRNWGVWYTNTLGLDGFRIDAVKHIKYSFTRDWLTHVRNTTGKNMFAVAEFWKNDIGAIENYLSKTNWNHSVFDVPLHYNLYNASRSGGNYDMRQIFNGTVVQRHPTHAVTFVDNHDSQPEEALESFVEEWFKPLAYALTLTRDQGYPSVFYGDYYGIPTHGVPAMKSKIDPILEARQKYAYGTQRDYLDHPDVIGWTREGDGVHADSGLATLMSDGPGGSKWMEVGKNNAGEVWYDITGNQTNTVTINKDGWGQFHVSGGSVSIYVQQ

SEQ ID NO: 25240 - protein, 483 aa, Bacillus licheniformis
HHNGTNGTMMQYFEWYLPNDGNHWNRLRSDASNLKDKGITAVWIPPAWKGASQNDVGYGAYDLYDLGEFNQKGTVRTKYGTRNQLQAAVTALKSNGIQVYGDVVMNHKGGADATEWVRAVEVNPSNRNQEVSGDYTIEAWTKFDFPGRGNTHSNFKWRWYHFDGVDWDQSRQLQNRIYKFRGKGWDWEVDTENGNYDYLMYADIDMDHPEVVNELRNWGVWYTNGLGLDGFRIDAVKHIKYSFTRDWLTHVRNTTGKNMFAVAEFWKNDIGAIENYLSKTNWNHSVFDVPLHYNLYNASRSGGNYDMRQIFNGTVVQRHPTHAVTFVDNHDSQPEEALESFVEEWFKPLAYALTLTRDQGYPSVFYGDYYGIPTHGVPAMKSKIDPILEARQKYAYGTQRDYLDHPDVIGWTREGDGVHADSGLATLMSDGPGGSKWMEVGKNNAGEVWYDITGNQTNTVTINKDGWGQFHVSGGSVSIYVQQ

SEQ ID NO: 25241 - protein, 483 aa, Bacillus licheniformis
HHNGTNGTMMQYFEWYLPNDGNHWNRLRSDASNLKDKGITAVWIPPAWKGASQNDVGYGAYDLYDLGEFNQKGTVRTKYGTRNQLQAAVTALKSNGIQVYGDVVMNHKGGADATEWVRAVEVNPSNRNQEVSGDYTIEAWTKFDFPGRGNTHSNFKWRWYHFDGVDWDQSRQLQNRIYKFRGKGWDWEVDTENGNYDYLMYADIDMDHPEVVNELRNWGVWYTNTLGLDGFRIDAVKHIKYSFTRDWLTHVRNTTGKNMFAVAEFWKNDIGAIENYLSKTNWNHSVFDVPLHYNLYNASRSGGNYDMRQIFNGTVVQRHPTHAVMFVDNHDSQPEEALESFVEEWFKPLAYALTLTRDQGYPSVFYGDYYGIPTHGVPAMKSKIDPILEARQKYAYGTQRDYLDHPDVIGWTREGDGVHADSGLATLMSDGPGGSKWMEVGKNNAGEVWYDITGNQTNTVTINKDGWGQFHVSGGSVSIYVQQ

SEQ ID NO: 25242 - protein, 483 aa, Bacillus licheniformis
HHNGTNGTMMQYFEWYLPNDGNHWNRLRSDASNLKDKGITAVWIPPAWKGASQNDVGYGAYDLYDLGEFNQKGTVRTKYGTRNQLQAAVTALKSNGIQVYGDVVMNHKGGADATEWVRAVEVNPSNRNQEVSGDYTIEAWTKFDFPGRGNTHSNFKWRWYHFDGVDWDQSRQLQNRIYKFRGKGWDWEWDTENGNYDYLMYADIDMDHPEVVNELRNWGVWYTNTLGLDGFRIDAVKHIKYSFTRDWLTHVRNTTGKNMFAVAEFWKNDIGAIENYLSKTNWNHSVFDVPLHYNLYNASRSGGNYDMRQIFNGTVVQRHPTHAVTFVDNHDSQPEEALESFVEEWFKPLAYALTLTRDQGYPSVFYGDYYGIPTHGVPAMKSKIDPILEARQKYAYGTQRDYLDHPDVIGWTREGDGVHADSGLATLMSDGPGGSKWMEVGKNNAGEVWYDITGNQTNTVTINKDGWGQFHVSGGSVSIYVQQ

SEQ ID NO: 25243 - protein, 483 aa, Bacillus licheniformis
HHNGTNGTMMQYFNWYLPNDGNHWNRLRSDASNLKDKGITAVWIPPAWKGASQNDVGYGAYDLYDLGEFNQKGTVRTKYGTRNQLQAAVTALKSNGIQVYGDVVMNHKGGADATEWVRAVEVNPSNRNQEVSGDYTIEAWTKFDFPGRGNTHSNFKWRWYHFDGVDWDQSRQLQNRIYKFRGKGWDWEVDTENGNYDYLMYADIDMDHPEVVNELRNWGVWYTNTLGLDGFRIDAVKHIKYSFTRDWLTHVRNTTGKNMFAVAEFWKNDIGAIENYLSKTNWNHSVFDVPLHYNLYNASRSGGNYDMRQIFNGTVVQRHPTHAVTFVDNHDSQPEEALESFVEEWFKPLAYALTLTRDQGYPSVFYGDYYGIPTHGVPAMKSKIDPILEARQKYAYGTQRDYLDHPDVIGWTREGDGVHADSGLATLMSDGPGGSKWMEVGKNNAGEVWYDITGNQTNTVTINKDGWGQFHVSGGSVSIYVQQ

SEQ ID NO: 25244 - protein, 483 aa, Bacillus licheniformis
HHNGTNGTMMQYFEWYLPNDGNHWNRLRSDASNLKDKGITAVWIPPAWKGASQNDVGYGAYDLYDLGEFNQKGTVRTKYGTRNQLQAAVTALKSNGIQVYGDVVMNHKGGADATEWVRAVEVNPSNRNQEVSGDYTIEAWTKFDFPGRGNTHSNFKWRWYHFDGVDWDQSRQLQNRIYKFRGKGWDWEVDTENGNYDYLMYADIDMDHPEVVNELRNWGVWYTNTLGLDGFRIDAVKHIKYSFTRDWLTHVRNTTGKNMFAVAEFWKNDIGAIENYLSKTNWNHSVFDVPLHYNLYNASRSGGNYDMRQIFNGTVVARHPTHAVTFVDNHDSQPEEALESFVEEWFKPLAYALTLTRDQGYPSVFYGDYYGIPTHGVPAMKSKIDPILEARQKYAYGTQRDYLDHPDVIGWTREGDGVHADSGLATLMSDGPGGSKWMEVGKNNAGEVWYDITGNQTNTVTINKDGWGQFHVSGGSVSIYVQQ

SEQ ID NO: 25245 - protein, 483 aa, Bacillus licheniformis
HHNGTNGTMMQYFEWYLPNDGNHWNRLRSDASNLKDKGITAVWIPPAWKGASQNDVGYGAYDLYDLGEFNQKGTVRTKYGTRNQLQAAVTALKSNGIQVYGDVVMNHKGGADATEWVRAVEVNPSNRNQEVSGDYTIEAWTKFDFPGRGNTHSNFKWRWYHFDGVDWDQSRQLQNRIYKFRGKGWDWEVDTENGNYDYLMYADIDMDHPEVVNELRNWGVWYTNTLGLDGFRIDAVKHIKYSFTRDWLTHVRNTTGKNMFAVAEFWKNDIGAIENYLSKTNWNHSVFDVPLHYNLYNASRSGGDYDMRQIFNGTVVQRHPTHAVTFVDNHDSQPEEALESFVEEWFKPLAYALTLTRDQGYPSVFYGDYYGIPTHGVPAMKSKIDPILEARQKYAYGTQRDYLDHPDVIGWTREGDGVHADSGLATLMSDGPGGSKWMEVGKNNAGEVWYDITGNQTNTVTINKDGWGQFHVSGGSVSIYVQQ

SEQ ID NO: 25246 - protein, 483 aa, Bacillus licheniformis
HHNGTNGTMMQYFEWYLPNDGNHWNRLRSDASNLKDKGITAVWIPPAWKGASQNDVGYGAYDLYDLGEFNQKGTVRTKYGTRNQLQAAVTALKSNGIQVYGDVVMNHKGGADATEWVRAVEVNPSNRNQEVSGDYTIEAWTKFDFPGRGNTHSNFKWRWYHFDGVDWDQSRQLQNRIYKFRGKGWDWEVDTENGNYDYLMYADIDMDHPEVVNELRNWGVWYTNTLGLDGFRIDAVKHIKYSFTRDWLTHVRNTTGKNMFAVAEFWKNDIGAIENYLSKTNWNHSVFDVPLHYNLYNASRSGGNYDMRQIFNGTVVQRHPTHAVTFVDNHDSQPEEALESFVEEWFKPLAYALTLTRDQGYPSVFYGDYYGIPTHGVPAMKSKIDPILEARQKYAYGTQRDYLDHPDVIGWTREGDGVHADSGLATLMSDGPGGSKWMEVGKNNAGEVWYDITGNQTNTVTIRKDGWGQFHVSGGSVSIYVQQ

SEQ ID NO: 25247 - protein, 483 aa, Bacillus licheniformis
HHNGTNRTMMQYFEWYLPNDGNHWNRLRSDASNLKDKGITAVWIPPAWKGASQNDVGYGAYDLYDLGEFNQKGTVRTKYGTRNQLQAAVTALKSNGIQVYGDVVMNHKGGADATEWVRAVEVNPSNRNQEVSGDYTIEAWTKFDFPGRGNTHSNFKWRWYHFDGVDWDQSRQLQNRIYKFRGKGWDWEVDTENGNYDYLMYADIDMDHPEVVNELRNWGVWYTNTLGLDGFRIDAVKHIKYSFTRDWLTHVRNTTGKNMFAVAEFWKNDIGAIENYLSKTNWNHSVFDVPLHYNLYNASRSGGNYDMRQIFNGTVVQRHPTHAVTFVDNHDSQPEEALESFVEEWFKPLAYALTLTRDQGYPSVFYGDYYGIPTHGVPAMKSKIDPILEARQKYAYGTQRDYLDHPDVIGWTREGDGVHADSGLATLMSDGPGGSKWMEVGKNNAGEVWYDITGNQTNTVTINKDGWGQFHVSGGSVSIYVQQ

SEQ ID NO: 25248 - protein, 483 aa, Bacillus licheniformis
HHNQTNGTMMQYFEWYLPNDGNHWNRLRSDASNLKDKGITAVWIPPAWKGASQNDVGYGAYDLYDLGEFNQKGTVRTKYGTRNQLQAAVTALKSNGIQVYGDVVMNHKGGADATEWVRAVEVNPSNRNQEVSGDYTIEAWTKFDFPGRGNTHSNFKWRWYHFDGVDWDQSRQLQNRIYKFRGKEWDWEVDTENGNYDYLMYADIDMDHPEVVNELRNWGVWYTNTLGLDGFRIDAVKHIKYSFTRDWLTHVRNTTGKNMFAVAEFWKNDIGAIENYLSKTNWNHSVFDVPLHYNLYNASRSGGNYDMRQIFNGTVVQRHPTHAVTFVDNHDSQPEEALESFVEEWFKPLAYALTLTRDQGYPSVFYGDYYGIPTHGVPAMKSKIDPILEARQKYAYGTQRDYLDHPDVIGWTREGDGVHADSGLATLMSDGPGGSKWMEVGKNNAGEVWYDITGNQTNTVTINKDGWGQFHVSGGSVSIYVQQ

SEQ ID NO: 25249 - protein, 483 aa, Bacillus licheniformis
HHNCTNGTMMQYFEWYLPNDGNHWNRLRSDASNLKDKGITAVWIPPAWKGASQNDVGYGAYDLYDLGEFNQKGTVRTKYGTRNQLQAAVTALKSNGIQVYGDVVMNHKGGADATEWVRAVEVNPSNRNQEVSGDYTIEAWTKFDFPGRGNTHSNFKWRWYHFDGVDWDQSRQLQNRIYKFRGKGWDWEVDTENGNYDYLMYADIDMDHPEVVNELRNWGVWYTNTLGLDGFRIDAVKHIKYSFTRDWLTHVRNTTGKNMFAVAEFWKNDIGAIENYLSKTNWNHSVFDVPLHYNLYNASRSGGNYDMRQIFNGTVVQRHPTHAVTFVDNHDSQPEEALESFVEEWFKPLAYALTLTRDQGYPSVFYGDYYGIPTHGVPAMKSKIDPILEARQKYAYGTQRDYLDHPDVIGWTREGDGVHADSGLATLMSDGPGGSKWMEVGKNNAGEVWYDITGNQTNTVTINKDGWGQFHVSGGSVSIYVQQ

SEQ ID NO: 25250 - protein, 483 aa, Bacillus licheniformis
HHNGTNGTMMQYFEWYLPNDGNHWNRLRSDASNLKDKGITAVWIPPAWKGASQNDVGYGAYDLYDLGEFNQKGTVRTKYGTRNQLQAAVTALKSNGIQVYGDVVMNHKGGADATEWVRAVEVNPSNRNQEVSGDYTIEAWTKFDFPGRGNTHSNFKWRWYHFDGVDWDQSRQLQNRIYKFRGKGWDWEVDTENGNYDYLMYADIDMDHPEVVNELRNWGVWYTNTLGLDGFRIDAVKHIKYSFTRDWITHVRNTTGKNMFAVAEFWKNDIGAIENYLSKTNWNHSVFDVPLHYNLYNASRSGGNYDMRQIFNGTVVQRHPTHAVTFVDNHDSQPEEALESFVEEWFKPLAYALTLTRDQGYPSVFYGDYYGIPTHGVPAMKSKIDPILEARQKYAYGTQRDYLDHPDVIGWTREGDGVHADSGLATLMSDGPGGSKWMEVGKNNAGEVWYDITGNQTNTVTINKDGWGQFHVSGGSVSIYVQQ

SEQ ID NO: 25251 - protein, 483 aa, Bacillus licheniformis
HHNGTNGTMMQYFEWYLPNDGNHWNRLQSDASNLKDKGITAVWIPPAWKGASQNDVGYGAYDLYDLGEFNQKGTVRTKYGTRNQLQAAVTALKSNGIQVYGDVVMNHKGGADATEWVRAVEVNPSNRNQEVSGDYTIEAWTKFDFPGRGNTHSNFKWRWYHFDGVDWDQSRQLQNRIYKFRGKGWDWEVDTENGNYDYLMYADIDMDHPEVVNELRNWGVWYTNTLGLDGFRIDAVKHIKYSFTRDWLTHVRNTTGKNMFAVAEFWKNDIGAIENYLSKTNWNHSVFDVPLHYNLYNASRSGGNYDMRQIFNGTVVQRHPTHAVTFVDNHDSQPEEALESFVEEWFKPLAYALTLTRDQGYPSVFYGDYYGIPTHGVPAMKSKIDPILEARQKYAYGTQRDYLDHPDVIGWTREGDGVHADSGLATLMSDGPGGSKWMEVGKNNAGEVWYDITGNQTNTVTINKDGWGQFHVSGGSVSIYVQQ

SEQ ID NO: 25252 - protein, 483 aa, Bacillus licheniformis
HHNGTNGTMMQYFEWYLPNDGNHWNRLRSDASNLKDKGITAVWIPPAWKGASQNDVGYGAYDLYDLGEFNQKGTVRTKYGTRNQLQAAVTALKSNGIQVYGDVVMNHKGGADATEWVRAVEVNPSNRNQEVSGDYTIEAWTKFDFPGRGNTHSNFKWRWYHFDGVDWDQSRQLQNRIYKFRGKGWDWEVDTENGNYDYLMYADIDMDHPEVVNELRNWGVWYTNTLGLDGFRIDAVKHIKYSFTRDWLTHVRNTTGKNMFAVAEFWKNDIGAIENYLSKTNWNHSVFDVPLHYNLYNASRSGGNYDMRQIFNGTVVQRTPTHAVTFVDNHDSQPEEALESFVEEWFKPLAYALTLTRDQGYPSVFYGDYYGIPTHGVPAMKSKIDPILEARQKYAYGTQRDYLDHPDVIGWTREGDGVHADSGLATLMSDGPGGSKWMEVGKNNAGEVWYDITGNQTNTVTINKDGWGQFHVSGGSVSIYVQQ

SEQ ID NO: 25253 - protein, 483 aa, Bacillus licheniformis
HHNGTNGTMMQYFEWYLPNDGNHWNRLRSDASNLKDKGITAVWIPPAWKGASQNDVGYGAYDLYDLGEFNQKGTVRTKYGTRNQLQAAVTALKSNGIQVYGDVVMNHKGGADATEWVRAVEVNPSNRNQEVSGDYTIEAWTKFDFPGRGNTHSNFKWRWYHFDGVDWDQSRQLQNRIYKFRGKGWDWEVDTENGNYDYLMYADIDMDHPEVPNELRNWGVWYTNTLGLDGFRIDAVKHIKYSFTRDWLTHVRNTTGKNMFAVAEFWKNDIGAIENYLSKTNWNHSVFDVPLHYNLYNASRSGGNYDMRQIFNGTVVQRHPTHAVTFVDNHDSQPEEALESFVEEWFKPLAYALTLTRDQGYPSVFYGDYYGIPTHGVPAMKSKIDPILEARQKYAYGTQRDYLDHPDVIGWTREGDGVHADSGLATLMSDGPGGSKWMEVGKNNAGEVWYDITGNQTNTVTINKDGWGQFHVSGGSVSIYVQQ

SEQ ID NO: 25254 - protein, 483 aa, Bacillus licheniformis
HHNGTNGTMMQYFEWYLPNDGNHWNRLRSDASNLKDKGITAVWIPPAWKGASQNDVGYGAYDLYDLGEFNQKGTVRTKYGTRNQLQAAVTALKSNGIQVYGDVVMNHKGGADATEWVRAVEVNPSNRNQEVSGDYTIEAWTKFDFPGRGNTHSNFKWRWYHFDGVDWDQSRQLQNRIYKFRGKEWDWEVDTENGNYDYLMYADYDMDHPEVVNELRNWGVWYTNTLGLDGFRIDAVKHIKYSFTRDWLTHVRNTTGKNMFAVAEFWKNDIGAIRNYLSKTNWNHSVFDVPLHYNLYNASRSGGNYDMRQIFNGTVVQRHPTHAVTFVDNHDSQPEEALESFVEEWFKPLAYALTLTRDQGYPSVFYGDYYGIPTHGVPAMKSKIDPILEARQKYAYGTQRDYLDHPDVIGWTREGDGVHADSGLATLMSDGPGGSKWMEVGKNNAGEVWYDITGNQTNTVTINKDGWGQFHVSGGSVSIYVQQ

SEQ ID NO: 25255 - protein, 483 aa, Bacillus licheniformis
HHNGTNGTMMQYFEWYLPNDGNHWNRLRSDASNLKDKGITAVWIPPAWKGASQNDVGYGAYDLYDLGEFNQKGTVRTKYGTRNQLQAAVTALKSNGIQVYGDVVMNHKGGADATEWVRAVEVNPSNRNQEVSGDYTIEAWTKFDFPGRGNTHSNFKWRWYHFDGVDWDQSRQLQNRIYKFRGKGWDWEVDTENGNYDYLMYADIDMDHPEVVNELRNWGVWYTNTLGLDGFRIDAVKHIKYSFTRDWLTHVRNTTGKNMFAVAEFWKNDIGAIENYLSKTNWNHSVFDVPLHYNLYNASRSGGNYDMRQIFNGTVVQRHPTHANTFVDNHDSQPEEALESFVEEWFKPLAYALTLTRDQGYPSVFYGDYYGIPTHGVPAMKSKIDPILEARQKYAYGTQRDYLDHPDVIGWTREGDGVHADSGLATLMSDGPGGSKWMEVGKNNAGEVWYDITGNQTNTVTINKDGWGQFHVSGGSVSIYVQQ

SEQ ID NO: 25256 - protein, 483 aa, Bacillus licheniformis
HHNGTNGTMMQYFEWYLPNDGNHWNRLRSDASNLKDKGITAVWIPPAWKGASQNDVGYGAYDLYDLGEFNQKGTVRTKYGTRNQLQAAVTALKSNGIQVYGDVVMNHKGGADATEWVRAVEVNPSNRNQEVSGDYTIEAWTKFDFPGRGNTHSNFKWRWYHFDGVDWDQSRQLQNRIYKFRGKGWDWEVDTENGNYDYLMYADIDMDHPEVVNELRNWGVWYTNTLGLDGFRIDAVKHIKYSFTRDWLTHVRNTTGKNMFAVAEFWKNDIGAIENYLSKTNWNHSVFDVPLHYNLYNASRSGGNMDMRQIFNGTVVQRHPTHAVTFVDNHDSQPEEALESFVEEWFKPLAYALTLTRDQGYPSVFYGDYYGIPTHGVPAMKSKIDPILEARQKYAYGTQRDYLDHPDVIGWTREGDGVHADSGLATLMSDGPGGSKWMEVGKNNAGEVWYDITGNQTNTVTINKDGWGQFHVSGGSVSIYVQQ

SEQ ID NO: 25257 - protein, 483 aa, Bacillus licheniformis
HHNGTNGTMMQYFEWYLPNDGNHWNRLRSDASNLKDKGITAVWIPPAWKGASQNDVGYGAYDLYDLGEFNQKGTVRTKYGTRNQLQAAVTALKSNGIQVYGDVVMNHKGGADATEWVRAVEVNPSNRNQEVSGDYTIEAWTKFDFPGRGNTHSNFKWRWYHFDGVDWDQSRQLQNRIYKFRGKGWDWEVDTENGNYDYLMYADIDMDHPEVVNELRNWGVWYTNTLGLDGFRIDAVKHIKYSFTRDWLTHVRNTTGKNMFAVAEFWKNDIGAIENYLSKTNWNHSVFDVPLHYNLYNASRSGGNYDMRQIFNGTVVQRHPTHAVTFVDNHDSQPEEALESFVEEWFKPLAYALTLTRDQGYPSVFYGDYYGIPTHGVPAMKSKIDPILEARQKYAYGTQRDYLDHPDVIGWTREGDGVHADSGLATLMSDGPGGSKWMEVGKNNAGEVWYDITGNQTNLVTINKDGWGQFHVSGGSVSIYVQQ

SEQ ID NO: 25258 - protein, 483 aa, Bacillus licheniformis
HHNGTNGTMMQYFEWYLPNDGNHWNRLRSDASNLKDKGITAVWIPPAWKGASQNDVGYGAYDLYDLGEFNQKGTVRTKYGTRNQLQAAVTALKSNGIQVYGDVVMNHKGGADATEWVRAVEVNPSNRNQEVSGDYTIEAWTKFDFPGRGNTHSNFKWRWYHFDGVDWDQSRQLQNRIYKFRGKGWDWEVDTENGNYDYLMYADIDMDHPEVVNELRNWGVWYTNTLGLDGFRIDAVKHIKYSFTRDWLTHVRNTTGKNMFAVAEFWKNDIGAIENYLSKTNWNHSVFMVPLHYNLYNASRSGGNYDMRQIFNGTVVQRHPTHAVTFVDNHDSQPEEALESFVEEWFKPLAYALTLTRDQGYPSVFYGDYYGIPTHGVPAMKSKIDPILEARQKYAYGTQRDYLDHPDVIGWTREGDGVHADSGLATLMSDGPGGSKWMEVGKNNAGEVWYDITGNQTNTVTINKDGWGQFHVSGGSVSIYVQQ

SEQ ID NO: 25259 - protein, 483 aa, Bacillus licheniformis
HHNGTNGTMMQYFEWYLPNDGNHWNRLRSDASNVKDKGITAVWIPPAWKGASQNDVGYGAYDLYDLGEFNQKGTVRTKYGTRNQLQAAVTALKSNGIQVYGDVVMNHKGGADATEWVRAVEVNPSNRNQEVSGDYTIEAWTKFDFPGRGNTHSNFKWRWYHFDGVDWDQSRQLQNRIYKFRGKGWDWEVDTENGNYDYLMYADIDMDHPEVVNELRNWGVWYTNTLGLDGFRIDAVKHIKYSFTRDWLTHVRNTTGKNMFAVAEFWKNDIGAIENYLSKTNWNHSVFDVPLHYNLYNASRSGGNYDMRQIFNGTVVQRHPTHAVTFVDNHDSQPEEALESFVEEWFKPLAYALTLTRDQGYPSVFYGDYYGIPTHGVPAMKSKIDPILEARQKYAYGTQRDYLDHPDVIGWTREGDGVHADSGLATLMSDGPGGSKWMEVGKNNAGEVWYDITGNQTNTVTINKDGWGQFHVSGGSVSIYVQQ

SEQ ID NO: 25260 - protein, 483 aa, Bacillus licheniformis
HHNGTNGTMMQYFEWYLPNDGNHWNRLRSDASNLKDKGITAVWIPPAWKGASQNDVGYGAYDLYDLGEFNQKGTVRTKYGTRNQLQAAVTALKSNGIQVYGDVVMNHKGGADATEWVRAVEVNPSNRNQEVSGDYTIEAWTKFDFPGRGNTHSNFKWRWYHFDGVDWDQSRQLQNRIYKFRGKGWDWEVDTENGNYDYLMYADIDMDHPEVVNELRNWGVWYTNTLGLDGFRLDAVKHIKYSFTRDWLTHVRNTTGKNMFAVAEFWKNDIGAIENYLSKTNWNHSVFDVPLHYNLYNASRSGGNYDMRQIFNGTVVQRHPTHAVTFVDNHDSQPEEALESFVEEWFKPLAYALTLTRDQGYPSVFYGDYYGIPTHGVPAMKSKIDPILEARQKYAYGTQRDYLDHPDVIGWTREGDGVHADSGLATLMSDGPGGSKWMEVGKNNAGEVWYDITGNQTNTVTINKDGWGQFHVSGGSVSIYVQQ

SEQ ID NO: 25261 - protein, 483 aa, Bacillus licheniformis
HHNGTNGTMMQYFEWYLPNDGNHWNRLRSDASNLKDKGITAVWIPPAWKGASQNDVGYGAYDLYDLGEFNQKGTVRTKYGTRNQLQAAVTALKSNGIQVYGDVVMNHKGGADATEWFRAVEVNPSNRNQEVSGDYTIEAWTKFDFPGRGNTHSNFKWRWYHFDGVDWDQSRQLQNRIYKFRGKGWDWEVDTENGNYDYLMYADIDMDHPEVVNELRNWGVWYTNTLGLDGFRIDAVKHIKYSFTRDWLTHVRNTTGKNMFAVAEFWKNDIGAIENYLSKTNWNHSVFDVPLHYNLYNASRSGGNYDMRQIFNGTVVQRHPTHAVTFVDNHDSQPEEALESFVEEWFKPLAYALTLTRDQGYPSVFYGDYYGIPTHGVPAMKSKIDPILEARQKYAYGTQRDYLDHPDVIGWTREGDGVHADSGLATLMSDGPGGSKWMEVGKNNAGEVWYDITGNQTNTVTINKDGWGQFHVSGGSVSIYVQQ

SEQ ID NO: 25262 - protein, 483 aa, Bacillus licheniformis
HHNGTNGTMMQYFEWYLPNDGNHWNRLRSDASNLKDKGITAVWIPPAWKGASQNDVGYGAYDLYDLGEFNQEGTVRTKYGTRNQLQAAVTALKSNGIQVYGDVVMNHKGGADATEWVRAVEVNPSNRNQEVSGDYTIEAWTKFDFPGRGNTHSNFKWRWYHFDGVDWDQSRQLQNRIYKFRGKGWDWEVDTENGNYDYLMYADIDMDHPEVVNELRNWGVWYTNTLGLDGFRIDAVKHIKYSFTRDWLTHVRNTTGKNMFAVAEFWKNDIGAIENYLSKTNWNHSVFDVPLHYNLYNASRSGGNYDMRQIFNGTVVQRHPTHAVTFVDNHDSQPEEALESFVEEWFKPLAYALTLTRDQGYPSVFYGDYYGIPTHGVPAMKSKIDPILEARQKYAYGTQRDYLDHPDVIGWTREGDGVHADSGLATLMSDGPGGSKWMEVGKNNAGEVWYDITGNQTNTVTINKDGWGQFHVSGGSVSIYVQQ

SEQ ID NO: 25263 - protein, 483 aa, Bacillus licheniformis
HHNGTNGTMMQYFEWYLPNDGNHWNRLRSDASNLKDKGITAVWIPPAWKGASQNDVGYGAYDLYDLGEFNQKGTVRTKYGTRNQLQAAVTALKSNGIQVYGDVVMNHKGGADATEWVRAVEVNPSNRNQEVSGDYTIEAWTKFDFPGRGNTHSNFKWRWYHFDGVDWDQSRQLQNRIYKFRGKGWDWEVDTENGNYDYLMYADIDMDHPEVVNELRNWGVWYTNTLGLDGFRIDAVKHIKYSFTRDWLTHVRNTTGKNMFAVAEFWKNDIGAIENYLSKTNWNHSVFDVPLHYNLYNASRSGGNYDMRQIFNETVVQRHPTHAVTFVDNHDSQPEEALESFVEEWFKPLAYALTLTRDQGYPSVFYGDYYGIPTHGVPAMKSKIDPILEARQKYAYGTQRDYLDHPDVIGWTREGDGVHADSGLATLMSDGPGGSKWMEVGKNNAGEVWYDITGNQTNTVTINKDGWGQFHVSGGSVSIYVQQ

SEQ ID NO: 25264 - protein, 483 aa, Bacillus licheniformis
HHNGTNGTMMQYFEWYLPNDGNHWNRLRSDASNLKDKGITAVWIPPAWKGASQNDVGYGAYDLYDLGEFNQKGTVRTKYGTRNQLQAAVTALKSNGIQVYGDVVMNHKGGADATEWVRAVEVNPSNRNQEVSGDYTIEAWTKFDFPGRGNTHSNFKWRWYHFDGVDWDQSRQLQNRIYKFRGKGWDWEVDTENGNYDYLMYADIDMDHPEVVNELRNWGVWYTNTLGLDGFRIDAVKHIKYSFTRDWLTHVRNTTGKNMFAVAEFWKNDIGAIENYLSKTNWNQSVFDVPLHYNLYNASRSGGNYDMRQIFNGTVVQRHPTHAVTFVDNHDSQPEEALESFVEEWFKPLAYALTLTRDQGYPSVFYGDYYGIPTHGVPAMKSKIDPILEARQKYAYGTQRDYLDHPDVIGWTREGDGVHADSGLATLMSDGPGGSKWMEVGKNNAGEVWYDITGNQTNTVTINKDGWGQFHVSGGSVSIYVQQ

SEQ ID NO: 25265 - protein, 483 aa, Bacillus licheniformis
HHNGTNGTMMQYFEWYLPNDGNHWNRLRSDASNLKDKGITAVWIPPAWKGASQNDVGYGAYDLYDLGEFNQKGTVRTKYGTRNQLQAAVTALKSNGIQVYGDVVMNHKGGADATEWVRAVEVNPSNRNQEVSGDPTIEAWTKFDFPGRGNTHSNFKWRWYHFDGVDWDQSRQLQNRIYKFRGKGWDWEVDTENGNYDYLMYADIDMDHPEVVNELRNWGVWYTNTLGLDGFRIDAVKHIKYSFTRDWLTHVRNTTGKNMFAVAEFWKNDIGAIENYLSKTNWNHSVFDVPLHYNLYNASRSGGNYDMRQIFNGTVVQRHPTHAVTFVDNHDSQPEEALESFVEEWFKPLAYALTLTRDQGYPSVFYGDYYGIPTHGVPAMKSKIDPILEARQKYAYGTQRDYLDHPDVIGWTREGDGVHADSGLATLMSDGPGGSKWMEVGKNNAGEVWYDITGNQTNTVTINKDGWGQFHVSGGSVSIYVQQ

SEQ ID NO: 25266 - protein, 483 aa, Bacillus licheniformis
HHNGTNGTMMQYFEWYLPNDGNHWNRLRSDASNLKDKGITAVWIPPAWKGASQNDVGYGAYDLYDLGEFNQKGTVRTKYGTRNQLQAAVTALKSNGIQVYGDVVMNHKGGADATEWVRAVEVNPSNRNQEVSGDYTIEAWTKFDFPGRGNTHSNFKWRWYHFDGVDWDQSRQLQNRIYKFRGKGWDWEVDTENGNYDYLMYADIDMDQPEVVNELRNWGVWYTNTLGLDGFRIDAVKHIKYSFTRDWLTHVRNTTGKNMFAVAEFWKNDIGAIENYLSKTNWNHSVFDVPLHYNLYNASRSGGNYDMRQIFNGTVVQRHPTHAVTFVDNHDSQPEEALESFVEEWFKPLAYALTLTRDQGYPSVFYGDYYGIPTHGVPAMKSKIDPILEARQKYAYGTQRDYLDHPDVIGWTREGDGVHADSGLATLMSDGPGGSKWMEVGKNNAGEVWYDITGNQTNTVTINKDGWGQFHVSGGSVSIYVQQ

SEQ ID NO: 25267 - protein, 483 aa, Bacillus licheniformis
HHNGTNGTMMQYFEWYLPNDGNHWNRLRSDASNLKDKGITAVWIPPAWKGASQNDVGYGAYDLYDLGEFNQKGTVRTKYGTRNQLQAAVTALKSNGIQVYGDVVMNHKGGADATEWVRAVEVNPSNRNQEVSGDYTIEAWTKFDFPGRGNTHSNFKWRWYHFDGVDWDQSRQLQNRIYKFRGKGWDWEVDTENGNYDYLMYADIDMDHPEVVNELRNWGVWYTNTLGLDGFRIDAVKHIKYSFTRDWLTHVRNTTGKNMFAVAEFWKNDIGAIENYLSKTNWNHSVGDVPLHYNLYNASRSGGNYDMRQIFNGTVVQRHPTHAVTFVDNHDSQPEEALESFVEEWFKPLAYALTLTRDQGYPSVFYGDYYGIPTHGVPAMKSKIDPILEARQKYAYGTQRDYLDHPDVIGWTREGDGVHADSGLATLMSDGPGGSKWMEVGKNNAGEVWYDITGNQTNTVTINKDGWGQFHVSGGSVSIYVQQ

SEQ ID NO: 25268 - protein, 483 aa, Bacillus licheniformis
HHNGTNGTMMQYFEWYLPNDGNHWNRLRSDASNLKDKGITAVWIPPAWKGASQNDVGYGAYDLYDLGEFNQKGTVRTKYGTRNQLQAAVTALKSNGIQVYGDVVMNHKGGADATEWVRAVEVNPSNRNQEVSGDYTIEAWTKFDFPGRGNTHSNFKWRWYHFDGVDWDQSRQLQNRIYKFRGKGWDWEVDTENGNYDYLMYADIDMDHPEVVNELRNWGVWYTNTLGLDGFRIDAVKHIKYSFTRDWLTHVRNTTGKNMFAVAEFWKNDIFAIENYLSKTNWNHSVFDVPLHYNLYNASRSGGNYDMRQIFNGTVVQRHPTHAVTFVDNHDSQPEEALESFVEEWFKPLAYALTLTRDQGYPSVFYGDYYGIPTHGVPAMKSKIDPILEARQKYAYGTQRDYLDHPDVIGWTREGDGVHADSGLATLMSDGPGGSKWMEVGKNNAGEVWYDITGNQTNTVTINKDGWGQFHVSGGSVSIYVQQ

SEQ ID NO: 25269 - protein, 483 aa, Bacillus licheniformis
HHNGTNGTMMQYFEWYLPNDGNHWNRLRSDASNLKDKGITAVWIPPAWKGASQNDVGYGAYDLYDLGEFNQKGTVRTKYGTRNQLQAAVTALKSNGIQVYGDVVMNHKGGADATEWVRAVEVNPSNRNQEVSGDYTIEAWTKFDFPGRGNTHSNFKWRWYHFDGVDWDQSRQLQNRIYKFRGKGWDWEVDTENGNYDYLMYADIDMDHPEVVNELRNWGVWYRNTLGLDGFRIDAVKHIKYSFTRDWLTHVRNTTGKNMFAVAEFWKNDIGAIENYLSKTNWNHSVFDVPLHYNLYNASRSGGNYDMRQIFNGTVVQRHPTHAVTFVDNHDSQPEEALESFVEEWFKPLAYALTLTRDQGYPSVFYGDYYGIPTHGVPAMKSKIDPILEARQKYAYGTQRDYLDHPDVIGWTREGDGVHADSGLATLMSDGPGGSKWMEVGKNNAGEVWYDITGNQTNTVTINKDGWGQFHVSGGSVSIYVQQ

SEQ ID NO: 25270 - protein, 483 aa, Bacillus licheniformis
HHNGTNGTMMQYFEWYLPNDGNHWNRLRSDASNLKDKGITAVWIPPAWKGASQNDVGYGAYDLYDLGEFNQKGTVRTKYGTRNQLQAAVTALKSNGIQVYGDVVMNHKGGADATEWVRAVEVNPSNRNQEVSGDYTIEAWTKFDFPGRGNTHSNFKWRWYHFDGVDWDQSRQLQNRIYKFRGKGWDWEVDTENGNYDYLMYADIDMDHPEVVNELRNWGVWYTNTLGLDGFRIDAVKHIKYSFTRDWLTHVRNTTGKNMFAVAEFWKNDIGAIENYLSKTNWNHSVFDVPLHYNLYNASRSGGNYDMRQIFNGTVVQRHPTHAVTFVDNHDSQPEEALESFVEEWFKPLAYALTLTRDQGYASVFYGDYYGIPTHGVPAMKSKIDPILEARQKYAYGTQRDYLDHPDVIGWTREGDGVHADSGLATLMSDGPGGSKWMEVGKNNAGEVWYDITGNQTNTVTINKDGWGQFHVSGGSVSIYVQQ

SEQ ID NO: 25271 - protein, 483 aa, Bacillus licheniformis
HHNGTNGTMMQYFEWYLPNDGNHWNRLRSDASNLKDKGITAVWIPPAWKGASQNDVGYGAYDLYDLGEFNQKGTVRTKYGTRNQLQAAVTALKSNGIQVYGDVVMNHKGGADATEWVRAVEVNPSNRNQEVSGDYTIEAWTKFDFPGRGNTHSNFKWRWYHFDGVDWDQSRQLQNRIYKFRGKGWDWEVDTENGNYDYLMYADIDMDHPEVVNELRNWGVWYTNTLGLDGFRIDAVKHIKYSFTRDWLTHVRNTTGKNMFAVAEFWKNDIGAIENYLSKTNWNHSVFDVPLHYNLYNASRSGGNYDMRQIFNGTVVQRHPTHAVTFVDNHDSQPEEALESFVEEWFKPLAYALTLTRDQGYPSVFYGDYYGIPTHGVPAMKSKIDPILEARQKYAYGTQRDYLDHPDVIGWTREGDGVHADSGLATLMSDGPGGSKWMEVGKNNAGEVWYDITGNQTNTVTINKDHWGQFHVSGGSVSIYVQQ

SEQ ID NO: 25272 - protein, 483 aa, Bacillus licheniformis
HHNGTNGTMMQYFEWYLPNDGNHWNRLRSDASNLKDKGITAVWIPPAWKGASQNDVGYGAYDLYDLGEFNQKGTVRTKYGTRNQLQAAVTALKSNGIQVYGDVVMNHKGGADATEWRRAVEVNPSNRNQEVSGDYTIEAWTKFDFPGRGNTHSNFKWRWYHFDGVDWDQSRQLQNRIYKFRGKGWDWEVDTENGNYDYLMYADIDMDHPEVVNELRNWGVWYTNTLGLDGFRIDAVKHIKYSFTRDWLTHVRNTTGKNMFAVAEFWKNDIGAIENYLSKTNWNHSVFDVPLHYNLYNASRSGGNYDMRQIFNGTVVQRHPTHAVTFVDNHDSQPEEALESFVEEWFKPLAYALTLTRDQGYPSVFYGDYYGIPTHGVPAMKSKIDPILEARQKYAYGTQRDYLDHPDVIGWTREGDGVHADSGLATLMSDGPGGSKWMEVGKNNAGEVWYDITGNQTNTVTINKDGWGQFHVSGGSVSIYVQQ

SEQ ID NO: 25273 - protein, 483 aa, Bacillus licheniformis
HHNGTNGTMMQYFEWYLPNDGNHWNRLRSDASNLKDKGITAVWIPPAWKGASQNDVGYGAYDLYDLGEFNQKGTVRTKYGTRNQLQAAVTALKSNGIQVYGDVVMNHKGGADATEWVRAVEVNPSNRNQEVSGDYTIEAWTKFDFPGRGNTHSNFKWRWYHFDGVDWDQSRQLQNRIYKFRGKGWDWEVDTENGNYDYLMYADIDMDHPEVVNELRNWGVWYTNTLGLDGFRIDAVKHIKYSFTRDWLTHVRNTTGKNMFAVAEFWKNDIGAIENYLSKTNWNHSVFDVPLHYNLYNASRSGGNYDMRQIFNGTVVQRHPTHAVTFVDNHDSQPEEALESFVEEWFKPLAYALTLTRDQGYPSVFYGDYYGIPTHGRPAMKSKIDPILEARQKYAYGTQRDYLDHPDVIGWTREGDGVHADSGLATLMSDGPGGSKWMEVGKNNAGEVWYDITGNQTNTVTINKDGWGQFHVSGGSVSIYVQQ

SEQ ID NO: 25274 - protein, 483 aa, Bacillus licheniformis
HHNGTNGTMMQYFEWYLPNDGNHWNRLRSDASNLKDKGITAVWIPPAWKGASQNDVGYGAYDLYDLGEFNQKGTVRTKYGTRNQLQAAVTALKSNGIQVYGDVVMNHKGGADATEWVRAVEVNPSNRNQEVSGDYTIEAWTKFDFPGRGNTHSNFKWRWYHFDGVDWDQSRQLQNRIYKFRGKGWDWEVDTENGNYDYLMYADIDMDHPEVVNELRNWGVWYTNTLGLDGFRIDAVKHIKYSFTRDWLTHVRNTTGKNMFAVAEFWKNDIGAIENYLSKTNWNHTVFDVPLHYNLYNASRSGGNYDMRQIFNGTVVQRHPTHAVTFVDNHDSQPEEALESFVEEWFKPLAYALTLTRDQGYPSVFYGDYYGIPTHGVPAMKSKIDPILEARQKYAYGTQRDYLDHPDVIGWTREGDGVHADSGLATLMSDGPGGSKWMEVGKNNAGEVWYDITGNQTNTVTINKDGWGQFHVSGGSVSIYVQQ

SEQ ID NO: 25275 - protein, 483 aa, Bacillus licheniformis
HHNGTNGTMMQYFEWYLPNDGNHWNRLRSDASNLKDKGITAVWIPPAWKGASQNDVGYGAYDLYDLGEFNQKGTVRTKYGTRNQLQAAVTALKSNGIQVYGDVVMNHKGGADATEWVRAVEVNPSNRNQEVSNDYTIEAWTKFDFPGRGNTHSNFKWRWYHFDGVDWDQSRQLQNRIYKFRGKGWDWEVDTENGNYDYLMYADIDMDHPEVVNELRNWGVWYTNTLGLDGFRIDAVKHIKYSFTRDWLTHVRNTTGKNMFAVAEFWKNDIGAIENYLSKTNWNHSVFDVPLHYNLYNASRSGGNYDMRQIFNGTVVQRHPTHAVTFVDNHDSQPEEALESFVEEWFKPLAYALTLTRDQGYPSVFYGDYYGIPTHGVPAMKSKIDPILEARQKYAYGTQRDYLDHPDVIGWTREGDGVHADSGLATLMSDGPGGSKWMEVGKNNAGEVWYDITGNQTNTVTINKDGWGQFHVSGGSVSIYVQQ

SEQ ID NO: 25276 - protein, 483 aa, Bacillus licheniformis
HHNGNNGTMMQYFEWYLPNDGNHWNRLRSDASNLKDKGITAVWIPPAWKGASQNDVGYGAYDLYDLGEFNQKGTVRTKYGTRNQLQAAVTALKSNGIQVYGDVVMNHKGGADATEWVRAVEVNPSNRNQEVSGDYTIEAWTKFDFPGRGNTHSNFKWRWYHFDGVDWDQSRQLQNRIYKFRGKGWDWEVDTENGNYDYLMYADIDMDHPEVVNELRNWGVWYTNTLGLDGFRIDAVKHIKYSFTRDWLTHVRNTTGKNMFAVAEFWKNDIGAIENYLSKTNWNHSVFDVPLHYNLYNASRSGGNYDMRQIFNGTVVQRHPTHAVTFVDNHDSQPEEALESFVEEWFKPLAYALTLTRDQGYPSVFYGDYYGIPTHGVPAMKSKIDPILEARQKYAYGTQRDYLDHPDVIGWTREGDGVHADSGLATLMSDGPGGSKWMEVGKNNAGEVWYDITGNQTNTVTINKDGWGQFHVSGGSVSIYVQQ

SEQ ID NO: 25277 - protein, 483 aa, Bacillus licheniformis
HHNGTNGTMMQYFEWYLPNDGNHWNRLRSDASNLKDKGITAVWIPPAWKGASQNDVGYGAYDLYDLGEFNQKGTVRTKYGTRNQLQAAVTALKSNGIQVYGDVVMNHKGGADATEWVRAVEVNPSNRNQEVSGDYTIEAWTKFDFPGRGNTHSNFKWRWYHFDGVDWDQSRQLQNRIYKFRGKGWDWEVDTENGNYDYLMYADIDMDHPEVVNELRNWGVWYTNTLGLDGFRIDAVKHIKYSFTRDWLTHVRNTTGKNMFAWAEFWKNDIGAIENYLSKTNWNHSVFDVPLHYNLYNASRSGGNYDMRQIFNGTVVQRHPTHAVTFVDNHDSQPEEALESFVEEWFKPLAYALTLTRDQGYPSVFYGDYYGIPTHGVPAMKSKIDPILEARQKYAYGTQRDYLDHPDVIGWTREGDGVHADSGLATLMSDGPGGSKWMEVGKNNAGEVWYDITGNQTNTVTINKDGWGQFHVSGGSVSIYVQQ

SEQ ID NO: 25278 - protein, 483 aa, Bacillus licheniformis
HHNGTNGTMMQYFEWYLPNDGNHWNRLRSDASNLKDKGITAVWIPPAWKGASQNDVGYGAYDLYDLGEFNQKGTVRTKYGTRNQLQAAVTALKSNGIQVYGDVVMNHKGGADATEWVRAVEVNPSNRNQEVSGDYTIEAWTKFDFPGRGNTHSNFKWRWWHFDGVDWDQSRQLQNRIYKFRGKQWDWEVDTENGNYDYLMYADIDMDHPEVVNELRNWGVWYTNTLGLDGFRIDAVKHIKYSFTRDWLTHVRNTTGKNMFAVAEFWKNDIGAIENYLSKTNWNHSVFDVPLHYNLYNASRSGGNYDMRQIFNGTVVQRHPTHAVTFVDNHDSQPEEALESFVEEWFKPLAYALTLTRDQGYPSVFYGDYYGIPTHGVPAMKSKIDPILEARQKYAYGTQRDYLDHPDVIGWTREGDGVHADSGLATLMSDGPGGSKWMEVGKNNAGEVWYDITGNQTNTVTINKDGWGQFHVSGGSVSIYVQQ

SEQ ID NO: 25279 - protein, 483 aa, Bacillus licheniformis
HHNGTNGTMMQYFEWYLPNDGNHWNRLRSDASNLKDKGITAVWIPPAWKGASQNDVGYGAYDLYDLGEFNQKGTVRTKYGTRNQLQAAVTALKSNGIQVYGDVVMNHKGGADATEWVRAVEVNPSNRNQEVSGDYTIEAWTKFDFPGRGNTHSNFKWRWYHFDGVDWDQSRQLQNRIYKFRGKGWDWEVDTENGNYDYLMYADIDMDHPEVVNELRNWGVWYANTLGLDGFRIDAVKHIKYSFTRDWLTHVRNTTGKNMFAVAEFWKNDIGAIENYLSKTNWNHSVFDVPLHYNLYNASRSGGNYDMRQIFNGTVVQRHPTHAVTFVDNHDSQPEEALESFVEEWFKPLAYALTLTRDQGYPSVFYGDYYGIPTHGVPAMKSKIDPILEARQKYAYGTQRDYLDHPDVIGWTREGDGVHADSGLATLMSDGPGGSKWMEVGKNNAGEVWYDITGNQTNTVTINKDGWGQFHVSGGSVSIYVQQ

SEQ ID NO: 25280 - protein, 483 aa, Bacillus licheniformis
HHNGTNGTMMQYFEWYLPNDGNHWHRLRSDASNLKDKGITAVWIPPAWKGASQNDVGYGAYDLYDLGEFNQKGTVRTKYGTRNQLQAAVTALKSNGIQVYGDVVMNHKGGADATEWVRAVEVNPSNRNQEVSGDYTIEAWTKFDFPGRGNTHSNFKWRWYHFDGVDWDQSRQLQNRIYKFRGKGWDWEVDTENGNYDYLMYADIDMDHPEVVNELRNWGVWYTNTLGLDGFRIDAVKHIKYSFTRDWLTHVRNTTGKNMFAVAEFWKNDIGAIENYLSKTNWNHSVFDVPLHYNLYNASRSGGNYDMRQIFNGTVVQRHPTHAVTFVDNHDSQPEEALESFVEEWFKPLAYALTLTRDQGYPSVFYGDYYGIPTHGVPAMKSKIDPILEARQKYAYGTQRDYLDHPDVIGWTREGDGVHADSGLATLMSDGPGGSKWMEVGKNNAGEVWYDITGNQTNTVTINKDGWGQFHVSGGSVSIYVQQ

SEQ ID NO: 25281 - protein, 483 aa, Bacillus licheniformis
HHNGTNGTMMQYFEWYLPNDGNHWNRLRSDASNLKDKGITAVWIPPAWKGASQNDVGYGAYDLYDLGEFNQKGTVRTKYGTRNQLQAAVTALKSNGIQVYGDVVMNHKGGADANEWVRAVEVNPSNRNQEVSGDYTIEAWTKFDFPGRGNTHSNFKWRWYHFDGVDWDQSRQLQNRIYKFRGKGWDWEVDTENGNYDYLMYADIDMDHPEVVNELRNWGVWYTNTLGLDGFRIDAVKHIKYSFTRDWLTHVRNTTGKNMFAVAEFWKNDIGAIENYLSKTNWNHSVFDVPLHYNLYNASRSGGNYDMRQIFNGTVVQRHPTHAVTFVDNHDSQPEEALESFVEEWFKPLAYALTLTRDQGYPSVFYGDYYGIPTHGVPAMKSKIDPILEARQKYAYGTQRDYLDHPDVIGWTREGDGVHADSGLATLMSDGPGGSKWMEVGKNNAGEVWYDITGNQTNTVTINKDGWGQFHVSGGSVSIYVQQ

SEQ ID NO: 25282 - protein, 483 aa, Bacillus licheniformis
HHNGTNGTMMQYFEWYLPNDGNHWNRLRSDASNLKDKGITAVWIPPAWKGASQNDVGYGAYDLYDLGEFNQKGTVRTKYGTRNQLQAAVTALKSNGIQVYGDVVMNHKGGADATEWVRAVEVNPSNRNQEVSGDYTIEAWTKFDFPGRGNTHSNFKWRWYHFDGVDWDQSRQLQNRIYKFRGKGWDWEVDTENGNYDYLMYADIDMDHPEVVNELRNWGVWYTNTLGLDGFRIDAVKHIKYSFTRDWLTHVRNTTGKNMFAVAEFWKNDIGAIENYLSKTNWNHSVFDVLLHYNLYNASRSGGNYDMRQIFNGTVVQRHPTHAVTFVDNHDSQPEEALESFVEEWFKPLAYALTLTRDQGYPSVFYGDYYGIPTHGVPAMKSKIDPILEARQKYAYGTQRDYLDHPDVIGWTREGDGVHADSGLATLMSDGPGGSKWMEVGKNNAGEVWYDITGNQTNTVTINKDGWGQFHVSGGSVSIYVQQ

SEQ ID NO: 25283 - protein, 483 aa, Bacillus licheniformis
HHNGTNGTMMQYFEWYLPNDGNHWNRLRSDASNLKDKGITAVWIPPAWKGASQNDVGYGAYDLYDLGEFNQKGTVRTKYGTRNQLQAAVTALKSIGIQVYGDVVMNHKGGADATEWVRAVEVNPSNRNQEVSGDYTIEAWTKFDFPGRGNTHSNFKWRWYHFDGVDWDQSRQLQNRIYKFRGKGWDWEVDTENGNYDYLMYADIDMDHPEVVNELRNWGVWYTNTLGLDGFRIDAVKHIKYSFTRDWLTHVRNTTGKNMFAVAEFWKNDIGAIENYLSKTNWNHSVFDVPLHYNLYNASRSGGNYDMRQIFNGTVVQRHPTHAVTFVDNHDSQPEEALESFVEEWFKPLAYALTLTRDQGYPSVFYGDYYGIPTHGVPAMKSKIDPILEARQKYAYGTQRDYLDHPDVIGWTREGDGVHADSGLATLMSDGPGGSKWMEVGKNNAGEVWYDITGNQTNTVTINKDGWGQFHVSGGSVSIYVQQ

SEQ ID NO: 25284 - protein, 483 aa, Bacillus licheniformis
HHNGTNGTMMQYFEWYLPNDGNHWNRLRSDASNLKDKGITAVWIPPAWKGASQNDVGYGAYDLYDLGEFNQKGTVRTKYGTRNQLQAAVTALKSNGIQVYGDVVMNHKGGADATEWVRAVEVNPSNRNQEVSGDYTIEAWTKFDFPGRGNTHSNFKWRWYHFDGVDWDQSRQLQNKIYKFRGKGWDWEVDTENGNYDYLMYADIDMDHPEVVNELRNWGVWYTNTLGLDGFRIDAVKHIKYSFTRDWLTHVRNTTGKNMFAVAEFWKNDIGAIENYLSKTNWNHSVFDVPLHYNLYNASRSGGNYDMRQIFNGTVVQRHPTHAVTFVDNHDSQPEEALESFVEEWFKPLAYALTLTRDQGYPSVFYGDYYGIPTHGVPAMKSKIDPILEARQKYAYGTQRDYLDHPDVIGWTREGDGVHADSGLATLMSDGPGGSKWMEVGKNNAGEVWYDITGNQTNTVTINKDGWGQFHVSGGSVSIYVQQ

SEQ ID NO: 25285 - protein, 483 aa, Bacillus licheniformis
HHNGTNGTMMQYFEWYLPNDGNHWNRLRSDASNLKDKGITAVWIPPAWKGASQNDVGYGAYDLYDLGEFNQKGTVRTKYGTRNQLQAAVTALKSNGIQVYGDVVMNHKGGADATEWVRAVEVNPSNRNQEVSGDYTIEAWTKFDFPGRGNTHSNFKWRWYHFDGVDWDQSRQLQNRIYKFRGKGWDWEVDTENGNYDYLMYADIDMDHPEVVNELRNWGVWYTNTLGLDGFRIDAAKHIKYSFTRDWLTHVRNTTGKNMFAVAEFWKNDIGAIENYLSKTNWNHSVFDVPLHYNLYNASRSGGNYDMRQIFNGTVVQRHPTHAVTFVDNHDSQPEEALESFVEEWFKPLAYALTLTRDQGYPSVFYGDYYGIPTHGVPAMKSKIDPILEARQKYAYGTQRDYLDHPDVIGWTREGDGVHADSGLATLMSDGPGGSKWMEVGKNNAGEVWYDITGNQTNTVTINKDGWGQFHVSGGSVSIYVQQ

SEQ ID NO: 25286 - protein, 483 aa, Bacillus licheniformis
HHNGTNGTMMQYFEWYLPNDGNHWNRLRSDASNLKDKGITAVWIPPAWKGASQNDVGYGAYDLYDLGEFNQKGTARTKYGTRNQLQAAVTALKSNGIQVYGDVVMNHKGGADATEWVRAVEVNPSNRNQEVSGDYTIEAWTKFDFPGRGNTHSNFKWRWYHFDGVDWDQSRQLQNRIYKFRGKGWDWEVDTENGNYDYLMYADIDMDHPEVVNELRNWGVWYTNTLGLDGFRIDAVKHIKYSFTRDWLTHVRNTTGKNMFAVAEFWKNDIGAIENYLSKTNWNHSVFDVPLHYNLYNASRSGGNYDMRQIFNGTVVQRHPTHAVTFVDNHDSQPEEALESFVEEWFKPLAYALTLTRDQGYPSVFYGDYYGIPTHGVPAMKSKIDPILEARQKYAYGTQRDYLDHPDVIGWTREGDGVHADSGLATLMSDGPGGSKWMEVGKNNAGEVWYDITGNQTNTVTINKDGWGQFHVSGGSVSIYVQQ

SEQ ID NO: 25287 - protein, 483 aa, Bacillus licheniformis
HHNGTNGWMMQYFEWYLPNDGNHWNRLRSDASNLKDKGITAVWIPPAWKGASQNDVGYGAYDLYDLGEFNQKGTVRTKYGTRNQLQAAVTALKSNGIQVYGDVVMNHKGGADATEWVRAVEVNPSNRNQEVSGDYTIEAWTKFDFPGRGNTHSNFKWRWYHFDGVDWDQSRQLQNRIYKFRGKGWDWEVDTENGNYDYLMYADIDMDHPEVVNELRNWGVWYTNTLGLDGFRIDAVKHIKYSFTRDWLTHVRNTTGKNMFAVAEFWKNDIGAIENYLSKTNWNHSVFDVPLHYNLYNASRSGGNYDMRQIFNGTVVQRHPTHAVTFVDNHDSQPEEALESFVEEWFKPLAYALTLTRDQGYPSVFYGDYYGIPTHGVPAMKSKIDPILEARQKYAYGTQRDYLDHPDVIGWTREGDGVHADSGLATLMSDGPGGSKWMEVGKNNAGEVWYDITGNQTNTVTINKDGWGQFHVSGGSVSIYVQQ

SEQ ID NO: 25288 - protein, 483 aa, Bacillus licheniformis
HHNGTNGTMMQYFEWYLPNDGNHWNRLRSDASNLKDKGITAVWIPPAWKGASQNDVGYGAYDLYDLGEFNQKGTVRTKYGTRNQLQAAVTALKSNGIQVYGDVVMNHKGGADAKEWVRAVEVNPSNRNQEVSGDYTIEAWTKFDFPGRGNTHSNFKWRWYHFDGVDWDQSRQLQNRIYKFRGKGWDWEVDTENGNYDYLMYADIDMDHPEVVNELRNWGVWYTNTLGLDGFRIDAVKHIKYSFTRDWLTHVRNTTGKNMFAVAEFWKNDIGAIENYLSKTNWNHSVFDVPLHYNLYNASRSGGNYDMRQIFNGTVVQRHPTHAVTFVDNHDSQPEEALESFVEEWFKPLAYALTLTRDQGYPSVFYGDYYGIPTHGVPAMKSKIDPILEARQKYAYGTQRDYLDHPDVIGWTREGDGVHADSGLATLMSDGPGGSKWMEVGKNNAGEVWYDITGNQTNTVTINKDGWGQFHVSGGSVSIYVQQ

SEQ ID NO: 25289 - protein, 483 aa, Bacillus licheniformis
HHNGTNGTMMQYFEWYLPNDGNHWNRLRSDASNLKDKGITAVWIPPAWKGASQNDVGYGAYDLYDLGEFNQKGTVRTKYGTRNQLQAAVTALKSNGIQVYGDVVMNHKGGADATEWVRAVEVNPSNRNQEVSGLYTIEAWTKFDFPGRGNTHSNFKWRWYHFDGVDWDQSRQLQNRIYKFRGKGWDWEVDTENGNYDYLMYADIDMDHPEVVNELRNWGVWYTNTLGLDGFRIDAVKHIKYSFTRDWLTHVRNTTGKNMFAVAEFWKNDIGAIENYLSKTNWNHSVFDVPLHYNLYNASRSGGNYDMRQIFNGTVVQRHPTHAVTFVDNHDSQPEEALESFVEEWFKPLAYALTLTRDQGYPSVFYGDYYGIPTHGVPAMKSKIDPILEARQKYAYGTQRDYLDHPDVIGWTREGDGVHADSGLATLMSDGPGGSKWMEVGKNNAGEVWYDITGNQTNTVTINKDGWGQFHVSGGSVSIYVQQ

SEQ ID NO: 25290 - protein, 483 aa, Bacillus licheniformis
HHNGTNGTMMQYFEWYLPNDGNHWNRLRSDASNLKDKGITAVWIPPAWKGASQNDVGYGAYDLYDLGEFNQKGTVRTKYGTRNQLQAAVTALKSNGIQVYGDVVMNHKGGADATEWVRAVEVNPSNRNQEVSGDYTIEAWTKFDFPGRGNTHSNFKWRWYHFDGVDWDQSRQLQNRIYKFRGKGWDWEVDTENGNYDYLMYADIDMDHPEVVNELRNWGVWYTNTLGLDGFRIDAVKHIKYSFTRDWLTHVRNTTGKNMFAVAEFWKNDIGAIENYLSKTNWNHSVFDVPLHYNLYNASRSGGNYDMRQIFNGTVVQRHPTHAVTFVDNHDSQPEEALESFVEEWFKPLAYALTLTRDQGYPSVFYGDYYGIPTHGVPAMKSKIDPILEARQKYAYGTQRDYLDHPDVIGWTREGDGVHADSGLATLMSDGPGGSKWMEVGKCNAGEVWYDITGNQTNTVTINKDGWGQFHVSGGSVSIYVQQ

SEQ ID NO: 25291 - protein, 483 aa, Bacillus licheniformis
HHNGTNGTMMQYFEWYLPNDGNHWNRLRSDASNLKDKGITAVWIPPAWKGASQNDVGYGAYDLYDLGEFNQKGTVRTKYGTRNQLQAAVTALKSNGIQVYGDVVMNHKGGADAAEWVRAVEVNPSNRNQEVSGDYTIEAWTKFDFPGRGNTHSNFKWRWYHFDGVDWDQSRQLQNRIYKFRGKGWDWEVDTENGNYDYLMYADIDMDHPEVVNELRNWGVWYTNTLGLDGFRIDAVKHIKYSFTRDWLTHVRNTTGKNMFAVAEFWKNDIGAIENYLSKTNWNHSVFDVPLHYNLYNASRSGGNYDMRQIFNGTVVQRHPTHAVTFVDNHDSQPEEALESFVEEWFKPLAYALTLTRDQGYPSVFYGDYYGIPTHGVPAMKSKIDPILEARQKYAYGTQRDYLDHPDVIGWTREGDGVHADSGLATLMSDGPGGSKWMEVGKNNAGEVWYDITGNQTNTVTINKDGWGQFHVSGGSVSIYVQQ

SEQ ID NO: 25292 - protein, 483 aa, Bacillus licheniformis
HHNGTNGTMMQYFEWYLPNDGNHWNRLRSDASNLKDKGITAVWIPPAWKGASQNDVGYGAYDLYDLGEFNQKGTVRTKYGTRNQLQAAVTALKSNGIQVYGDVVMNHKGGADATEWVRAVEVNPSNRNQEVSGDYTIEAWTKFDFPGRGNTHSNFKWRWYHFDGVDWDQSRQLQNRIYKFRGKEWDWEVDTENGNYDYLMYADIDMDHPEVVNELRNWGVWYTNTLGLDGFRIDAVKHIKYSFTRDWLTHVRNTTGKNMFAVAEFWKNDIGAIENYLSKTNWNHSVFDVPLHYNLYNASRSGGNYDMRQIFNKTVVQRHPTHAVTFVDNHDSQPEEALESFVEEWFKPLAYALTLTRDQGYPSVFYGDYYGIPTHGVPAMKSKIDPILEARQKYAYGTQRDYLDHPDVIGWTREGDGEHADSGLATLMSDGPGGSKWMEVGKNNAGEVWRDITGNQTNTVTINKDGWGQFHVSGGSVSIYVQQ

SEQ ID NO: 25293 - protein, 483 aa, Bacillus licheniformis
HHNGTNGTMMQYFEWYLPNDGNHWNRLRSDASNLKDKGITAVWIPPAWKGASQNDVGYGAYDLYDLGEFNQKGTVRTKYGTRNQLQAAVTALKSNGIQVYGDVVMNHKGGADATEWVRAVEVNPSNRNQEVSGDYTIEAWTKFDFPGRGNTHSNFKWRWYHFDGVDWDQSRQLQNRIYKFRGKGWDWEVDTENGNYDYLMYADIDMDHPEVVNELRNWGVWYTNTLGLDGFRIDAVKHIKYSFTRDWLTHVRNTTGKNMFAVAEFWKNDIGAIENYLSKTNWNHSVFDVPLHYNLYNASRSGGNYDMRQIFNGTVVQRHPTHAVTFVDNHDSQPEEALESFVEEWFKPLAYALTLTRDQGYPSVFYGDYYGIPTHGVPAMKSKIDPILEARQKYAYGTQRDYLDHPDVIGWTREGDGVHADSGLATLMSDGPGGSKWMEVGKNNAGEVWYDITGNQTNTVTINKAGWGQFHVSGGSVSIYVQQ

SEQ ID NO: 25294 - protein, 483 aa, Bacillus licheniformis
HHNGTNGTMMQYFEWYLPNDGNHWNRLRSDASNLKDKGITAVWIPPAWKGASQNDVGYGAYDLYDLGEFNQKGTVRTKYGTRNQLQAAVTALKSNGIQVYGDVVMNHKGGADATEWVRAVEVNPSNRNQEVSGDYTIEAWTKFDFPGRGNTHSNFKWRWYHFDGVDWDQSRQLQNRIYKFRGKGWDWEVDTENGNYDYLMYADIDMDHPEVENELRNWGVWYTNTLGLDGFRIDAVKHIKYSFTRDWLTHVRNTTGKNMFAVAEFWKNDIGAIENYLSKTNWNHSVFDVPLHYNLYNASRSGGNYDMRQIFNGTVVQRHPTHAVTFVDNHDSQPEEALESFVEEWFKPLAYALTLTRDQGYPSVFYGDYYGIPTHGVPAMKSKIDPILEARQKYAYGTQRDYLDHPDVIGWTREGDGVHADSGLATLMSDGPGGSKWMEVGKNNAGEVWYDITGNQTNTVTINKDGWGQFHVSGGSVSIYVQQ

SEQ ID NO: 25295 - protein, 483 aa, Bacillus licheniformis
HINGTNGTMMQYFEWYLPNDGNHWNRLRSDASNLKDKGITAVWIPPAWKGASQNDVGYGAYDLYDLGEFNQKGTVRTKYGTRNQLQAAVTALKSNGIQVYGDVVMNHKGGADATEWVRAVEVNPSNRNQEVSGDYTIEAWTKFDFPGRGNTHSNFKWRWYHFDGVDWDQSRQLQNRIYKFRGKGWDWEVDTENGNYDYLMYADIDMDHPEVVNELRNWGVWYTNTLGLDGFRIDAVKHIKYSFTRDWLTHVRNTTGKNMFAVAEFWKNDIGAIENYLSKTNWNHSVFDVPLHYNLYNASRSGGNYDMRQIFNGTVVQRHPTHAVTFVDNHDSQPEEALESFVEEWFKPLAYALTLTRDQGYPSVFYGDYYGIPTHGVPAMKSKIDPILEARQKYAYGTQRDYLDHPDVIGWTREGDGVHADSGLATLMSDGPGGSKWMEVGKNNAGEVWYDITGNQTNTVTINKDGWGQFHVSGGSVSIYVQQ

SEQ ID NO: 25296 - protein, 483 aa, Bacillus licheniformis
HHNGTNGTMMQYFEWYLPNDGNHWNRLRSDASNLKDKGITAVWIPPAWKGASQNDVGYGAYDLYDLGEFNQKGTVRTKYGTRNQLQAAVTALKSNGIQVYGDVVMNHKGGADATEWVRAVEVNPSNRNQEVSGIYTIEAWTKFDFPGRGNTHSNFKWRWYHFDGVDWDQSRQLQNRIYKFRGKGWDWEVDTENGNYDYLMYADIDMDHPEVVNELRNWGVWYTNTLGLDGFRIDAVKHIKYSFTRDWLTHVRNTTGKNMFAVAEFWKNDIGAIENYLSKTNWNHSVFDVPLHYNLYNASRSGGNYDMRQIFNGTVVQRHPTHAVTFVDNHDSQPEEALESFVEEWFKPLAYALTLTRDQGYPSVFYGDYYGIPTHGVPAMKSKIDPILEARQKYAYGTQRDYLDHPDVIGWTREGDGVHADSGLATLMSDGPGGSKWMEVGKNNAGEVWYDITGNQTNTVTINKDGWGQFHVSGGSVSIYVQQ

SEQ ID NO: 25297 - protein, 483 aa, Bacillus licheniformis
HHNGTNGTMMQYFEWYLPNDGNHWQRLRSDASNLKDKGITAVWIPPAWKGASQNDVGYGAYDLYDLGEFNQKGTVRTKYGTRNQLQAAVTALKSNGIQVYGDVVMNHKGGADATEWVRAVEVNPSNRNQEVSGDYTIEAWTKFDFPGRGNTHSNFKWRWYHFDGVDWDQSRQLQNRIYKFRGKGWDWEVDTENGNYDYLMYADIDMDHPEVVNELRNWGVWYTNTLGLDGFRIDAVKHIKYSFTRDWLTHVRNTTGKNMFAVAEFWKNDIGAIENYLSKTNWNHSVFDVPLHYNLYNASRSGGNYDMRQIFNGTVVQRHPTHAVTFVDNHDSQPEEALESFVEEWFKPLAYALTLTRDQGYPSVFYGDYYGIPTHGVPAMKSKIDPILEARQKYAYGTQRDYLDHPDVIGWTREGDGVHADSGLATLMSDGPGGSKWMEVGKNNAGEVWYDITGNQTNTVTINKDGWGQFHVSGGSVSIYVQQ

SEQ ID NO: 25298 - protein, 483 aa, Bacillus licheniformis
HHNGTNGTMMQYFEWYLPNDGNHWNRLRSDASNLKDKGITAVWIPPAWKGASQNDVGYGAYDLYDLGEFNQKGTVRTKYGTKNQLQAAVTALKSNGIQVYGDVVMNHKGGADATEWVRAVEVNPSNRNQEVSGDYTIEAWTKFDFPGRGNTHSNFKWRWYHFDGVDWDQSRQLQNRIYKFRGKGWDWEVDTENGNYDYLMYADIDMDHPEVVNELRNWGVWYTNTLGLDGFRIDAVKHIKYSFTRDWLTHVRNTTGKNMFAVAEFWKNDIGAIENYLSKTNWNHSVFDVPLHYNLYNASRSGGNYDMRQIFNGTVVQRHPTHAVTFVDNHDSQPEEALESFVEEWFKPLAYALTLTRDQGYPSVFYGDYYGIPTHGVPAMKSKIDPILEARQKYAYGTQRDYLDHPDVIGWTREGDGVHADSGLATLMSDGPGGSKWMEVGKNNAGEVWYDITGNQTNTVTINKDGWGQFHVSGGSVSIYVQQ

SEQ ID NO: 25299 - protein, 483 aa, Bacillus licheniformis
HHNGTNGTMMQYFEWYLPNDGNHWNRLRSDNSNLKDKGITAVWIPPAWKGASQNDVGYGAYDLYDLGEFNQKGTVRTKYGTRNQLQAAVTALKSNGIQVYGDVVMNHKGGADATEWVRAVEVNPSNRNQEVSGDYTIEAWTKFDFPGRGNTHSNFKWRWYHFDGVDWDQSRQLQNRIYKFRGKGWDWEVDTENGNYDYLMYADIDMDHPEVVNELRNWGVWYTNTLGLDGFRIDAVKHIKYSFTRDWLTHVRNTTGKNMFAVAEFWKNDIGAIENYLSKTNWNHSVFDVPLHYNLYNASRSGGNYDMRQIFNGTVVQRHPTHAVTFVDNHDSQPEEALESFVEEWFKPLAYALTLTRDQGYPSVFYGDYYGIPTHGVPAMKSKIDPILEARQKYAYGTQRDYLDHPDVIGWTREGDGVHADSGLATLMSDGPGGSKWMEVGKNNAGEVWYDITGNQTNTVTINKDGWGQFHVSGGSVSIYVQQ

SEQ ID NO: 25300 - protein, 483 aa, Bacillus licheniformis
HHNGTNGTMMQYFEWYLPNDGNHWNRLRSDAHNLKDKGITAVWIPPAWKGASQNDVGYGAYDLYDLGEFNQKGTVRTKYGTRNQLQAAVTALKSNGIQVYGDVVMNHKGGADATEWVRAVEVNPSNRNQEVSGDYTIEAWTKFDFPGRGNTHSNFKWRWYHFDGVDWDQSRQLQNRIYKFRGKGWDWEVDTENGNYDYLMYADIDMDHPEVVNELRNWGVWYTNTLGLDGFRIDAVKHIKYSFTRDWLTHVRNTTGKNMFAVAEFWKNDIGAIENYLSKTNWNHSVFDVPLHYNLYNASRSGGNYDMRQIFNGTVVQRHPTHAVTFVDNHDSQPEEALESFVEEWFKPLAYALTLTRDQGYPSVFYGDYYGIPTHGVPAMKSKIDPILEARQKYAYGTQRDYLDHPDVIGWTREGDGVHADSGLATLMSDGPGGSKWMEVGKNNAGEVWYDITGNQTNTVTINKDGWGQFHVSGGSVSIYVQQ

SEQ ID NO: 25301 - protein, 483 aa, Bacillus licheniformis
HHNGTNGTMMQYFEWYLPNDGNHWNRLRSDASNLKDKGITAVWIPPAWKGASQNDVGYGAYDLYDLGEFNQKGTVRTKYGTRNQLQAAVTALKSNGIQVYGDVVMNHKGGADATEWVRAVEVNPSNRNQEVSGDYTIEAWTKFDFPGRGNTHSNFKWRWYHFDGVDWDQSRQLQNRIYKFRGKGWDWEVDTENGNYDYLMYADIDMDHPEVVNELRNWGVWYTNTLGLDGFRIDAVKHIKYSMTRDWLTHVRNTTGKNMFAVAEFWKNDIGAIENYLSKTNWNHSVFDVPLHYNLYNASRSGGNYDMRQIFNGTVVQRHPTHAVTFVDNHDSQPEEALESFVEEWFKPLAYALTLTRDQGYPSVFYGDYYGIPTHGVPAMKSKIDPILEARQKYAYGTQRDYLDHPDVIGWTREGDGVHADSGLATLMSDGPGGSKWMEVGKNNAGEVWYDITGNQTNTVTINKDGWGQFHVSGGSVSIYVQQ

SEQ ID NO: 25302 - protein, 483 aa, Bacillus licheniformis
HHNGTNGTMMQYFEWYLPNDGNHWNRLRSDASNLKDKGITAVWIPPAWKGASQNDVGYGAYDLYDLGEFNQKGTVRTKYGTRNQLQAAVTALKSNGIQVYGDVVMNHKGGADATEWVRAVEVNPSNRNQEVSGDYTIEAWTKFDFPGRGNTHSNFKWRWYHFDGVDWDQSRQLQNRIYKFRGKGWDWEVDTENGNYDYLMYADIDMDHPEVVNELRNWGVWYTNTLGLDGFRIDAVKHIKYSFTRDWLTHVRNTTGKNMFAVAEFWKNDIGAIENYLSKTNWNHSVFDVPLHYNLYNASRSGGNYDMRQIFNGTVVQRHPTHAVTFVDNHDSQPEEALESFVEEWFKPLAYALTLTRDQGYPSVFYGDYYGIPTHGVPAMKSKIDPILEARQKYAYGTQRDYLDHPDVIGWTREGDGVHADSGLATLMSDGPGGSYWMEVGKNNAGEVWYDITGNQTNTVTINKDGWGQFHVSGGSVSIYVQQ

SEQ ID NO: 25303 - protein, 483 aa, Bacillus licheniformis
HHNGTNGTMMQYFEWYLPNDGNHWNRLRSDASNLKDKGITAVWIPPAWKGASQNDVGYGAYDLYDLGEFNQKGTVRTKYGTRNQLQAAVTALKSNGIQVYGDVVMNHKGGADATEWVRAVEVNPSNRNQEVSGDYTIEAWTKFDFPGRGNTHSNFKWRWYHFAGVDWDQSRQLQNRIYKFRGKGWDWEVDTENGNYDYLMYADIDMDHPEVVNELRNWGVWYTNTLGLDGFRIDAVKHIKYSFTRDWLTHVRNTTGKNMFAVAEFWKNDIGAIENYLSKTNWNHSVFDVPLHYNLYNASRSGGNYDMRQIFNGTVVQRHPTHAVTFVDNHDSQPEEALESFVEEWFKPLAYALTLTRDQGYPSVFYGDYYGIPTHGVPAMKSKIDPILEARQKYAYGTQRDYLDHPDVIGWTREGDGVHADSGLATLMSDGPGGSKWMEVGKNNAGEVWYDITGNQTNTVTINKDGWGQFHVSGGSVSIYVQQ

SEQ ID NO: 25304 - protein, 483 aa, Bacillus licheniformis
HHNGTNGTMMQYFEWYLPNDGNHWNRLRSDASNLKDKGITAVWIPPAWKGASQNDVGYGAYDLYDLGEFNQKGTVRTKYGTRNQLQAAVTALKSNGIQVYGDVVMNHKGGADATEWVRAVEVNPSNRNQEVSGDYTIEAWTKFDFPGRGNTHSNFKWRWYHFDGVDWDQSRQLQNRIYKFRGKGWDWEVDTENGNYDYLMYADIDMDHPEVVNELRNWGVWYTNTLGLDGFRIDAVKHIKYSFTRDWLTHVRNTTGKNMFAVAEFWKNDIGAIENYLSKTNWNHSVFDVPLHYNLYNASRSGGNYDMRQIFNGTVVQRHPTHAVTFVDNHDSQPEEALESFVEEWFKPLAYALTLTRDQGYPSVFYGDYYGIPTHGVPAMKSKIDPILEARQKYAYGTQRDYLDHPDVIGWTREGDGVHADSGLATLMSDGPGGSKWMEVGKGNAGEVWYDITGNQTNTVTINKDGWGQFHVSGGSVSIYVQQ

SEQ ID NO: 25305 - protein, 483 aa, Bacillus licheniformis
HHNGTNGTMMQYFEWYLPNDGNHWNRLRSDASNLKDKGITAVWIPPAWKGASQNDVGYGAYDLYDLGEFNQKGTVRTKYGTRNQLQAAVTALKSNGIQVYGDVVMNHKGGADATEWVRAVEVNPSNRNQEVSGDYTIEAWTKFDFPGRGNTHSNFKWRWYHFDGVDWDQSRQLQNRIYKFRGKGWDWEVDTENGNYDYLMYADIDMDHPEVVNELRNWGVWYTNTLGLDGFRIDAVKHIKYSFTRDWLTHVRNTTGKNMFAVAEFWKNDIGAIEDYLSKTNWNHSVFDVPLHYNLYNASRSGGNYDMRQIFNGTVVQRHPTHAVTFVDNHDSQPEEALESFVEEWFKPLAYALTLTRDQGYPSVFYGDYYGIPTHGVPAMKSKIDPILEARQKYAYGTQRDYLDHPDVIGWTREGDGVHADSGLATLMSDGPGGSKWMEVGKNNAGEVWYDITGNQTNTVTINKDGWGQFHVSGGSVSIYVQQ

SEQ ID NO: 25306 - protein, 483 aa, Bacillus licheniformis
HHNGTNGTMMQYFEWYLPNDGNHWNRLRSDASNLKDKGITAVWIPPAWKGASQNDVGYGAYDLYDLGEFNQKGTVRTKYGTRNQLQAAVTALKSNGIQVYGDVVMNHKGGADATEWVRAVEVNPSNRNQEVSGDYTIEAWTKFDFPGRGNTHSNFKWRWYHFDGVDWDQSRQLQNRIYKFRGKGWDWEVDTENGNYDYLMYADIDMDHPEVVNELRNWGVWYTNTLGLDGFRIDAVKHIKYSFTRDWLTHVRNTTGKNMFAVAEFWKNDICAIENYLSKTNWNHSVFDVPLHYNLYNASRSGGNYDMRQIFNGTVVQRHPTHAVTFVDNHDSQPEEALESFVEEWFKPLAYALTLTRDQGYPSVFYGDYYGIPTHGVPAMKSKIDPILEARQKYAYGTQRDYLDHPDVIGWTREGDGVHADSGLATLMSDGPGGSKWMEVGKNNAGEVWYDITGNQTNTVTINKDGWGQFHVSGGSVSIYVQQ

SEQ ID NO: 25307 - protein, 483 aa, Bacillus licheniformis
HHNGTNGTMMQYFEWYLPNDGNHWNRLRSDASNLKDKGITAVWIPPAWKGASQNDVGYGAYDLYDLGEFNQKGTVRTKYGTRNQLQAAVTALKSNGIQVYGDVVMNHKGGADATEWVRAVEVNPSNRNQEVSGDYTIEAWTKFDFPGRGNTHSNFKWRWYHFDGVDWDQSRQLQNRIYKFRGKGWDWEVDTENGNYDYLMYADIDMDHPEVVNELRNWGVWYTNTLGLDGFRIDAVKHIKYSFTRDWLTHVRNTTGKNMFAVAEFWKNDIGAIENYLSKTNWNHSVFDVPLHYNLYNASRSGGNYDMRQIFNGTVVQRHPTHAVTFVDNHDSQPEEALESFVEEWFKPLAYALTLTRDQGYPSVFYGDYYGIPTHGVPAMKSKIDPILEARQKYAYGTQRDYLDHPDVIGWTREGDGVHADSGLATLMSDGPGGSKWMEVGKNNAGEVWYDITGNQTNTVTINKDGWGQFHPSGGSVSIYVQQ

SEQ ID NO: 25308 - protein, 483 aa, Bacillus licheniformis
HHNGTNGTMMQYFEWYLPNDGNHWNRLRSDASNLKDKGITAVWIPPAWKGASQNDVGYGAYDLYDLGEFNQKGTVRTKYGTRNQLQAAVTALKSNGIQVYGDVVMNHKGGADATEWVRAVEVNPSNRNQEVSGDYTIEAWTKFDFPGRGNTHSNFKWRWYHFDGVDWDQSRQLQNRIYKFRGKGWDWEVDTENGNYDYLMYADIDMDHPEVVNELRNWGVWYTNTLGLDGFRIDAVKHIKYSFTRDWLTHVRNTTGKNMFAVAEFWKNDIGAIENYLSKTNWNHSVFDVPLHYNLYNASRSGGNYDHRQIFNGTVVQRHPTHAVTFVDNHDSQPEEALESFVEEWFKPLAYALTLTRDQGYPSVFYGDYYGIPTHGVPAMKSKIDPILEARQKYAYGTQRDYLDHPDVIGWTREGDGVHADSGLATLMSDGPGGSKWMEVGKNNAGEVWYDITGNQTNTVTINKDGWGQFHVSGGSVSIYVQQ

SEQ ID NO: 25309 - protein, 483 aa, Bacillus licheniformis
HHNGTNGTMMQYFEWYLPNDGNHWNRLRSDASNLKDKGITAVWIPPAWKGASQNDVGYGAYDLYDLGEFFQKGTVRTKYGTRNQLQAAVTALKSNGIQVYGDVVMNHKGGADATEWVRAVEVNPSNRNQEVSGDYTIEAWTKFDFPGRGNTHSNFKWRWYHFDGVDWDQSRQLQNRIYKFRGKGWDWEVDTENGNYDYLMYADIDMDHPEVVNELRNWGVWYTNTLGLDGFRIDAVKHIKYSFTRDWLTHVRNTTGKNMFAVAEFWKNDIGAIENYLSKTNWNHSVFDVPLHYNLYNASRSGGNYDMRQIFNGTVVQRHPTHAVTFVDNHDSQPEEALESFVEEWFKPLAYALTLTRDQGYPSVFYGDYYGIPTHGVPAMKSKIDPILEARQKYAYGTQRDYLDHPDVIGWTREGDGVHADSGLATLMSDGPGGSKWMEVGKNNAGEVWYDITGNQTNTVTINKDGWGQFHVSGGSVSIYVQQ

SEQ ID NO: 25310 - protein, 483 aa, Bacillus licheniformis
HHQGTNGTMMQYFEWYLPNDGNHWNRLRSDASNLKDKGITAVWIPPAWKGASQNDVGYGAYDLYDLGEFNQKGTVRTKYGTRNQLQAAVTALKSNGIQVYGDVVMNHKGGADATEWVRAVEVNPSNRNQEVSGDYTIEAWTKFDFPGRGNTHSNFKWRWYHFDGVDWDQSRQLQNRIYKFRGKGWDWEVDTENGNYDYLMYADIDMDHPEVVNELRNWGVWYTNTLGLDGFRIDAVKHIKYSFTRDWLTHVRNTTGKNMFAVAEFWKNDIGAIENYLSKTNWNHSVFDVPLHYNLYNASRSGGNYDMRQIFNGTVVQRHPTHAVTFVDNHDSQPEEALESFVEEWFKPLAYALTLTRDQGYPSVFYGDYYGIPTHGVPAMKSKIDPILEARQKYAYGTQRDYLDHPDVIGWTREGDGVHADSGLATLMSDGPGGSKWMEVGKNNAGEVWYDITGNQTNTVTINKDGWGQFHVSGGSVSIYVQQ

SEQ ID NO: 25311 - protein, 483 aa, Bacillus licheniformis
HHNGTNGTMMQYFEWYLPNDGNHWNRLRSDASNLKDKGITAVWIPPAWKGASQNDVGYGAYDLYDLGEFNQKGTVRTKYGTRNQLQAAVTALKSNGIQVYGDVVMNHKGGADATEWVRAVEVNPSNRNQEVSGDYMIEAWTKFDFPGRGNTHSNFKWRWYHFDGVDWDQSRQLQNRIYKFRGKGWDWEVDTENGNYDYLMYADIDMDHPEVVNELRNWGVWYTNTLGLDGFRIDAVKHIKYSFTRDWLTHVRNTTGKNMFAVAEFWKNDIGAIENYLSKTNWNHSVFDVPLHYNLYNASRSGGNYDMRQIFNGTVVQRHPTHAVTFVDNHDSQPEEALESFVEEWFKPLAYALTLTRDQGYPSVFYGDYYGIPTHGVPAMKSKIDPILEARQKYAYGTQRDYLDHPDVIGWTREGDGVHADSGLATLMSDGPGGSKWMEVGKNNAGEVWYDITGNQTNTVTINKDGWGQFHVSGGSVSIYVQQ

SEQ ID NO: 25312 - protein, 483 aa, Bacillus licheniformis
HHNGTNGTMMQYFEWYLPNDGNHWNRLRSDASNLKDKGITAVWIPPAWKGASQNDVGYGAYDLYDLGEFNQKGTVRTKYGTRNQLQAAVTALKSNGIQVYGDVVMNHKGGADATEWVRAVEVNPSNRNQEVSGVYTIEAWTKFDFPGRGNTHSNFKWRWYHFDGVDWDQSRQLQNRIYKFRGKGWDWEVDTENGNYDYLMYADIDMDHPEVVNELRNWGVWYTNTLGLDGFRIDAVKHIKYSFTRDWLTHVRNTTGKNMFAVAEFWKNDIGAIENYLSKTNWNHSVFDVPLHYNLYNASRSGGNYDMRQIFNGTVVQRHPTHAVTFVDNHDSQPEEALESFVEEWFKPLAYALTLTRDQGYPSVFYGDYYGIPTHGVPAMKSKIDPILEARQKYAYGTQRDYLDHPDVIGWTREGDGVHADSGLATLMSDGPGGSKWMEVGKNNAGEVWYDITGNQTNTVTINKDGWGQFHVSGGSVSIYVQQ

SEQ ID NO: 25313 - protein, 483 aa, Bacillus licheniformis
HHNGTNGTMMQYFEWYLPNDGNHWNRLRSDASNLKDKGITAVWIPPAWKGASQNDVGYGAYDLYDLGEFNQKGTVRTKYGTRNQLQAAVTALKSNGIQVYGDVVMNHKGGADATEWVRAVEVNPSNRNQEVSGDYCIEAWTKFDFPGRGNTHSNFKWRWYHFDGVDWDQSRQLQNRIYKFRGKGWDWEVDTENGNYDYLMYADIDMDHPEVVNELRNWGVWYTNTLGLDGFRIDAVKHIKYSFTRDWLTHVRNTTGKNMFAVAEFWKNDIGAIENYLSKTNWNHSVFDVPLHYNLYNASRSGGNYDMRQIFNGTVVQRHPTHAVTFVDNHDSQPEEALESFVEEWFKPLAYALTLTRDQGYPSVFYGDYYGIPTHGVPAMKSKIDPILEARQKYAYGTQRDYLDHPDVIGWTREGDGVHADSGLATLMSDGPGGSKWMEVGKNNAGEVWYDITGNQTNTVTINKDGWGQFHVSGGSVSIYVQQ

SEQ ID NO: 25314 - protein, 483 aa, Bacillus licheniformis
HHNGTNGTMMQYFEWYLPNDGNHWNRLRSDASNLKDKGITAVWIPPAWKGASQNDVGYGAYDLYDLGEFNQKGTWRTKYGTRNQLQAAVTALKSNGIQVYGDVVMNHKGGADATEWVRAVEVNPSNRNQEVSGDYTIEAWTKFDFPGRGNTHSNFKWRWYHFDGVDWDQSRQLQNRIYKFRGKGWDWEVDTENGNYDYLMYADIDMDHPEVVNELRNWGVWYTNTLGLDGFRIDAVKHIKYSFTRDWLTHVRNTTGKNMFAVAEFWKNDIGAIENYLSKTNWNHSVFDVPLHYNLYNASRSGGNYDMRQIFNGTVVQRHPTHAVTFVDNHDSQPEEALESFVEEWFKPLAYALTLTRDQGYPSVFYGDYYGIPTHGVPAMKSKIDPILEARQKYAYGTQRDYLDHPDVIGWTREGDGVHADSGLATLMSDGPGGSKWMEVGKNNAGEVWYDITGNQTNTVTINKDGWGQFHVSGGSVSIYVQQ

SEQ ID NO: 25315 - protein, 483 aa, Bacillus licheniformis
HHNGTNGTMMQYFEWYLPNDGNHWNRLRSDASNLKDKGITAVWIPPAWKGASQNDVGYGAYDLYDLGEFNQKGTVRTKYGTRNQLQAAVTALKSNGIQVYGDVVMNHKGGADATEWVRAVEVNPSNRNQEVSGDYTIEAWTKFDFPGRGNTHSNFKWRWYHFDGVDWDQSRQLQNRIYKFRGKGWDWEVDTENGNYDYLMYADIDMDHPEVVNELRNWGVWYTNTLGLDGFRIDAVKHIKYSFTRDWLTHVRNTTGKNMFAVAEFWKNDIGAIENYLSKTNWNHSVFDVPLHYNLYNASRSGGNYDMRQIFNGTVVQRHPTHAVTFVDNHDSQPEEALESFVEEWFKPLAYALTLTWDQGYPSVFYGDYYGIPTHGVPAMKSKIDPILEARQKYAYGTQRDYLDHPDVIGWTREGDGVHADSGLATLMSDGPGGSKWMEVGKNNAGEVWYDITGNQTNTVTINKDGWGQFHVSGGSVSIYVQQ

SEQ ID NO: 25316 - protein, 483 aa, Bacillus licheniformis
HHNGTNGTMMQYFEWYLPNDGNHWNRLRSDASNLKDKGITAVWIPPAWKGASQNDVGYGAYDLYDLGEFNQKGTVRTKYGTRNQLQAAVTALKSNGIQVYGDVVMNHKGGADATEWVRAVEVNPSNRMQEVSGDYTIEAWTKFDFPGRGNTHSNFKWRWYHFDGVDWDQSRQLQNRIYKFRGKGWDWEVDTENGNYDYLMYADIDMDHPEVVNELRNWGVWYTNTLGLDGFRIDAVKHIKYSFTRDWLTHVRNTTGKNMFAVAEFWKNDIGAIENYLSKTNWNHSVFDVPLHYNLYNASRSGGNYDMRQIFNGTVVQRHPTHAVTFVDNHDSQPEEALESFVEEWFKPLAYALTLTRDQGYPSVFYGDYYGIPTHGVPAMKSKIDPILEARQKYAYGTQRDYLDHPDVIGWTREGDGVHADSGLATLMSDGPGGSKWMEVGKNNAGEVWYDITGNQTNTVTINKDGWGQFHVSGGSVSIYVQQ

SEQ ID NO: 25317 - protein, 483 aa, Bacillus licheniformis
HHNGTNKTMMQYFEWYLPNDGNHWNRLRSDASNLKDKGITAVWIPPAWKGASQNDVGYGAYDLYDLGEFNQKGTVRTKYGTRNQLQAAVTALKSNGIQVYGDVVMNHKGGADATEWVRAVEVNPSNRNQEVSGDYTIEAWTKFDFPGRGNTHSNFKWRWYHFDGVDWDQSRQLQNRIYKFRGKGWDWEVDTENGNYDYLMYADIDMDHPEVVNELRNWGVWYTNTLGLDGFRIDAVKHIKYSFTRDWLTHVRNTTGKNMFAVAEFWKNDIGAIENYLSKTNWNHSVFDVPLHYNLYNASRSGGNYDMRQIFNGTVVQRHPTHAVTFVDNHDSQPEEALESFVEEWFKPLAYALTLTRDQGYPSVFYGDYYGIPTHGVPAMKSKIDPILEARQKYAYGTQRDYLDHPDVIGWTREGDGVHADSGLATLMSDGPGGSKWMEVGKNNAGEVWYDITGNQTNTVTINKDGWGQFHVSGGSVSIYVQQ

SEQ ID NO: 25318 - protein, 483 aa, Bacillus licheniformis
HHNGTNGTMMQYFEWYLPNDGNHWHRLRSDASNLKDKGITAVWIPPAWKGASQNDVGYGAYDLYDLGEFNQKGTVRTKYGTRNQLQAAVTALKSNGIQVYGDVVMNHKGGADATEWVRAVEVNPSNRNQEVSGDYTIEAWTKFDFPGRGNTHSNFKWRWYHFDGVDWDQSRQLQNRIYKFRGKEWDWEVDEENGNYDYLMYADYDMDHPEVVNELRNWGVWYTNTLGLDGFRIDAVKHIKYSFTRDWLTHVRNTTGKNMFAVAEFWKNDIGAIENYLSKTNWNHSVFDVPLHYNLYNASRSGGNYDMRQIFNGTVVQRHPTHAVTFVDNHDSQPEEALESFVEEWFKPLAYALTLTRDQGYPSVFYGDYYGIPTHGVPAMKSKIDPILEARQKYAYGTQRDYMDHPDVIGWTREGDGVHADSGLATLMSDGPGGSKWMEVGKNNAGEVWYDITGNQTNTVTINKDGWGQFHVSGGSVSIYVQQ

SEQ ID NO: 25319 - protein, 483 aa, Bacillus licheniformis
HHNGTNGTMMQYFEWYLPNDGNHWNRLNSDASNLKDKGITAVWIPPAWKGASQNDVGYGAYDLYDLGEFNQKGTVRTKYGTRNQLQAAVTALKSNGIQVYGDVVMNHKGGADATEWVRAVEVNPSNRNQEVSGDYTIEAWTKFDFPGRGNTHSNFKWRWYHFDGVDWDQSRQLQNRIYKFRGKGWDWEVDTENGNYDYLMYADIDMDHPEVVNELRNWGVWYTNTLGLDGFRIDAVKHIKYSFTRDWLTHVRNTTGKNMFAVAEFWKNDIGAIENYLSKTNWNHSVFDVPLHYNLYNASRSGGNYDMRQIFNGTVVQRHPTHAVTFVDNHDSQPEEALESFVEEWFKPLAYALTLTRDQGYPSVFYGDYYGIPTHGVPAMKSKIDPILEARQKYAYGTQRDYLDHPDVIGWTREGDGVHADSGLATLMSDGPGGSKWMEVGKNNAGEVWYDITGNQTNTVTINKDGWGQFHVSGGSVSIYVQQ

SEQ ID NO: 25320 - protein, 483 aa, Bacillus licheniformis
HHNGTNGTMMQYFEWYLPNDGNHWNRLRSDASNLKDKGITAVWIPPAWKGASQNDVGYGAYDLYDLGEFNQKGTVRTKYGTRNQLQAAVTALKSNGIQVYGDVVMNHKGGADATEWVRAVEVNPSNRNQEVSGDYTIEAWTKFDFPGRGNTHSNFKWRWYHFDGVDWDQSRQLQNRIYKFRGKGWDWEVDTENGNYDYLMYADIDMDHPEVVNELRNWGVWYTNTLGLDGFRIDAVKHIKYSFTRDWLTHVRNTTGKNMFAVAEFWKNDIGAIENYLSKTNWNHSVFDVPLHYNLYNASRSGGNYDLRQIFNGTVVQRHPTHAVTFVDNHDSQPEEALESFVEEWFKPLAYALTLTRDQGYPSVFYGDYYGIPTHGVPAMKSKIDPILEARQKYAYGTQRDYLDHPDVIGWTREGDGVHADSGLATLMSDGPGGSKWMEVGKNNAGEVWYDITGNQTNTVTINKDGWGQFHVSGGSVSIYVQQ

SEQ ID NO: 25321 - protein, 483 aa, Bacillus licheniformis
HHNGTNGTMMQYFEWYLPNDGNHWNRLRSDASNLKDKGITAVWIPPAWKGASQNDVGYGAYDLYDLGEFNQKGTVRTKYGTRNQLQAAVTALKSNGIQVYGDVVMNHKGGADATEWVRAVEVNPSNRNQEVSGDYTIEAWTKFDFPGRGNTHSNFKWRWYHFDGVDWDQSRQLQNRIYKFRGKGWDWEVDTENGNYDYLMYADIDMDHPEVVNELRNWGVWYTNTLGLDGFRIDAVKHIKYSFTRDWLTHVRNTTGKNMFAVAEFWKNDIGAIENYLSKTNWNHSVFDVPLHYNLYNASRSGGNYDMRQIFNGTVVQRHPTHAVTFVDNHDSQPEEALESFVEEWFKPLAYYLTLTRDQGYPSVFYGDYYGIPTHGVPAMKSKIDPILEARQKYAYGTQRDYLDHPDVIGWTREGDGVHADSGLATLMSDGPGGSKWMEVGKNNAGEVWYDITGNQTNTVTINKDGWGQFHVSGGSVSIYVQQ

SEQ ID NO: 25322 - protein, 483 aa, Bacillus licheniformis
HHNGTNGTMMQYFEWYLPNDGNHWNRLRSDASNLKDKGITAVWIPPAWKGASQNDVGYGAYDLYDLGEFNQKGTVRTKYGTRNQLQAAVTALKSNGIQVYGDVVMNHKGGADAHEWVRAVEVNPSNRNQEVSGDYTIEAWTKFDFPGRGNTHSNFKWRWYHFDGVDWDQSRQLQNRIYKFRGKGWDWEVDTENGNYDYLMYADIDMDHPEVVNELRNWGVWYTNTLGLDGFRIDAVKHIKYSFTRDWLTHVRNTTGKNMFAVAEFWKNDIGAIENYLSKTNWNHSVFDVPLHYNLYNASRSGGNYDMRQIFNGTVVQRHPTHAVTFVDNHDSQPEEALESFVEEWFKPLAYALTLTRDQGYPSVFYGDYYGIPTHGVPAMKSKIDPILEARQKYAYGTQRDYLDHPDVIGWTREGDGVHADSGLATLMSDGPGGSKWMEVGKNNAGEVWYDITGNQTNTVTINKDGWGQFHVSGGSVSIYVQQ

SEQ ID NO: 25323 - protein, 483 aa, Bacillus licheniformis
HHNGTNGTMMQYFEWYLPNDGNHWNRLRSDASNLKDKGITAVWIPPAWKGASQNDVGYGAYDLYDLGEFNQKGTVRTKYGTRNQLQAAVTALKSNGIQVYGDVVMNHKGGADATEWVRAVEVNPSNRNQEVSGDYTIEAWTKFDFPGRGNTHSNFKWRWYHFDGVDWDQSRQLQNRIYKFRGKGWDWEVDTENGNYDYLMYADIDMDHPEVVNELRNWGVWYTNTLGLDGFRIDAVKHIKYSFTRDWLTSVRNTTGKNMFAVAEFWKNDIGAIENYLSKTNWNHSVFDVPLHYNLYNASRSGGNYDMRQIFNGTVVQRHPTHAVTFVDNHDSQPEEALESFVEEWFKPLAYALTLTRDQGYPSVFYGDYYGIPTHGVPAMKSKIDPILEARQKYAYGTQRDYLDHPDVIGWTREGDGVHADSGLATLMSDGPGGSKWMEVGKNNAGEVWYDITGNQTNTVTINKDGWGQFHVSGGSVSIYVQQ

SEQ ID NO: 25324 - protein, 483 aa, Bacillus licheniformis
HHNGTNGTMMQYFEWYLPNDGNHWNRLRSDASNLKDKGITAVWIPPAWKGASQNDVGYGAYDLYDLGEFNQKGTVRTKYGTRNQLQAAVTALKSNGIQVYGDVVMNHKGGADATEWVRAVEVNPSNRNQEVSGDYTIEAWTKFDFPGRGNTHSNFKWRWYHFDGVDWDQSRQLQNRIYKFRGKGWDWEVDTENGNYDYLMYADIDMDHPEVVNELRNWGVWYTNTLGLDGFRIDAVKHIKYSFTRDWLTHVRNTTGKNMEAVAEFWKNDIGAIENYLSKTNWNHSVFDVPLHYNLYNASRSGGNYDMRQIFNGTVVQRHPTHAVTFVDNHDSQPEEALESFVEEWFKPLAYALTLTRDQGYPSVFYGDYYGIPTHGVPAMKSKIDPILEARQKYAYGTQRDYLDHPDVIGWTREGDGVHADSGLATLMSDGPGGSKWMEVGKNNAGEVWYDITGNQTNTVTINKDGWGQFHVSGGSVSIYVQQ

SEQ ID NO: 25325 - protein, 483 aa, Bacillus licheniformis
HHNGLNGTMMQYFEWYLPNDGNHWNRLRSDASNLKDKGITAVWIPPAWKGASQNDVGYGAYDLYDLGEFNQKGTVRTKYGTRNQLQAAVTALKSNGIQVYGDVVMNHKGGADATEWVRAVEVNPSNRNQEVSGDYTIEAWTKFDFPGRGNTHSNFKWRWYHFDGVDWDQSRQLQNRIYKFRGKGWDWEVDTENGNYDYLMYADIDMDHPEVVNELRNWGVWYTNTLGLDGFRIDAVKHIKYSFTRDWLTHVRNTTGKNMFAVAEFWKNDIGAIENYLSKTNWNHSVFDVPLHYNLYNASRSGGNYDMRQIFNGTVVQRHPTHAVTFVDNHDSQPEEALESFVEEWFKPLAYALTLTRDQGYPSVFYGDYYGIPTHGVPAMKSKIDPILEARQKYAYGTQRDYLDHPDVIGWTREGDGVHADSGLATLMSDGPGGSKWMEVGKNNAGEVWYDITGNQTNTVTINKDGWGQFHVSGGSVSIYVQQ

SEQ ID NO: 25326 - protein, 483 aa, Bacillus licheniformis
HHNGTNGTMMQYFEWYLPNDGNHWNRLRSDASNLKDKGITAVWIPPAWKGASQNDVGYGAYDLYDLGEFNQKGTVRTKYGTRNQLQAAVTALKSNGIQVYGDVVMNHKGGADATEWVRAVEVNPSNRNQEVSGDYTIEAWTCFDFPGRGNTHSNFKWRWYHFDGVDWDQSRQLQNRIYKFRGKGWDWEVDTENGNYDYLMYADIDMDHPEVVNELRNWGVWYTNTLGLDGFRIDAVKHIKYSFTRDWLTHVRNTTGKNMFAVAEFWKNDIGAIENYLSKTNWNHSVFDVPLHYNLYNASRSGGNYDMRQIFNGTVVQRHPTHAVTFVDNHDSQPEEALESFVEEWFKPLAYALTLTRDQGYPSVFYGDYYGIPTHGVPAMKSKIDPILEARQKYAYGTQRDYLDHPDVIGWTREGDGVHADSGLATLMSDGPGGSKWMEVGKNNAGEVWYDITGNQTNTVTINKDGWGQFHVSGGSVSIYVQQ

SEQ ID NO: 25327 - protein, 483 aa, Bacillus licheniformis
HHNGTNGTMMQYFEWYLPNDGNHWNRLRSDASNLKDKGITAVWIPPAWKGASQNDVGYGAYDLYDLGEFNQKGTVRTKYGTRNQLQAAVTALKSNGIQVYGDVVMNHKGGADATEWVRAVEVNPSNRNQEVSGDYTIEAWTKFDFPGRGNTHSNFKWRWYHFDGVDWDQSRQLQNRIYKFRGKGWDWEVDTENGNYDYLMYADIDMDHPEVVNELRNWGVWYTNTLGLDGFRIDAVKHIKYSFTRDWLTHVRNTTGKNMFAVAEFWKNDIGAIENYLSKTNWNHSVFDVPLHYNLYKASRSGGNYDMRQIFNGTVVQRHPTHAVTFVDNHDSQPEEALESFVEEWFKPLAYALTLTRDQGYPSVFYGDYYGIPTHGVPAMKSKIDPILEARQKYAYGTQRDYLDHPDVIGWTREGDGVHADSGLATLMSDGPGGSKWMEVGKNNAGEVWYDITGNQTNTVTINKDGWGQFHVSGGSVSIYVQQ

SEQ ID NO: 25328 - protein, 483 aa, Bacillus licheniformis
HHNGTNGTMMQYFEWYLPNDGNHWNRLRSDASNLKDKGITAVWIPPAWKGASQNDVGYGAYDLYDLGEFNQKGTVRTKYGTRNQLQAAVTALKSNGIQVYGDVVMNHKGGADATEWVRAVEVNPSNRNQEVSGDETIEAWTKFDFPGRGNTHSNFKWRWYHFDGVDWDQSRQLQNRIYKFRGKGWDWEVDTENGNYDYLMYADIDMDHPEVVNELRNWGVWYTNTLGLDGFRIDAVKHIKYSFTRDWLTHVRNTTGKNMFAVAEFWKNDIGAIENYLSKTNWNHSVFDVPLHYNLYNASRSGGNYDMRQIFNGTVVQRHPTHAVTFVDNHDSQPEEALESFVEEWFKPLAYALTLTRDQGYPSVFYGDYYGIPTHGVPAMKSKIDPILEARQKYAYGTQRDYLDHPDVIGWTREGDGVHADSGLATLMSDGPGGSKWMEVGKNNAGEVWYDITGNQTNTVTINKDGWGQFHVSGGSVSIYVQQ

SEQ ID NO: 25329 - protein, 483 aa, Bacillus licheniformis
HHNGTNGTMMQYFEWYLPNDGNHWNRLRSDASNLKDKGITAVWIPPAWKGASQNDVGYGAYDLYDLGEFNQKGTVRTKYGTRNQLQAAVTALKSNGIQVYGDVVMNHKGGADATEWVRAVEVNPSNRNQEVSGDYTIEAWTKFDFPGRGNTHSNFKWRWYHFDGVDWDQSRQLQNRIYKFRGKGWDWEVDTENGNYDYLMYADIDMDHPEVVNELRNWGVCYTNTLGLDGFRIDAVKHIKYSFTRDWLTHVRNTTGKNMFAVAEFWKNDIGAIENYLSKTNWNHSVFDVPLHYNLYNASRSGGNYDMRQIFNGTVVQRHPTHAVTFVDNHDSQPEEALESFVEEWFKPLAYALTLTRDQGYPSVFYGDYYGIPTHGVPAMKSKIDPILEARQKYAYGTQRDYLDHPDVIGWTREGDGVHADSGLATLMSDGPGGSKWMEVGKNNAGEVWYDITGNQTNTVTINKDGWGQFHVSGGSVSIYVQQ

SEQ ID NO: 25330 - protein, 483 aa, Bacillus licheniformis
HHNGTNGTMMQYFEWYLPNDGNHWNRLRSDASNLKDKGITAVWIPPAWKGASQNDVGYGAYDLYDLGEFNQKGTVRTKYGTRNQLQAAVTALKSNGIQVYGDVVMNHKGGADATEWVRAVEVNPSNRNQEVSGDYTIEAWTKFDFPGRGNTHSNFKWRWWHFDGVDWDQSRQLQNRIYKFRGKEWDWEVDEENGNYDYLMYADYDMDHPEVVNELRNWGVWYTNTLGLDGFRIDAVKHIKYSFTRDWLTHVRNTTGKNMFAVAEFWKNDIGAIENYLSKTNWNHSVFDVPLHYNLYNASRSGGNYDMRQIFNGTVVQRHPTHAVTFVDNHDSQPEEALESFVEEWFKPLAYALTLTRDQGYPSVFYGDYYGIPTHGVPAMKSKIDPILEARQKYAYGTQRDYLDHPDVIGWTREGDGVHADSGLATLMSDGPGGSKWMEVGKNNAGEVWYDITGNQTNTVTINKDGWGQFHVSGGSVSIYVQQ

SEQ ID NO: 25331 - protein, 483 aa, Bacillus licheniformis
HHNGTNGTMMQYFEWYLPNDGNHWNRLRSDASNLKDKGITAVWIPPAWKGASQNDVGYGAYDLYDLGEFNQKGTVRTKYGTRNQLQAAVTALKSNGIQVYGDVVMNHKGGADATEWVRAVEVNPSNRNQEVSGDYTIEAWTKFDFPGRGNTHSNFKWRWYHFDGVDWDQSRQLQNRIYKFRGKGWDWEVDTENGNYDYLMYADIDMDHPEVVNELRNWGVWYTNTLGLDGFRIDAVKHIKYSFTRDWLTHVRNTTGKNMFAVAEFWKNDIGAIENYLSKTNWNHSKFDVPLHYNLYNASRSGGNYDMRQIFNGTVVQRHPTHAVTFVDNHDSQPEEALESFVEEWFKPLAYALTLTRDQGYPSVFYGDYYGIPTHGVPAMKSKIDPILEARQKYAYGTQRDYLDHPDVIGWTREGDGVHADSGLATLMSDGPGGSKWMEVGKNNAGEVWYDITGNQTNTVTINKDGWGQFHVSGGSVSIYVQQ

SEQ ID NO: 25332 - protein, 483 aa, Bacillus licheniformis
HHNGTNGTMMQYFEWYLPNDGNHWNRLRSDASNLKDKGITAVWIPPAWKGASQNDVGYGAYDLYDLGEFNQKGTVRTKYGTRNQLQAAVTALQSNGIQVYGDVVMNHKGGADATEWVRAVEVNPSNRNQEVSGDYTIEAWTKFDFPGRGNTHSNFKWRWYHFDGVDWDQSRQLQNRIYKFRGKGWDWEVDTENGNYDYLMYADIDMDHPEVVNELRNWGVWYTNTLGLDGFRIDAVKHIKYSFTRDWLTHVRNTTGKNMFAVAEFWKNDIGAIENYLSKTNWNHSVFDVPLHYNLYNASRSGGNYDMRQIFNGTVVQRHPTHAVTFVDNHDSQPEEALESFVEEWFKPLAYALTLTRDQGYPSVFYGDYYGIPTHGVPAMKSKIDPILEARQKYAYGTQRDYLDHPDVIGWTREGDGVHADSGLATLMSDGPGGSKWMEVGKNNAGEVWYDITGNQTNTVTINKDGWGQFHVSGGSVSIYVQQ

SEQ ID NO: 25333 - protein, 483 aa, Bacillus licheniformis
HHNGTNGTMMQYFEWYLPNDGNHWNRLRSDASNLKDKGITAVWIPPAWKGASQNDVGYGAYDLYDLGEFNQKGTVRTKYGTRNQLQAAVTALKSNGIQVYGDVVMNHKGGADATEWVRAVEVNPSNRNQEVSGDYTIEAWTKFDFPGRGNTHSNFKWRWYHFDGVDWDQSRQLQNRIYKFRGKGWDWEVDTENGNYDYLMYADIDMDHPEVVNELRNWGVWYTNTLGLDGFRIDAVKHIKYSFTRDWLTHVRVTTGKNMFAVAEFWKNDIGAIENYLSKTNWNHSVFDVPLHYNLYNASRSGGNYDMRQIFNGTVVQRHPTHAVTFVDNHDSQPEEALESFVEEWFKPLAYALTLTRDQGYPSVFYGDYYGIPTHGVPAMKSKIDPILEARQKYAYGTQRDYLDHPDVIGWTREGDGVHADSGLATLMSDGPGGSKWMEVGKNNAGEVWYDITGNQTNTVTINKDGWGQFHVSGGSVSIYVQQ

SEQ ID NO: 25334 - protein, 483 aa, Bacillus licheniformis
HHNGTNGTMMQYFEWYLPNDGNHWNRLRSDASNLKDKGITAVWIPPAWKGASQNDVGYGAYDLYDLGEFNQKGTVRTKYGTRNQLQAAVTALKSNGIQVYGDVVMNHKGGADATEWVRAVEVNPSNRNQEVSGDYTIEAWTKFDFPGRGNTHSNFKWRWYHFDGVDWDQSRQLQNRIYKFRGKGWDWEVDTENGNYDYLMYADIDMDHPEVVNELRNWGVWYTNTLGLDGFRIDAVKHIKYSFTRDWLTHVRNTTGKNMFAVAEFWKNDIGAIENYLSKTNWNHSVFDVPLHYNLYNASRSGGNYDMRQIFNGTVVQRHPTHAVTFVDNHDSQPEEALESFVEEWFKPLAYALTLTRDQGYPSVFYGDYYGIPTHGVPAMKSKIDPILEARQKYAYGTQRDYLDHPDVIGWTREGDGVHADSGLATLMSDGPGGSKWMEVGKNNAGEVWYDITGNQTNTVTINKEGWGQFHVSGGSVSIYVQQ

SEQ ID NO: 25335 - protein, 483 aa, Bacillus licheniformis
HHNGTNGTMMQYFEWYLPNDGNHWNRLSSDASNLKDKGITAVWIPPAWKGASQNDVGYGAYDLYDLGEFNQKGTVRTKYGTRNQLQAAVTALKSNGIQVYGDVVMNHKGGADATEWVRAVEVNPSNRNQEVSGDYTIEAWTKFDFPGRGNTHSNFKWRWYHFDGVDWDQSRQLQNRIYKFRGKGWDWEVDTENGNYDYLMYADIDMDHPEVVNELRNWGVWYTNTLGLDGFRIDAVKHIKYSFTRDWLTHVRNTTGKNMFAVAEFWKNDIGAIENYLSKTNWNHSVFDVPLHYNLYNASRSGGNYDMRQIFNGTVVQRHPTHAVTFVDNHDSQPEEALESFVEEWFKPLAYALTLTRDQGYPSVFYGDYYGIPTHGVPAMKSKIDPILEARQKYAYGTQRDYLDHPDVIGWTREGDGVHADSGLATLMSDGPGGSKWMEVGKNNAGEVWYDITGNQTNTVTINKDGWGQFHVSGGSVSIYVQQ

SEQ ID NO: 25336 - protein, 483 aa, Bacillus licheniformis
HHNGTNGTMMQYFEWYLPNDGNHWNRLRSDASNLKDKGITAVWIPPAWKGASQNDVGYGAYDLYDLGEFNQKGTVRTKYGTRNQLQAAVTALKSNGIQVYGDVVMNHKGGADATEWVRAVEVNPSNRNQEVSGDYTIEAWTKFDFPGRGNTHSNFKWRWYHFDGVDWDQSRQLQNRIYKFRGKGWDWEVDTENGNYDYLMYADIDMDHPEVVNELRNWGVWYTNTLGLDGFRIDAVKHIKYSFTRDWLTHVRNTTGKNMFAVAEFWKNDIGAIENYLSKTNWNHSVFDVPLHYNLYNASRSGGNYDMRQIFNGTVVQRHPTHAVTFVDNHDSQPEEALESFVEEWFKPLAYALTLTRDQGYPSVFYGDYYGIPTHGVPAMKSKIDPILEARQKYAYGTQRDYLDHPDVIGWTREGDGVHADSGLATLMSDGPGGSKWMEVGKNNAGEVWYDITGTQTNTVTINKDGWGQFHVSGGSVSIYVQQ

SEQ ID NO: 25337 - protein, 483 aa, Bacillus licheniformis
HHNGTNGTMMQYFEWYLPNDGNHWNRLRSDASNLKDKGITAVWIPPAWKGASQNDVGYGAYDLYDLGEFNQKGTVRTKYGTRNQLQAAVTALKSNGIQVYGDVVMNHKGGADATEWVRAVEVNPSNRNQEVSGDYTIEAWTKFDFPGRGNTHSNFKWRWYHFQGVDWDQSRQLQNRIYKFRGKGWDWEVDTENGNYDYLMYADIDMDHPEVVNELRNWGVWYTNTLGLDGFRIDAVKHIKYSFTRDWLTHVRNTTGKNMFAVAEFWKNDIGAIENYLSKTNWNHSVFDVPLHYNLYNASRSGGNYDMRQIFNGTVVQRHPTHAVTFVDNHDSQPEEALESFVEEWFKPLAYALTLTRDQGYPSVFYGDYYGIPTHGVPAMKSKIDPILEARQKYAYGTQRDYLDHPDVIGWTREGDGVHADSGLATLMSDGPGGSKWMEVGKNNAGEVWYDITGNQTNTVTINKDGWGQFHVSGGSVSIYVQQ

SEQ ID NO: 25338 - protein, 483 aa, Bacillus licheniformis
HHNGTNGTMMQYFEWYLPNDGNHWNRLRSDASNLKDKGITAVWIPPAWKGASQNDVGYGAYDLYDLGEFNQKGTVRTKYGTRNQLQAAVTALKSNQIQVYGDVVMNHKGGADATEWVRAVEVNPSNRNQEVSGDYTIEAWTKFDFPGRGNTHSNFKWRWYHFDGVDWDQSRQLQNRIYKFRGKGWDWEVDTENGNYDYLMYADIDMDHPEVVNELRNWGVWYTNTLGLDGFRIDAVKHIKYSFTRDWLTHVRNTTGKNMFAVAEFWKNDIGAIENYLSKTNWNHSVFDVPLHYNLYNASRSGGNYDMRQIFNGTVVQRHPTHAVTFVDNHDSQPEEALESFVEEWFKPLAYALTLTRDQGYPSVFYGDYYGIPTHGVPAMKSKIDPILEARQKYAYGTQRDYLDHPDVIGWTREGDGVHADSGLATLMSDGPGGSKWMEVGKNNAGEVWYDITGNQTNTVTINKDGWGQFHVSGGSVSIYVQQ

SEQ ID NO: 25339 - protein, 483 aa, Bacillus licheniformis
HHNGTNGTMMQYFEWYLPNDGNHWNRLRSDASNLKDKGITAVWIPPAWKGASQNDVGYGAYDLYDLGEFNQKGTVRTKYGTRNQLQAAVTALKSNGIQVYGDVVMNHKGGADATEWVRAVEVNPSNRNQEVSGDYTIEAWTKFDFPGRGNTHSNFKWRWYHFDGVDWDQSRQLQNRIYKFRGKGWDWEVDTENGNYDYLMYADIDMDHPEVVNELRNWGVWYTNTLGLDGFRIDAVKHIKYSFTRDWLTHVRNTTGKNMFAVAEFWKNDIGAIENYLSKTNWNHSVFDVPLHYNKYNASRSGGNYDMRQIFNGTVVQRHPTHAVTFVDNHDSQPEEALESFVEEWFKPLAYALTLTRDQGYPSVFYGDYYGIPTHGVPAMKSKIDPILEARQKYAYGTQRDYLDHPDVIGWTREGDGVHADSGLATLMSDGPGGSKWMEVGKNNAGEVWYDITGNQTNTVTINKDGWGQFHVSGGSVSIYVQQ

SEQ ID NO: 25340 - protein, 483 aa, Bacillus licheniformis
HHNGTNGTMMQYFEWYLPNDGNHWKRLRSDASNLKDKGITAVWIPPAWKGASQNDVGYGAYDLYDLGEFNQKGTVRTKYGTRNQLQAAVTALKSNGIQVYGDVVMNHKGGADATEWVRAVEVNPSNRNQEVSGDYTIEAWTKFDFPGRGNTHSNFKWRWYHFDGVDWDQSRQLQNRIYKFRGKGWDWEVDTENGNYDYLMYADIDMDHPEVVNELRNWGVWYTNTLGLDGFRIDAVKHIKYSFTRDWLTHVRNTTGKNMFAVAEFWKNDIGAIENYLSKTNWNHSVFDVPLHYNLYNASRSGGNYDMRQIFNGTVVQRHPTHAVTFVDNHDSQPEEALESFVEEWFKPLAYALTLTRDQGYPSVFYGDYYGIPTHGVPAMKSKIDPILEARQKYAYGTQRDYLDHPDVIGWTREGDGVHADSGLATLMSDGPGGSKWMEVGKNNAGEVWYDITGNQTNTVTINKDGWGQFHVSGGSVSIYVQQ

SEQ ID NO: 25341 - protein, 483 aa, Bacillus licheniformis
HHNGTNGTMMQYFEWYLPNDGNHWNRLRSDASNLKDKGITAVWIPPAWKGASQNDVGYGAYDLYDLGEFNQKGTVRTKYGTRNQLQDAVTALKSNGIQVYGDVVMNHKGGADATEWVRAVEVNPSNRNQEVSGDYTIEAWTKFDFPGRGNTHSNFKWRWYHFDGVDWDQSRQLQNRIYKFRGKEWDWEVDTENGNYDYLMYADIDMDHPEVVNELRNWGVWYTNTLGLDGFRIDAVKHIKYSFTRDWLTHVRNTTGKNMFAVAEFWKNDIGAIENYLSKTNWNHSVFDVPLHYNLYNASRSGGNYDMRQIFEGTVVQRHPTHAVTFVDNHDSQPEEALESFVEEWFKPLAYALTLTRDQGYPSVFYGDYYGIPTHGVPAMKSKIDPILEARQKYAYGTQRDYLDHPDVIGWTREGDGVHADSGLATLMSDGPGGSKWMEVGKNNAGEVWYDITGNQTNTVTINKDGWGEFHVSGGSVSIYVQQ

SEQ ID NO: 25342 - protein, 483 aa, Bacillus licheniformis
HHNGTNGTMMQYFEWYLPNDGNHWNRLRSDASNLKDKGITAVWIPPAWKGASQNDVGYGAYDLYDLGEFNQKGTVRTKYGTRNQLQAAVTALKSNGIQVYGDVVMNHKGGADATEWVRAVEVNPSNRNQEVSGDYTIEAWTKFDFPGRGNTHSNFKWRWYHFDGVDWDQSRQLQNRIYKFRGKGWDWEVDTENGNYDYLMYADIDMDHPEVVNELRNWGVWYTNTLGLDGFRIDAVKHIKYSFTRDWLTHVRNTTGKNMFAVAEFWKNDIGAIENYLSKTNWNHSVFDVPLHYNLYNASRSGGNYDMRQIFNGTVVQRHPTHAVTFVDNHDSQPEEALESFVEEWFKPLAYALTLTRDQGYPSVFYGDYYGIPTHGVPAMKSKIDPILEARQKYAYGTQRDYLDHPDVIGWTREGDGVHADSGLATLMSDGPGGSKWMEVGKNNAGEVWYDITGNQTNTVLINKDGWGQFHVSGGSVSIYVQQ

SEQ ID NO: 25343 - protein, 483 aa, Bacillus licheniformis
HHNGTNGTMMQYFEWYLPTDGNHWNRLRSDASNLKDKGITAVWIPPAWKGASQNDVGYGAYDLYDLGEFNQKGTVRTKYGTRNQLQAAVTALKSNGIQVYGDVVMNHKGGADATEWVRAVEVNPSNRNQEVSGDYTIEAWTKFDFPGRGNTHSNFKWRWYHFDGVDWDQSRQLQNRIYKFRGKGWDWEVDTENGNYDYLMYADIDMDHPEVVNELRNWGVWYTNTLGLDGFRIDAVKHIKYSFTRDWLTHVRNTTGKNMFAVAEFWKNDIGAIENYLSKTNWNHSVFDVPLHYNLYNASRSGGNYDMRQIFNGTVVQRHPTHAVTFVDNHDSQPEEALESFVEEWFKPLAYALTLTRDQGYPSVFYGDYYGIPTHGVPAMKSKIDPILEARQKYAYGTQRDYLDHPDVIGWTREGDGVHADSGLATLMSDGPGGSKWMEVGKNNAGEVWYDITGNQTNTVTINKDGWGQFHVSGGSVSIYVQQ

SEQ ID NO: 25344 - protein, 483 aa, Bacillus licheniformis
HHNGTNGTMMQYFEWYLPNDGNHWNRLRSDASNLKDKGITAVWIPPAWKGASQNDVGYGAYDLYDLGEFNQKGTVRTKYGTRNQLQAAVTALKSNGIQVYGDVVMNHKGGADATEWVRAVEVNPSNRNQEVSGDYTIEAWTKFDFPGRGNTHSNFKWRWYHFDGVDWDQSRQLQNRIYKFRGKGWDWEVDTENGNYDYLMYADIDMDHPEVVNELRNWGVWYTNTLGLDGFRIDAVKHIKYSFTRDWLTHVRNTTGKNMFAVAEFWKNDIGAIENYLSKTNWNHSPFDVPLHYNLYNASRSGGNYDMRQIFNGTVVQRHPTHAVTFVDNHDSQPEEALESFVEEWFKPLAYALTLTRDQGYPSVFYGDYYGIPTHGVPAMKSKIDPILEARQKYAYGTQRDYLDHPDVIGWTREGDGVHADSGLATLMSDGPGGSKWMEVGKNNAGEVWYDITGNQTNTVTINKDGWGQFHVSGGSVSIYVQQ

SEQ ID NO: 25345 - protein, 483 aa, Bacillus licheniformis
HHNGTNGTMMQYFEWYLPNDGNHWNRLRSDASNLKDKGITAVWIPPAWKGASQNDVGYGAYDLYDLGEFNQKGTVRTKYGTRNQLQAAVTALKSNGIQVYGDVVMNHKGGADATEWVRAVEVNPSNRNQEVSGDYTIEAWTKFDFPGRGNTHSNFKWRWYHFDGVDWDQSRQLQNRIYKFRGKGWDWEVDTENGNYDYLMYADIDMDHPEVVNELRNWGVWYTNTLGLDGFCIDAVKHIKYSFTRDWLTHVRNTTGKNMFAVAEFWKNDIGAIENYLSKTNWNHSVFDVPLHYNLYNASRSGGNYDMRQIFNGTVVQRHPTHAVTFVDNHDSQPEEALESFVEEWFKPLAYALTLTRDQGYPSVFYGDYYGIPTHGVPAMKSKIDPILEARQKYAYGTQRDYLDHPDVIGWTREGDGVHADSGLATLMSDGPGGSKWMEVGKNNAGEVWYDITGNQTNTVTINKDGWGQFHVSGGSVSIYVQQ

SEQ ID NO: 25346 - protein, 483 aa, Bacillus licheniformis
HHNGTNGTMMQYFEWYLPNDGNHWNRLRSDASNLKDKGITAVWIPPAWKGASQNDVGYGAYDLYDLGEFNQKGTVRTKYGTRNQLQAAVTALKSNGIQVYGDVVMNHKGGADATEWVRAVEVNPSNRNQEVSGDYLIEAWTKFDFPGRGNTHSNFKWRWYHFDGVDWDQSRQLQNRIYKFRGKGWDWEVDTENGNYDYLMYADIDMDHPEVVNELRNWGVWYTNTLGLDGFRIDAVKHIKYSFTRDWLTHVRNTTGKNMFAVAEFWKNDIGAIENYLSKTNWNHSVFDVPLHYNLYNASRSGGNYDMRQIFNGTVVQRHPTHAVTFVDNHDSQPEEALESFVEEWFKPLAYALTLTRDQGYPSVFYGDYYGIPTHGVPAMKSKIDPILEARQKYAYGTQRDYLDHPDVIGWTREGDGVHADSGLATLMSDGPGGSKWMEVGKNNAGEVWYDITGNQTNTVTINKDGWGQFHVSGGSVSIYVQQ

SEQ ID NO: 25347 - protein, 483 aa, Bacillus licheniformis
HHNGTNGTMMQYFEWYLPNDGNHWNRLRSDASNLKDKGITAVWIPPAWKGASQNDVGYGAYDLYDLGEFNQKGTVRTKYGTRNQLQAAVTALKSNGIQVYGDVVMNHKGGADATEWVRAVEVNPSNRNQEVSHDYTIEAWTKFDFPGRGNTHSNFKWRWYHFDGVDWDQSRQLQNRIYKFRGKGWDWEVDTENGNYDYLMYADIDMDHPEVVNELRNWGVWYTNTLGLDGFRIDAVKHIKYSFTRDWLTHVRNTTGKNMFAVAEFWKNDIGAIENYLSKTNWNHSVFDVPLHYNLYNASRSGGNYDMRQIFNGTVVQRHPTHAVTFVDNHDSQPEEALESFVEEWFKPLAYALTLTRDQGYPSVFYGDYYGIPTHGVPAMKSKIDPILEARQKYAYGTQRDYLDHPDVIGWTREGDGVHADSGLATLMSDGPGGSKWMEVGKNNAGEVWYDITGNQTNTVTINKDGWGQFHVSGGSVSIYVQQ

SEQ ID NO: 25348 - protein, 483 aa, Bacillus licheniformis
HHNGTNGTMMQYFEWYLPNAGNHWNRLRSDASNLKDKGITAVWIPPAWKGASQNDVGYGAYDLYDLGEFNQKGTVRTKYGTRNQLQAAVTALKSNGIQVYGDVVMNHKGGADATEWVRAVEVNPSNRNQEVSGDYTIEAWTKFDFPGRGNTHSNFKWRWYHFDGVDWDQSRQLQNRIYKFRGKGWDWEVDTENGNYDYLMYADIDMDHPEVVNELRNWGVWYTNTLGLDGFRIDAVKHIKYSFTRDWLTHVRNTTGKNMFAVAEFWKNDIGAIENYLSKTNWNHSVFDVPLHYNLYNASRSGGNYDMRQIFNGTVVQRHPTHAVTFVDNHDSQPEEALESFVEEWFKPLAYALTLTRDQGYPSVFYGDYYGIPTHGVPAMKSKIDPILEARQKYAYGTQRDYLDHPDVIGWTREGDGVHADSGLATLMSDGPGGSKWMEVGKNNAGEVWYDITGNQTNTVTINKDGWGQFHVSGGSVSIYVQQ

SEQ ID NO: 25349 - protein, 483 aa, Bacillus licheniformis
HHNGTNGTMMQYFEWYLPNDGNHWNRLRSDASNLKDKGITAVWIPPAWKGASQNDVGYGAYDLYDLGEFNQKGTVRTKYGTRNQLQAAVTALKSNGIQVYGDVVMNHKGGADATEWVRAVEVNPSNRNQEVSGDYTIEAWTKFDFPGRGNTHSNFKWRWYHFDGVDWDQSRQLQNRIYKFRGKGWDWEVDTENGNYDYLMYADIDMDHQEVVNELRNWGVWYTNTLGLDGFRIDAVKHIKYSFTRDWLTHVRNTTGKNMFAVAEFWKNDIGAIENYLSKTNWNHSVFDVPLHYNLYNASRSGGNYDMRQIFNGTVVQRHPTHAVTFVDNHDSQPEEALESFVEEWFKPLAYALTLTRDQGYPSVFYGDYYGIPTHGVPAMKSKIDPILEARQKYAYGTQRDYLDHPDVIGWTREGDGVHADSGLATLMSDGPGGSKWMEVGKNNAGEVWYDITGNQTNTVTINKDGWGQFHVSGGSVSIYVQQ

SEQ ID NO: 25350 - protein, 483 aa, Bacillus licheniformis
HHNGTNGTMMQYFEWYLPNDGNHWNRLRSDASNLKDKGITAVWIPPAWKGASQNDVGYGAYDLYDLGEFNQKGTVRTKYGTRNQLQAAVTALKSNGIQVYGDVVMNHKGGADATEWVRAVEVNPSNRNQEVSGDYTIEAWTKFVFPGRGNTHSNFKWRWYHFDGVDWDQSRQLQNRIYKFRGKGWDWEVDTENGNYDYLMYADIDMDHPEVVNELRNWGVWYTNTLGLDGFRIDAVKHIKYSFTRDWLTHVRNTTGKNMFAVAEFWKNDIGAIENYLSKTNWNHSVFDVPLHYNLYNASRSGGNYDMRQIFNGTVVQRHPTHAVTFVDNHDSQPEEALESFVEEWFKPLAYALTLTRDQGYPSVFYGDYYGIPTHGVPAMKSKIDPILEARQKYAYGTQRDYLDHPDVIGWTREGDGVHADSGLATLMSDGPGGSKWMEVGKNNAGEVWYDITGNQTNTVTINKDGWGQFHVSGGSVSIYVQQ

SEQ ID NO: 25351 - protein, 483 aa, Bacillus licheniformis
HHNGTNGTMMQYFEWYLPNDGNHWNRLRSDASNLKDKGITAVWIPPAWKGASQNDVGYGAYDLYDLGEFNQKGTVRTKYGTRNQLQAAVTALKSNGIQVYGDVVMNHKGGADATEWVRAVEVNPSNRNQEVSGDYTIEAWTKFDFPGRGNTHSNFKWRWYHFDGVDWDQSRQLQNRIYKFRGKGWDWEVDTENGNYDYLMYADIDMDHPERVNELRNWGVWYTNTLGLDGFRIDAVKHIKYSFTRDWLTHVRNTTGKNMFAVAEFWKNDIGAIENYLSKTNWNHSVFDVPLHYNLYNASRSGGNYDMRQIFNGTVVQRHPTHAVTFVDNHDSQPEEALESFVEEWFKPLAYALTLTRDQGYPSVFYGDYYGIPTHGVPAMKSKIDPILEARQKYAYGTQRDYLDHPDVIGWTREGDGVHADSGLATLMSDGPGGSKWMEVGKNNAGEVWYDITGNQTNTVTINKDGWGQFHVSGGSVSIYVQQ

SEQ ID NO: 25352 - protein, 483 aa, Bacillus licheniformis
HHNGTNGTMMQYFEWYLPNDGNHWNRLRSDASNLKDKGITAVWIPPAWKGASQNDVGYGAYDLYDLGEFNQKGTVRTKYGTRNQLQAAVTALKSNGIQVYGDVVMNHKGGADATEWVRAVEVNPSNRNQEVSGDYTIEAWTKFDFPGRGNTHSNFKWRWYHFDGVDWDQSRQLQNRIYKFRGKGWDWEVDTENGNYDYLMYADIDMDHPEVVNELRNWGVWYTNTLGLDGFRIDAVKHIKYSFTRDWLTHVRNTTGKNMFAVAEFWKNDIGAIENYLSKTNWNHSVFDVPLHYNLYNASRSGGNYDMRQIFNGTVVQRHPTHAVTFVDNHDSQPEEALESFVEEWFKPLAYALTLTRDQGYPSVFYGDYYGIPTHGVPAMKSKIDPILEARQKYAYGTQRDYLDHPDVIGWTREGDGVHADSGLATLMSDGPGGSKWMEVGKNNAGEVWYDITGNQTNVVTINKDGWGQFHVSGGSVSIYVQQ

SEQ ID NO: 25353 - protein, 483 aa, Bacillus licheniformis
HHNGTNGTMMQYFEWYLPNDGNHWNRLRSDASNLKDKGITAVWIPPAWKGASQNDVGYGAYDLYDLGEFNQKGTVRTKYGTRNQLQAAVTALKSNGIQVYGDVVMNHKGGADATEWVRAVEVNPSNRNQEVSGDWTIEAWTKFDFPGRGNTHSNFKWRWYHFDGVDWDQSRQLQNRIYKFRGKGWDWEVDTENGNYDYLMYADIDMDHPEVVNELRNWGVWYTNTLGLDGFRIDAVKHIKYSFTRDWLTHVRNTTGKNMFAVAEFWKNDIGAIENYLSKTNWNHSVFDVPLHYNLYNASRSGGNYDMRQIFNGTVVQRHPTHAVTFVDNHDSQPEEALESFVEEWFKPLAYALTLTRDQGYPSVFYGDYYGIPTHGVPAMKSKIDPILEARQKYAYGTQRDYLDHPDVIGWTREGDGVHADSGLATLMSDGPGGSKWMEVGKNNAGEVWYDITGNQTNTVTINKDGWGQFHVSGGSVSIYVQQ

SEQ ID NO: 25354 - protein, 483 aa, Bacillus licheniformis
HHNGTNGTMMQYFEWYLPNDGNHWNRLRSDASNLKDKGISAVWIPPAWKGASQNDVGYGAYDLYDLGEFNQKGTVRTKYGTRNQLQAAVTALKSNGIQVYGDVVMNHKGGADATEWVRAVEVNPSNRNQEVSGDYTIEAWTKFDFPGRGNTHSNFKWRWYHFDGVDWDQSRQLQNRIYKFRGKGWDWEVDTENGNYDYLMYADIDMDHPEVVNELRNWGVWYTNTLGLDGFRIDAVKHIKYSFTRDWLTHVRNTTGKNMFAVAEFWKNDIGAIENYLSKTNWNHSVFDVPLHYNLYNASRSGGNYDMRQIFNGTVVQRHPTHAVTFVDNHDSQPEEALESFVEEWFKPLAYALTLTRDQGYPSVFYGDYYGIPTHGVPAMKSKIDPILEARQKYAYGTQRDYLDHPDVIGWTREGDGVHADSGLATLMSDGPGGSKWMEVGKNNAGEVWYDITGNQTNTVTINKDGWGQFHVSGGSVSIYVQQ

SEQ ID NO: 25355 - protein, 483 aa, Bacillus licheniformis
HHNGTNGTMMQYFEWYLPNDGNHWNRLRSDASNLKDKGITAVWIPPAWKGASQNDVGYGAYDLYDLGEFNQKGTVRTKYGTRNQLQAAVTALKSNGIQVYGDVVMNHKGGADATEWVRAVEVNPSNRNQEVSGDYTIEAWTKFNFPGRGNTHSNFKWRWYHFDGVDWDQSRQLQNRIYKFRGKGWDWEVDTENGNYDYLMYADIDMDHPEVVNELRNWGVWYTNTLGLDGFRIDAVKHIKYSFTRDWLTHVRNTTGKNMFAVAEFWKNDIGAIENYLSKTNWNHSVFDVPLHYNLYNASRSGGNYDMRQIFNGTVVQRHPTHAVTFVDNHDSQPEEALESFVEEWFKPLAYALTLTRDQGYPSVFYGDYYGIPTHGVPAMKSKIDPILEARQKYAYGTQRDYLDHPDVIGWTREGDGVHADSGLATLMSDGPGGSKWMEVGKNNAGEVWYDITGNQTNTVTINKDGWGQFHVSGGSVSIYVQQ

SEQ ID NO: 25356 - protein, 483 aa, Bacillus licheniformis
HHNGTNGTMMQYFEWYLPNSGNHWNRLRSDASNLKDKGITAVWIPPAWKGASQNDVGYGAYDLYDLGEFNQKGTVRTKYGTRNQLQAAVTALKSNGIQVYGDVVMNHKGGADATEWVRAVEVNPSNRNQEVSGDYTIEAWTKFDFPGRGNTHSNFKWRWYHFDGVDWDQSRQLQNRIYKFRGKGWDWEVDTENGNYDYLMYADIDMDHPEVVNELRNWGVWYTNTLGLDGFRIDAVKHIKYSFTRDWLTHVRNTTGKNMFAVAEFWKNDIGAIENYLSKTNWNHSVFDVPLHYNLYNASRSGGNYDMRQIFNGTVVQRHPTHAVTFVDNHDSQPEEALESFVEEWFKPLAYALTLTRDQGYPSVFYGDYYGIPTHGVPAMKSKIDPILEARQKYAYGTQRDYLDHPDVIGWTREGDGVHADSGLATLMSDGPGGSKWMEVGKNNAGEVWYDITGNQTNTVTINKDGWGQFHVSGGSVSIYVQQ

SEQ ID NO: 25357 - protein, 483 aa, Bacillus licheniformis
HHNGTNGTMMQYFEWYLPNDGNHWNRLRSDASNLKDKGITAVWIPPSWKGASQNDVGYGAYDLYDLGEFNQKGTVRTKYGTRNQLQAAVTALKSNGIQVYGDVVMNHKGGADATEWVRAVEVNPSNRNQEVSGDYTIEAWTKFDFPGRGNTHSNFKWRWYHFDGVDWDQSRQLQNRIYKFRGKGWDWEVDTENGNYDYLMYADIDMDHPEVVNELRNWGVWYTNTLGLDGFRIDAVKHIKYSFTRDWLTHVRNTTGKNMFAVAEFWKNDIGAIENYLSKTNWNHSVFDVPLHYNLYNASRSGGNYDMRQIFNGTVVQRHPTHAVTFVDNHDSQPEEALESFVEEWFKPLAYALTLTRDQGYPSVFYGDYYGIPTHGVPAMKSKIDPILEARQKYAYGTQRDYLDHPDVIGWTREGDGVHADSGLATLMSDGPGGSKWMEVGKNNAGEVWYDITGNQTNTVTINKDGWGQFHVSGGSVSIYVQQ

SEQ ID NO: 25358 - protein, 483 aa, Bacillus licheniformis
HHNGTNGTMMQYFEWYLPNDGNHWNRLRSDASNLKDKGITAVWIPPAWKGASQNDVGYGAYDLYDLGEFNQKGTVRTKYGTRNQLQAAVTALKSNGIQVYGDVVMNHKGGADATEWVRAVEVNPSNRNQEVSGDYTIEAWTKFDFPGRGNTHSNFKWRWYHFDGVDWDQSRQLQNRIYKFRGKGWDWEVDTENGNYDYLMYADIDMDHPEVVNELRNWGVWYTNTLGLDGFRIDAVKHIKYSFTRDWLTHVRNTTGKNMFAVAEFWKNDIGAIENYLSKTNWNHSVFDVPLHYNLYNASRSGGNYDMRQIFNGTVVQRHPTHAVTFVDNHDSQPEEALESFVEEWFKPLAYALTLTRDQGYPSVFYGDYYGIPTHGVPAMKSKIDPILEARQKYAYGTQRDYLDHPDVIGWTREGDGVHADSGLATLMSDGPGGSKWMEVGKNNAGEVWYDITGVQTNTVTINKDGWGQFHVSGGSVSIYVQQ

SEQ ID NO: 25359 - protein, 483 aa, Bacillus licheniformis
HHNGTNGTMMQYFEWYLPNDGNHWNRLRSDASNLKDKGITAVWIPPAWKGASQNDVGYGAYDLYDLGEFNQKGTVRTKYGTRNQLQAAVTALKSNGIQVYGDVVMNHKGGADATEWVRAYEVNPSNRNQEVSGDYTIEAWTKFDFPGRGNTHSNFKWRWYHFDGVDWDQSRQLQNRIYKFRGKGWDWEVDTENGNYDYLMYADIDMDHPEVVNELRNWGVWYTNTLGLDGFRIDAVKHIKYSFTRDWLTHVRNTTGKNMFAVAEFWKNDIGAIENYLSKTNWNHSVFDVPLHYNLYNASRSGGNYDMRQIFNGTVVQRHPTHAVTFVDNHDSQPEEALESFVEEWFKPLAYALTLTRDQGYPSVFYGDYYGIPTHGVPAMKSKIDPILEARQKYAYGTQRDYLDHPDVIGWTREGDGVHADSGLATLMSDGPGGSKWMEVGKNNAGEVWYDITGNQTNTVTINKDGWGQFHVSGGSVSIYVQQ

SEQ ID NO: 25360 - protein, 483 aa, Bacillus licheniformis
HHNGTNGTMMQYFEWYLPNDGNHWNRLRSDASNLKDKGITAVWIPPAWKGASQNDVGYGAYDLYDLGEFNQKGTVRTKYGTRNQLQAAVTALKSNGIQVYGDVVMNHKGGADATEWVRAVEVNPSNRNQEVSGDYTIEAWTKFDFPGRGNTHSNFKWRWYHFDGVDWDQSRQLQNRIYKFRGKGWDWEVDTENGNYDYLMYADIDMDHPEVVNELRNWGVWYTNTLGLDGFRIDAVKHIKYSFTRDWLTHVRNTTGKNMFAVAEFWKNDIGAIENYLSKTNWNHSVFDVPLHYNLYNASRSGGNYDMRQIFNGTVVQRHPTHAVTFVDNHDSQPEEALESFVEEWFKPLAYALTLTRDQGYPSVFYGDYYGIPTHGVPAMKSKIDPILEARQKYAYGTQRDYLDHPDVIGWTREGDGVHADSGLATLMSDGPGGSKWMEVGKSNAGEVWYDITGNQTNTVTINKDGWGQFHVSGGSVSIYVQQ

SEQ ID NO: 25361 - protein, 483 aa, Bacillus licheniformis
HHNGTNGTMMQYFEWYLPNDGNHWNRLRSDASNLKDKGITAVWIPPAWKGASQNDVGYGAYDLYDLGEFNQKGTVRTKYGTRNQLQAAVTALKSNGIQVYGDVVMNHKGGADATEWVRAVEVNPSNRNQEVSGDYTIEAWTKFDFPGRGNTHSNFKWRWYHFDGVDWDQSRQLQNRIYKFRGKGWDWEVDTENGNYDYLMYADIDMDHPEVVNELRNWGVWYTNTLGLDGFRIDAVKHIKYSFTRDWLTHVRNTTGKNMFAVAEFWKNDIGAIENYLSKTNWNHSVFDVPLHYLLYNASRSGGNYDMRQIFNGTVVQRHPTHAVTFVDNHDSQPEEALESFVEEWFKPLAYALTLTRDQGYPSVFYGDYYGIPTHGVPAMKSKIDPILEARQKYAYGTQRDYLDHPDVIGWTREGDGVHADSGLATLMSDGPGGSKWMEVGKNNAGEVWYDITGNQTNTVTINKDGWGQFHVSGGSVSIYVQQ

SEQ ID NO: 25362 - protein, 483 aa, Bacillus licheniformis
HHNGTNGTMMQYFEWYLPNDGNHWNRLRSDASNLKDKGITAVWIPPAWKGASQNDVGYGAYDLYDLGEFNQKGTVRTKYGTRNQLQAAVTALKSNGIQVYGDVVMNHKGGADATMWVRAVEVNPSNRNQEVSGDYTIEAWTKFDFPGRGNTHSNFKWRWYHFDGVDWDQSRQLQNRIYKFRGKGWDWEVDTENGNYDYLMYADIDMDHPEVVNELRNWGVWYTNTLGLDGFRIDAVKHIKYSFTRDWLTHVRNTTGKNMFAVAEFWKNDIGAIENYLSKTNWNHSVFDVPLHYNLYNASRSGGNYDMRQIFNGTVVQRHPTHAVTFVDNHDSQPEEALESFVEEWFKPLAYALTLTRDQGYPSVFYGDYYGIPTHGVPAMKSKIDPILEARQKYAYGTQRDYLDHPDVIGWTREGDGVHADSGLATLMSDGPGGSKWMEVGKNNAGEVWYDITGNQTNTVTINKDGWGQFHVSGGSVSIYVQQ

SEQ ID NO: 25363 - protein, 483 aa, Bacillus licheniformis
HHNGTNGTMMQYFEWYLPNDGNHWNRLRSDASNLKDKGITAVWIPPAWKGASQNDVGYGAYDLYDLGEFNQKGTVRTKYGTRNQLQAAVTALKSNGIQVYGDVVMNHKGGADATEWVRAVEVNPSNRNQEVSGDYTIEAWTKFDFPGRGNTHSNFKWRWYHFDGVDWDQSRQLQNRIYKFRGKGWDWEVDTENGNYDYLMYADIDMDHPEVVNELRNWGVWYTNTLGLDGFRIDAVKHIKYSFTRDWLTHVRNTTGKNMFAVAEFWKNDIDAIENYLSKTNWNHSVFDVPLHYNLYNASRSGGNYDMRQIFNGTVVQRHPTHAVTFVDNHDSQPEEALESFVEEWFKPLAYALTLTRDQGYPSVFYGDYYGIPTHGVPAMKSKIDPILEARQKYAYGTQRDYLDHPDVIGWTREGDGVHADSGLATLMSDGPGGSKWMEVGKNNAGEVWYDITGNQTNTVTINKDGWGQFHVSGGSVSIYVQQ

SEQ ID NO: 25364 - protein, 483 aa, Bacillus licheniformis
HHNGTNGTMMQYFEWYLPNDGNHWNRLRSDASNLKDKGITAVWIPPAWKGASQNDVGYGAYDLYDLGEFNQKGTVRTKYGTRNQLQAAVTALKSNGIQVYGDVVMNHKGGADATEWVRAVEVNPSNRNQEVSGDYTIEAWTKFDFGGRGNTHSNFKWRWYHFDGVDWDQSRQLQNRIYKFRGKGWDWEVDTENGNYDYLMYADIDMDHPEVVNELRNWGVWYTNTLGLDGFRIDAVKHIKYSFTRDWLTHVRNTTGKNMFAVAEFWKNDIGAIENYLSKTNWNHSVFDVPLHYNLYNASRSGGNYDMRQIFNGTVVQRHPTHAVTFVDNHDSQPEEALESFVEEWFKPLAYALTLTRDQGYPSVFYGDYYGIPTHGVPAMKSKIDPILEARQKYAYGTQRDYLDHPDVIGWTREGDGVHADSGLATLMSDGPGGSKWMEVGKNNAGEVWYDITGNQTNTVTINKDGWGQFHVSGGSVSIYVQQ

SEQ ID NO: 25365 - protein, 483 aa, Bacillus licheniformis
HHNGTNGTMMQYFEWYLPNDGNHWNRLRSDASNLKDKGITAVWIPPAWKGASQNDVGYGAYDLYDLGEFNQKGTVRTKYGTRNQLQAAVTILKSNGIQVYGDVVMNHKGGADATEWVRAVEVNPSNRNQEVSGDYTIEAWTKFDFPGRGNTHSNFKWRWYHFDGVDWDQSRQLQNRIYKFRGKGWDWEVDTENGNYDYLMYADIDMDHPEVVNELRNWGVWYTNTLGLDGFRIDAVKHIKYSFTRDWLTHVRNTTGKNMFAVAEFWKNDIGAIENYLSKTNWNHSVFDVPLHYNLYNASRSGGNYDMRQIFNGTVVQRHPTHAVTFVDNHDSQPEEALESFVEEWFKPLAYALTLTRDQGYPSVFYGDYYGIPTHGVPAMKSKIDPILEARQKYAYGTQRDYLDHPDVIGWTREGDGVHADSGLATLMSDGPGGSKWMEVGKNNAGEVWYDITGNQTNTVTINKDGWGQFHVSGGSVSIYVQQ

SEQ ID NO: 25366 - protein, 483 aa, Bacillus licheniformis
HHNGTNGTMMQYFEWYLPNDGNHWNRLRSDASNLKDKGITAVWIPPAWKGASQNDVGYGAYDLYDLGEFNQKGTVRTKYGTRNQLQAAVTALKSNGIQVYGDVVMNHKGGADATEWVRAVEVNPSNRNQEVSGDYTIEAWTKFDFPGRGNTHSNFKWRWYHFDGVDWDQSRQLQNRIYKFRGKGWDWEVDTENGNYDYLMYADIDMDHPEVVNELRNWGVWYTNTLGLDGFRIDAVKHIKYSFTRDWLTHVRNTTGKNMFAVAEFWKNDIGAIENYLSKTNWNHSVFDVPLHYNLYNASRSGGNYDMRQIFNGTVVQRHPTHAVTFVDNHDSQPEEALESFVEEWFKPLAYALTLTRDQGYPSVFYGDYYGIPTHGVPAMKSKIDPILKARQKYAYGTQRDYLDHPDVIGWTREGDGVHADSGLATLMSDGPGGSKWMEVGKNNAGEVWYDITGNQTNTVTINKDGWGQFHVSGGSVSIYVQQ

SEQ ID NO: 25367 - protein, 483 aa, Bacillus licheniformis
HHNGTNGTMMQYFEWYLPNYGNHWNRLRSDASNLKDKGITAVWIPPAWKGASQNDVGYGAYDLYDLGEFNQKGTVRTKYGTRNQLQAAVTALKSNGIQVYGDVVMNHKGGADATEWVRAVEVNPSNRNQEVSGDYTIEAWTKFDFPGRGNTHSNFKWRWYHFDGVDWDQSRQLQNRIYKFRGKGWDWEVDTENGNYDYLMYADIDMDHPEVVNELRNWGVWYTNTLGLDGFRIDAVKHIKYSFTRDWLTHVRNTTGKNMFAVAEFWKNDIGAIENYLSKTNWNHSVFDVPLHYNLYNASRSGGNYDMRQIFNGTVVQRHPTHAVTFVDNHDSQPEEALESFVEEWFKPLAYALTLTRDQGYPSVFYGDYYGIPTHGVPAMKSKIDPILEARQKYAYGTQRDYLDHPDVIGWTREGDGVHADSGLATLMSDGPGGSKWMEVGKNNAGEVWYDITGNQTNTVTINKDGWGQFHVSGGSVSIYVQQ

SEQ ID NO: 25368 - protein, 483 aa, Bacillus licheniformis
HHNGTNGTMMQYFEWYLPNDGNHWNRLRSDASNLKDKGITAVWIPPAWKGASQNDVGYGAYDLYDLGEFNQKGTVRTKYGTRNQLQAAVTALKSNGIQVYGDVVMNHKGGADATEWVRAVEVNPSNRNQEVSGDYTIEAWTKFDFPGRGNTHSNFKWRWYHFDGVDWDQSRQLQNRIYKFRGKGWDWEVDTENGNYDYLMYADIDMDHPEVVNELRNWGVWYTNTLGLDGFRIDAVKHIKYSFTRDWLTHVRNTTGKNMFAVAEFWKNDIGAIENYLSKTNWNHSVFDVPLHYYLYNASRSGGNYDMRQIFNGTVVQRHPTHAVTFVDNHDSQPEEALESFVEEWFKPLAYALTLTRDQGYPSVFYGDYYGIPTHGVPAMKSKIDPILEARQKYAYGTQRDYLDHPDVIGWTREGDGVHADSGLATLMSDGPGGSKWMEVGKNNAGEVWYDITGNQTNTVTINKDGWGQFHVSGGSVSIYVQQ

SEQ ID NO: 25369 - protein, 483 aa, Bacillus licheniformis
HHNGTNGTMMQYFEWYLPNDGNHWNRLRSDASNLKDKGITAVWIPPAWKGASQNDVGYGAYDLYDLGEFNQKGTVRTKYGTRNQLQAAVTALKSNGIQVYGDVVMNHKGGADATEWVRAVEVNPSNRNQEVSGDYTIEAWTKFDFPGRGNTHSNFKWRWYHFDGVDWDQSRQLQNRIYKFRGKGWDWEVDTENGNYDYLMYADIDMDHPEVVNELRNWGVWYTNTLGLDGFRIDAVKHIKYSFTRDWLTHVRNTTGKNMFAVAEFWKNDIGAIENYLSKTNWNHSVFDVPLHYNLYNASRSGGNYDMRQIFNGTVVQRHPTHAVTFVDNHDSQPEEALESFVEEWFKPLAYALTLTRDQGYPSVFYGDYYGIPTHGVPAMKSKIDPILEARQKYAYGTQRDYLDHPDVIGWTREGDGVHADSGLATLMSDGPGGSKWMEVGKTNAGEVWYDITGNQTNTVTINKDGWGQFHVSGGSVSIYVQQ

SEQ ID NO: 25370 - protein, 483 aa, Bacillus licheniformis
HHNGTNGTMMQYFEWYLPNDGNHWNRLRSDASNLKDKGITAVWIPPAWKGASQNDVGYGAYDLYDLGEFNQKGTVRTKYGTRNQLQAAVTALKSNGIQVYGDVVMNHKGGADATEWVRAVEVNPSNRNQEVSGDYTIEAWTKFDFPGRGNTHSNFKWRWYHFDGVDWDQSRQLQNTIYKFRGKGWDWEVDTENGNYDYLMYADIDMDHPEVVNELRNWGVWYTNTLGLDGFRIDAVKHIKYSFTRDWLTHVRNTTGKNMFAVAEFWKNDIGAIENYLSKTNWNHSVFDVPLHYNLYNASRSGGNYDMRQIFNGTVVQRHPTHAVTFVDNHDSQPEEALESFVEEWFKPLAYALTLTRDQGYPSVFYGDYYGIPTHGVPAMKSKIDPILEARQKYAYGTQRDYLDHPDVIGWTREGDGVHADSGLATLMSDGPGGSKWMEVGKNNAGEVWYDITGNQTNTVTINKDGWGQFHVSGGSVSIYVQQ

SEQ ID NO: 25371 - protein, 483 aa, Bacillus licheniformis
HHNGTNGTMMQYFEWYLPNDGNHWNRLRSDASNLKDKGITAVWIPPAWKGASQNDVGYGAYDLYDLGEFNQKGTVRTKYGTRNQLQAAVTALKSNGIQVFGDVVMNHKGGADATEWVRAVEVNPSNRNQEVSGDYTIEAWTKFDFPGRGNTHSNFKWRWYHFDGVDWDQSRQLQNRIYKFRGKGWDWEVDTENGNYDYLMYADIDMDHPEVVNELRNWGVWYTNTLGLDGFRIDAVKHIKYSFTRDWLTHVRNTTGKNMFAVAEFWKNDIGAIENYLSKTNWNHSVFDVPLHYNLYNASRSGGNYDMRQIFNGTVVQRHPTHAVTFVDNHDSQPEEALESFVEEWFKPLAYALTLTRDQGYPSVFYGDYYGIPTHGVPAMKSKIDPILEARQKYAYGTQRDYLDHPDVIGWTREGDGVHADSGLATLMSDGPGGSKWMEVGKNNAGEVWYDITGNQTNTVTINKDGWGQFHVSGGSVSIYVQQ

SEQ ID NO: 25372 - protein, 483 aa, Bacillus licheniformis
HHNGTNGTMMQYFEWYLPNDGNHWNRLRSDASNLKDKGITAVWIPPAWKGASQNDVGYGAYDLYDLGEFNQKGTVRTKYGTRNQLQAAVTALKSNGIQVYGDVVMNHKGGADATEWVRAVEVNPSNRNQEVSGDYTIEAWTKFDFPGRGNTHSNFKWRWYHFDGVDWDQSRQLQNRIYKFRGKGWDWEVDTENGNYDYLMYADIDMDHPEVVNELRNWGVWYTNTLGLDGFRIDAVKHIKYSFTRDWLTHVRNTTGKNMFAVAEFWKNDIGAIENYLSKTNWNHSVFDVPLHYNLYNASRSGGNYDMRQIFNGTVVQRHPTHAVCFVDNHDSQPEEALESFVEEWFKPLAYALTLTRDQGYPSVFYGDYYGIPTHGVPAMKSKIDPILEARQKYAYGTQRDYLDHPDVIGWTREGDGVHADSGLATLMSDGPGGSKWMEVGKNNAGEVWYDITGNQTNTVTINKDGWGQFHVSGGSVSIYVQQ

SEQ ID NO: 25373 - protein, 483 aa, Bacillus licheniformis
HHNGTNGTMEQYFEWYLPNDGNHWNRLRSDASNLKDKGITAVWIPPAWKGASQNDVGYGAYDLYDLGEFNQKGTVRTKYGTRNQLQAAVTALKSNGIQVYGDVVMNHKGGADATEWVRAVEVNPSNRNQEVSGDYTIEAWTKFDFPGRGNTHSNFKWRWYHFDGVDWDQSRQLQNRIYKFRGKGWDWEVDTENGNYDYLMYADIDMDHPEVVNELRNWGVWYTNTLGLDGFRIDAVKHIKYSFTRDWLTHVRNTTGKNMFAVAEFWKNDIGAIENYLSKTNWNHSVFDVPLHYNLYNASRSGGNYDMRQIFNGTVVQRHPTHAVTFVDNHDSQPEEALESFVEEWFKPLAYALTLTRDQGYPSVFYGDYYGIPTHGVPAMKSKIDPILEARQKYAYGTQRDYLDHPDVIGWTREGDGVHADSGLATLMSDGPGGSKWMEVGKNNAGEVWYDITGNQTNTVTINKDGWGQFHVSGGSVSIYVQQ

SEQ ID NO: 25374 - protein, 483 aa, Bacillus licheniformis
HHNGTNGTMMQYFEWYLPNDGNHWNRLRSDASNLKDKGITAVWIPPAWKGASQNDVGYGAYDLYDLGEFNQKGTVRTKYGTRNQLQAAVTALKSNGIQVYGDVVMNHKGGADATEWVRAGEVNPSNRNQEVSGDYTIEAWTKFDFPGRGNTHSNFKWRWYHFDGVDWDQSRQLQNRIYKFRGKGWDWEVDTENGNYDYLMYADIDMDHPEVVNELRNWGVWYTNTLGLDGFRIDAVKHIKYSFTRDWLTHVRNTTGKNMFAVAEFWKNDIGAIENYLSKTNWNHSVFDVPLHYNLYNASRSGGNYDMRQIFNGTVVQRHPTHAVTFVDNHDSQPEEALESFVEEWFKPLAYALTLTRDQGYPSVFYGDYYGIPTHGVPAMKSKIDPILEARQKYAYGTQRDYLDHPDVIGWTREGDGVHADSGLATLMSDGPGGSKWMEVGKNNAGEVWYDITGNQTNTVTINKDGWGQFHVSGGSVSIYVQQ

SEQ ID NO: 25375 - protein, 483 aa, Bacillus licheniformis
HHNGTNGTMMQYFEWYLPNDGNHWNRLRSDASNLKDKGITAVWIPPAWKGASQNDVGYGAYDLYDLGEFNQKGTVRTKYGTRNQLQAAVTFLKSNGIQVYGDVVMNHKGGADATEWVRAVEVNPSNRNQEVSGDYTIEAWTKFDFPGRGNTHSNFKWRWYHFDGVDWDQSRQLQNRIYKFRGKGWDWEVDTENGNYDYLMYADIDMDHPEVVNELRNWGVWYTNTLGLDGFRIDAVKHIKYSFTRDWLTHVRNTTGKNMFAVAEFWKNDIGAIENYLSKTNWNHSVFDVPLHYNLYNASRSGGNYDMRQIFNGTVVQRHPTHAVTFVDNHDSQPEEALESFVEEWFKPLAYALTLTRDQGYPSVFYGDYYGIPTHGVPAMKSKIDPILEARQKYAYGTQRDYLDHPDVIGWTREGDGVHADSGLATLMSDGPGGSKWMEVGKNNAGEVWYDITGNQTNTVTINKDGWGQFHVSGGSVSIYVQQ

SEQ ID NO: 25376 - protein, 483 aa, Bacillus licheniformis
HHNGTNGTMMQYFEWYLPNDGNHWNRLRSDASNLKDKGITAVWIPPAWKGASQNDVGYGAYDLYDLGEFNQKGTVRTKYGTRNQLQAAVTALKSNGIQVYGDVVMNHKGGADATEWVRAVEVNPSNRNQEVSGDYTIEAWTKFDFPGRGNTHSNFKWRWYHFDGVDWDQSRQLQNRIYKFRGKGWDWEVDTENGNYDYLMYADIDMDHPEVVNELRNWGVWYTNTLGLDGFRIDAVKHIKYSFTRDWLTHVRNTTGKNMFAVAEFWKNDIMAIENYLSKTNWNHSVFDVPLHYNLYNASRSGGNYDMRQIFNGTVVQRHPTHAVTFVDNHDSQPEEALESFVEEWFKPLAYALTLTRDQGYPSVFYGDYYGIPTHGVPAMKSKIDPILEARQKYAYGTQRDYLDHPDVIGWTREGDGVHADSGLATLMSDGPGGSKWMEVGKNNAGEVWYDITGNQTNTVTINKDGWGQFHVSGGSVSIYVQQ

SEQ ID NO: 25377 - protein, 483 aa, Bacillus licheniformis
HHNGTNGTMMQYFEWYLINDGNHWNRLRSDASNLKDKGITAVWIPPAWKGASQNDVGYGAYDLYDLGEFNQKGTVRTKYGTRNQLQAAVTALKSNGIQVYGDVVMNHKGGADATEWVRAVEVNPSNRNQEVSGDYTIEAWTKFDFPGRGNTHSNFKWRWYHFDGVDWDQSRQLQNRIYKFRGKGWDWEVDTENGNYDYLMYADIDMDHPEVVNELRNWGVWYTNTLGLDGFRIDAVKHIKYSFTRDWLTHVRNTTGKNMFAVAEFWKNDIGAIENYLSKTNWNHSVFDVPLHYNLYNASRSGGNYDMRQIFNGTVVQRHPTHAVTFVDNHDSQPEEALESFVEEWFKPLAYALTLTRDQGYPSVFYGDYYGIPTHGVPAMKSKIDPILEARQKYAYGTQRDYLDHPDVIGWTREGDGVHADSGLATLMSDGPGGSKWMEVGKNNAGEVWYDITGNQTNTVTINKDGWGQFHVSGGSVSIYVQQ

SEQ ID NO: 25378 - protein, 483 aa, Bacillus licheniformis
HHNGTNGTMMQYFEWYLPNDGNHWNRLRSDASNLKDKGITAVWIPPAIKGASQNDVGYGAYDLYDLGEFNQKGTVRTKYGTRNQLQAAVTALKSNGIQVYGDVVMNHKGGADATEWVRAVEVNPSNRNQEVSGDYTIEAWTKFDFPGRGNTHSNFKWRWYHFDGVDWDQSRQLQNRIYKFRGKGWDWEVDTENGNYDYLMYADIDMDHPEVVNELRNWGVWYTNTLGLDGFRIDAVKHIKYSFTRDWLTHVRNTTGKNMFAVAEFWKNDIGAIENYLSKTNWNHSVFDVPLHYNLYNASRSGGNYDMRQIFNGTVVQRHPTHAVTFVDNHDSQPEEALESFVEEWFKPLAYALTLTRDQGYPSVFYGDYYGIPTHGVPAMKSKIDPILEARQKYAYGTQRDYLDHPDVIGWTREGDGVHADSGLATLMSDGPGGSKWMEVGKNNAGEVWYDITGNQTNTVTINKDGWGQFHVSGGSVSIYVQQ

SEQ ID NO: 25379 - protein, 483 aa, Bacillus licheniformis
HHNGTNGTMMQYFEWYLPNDGNHWNRLRSDASNLKDKGITAVWIPPAWKGASQNDVGYGAYDLYDLGEFNQKGTVRTKYGTRNQLQAAVTALKSNGIQVYGDVVMNHKGGADATEWVRAVEVNPSNRNQEVSGDYTIEAWTKFDFPGRGNTHSNFKWRWYHFDGVDWDQSRQLQNRIYKFRGKGWDWEVDTENGNYDYLMYADIDMDHPEVVNELRNWGVWYTNTLGLDGFRIDAVKHIKYSFTRDWLTHVRNTTGKNMFAVAEFWKNDIGAIENYLSKTNWNHSVFDVPLHYNLYNASRSGGNYDMRQIFNGTVVQRHPTHAVTFVDNHDSQPEEALESFIEEWFKPLAYALTLTRDQGYPSVFYGDYYGIPTHGVPAMKSKIDPILEARQKYAYGTQRDYLDHPDVIGWTREGDGVHADSGLATLMSDGPGGSKWMEVGKNNAGEVWYDITGNQTNTVTINKDGWGQFHVSGGSVSIYVQQ

SEQ ID NO: 25380 - protein, 483 aa, Bacillus licheniformis
HHNGTNGTMMQYFEWYLPNDGNHWNRLRSDASNLKDKGITAVWIPPAWKGASQNDVGYGAYDLYDLGEFNQKGTVRTKYGTRNQLQAAVTALKSNGIQVYGDVVMNHKGGADATEWVRAVEVNPSNRNQEVSGDYTIEAWTKFDFPGRGNTHSNFKWRWYHFDGVDWDQSRQLQNRIYKFRGKGWDWEVDTENGNYDYLMYADIDMDHPEVVNELRNWGVWYTNTLGLDGFRIDAVKHIKYSFTRDWLTHVRNTTGKNMFAVAEFWKNDIGAIRNYLSKTNWNHSVFDVPLHYNLYNASRSGGNYDMRQIFNGTVVQRHPTHAVTFVDNHDSQPEEALESFVEEWFKPLAYALTLTRDQGYPSVFYGDYYGIPTHGVPAMKSKIDPILEARQKYAYGTQRDYLDHPDVIGWTREGDGVHADSGLATLMSDGPGGSKWMEVGKNNAGEVWYDITGNQTNTVTINKDGWGQFHVSGGSVSIYVQQ

SEQ ID NO: 25381 - protein, 483 aa, Bacillus licheniformis
HHNGTNGTMMQYFEWYLPNDGNHWNRLRSDASNLKDKGITAVWIPPAWKGASQNDVGYGAYDLYDLGEFNQKGTVRTKYGTRNQLQAAVTALKSNGIQVYGDVVMNHKGGADATEWVRAVEVNPSNRNQEVSGDYTIEAWTKFDFPGRGNTHSNFKWRWYHFDGVDWDQSRQLQNRIYKFRGKGWDWEVDTENGNYDYLMYADIDMDHPEVVNELRNWGVWYTNTLGLDGFRIDAVKHIKYSFTRDWLTHVRNTTGKNMFAVAEFWKNDIGAIENYLSKTNWNHSVFDVPLHYNLYNASRSGGNYDMRQIFNGTVVTRHPTHAVTFVDNHDSQPEEALESFVEEWFKPLAYALTLTRDQGYPSVFYGDYYGIPTHGVPAMKSKIDPILEARQKYAYGTQRDYLDHPDVIGWTREGDGVHADSGLATLMSDGPGGSKWMEVGKNNAGEVWYDITGNQTNTVTINKDGWGQFHVSGGSVSIYVQQ

SEQ ID NO: 25382 - protein, 483 aa, Bacillus licheniformis
HHNGTNGTMMQYFEWYLPNDGNHWNRLRSDASNLKDKGITAVWIPPAWKGASQNDVGYGAYDLYDLGEFNQKGTVRTKYGTRNQLQAAVTALKSNGIQVYGDVVMNHKGGADATEWARAVEVNPSNRNQEVSGDYTIEAWTKFDFPGRGNTHSNFKWRWYHFDGVDWDQSRQLQNRIYKFRGKGWDWEVDTENGNYDYLMYADIDMDHPEVVNELRNWGVWYTNTLGLDGFRIDAVKHIKYSFTRDWLTHVRNTTGKNMFAVAEFWKNDIGAIENYLSKTNWNHSVFDVPLHYNLYNASRSGGNYDMRQIFNGTVVQRHPTHAVTFVDNHDSQPEEALESFVEEWFKPLAYALTLTRDQGYPSVFYGDYYGIPTHGVPAMKSKIDPILEARQKYAYGTQRDYLDHPDVIGWTREGDGVHADSGLATLMSDGPGGSKWMEVGKNNAGEVWYDITGNQTNTVTINKDGWGQFHVSGGSVSIYVQQ

SEQ ID NO: 25383 - protein, 483 aa, Bacillus licheniformis
HHNGTNGTMMQYFEWYLPNDGNHWNRLRSDASNLKDKGITAVWIPPAWKGASQNDVGYGAYDLYDLGEFNQKGTVRTKYGTRNQLQAAVTALKSNGIQVYGDVVMNHKGGADATEWVRAVEVNPSNRNQEVSGDYTIEAWTKFDFPGRGNTHSNFKWRWYHFDGVDWDQSRQLQNRIYKFRGKGWDWEVDTENGNYDYLMYADIDMDHPEVVNELRNWGVWYTNTLGLDGFRIDAVKHIKYSFTRDWLTHVRNTTGKNMFAVAEFWKNDIGAIKNYLSKTNWNHSVFDVPLHYNLYNASRSGGNYDMRQIFNGTVVQRHPTHAVTFVDNHDSQPEEALESFVEEWFKPLAYALTLTRDQGYPSVFYGDYYGIPTHGVPAMKSKIDPILEARQKYAYGTQRDYLDHPDVIGWTREGDGVHADSGLATLMSDGPGGSKWMEVGKNNAGEVWYDITGNQTNTVTINKDGWGQFHVSGGSVSIYVQQ

SEQ ID NO: 25384 - protein, 483 aa, Bacillus licheniformis
HHNGTNGTMMQYFEWYLPNDGNHWNRLRSDASNLKDKGITAVWIPPAWKGASQNDVGYGAYDLYDLGEFNQKGTVRTKYGTRNQLQAAVTALKSNGIQVYGDVVMNHKGGADATEWVRAVEVNPSNRNQEVSGDYTIEAWTMFDFPGRGNTHSNFKWRWYHFDGVDWDQSRQLQNRIYKFRGKGWDWEVDTENGNYDYLMYADIDMDHPEVVNELRNWGVWYTNTLGLDGFRIDAVKHIKYSFTRDWLTHVRNTTGKNMFAVAEFWKNDIGAIENYLSKTNWNHSVFDVPLHYNLYNASRSGGNYDMRQIFNGTVVQRHPTHAVTFVDNHDSQPEEALESFVEEWFKPLAYALTLTRDQGYPSVFYGDYYGIPTHGVPAMKSKIDPILEARQKYAYGTQRDYLDHPDVIGWTREGDGVHADSGLATLMSDGPGGSKWMEVGKNNAGEVWYDITGNQTNTVTINKDGWGQFHVSGGSVSIYVQQ

SEQ ID NO: 25385 - protein, 483 aa, Bacillus licheniformis
HHNGTNGTMMQYFEWYLPNDGNHWNRLRSDASNLKDKGITAVWIPPAWKGASQNDVGYGAYDLYDLGEFNQKGTVRTKYGTRNQLQAAVTALKSNGIQVYGDVVMNHKGGADATEWVRAVEVNPSNRNQEVSGDYTIEAWTKFDFPGRGNTHSNFKWRWYHFDGVDWDQSRQLQNRIYKFRGKGWDWEVDTENGNYDYLMYADIDMDHPEVVNELRNWGVWYTNTLGLDGFRIDAVKHIKYSFTRDWLTHVRNTTGKNMFAVAEFWKNDIGAIENYLSKTNWNHSVFDVPLHYNLYNASRSGGNYDMRQIFNGTVVQRHPTHAVTFVDNHDSQPEEALESFVEEWFKPLAYALTLTRDQGYPSVFYGDYYGIPTHGVPAMKSKIDPILEARQKYAYGTQRDYLDHPDVIGWTREGDGVHADSGLATLMSDGPGGSPWMEVGKNNAGEVWYDITGNQTNTVTINKDGWGQFHVSGGSVSIYVQQ

SEQ ID NO: 25386 - protein, 483 aa, Bacillus licheniformis
HHNGTNGTMMQYFEWYLPNDGNHWNRLRSDASNLKDKGITAVWIPPAWKGASQNDVGYGAYDLYDLGEFNQKGTVRTKYGTRNQLQAAVTALKSNGIQVYGDVVMNHKGGADATEWVRAVEVNPSNRNQEVSGDYTIEAWTKFDFPGRGNTHSNFKWRWYHFDGVDWDQSRQLQNRIYKFRGKGWDWEVDTENGNYDYLMYADIDMDHPEVVNELRNWGVWYTNTLGLDGFRIDAVKHIKYSFTRDWLTHVRNTTGKNMFAVAEFWKNDIGAIENYLSKTNWNHSVTDVPLHYNLYNASRSGGNYDMRQIFNGTVVQRHPTHAVTFVDNHDSQPEEALESFVEEWFKPLAYALTLTRDQGYPSVFYGDYYGIPTHGVPAMKSKIDPILEARQKYAYGTQRDYLDHPDVIGWTREGDGVHADSGLATLMSDGPGGSKWMEVGKNNAGEVWYDITGNQTNTVTINKDGWGQFHVSGGSVSIYVQQ

SEQ ID NO: 25387 - protein, 483 aa, Bacillus licheniformis
HHNGTNGTMMQYFEWYLPNDGNHWNRLRSDASNLKDKGITAVWIPPAWKGASQNDVGYGAYDLYDLGEFNQKGTVRTKYGTRNQLQAAVTALKSNGIQVKGDVVMNHKGGADATEWVRAVEVNPSNRNQEVSGDYTIEAWTKFDFPGRGNTHSNFKWRWYHFDGVDWDQSRQLQNRIYKFRGKGWDWEVDTENGNYDYLMYADIDMDHPEVVNELRNWGVWYTNTLGLDGFRIDAVKHIKYSFTRDWLTHVRNTTGKNMFAVAEFWKNDIGAIENYLSKTNWNHSVFDVPLHYNLYNASRSGGNYDMRQIFNGTVVQRHPTHAVTFVDNHDSQPEEALESFVEEWFKPLAYALTLTRDQGYPSVFYGDYYGIPTHGVPAMKSKIDPILEARQKYAYGTQRDYLDHPDVIGWTREGDGVHADSGLATLMSDGPGGSKWMEVGKNNAGEVWYDITGNQTNTVTINKDGWGQFHVSGGSVSIYVQQ

SEQ ID NO: 25388 - protein, 483 aa, Bacillus licheniformis
HHNGTNGTMMQYFEWYLPNDGNHWNRLRSDASNLKDKGITAVWIPPAWKGASQNDVGYGAYDLYDLGEFNQKGTVRTKYGTRNQLQAAVTALKSNGIQVYGDVVMNHKGGADATEWVRAVEVNPSNRNQEVSGDYTIEAWTKFDFPGRGNTHSNFKWRWYHFDGVDWDQSRQLQNRIYKFRGKGWDWEVDTENGNYDYLMYADIDMDHNEVVNELRNWGVWYTNTLGLDGFRIDAVKHIKYSFTRDWLTHVRNTTGKNMFAVAEFWKNDIGAIENYLSKTNWNHSVFDVPLHYNLYNASRSGGNYDMRQIFNGTVVQRHPTHAVTFVDNHDSQPEEALESFVEEWFKPLAYALTLTRDQGYPSVFYGDYYGIPTHGVPAMKSKIDPILEARQKYAYGTQRDYLDHPDVIGWTREGDGVHADSGLATLMSDGPGGSKWMEVGKNNAGEVWYDITGNQTNTVTINKDGWGQFHVSGGSVSIYVQQ

SEQ ID NO: 25389 - protein, 483 aa, Bacillus subtilis
HHNGTNGTMMQYFEWYLPNDGNHWNRLRSDASNLKDKGITAVWIPPAWKGASQNDVGYGAYDLYDLGEFNQKGTVRTKYGTRNQLQAAVTALKSNGIQVYGDVVMNHKGGADATEWVRAVEVNPSNRNQEVSGDYTIEAWTKFDFPGRGNTHSNFKWRWYHFDGVDWDQSRQLQNRIYKFRGKNWDWEVDTENNNYDYLMYADIDMDHPEVVNELRNWGVWYTNTLGLDGFRIDAVKHIKYSFTRDWLTHVRNTTGKNMFAVAEFWKNDIGAIENYLSKTNWNHSVFDVPLHYNLYNASRSGGNYDMRQIFNGTVVQRHPTHAVTFVDNHDSQPEEALESFVEEWFKPLAYALTLTRDQGYPSVFYGDYYGIPTHGVPAMKSKIDPILEARQKYAYGTQRDYLDHPDVIGWTREGDGVHADSGLATLMSDGPGGSKWMEVGKNNAGEVWYDITGNQTNTVTINKDGWGQFHVSGGSVSIYVQQ

SEQ ID NO: 25390 - protein, 483 aa, Bacillus licheniformis
HHNGTNGTMMQYFEWYLPNDGNHWMRLRSDASNLKDKGITAVWIPPAWKGASQNDVGYGAYDLYDLGEFNQKGTVRTKYGTRNQLQAAVTALKSNGIQVYGDVVMNHKGGADATEWVRAVEVNPSNRNQEVSGDYTIEAWTKFDFPGRGNTHSNFKWRWYHFDGVDWDQSRQLQNRIYKFRGKGWDWEVDTENGNYDYLMYADIDMDHPEVVNELRNWGVWYTNTLGLDGFRIDAVKHIKYSFTRDWLTHVRNTTGKNMFAVAEFWKNDIGAIENYLSKTNWNHSVFDVPLHYNLYNASRSGGNYDMRQIFNGTVVQRHPTHAVTFVDNHDSQPEEALESFVEEWFKPLAYALTLTRDQGYPSVFYGDYYGIPTHGVPAMKSKIDPILEARQKYAYGTQRDYLDHPDVIGWTREGDGVHADSGLATLMSDGPGGSKWMEVGKNNAGEVWYDITGNQTNTVTINKDGWGQFHVSGGSVSIYVQQ

SEQ ID NO: 25391 - protein, 483 aa, Bacillus subtilis
HHNGTNGTMMQYFEWYLPNDGNHWNRLRSDASNLKDKGITAVWIPPAWKGASQNDVGYGAYDLYDLGEFNQKGTVRTKYGTRNQLQAAVTALKSNGIQVYGDVVMNHKGGADATEWVRAVEVNPSNRNQEVSGDYTIEAWTKFDFPGRGNTHSNFKWRWYHFDGVDWDQSRQLQNRIYKFRGKGWDWEVDTENGNYDYLMYADIDMDHPEVVNELRNWGVWYTNTLGLDGFRIDAVKHIKYSFTRDWLTHVRNTTGKNMFAVAEFWKNDIGAIENYLSKTNWNHSVFDVPLHYNLYNASRSGGNYDMRQIFNGTVVQRHPTHAVTFVDNHDSQPEEALESFVEEWFKPLAYALTLTRDQGYPSVFYGDYYGIPTHGVPAMKSKIDPILEARQKYAYGTQRDYLDHPDVIGWTREGDGVHADSGLATLMSDGPRGSKWMEVGKNNAGEVWYDITGNQTNTVTINKDGWGQFHVSGGSVSIYVQQ

SEQ ID NO: 25392 - protein, 483 aa, Bacillus licheniformis
HHNGTNGTMMQYFEWYLPNDGNHWNRLRSDASNLKDKGITAVWIPPAWKGASQNDVGYGAYDLYDLGEFNQKGTVRTKYGTRNQLQAAVTALKSNGIQVYGDVVMNHKGGADATEWVRAVEVNPSNRNQEVSGDYTIEAWTKFDFPGRGNTHSNFKWRWYHFDGVDWDQSRQLQNRIYKFRGKGWDWEVDTENGNYDYLMYADIDMDHPEVVNELRNWGVWYINTLGLDGFRIDAVKHIKYSFTRDWLTHVRNTTGKNMFAVAEFWKNDIGAIENYLSKTNWNHSVFDVPLHYNLYNASRSGGNYDMRQIFNGTVVQRHPTHAVTFVDNHDSQPEEALESFVEEWFKPLAYALTLTRDQGYPSVFYGDYYGIPTHGVPAMKSKIDPILEARQKYAYGTQRDYLDHPDVIGWTREGDGVHADSGLATLMSDGPGGSKWMEVGKNNAGEVWYDITGNQTNTVTINKDGWGQFHVSGGSVSIYVQQ

SEQ ID NO: 25393 - protein, 483 aa, Bacillus licheniformis
HHNGTNGTMMQYFEWYLPNDGNHWNRLRSDASNLKDKGIIAVWIPPAWKGASQNDVGYGAYDLYDLGEFNQKGTVRTKYGTRNQLQAAVTALKSNGIQVYGDVVMNHKGGADATEWVRAVEVNPSNRNQEVSGDYTIEAWTKFDFPGRGNTHSNFKWRWYHFDGVDWDQSRQLQNRIYKFRGKGWDWEVDTENGNYDYLMYADIDMDHPEVVNELRNWGVWYTNTLGLDGFRIDAVKHIKYSFTRDWLTHVRNTTGKNMFAVAEFWKNDIGAIENYLSKTNWNHSVFDVPLHYNLYNASRSGGNYDMRQIFNGTVVQRHPTHAVTFVDNHDSQPEEALESFVEEWFKPLAYALTLTRDQGYPSVFYGDYYGIPTHGVPAMKSKIDPILEARQKYAYGTQRDYLDHPDVIGWTREGDGVHADSGLATLMSDGPGGSKWMEVGKNNAGEVWYDITGNQTNTVTINKDGWGQFHVSGGSVSIYVQQ

SEQ ID NO: 25394 - protein, 483 aa, Bacillus licheniformis
HHNGTNGTMMQYFEWYLPNDGNHWNRLRSDASNLKDKGITAVWIPPAWKGASQNDVGYGAYDLYDLGEFNQKGTVRTKYGTRNQLQAAVTALKSNGIQVYGDVVMNHKGGADATEWVRAVEVNPSNRNQEVSGDYTIEAWTKFDFPGRGNTHSNFKWRWYHFDGVDWDQSRQLQNRIYKFRGKGWDWEVDTENGNYDYLMYADIDMDHPEVVNELRNWGVWYTNTLGLDGFRIDAVKHIKYSFTRDWLTHVRNTTGKNMFAVAEFWKNDIGAIENYLSKTNWNHSVFDVPLHYNLYNASRSGGNYDMRQIFNGTVVQRHPTHAVTFVDNHDSQPEEALESFVEEWFKPLAYALTLTRDQGYPSVFYGDYYGIPTHGVPAMKSKIDPILEARQKYAYGTQRDYLDHPDVIGWTREGDGVHADSGLKTLMSDGPGGSKWMEVGKNNAGEVWYDITGNQTNTVTINKDGWGQFHVSGGSVSIYVQQ

SEQ ID NO: 25395 - protein, 483 aa, Bacillus licheniformis
HHNGTNGTMMQYFEWYLPNDGNHWNRLRSDASNLKDKGITAVWIPPAWKGASQNDVGYGAYDLYDLGEFNQKGTVRTKYGTRNQLQAAVTALKSNGIQVYGDVVMNHKGGADATEWVRAVEVNPSNRNQEVSGDYTIEAWTKFDFPGRGNTHSNFKWRWYHFDGVDWDQSRQLQNRIYKFRGKGWDWEVDTENGNYDYLMYADIDMDHPEVVNELRNWGVWYTVTLGLDGFRIDAVKHIKYSFTRDWLTHVRNTTGKNMFAVAEFWKNDIGAIENYLSKTNWNHSVFDVPLHYNLYNASRSGGNYDMRQIFNGTVVQRHPTHAVTFVDNHDSQPEEALESFVEEWFKPLAYALTLTRDQGYPSVFYGDYYGIPTHGVPAMKSKIDPILEARQKYAYGTQRDYLDHPDVIGWTREGDGVHADSGLATLMSDGPGGSKWMEVGKNNAGEVWYDITGNQTNTVTINKDGWGQFHVSGGSVSIYVQQ

SEQ ID NO: 25396 - protein, 483 aa, Bacillus licheniformis
HHNGTNGTMMQYFEWYLPNDGNHWNRLRSDASNLKDKGITAVWIPPAWKGASQNDVGYGAYDLYDLGEFNQKGTVRTKYGTRNQLQAAVTALKSNGIQVYGDVVMNHKGGADATEWVRAVEVNPSNRNQEVSGDYTIEAWTKFDFPGRGNTHSNFKWRWYHFDGVDWDQSRQLQNRIYKFRGKGWDWEVDTENGNYDYLMYADIDMDHPEVVNELRNWGVWYTNTLGLDGFRIDAVKHIKYSFTRDWLTHVRNTTGKNMFAVAEFWKNDIGAIENYLSKTNWNHSVRDVPLHYNLYNASRSGGNYDMRQIFNGTVVQRHPTHAVTFVDNHDSQPEEALESFVEEWFKPLAYALTLTRDQGYPSVFYGDYYGIPTHGVPAMKSKIDPILEARQKYAYGTQRDYLDHPDVIGWTREGDGVHADSGLATLMSDGPGGSKWMEVGKNNAGEVWYDITGNQTNTVTINKDGWGQFHVSGGSVSIYVQQ

SEQ ID NO: 25397 - protein, 483 aa, Bacillus licheniformis
HHNGTNGTMMQYFEWYLPNDGNHWNRLRSDASNLKDKGITAVWIPPAWKGASQNDVGYGAYDLYDLGEFNQKGTVRTKYGTRNQLQAAVTALKSNGIQVYGDVVMNHKGGADATEWVRAVEVNPSNRNQEVSGDYTIEAWTKFDFPGRGNTHSNFKWRWYHFDGVDWDQSRQLQNRIYKFRGKGWDWEVDTENGNYDYLMYADIDMDHPEVVNELRNWGVWYTNTLGLDGFRIDAVKHIKYSFTRDWLTHVRNTTGKNMHAVAEFWKNDIGAIENYLSKTNWNHSVFDVPLHYNLYNASRSGGNYDMRQIFNGTVVQRHPTHAVTFVDNHDSQPEEALESFVEEWFKPLAYALTLTRDQGYPSVFYGDYYGIPTHGVPAMKSKIDPILEARQKYAYGTQRDYLDHPDVIGWTREGDGVHADSGLATLMSDGPGGSKWMEVGKNNAGEVWYDITGNQTNTVTINKDGWGQFHVSGGSVSIYVQQ

SEQ ID NO: 25398 - protein, 483 aa, Bacillus licheniformis
HHNGTNGTMMQYFEWYLPNDGNHWNRLRSDASNLKDKGITAVWIPPAWKGASQNDVGYGAYDLYDLGEFNQKGTVRTKYGTRNQLQAAVTALKSNGIQVYGDVVMNHKGGADATEWVRAVEVNPSNRNQEVSGDYTIEAWVKFDFPGRGNTHSNFKWRWYHFDGVDWDQSRQLQNRIYKFRGKGWDWEVDTENGNYDYLMYADIDMDHPEVVNELRNWGVWYTNTLGLDGFRIDAVKHIKYSFTRDWLTHVRNTTGKNMFAVAEFWKNDIGAIENYLSKTNWNHSVFDVPLHYNLYNASRSGGNYDMRQIFNGTVVQRHPTHAVTFVDNHDSQPEEALESFVEEWFKPLAYALTLTRDQGYPSVFYGDYYGIPTHGVPAMKSKIDPILEARQKYAYGTQRDYLDHPDVIGWTREGDGVHADSGLATLMSDGPGGSKWMEVGKNNAGEVWYDITGNQTNTVTINKDGWGQFHVSGGSVSIYVQQ

SEQ ID NO: 25399 - protein, 483 aa, Bacillus licheniformis
HHNGTNGTMMQYFEWYLPNDGNHWNRLRSDASNLKDKGITAVWIPPAWKGASQNDVGYGAYDLYDLGEFNQKGTVRTKYGTRNQLQAAVTALKSNGIQVYGDVVMNHKGGADATEWVRAVEVNPSNRNQEVSGDYTIEAWTKFDFPGRGNTHSNFKWRWYHFDGVDWDQSRQLQNRIYKFRGKGWDWEVDTENGNYDYLMYADIDMDHPEVVNELRNWGVWYTNTLGLDGFRIDAVKHIKYSFTRDWLTHYRNTTGKNMFAVAEFWKNDIGAIENYLSKTNWNHSVFDVPLHYNLYNASRSGGNYDMRQIFNGTVVQRHPTHAVTFVDNHDSQPEEALESFVEEWFKPLAYALTLTRDQGYPSVFYGDYYGIPTHGVPAMKSKIDPILEARQKYAYGTQRDYLDHPDVIGWTREGDGVHADSGLATLMSDGPGGSKWMEVGKNNAGEVWYDITGNQTNTVTINKDGWGQFHVSGGSVSIYVQQ

SEQ ID NO: 25400 - protein, 483 aa, Bacillus licheniformis
HHNGTNGTMMQYFEWYLPNDGNHWNRLRSDASNLKDKGITAVWIPPAWKGASQNDVGYGAYDLYDLGEFNQKGTVRTKYGTRNQLQAAVTALKSNGIQVYGDVVMNHKGGADATEWVRAVEVNPSNRNQEVSGDYTIEAWTKFDFPGRGNTHSNFKWRWYHFDGVDWDQSRQLQNRIYKFRGKGWDWEVDTENGNYDYLMYADIDMDHPEVVNELRNWGVWYTNTLGLDGFRIDAVKHIKYSFTRDWLTHVRNTTGKNMFAVAEFWKNDIGAIENYLSKTNWNHSVFDVPLHYNLYNASRSGGNYDMRQIFNGTVVQRHPTHAVTFVDNHDSQPEEALESFVEEWFKPLAYALTLTRDQGYPSVFYGDYYGIPTHGVPAMKSKIEPILEARQKYAYGTQRDYLDHPDVIGWTREGDGVHADSGLATLMSDGPGGSKWMEVGKNNAGEVWYDITGNQTNTVTINKDGWGQFHVSGGSVSIYVQQ

SEQ ID NO: 25401 - protein, 483 aa, Bacillus licheniformis
HHNGTNGTMMQYFEWYLPNDGNHWNRLRSDASNLKDKGITAVWIPPAWKGASQNDVGYGAYDLYDLGEFNQKGTVRTKYGTRNQLQAAVTALKSNGIQVYGDVVMNHKGGADATEWVRAVEVNPSNRNQEVSGDYTIEAWTKFDFPGRGNTHSNFKWRWYHFDGVDWDQSRQLQNRIYKFRGKGWDWEVDTENGNYDYLMYADIDMDHPEVVNELRNWGVWYTNTLGLDGFRIDAVKHIKYSFTRDWLTHVRNTTGKNMFAVAEFWKNDIGAIENYLSKTNWNHSVFDVPLHYNLYNASRMGGNYDMRQIFNGTVVQRHPTHAVTFVDNHDSQPEEALESFVEEWFKPLAYALTLTRDQGYPSVFYGDYYGIPTHGVPAMKSKIDPILEARQKYAYGTQRDYLDHPDVIGWTREGDGVHADSGLATLMSDGPGGSKWMEVGKNNAGEVWYDITGNQTNTVTINKDGWGQFHVSGGSVSIYVQQ

SEQ ID NO: 25402 - protein, 483 aa, Bacillus licheniformis
HHNGTNGTMMQYFEWYLPNDGNHWNRLRSDASNLKDKGITAVWIPPAWKGASQNDVGYGAYDLYDLGEFNQKGTVRTKYGTRNQLQAAVTALKSNGIQVYGDVVMNHKGGADATEWVRAWEVNPSNRNQEVSGDYTIEAWTKFDFPGRGNTHSNFKWRWYHFDGVDWDQSRQLQNRIYKFRGKGWDWEVDTENGNYDYLMYADIDMDHPEVVNELRNWGVWYTNTLGLDGFRIDAVKHIKYSFTRDWLTHVRNTTGKNMFAVAEFWKNDIGAIENYLSKTNWNHSVFDVPLHYNLYNASRSGGNYDMRQIFNGTVVQRHPTHAVTFVDNHDSQPEEALESFVEEWFKPLAYALTLTRDQGYPSVFYGDYYGIPTHGVPAMKSKIDPILEARQKYAYGTQRDYLDHPDVIGWTREGDGVHADSGLATLMSDGPGGSKWMEVGKNNAGEVWYDITGNQTNTVTINKDGWGQFHVSGGSVSIYVQQ

SEQ ID NO: 25403 - protein, 483 aa, Bacillus licheniformis
HHNGTNGTMMQYFEWYLPNDGNHWNRLRSDASNLKDKGITAVWIPPAWKGASQNDVGYGAYDLYDLGEFNQKGTVRTKYGTRNQLQAAVTALKSNGIQVYGDVVMNHKGGADATEWVRAVEVNPSNRNQEVSGYYTIEAWTKFDFPGRGNTHSNFKWRWYHFDGVDWDQSRQLQNRIYKFRGKGWDWEVDTENGNYDYLMYADIDMDHPEVVNELRNWGVWYTNTLGLDGFRIDAVKHIKYSFTRDWLTHVRNTTGKNMFAVAEFWKNDIGAIENYLSKTNWNHSVFDVPLHYNLYNASRSGGNYDMRQIFNGTVVQRHPTHAVTFVDNHDSQPEEALESFVEEWFKPLAYALTLTRDQGYPSVFYGDYYGIPTHGVPAMKSKIDPILEARQKYAYGTQRDYLDHPDVIGWTREGDGVHADSGLATLMSDGPGGSKWMEVGKNNAGEVWYDITGNQTNTVTINKDGWGQFHVSGGSVSIYVQQ

SEQ ID NO: 25404 - protein, 483 aa, Bacillus licheniformis
HHNGTNGTMMQYFEWYLPNDGNHWNRLRSDASKLKDKGITAVWIPPAWKGASQNDVGYGAYDLYDLGEFNQKGTVRTKYGTRNQLQAAVTALKSNGIQVYGDVVMNHKGGADATEWVRAVEVNPSNRNQEVSGDYTIEAWTKFDFPGRGNTHSNFKWRWYHFDGVDWDQSRQLQNRIYKFRGKGWDWEVDTENGNYDYLMYADIDMDHPEVVNELRNWGVWYTNTLGLDGFRIDAVKHIKYSFTRDWLTHVRNTTGKNMFAVAEFWKNDIGAIENYLSKTNWNHSVFDVPLHYNLYNASRSGGNYDMRQIFNGTVVQRHPTHAVTFVDNHDSQPEEALESFVEEWFKPLAYALTLTRDQGYPSVFYGDYYGIPTHGVPAMKSKIDPILEARQKYAYGTQRDYLDHPDVIGWTREGDGVHADSGLATLMSDGPGGSKWMEVGKNNAGEVWYDITGNQTNTVTINKDGWGQFHVSGGSVSIYVQQ

SEQ ID NO: 25405 - protein, 483 aa, Bacillus licheniformis
HHNGTNGTMMQYFEWYLPNDGNHWNRLRSDASNLKDKGITAVWIPPAWKGASQNDVGYGAYDLYDLGEFNQKGTVRTKYGTRNQLQAAVTALKSNGIQVYGDVVMNHKGGADATEWVRAVEVNPSNRNQEVSGDYTIEAWTKFDFPGRGNTHSNFKWRWYHFDGVDWDQSRQLQNRIYKFRGKGWDWEVDTENGNYDYLMYADIDMDHPEVVNELRNWGVWYTNTLGLDGFRIDAVKHIKYSFTRDDLTHVRNTTGKNMFAVAEFWKNDIGAIENYLSKTNWNHSVFDVPLHYNLYNASRSGGNYDMRQIFNGTVVQRHPTHAVTFVDNHDSQPEEALESFVEEWFKPLAYALTLTRDQGYPSVFYGDYYGIPTHGVPAMKSKIDPILEARQKYAYGTQRDYLDHPDVIGWTREGDGVHADSGLATLMSDGPGGSKWMEVGKNNAGEVWYDITGNQTNTVTINKDGWGQFHVSGGSVSIYVQQ

SEQ ID NO: 25406 - protein, 483 aa, Bacillus licheniformis
HHNGTNGTMMQYFEWYLPNDGNHWNRLRSDASNLKDKGITAVWIPPAWKGASQNDVGYGAYDLYDLGEFNQKGTVRTKYGTRNQLQAAVTALKSNGIQVYGDVVMNHKGGADATEWVRAVEVNPSNRNQEVSGDYTIEAWTEFDFPGRGNTHSNFKWRWYHFDGVDWDQSRQLQNRIYKFRGKGWDWEVDTENGNYDYLMYADIDMDHPEVVNELRNWGVWYTNTLGLDGFRIDAVKHIKYSFTRDWLTHVRNTTGKNMFAVAEFWKNDIGAIENYLSKTNWNHSVFDVPLHYNLYNASRSGGNYDMRQIFNGTVVQRHPTHAVTFVDNHDSQPEEALESFVEEWFKPLAYALTLTRDQGYPSVFYGDYYGIPTHGVPAMKSKIDPILEARQKYAYGTQRDYLDHPDVIGWTREGDGVHADSGLATLMSDGPGGSKWMEVGKNNAGEVWYDITGNQTNTVTINKDGWGQFHVSGGSVSIYVQQ

SEQ ID NO: 25407 - protein, 483 aa, Bacillus licheniformis
HHNGTNGTMMQYFEWYLPNDGNHWNRLRSDASNLKDKGITAVWIPPAWKGASQNDVGYGAYDLYDLGEFNQKGTVRTKYGTRNQLQAAVTALKSNGIQVYGDVVMNHKGGADATEWVRAVEVNPSNRNQEVSGDYTIEAWTKFDFPGRGNTHSNFKWRWYHFDGVDWDQSRQLQNRIYKFRGKGWDWEVDTENGNYDYLMYADIDMDHGEVVNELRNWGVWYTNTLGLDGFRIDAVKHIKYSFTRDWLTHVRNTTGKNMFAVAEFWKNDIGAIENYLSKTNWNHSVFDVPLHYNLYNASRSGGNYDMRQIFNGTVVQRHPTHAVTFVDNHDSQPEEALESFVEEWFKPLAYALTLTRDQGYPSVFYGDYYGIPTHGVPAMKSKIDPILEARQKYAYGTQRDYLDHPDVIGWTREGDGVHADSGLATLMSDGPGGSKWMEVGKNNAGEVWYDITGNQTNTVTINKDGWGQFHVSGGSVSIYVQQ

SEQ ID NO: 25408 - protein, 483 aa, Bacillus licheniformis
HHNGTNGTMMQYFEWYLPNDGNHWNRLRSIASNLKDKGITAVWIPPAWKGASQNDVGYGAYDLYDLGEFNQKGTVRTKYGTRNQLQAAVTALKSNGIQVYGDVVMNHKGGADATEWVRAVEVNPSNRNQEVSGDYTIEAWTKFDFPGRGNTHSNFKWRWYHFDGVDWDQSRQLQNRIYKFRGKGWDWEVDTENGNYDYLMYADIDMDHPEVVNELRNWGVWYTNTLGLDGFRIDAVKHIKYSFTRDWLTHVRNTTGKNMFAVAEFWKNDIGAIENYLSKTNWNHSVFDVPLHYNLYNASRSGGNYDMRQIFNGTVVQRHPTHAVTFVDNHDSQPEEALESFVEEWFKPLAYALTLTRDQGYPSVFYGDYYGIPTHGVPAMKSKIDPILEARQKYAYGTQRDYLDHPDVIGWTREGDGVHADSGLATLMSDGPGGSKWMEVGKNNAGEVWYDITGNQTNTVTINKDGWGQFHVSGGSVSIYVQQ

SEQ ID NO: 25409 - protein, 483 aa, Bacillus licheniformis
HHNGTNGTMMQYFEWYLPNDGNHWNRLRSDASNLKDKGITAVWIPPAWKGASQNDVGYGAYDLYDLGEFNQKGTVRTKYGTRNQLQAAVTALKSNGIQVYGDVVMNHKGGADATEWVRAVEVNPSNRNQEVSGDYTIEAWTKFDFPGRGNTHSNFKWRWYHFDGVDWDQSRQLQNRIYKFRGKGWDWEVDTENGNYDYLMYADIDMDHPEVVNELRNWGVWYTNTLGLDGFRIDAVKHIMYSFTRDWLTHVRNTTGKNMFAVAEFWKNDIGAIENYLSKTNWNHSVFDVPLHYNLYNASRSGGNYDMRQIFNGTVVQRHPTHAVTFVDNHDSQPEEALESFVEEWFKPLAYALTLTRDQGYPSVFYGDYYGIPTHGVPAMKSKIDPILEARQKYAYGTQRDYLDHPDVIGWTREGDGVHADSGLATLMSDGPGGSKWMEVGKNNAGEVWYDITGNQTNTVTINKDGWGQFHVSGGSVSIYVQQ

SEQ ID NO: 25410 - protein, 483 aa, Bacillus licheniformis
HHNGTNGTMMQYFEWYLPNDGNHWNRLRSDASNLKDKGITAVWIPPAWKGASQNDVGYGAYDLYDLGEFNQKGTVRTKYGTRNQLQAAVTALKSNGIQVYGDVVMNHKGGADATEWVRAVEVNPSNRNQEVSGDYTIEAWTKFDFPGRGNTHSNFKWRWYHFDGVDWDQSRQLQNRIYKFRGKGWDWEVDTENGNYDYLMYADIDMDFPEVVNELRNWGVWYTNTLGLDGFRIDAVKHIKYSFTRDWLTHVRNTTGKNMFAVAEFWKNDIGAIENYLSKTNWNHSVFDVPLHYNLYNASRSGGNYDMRQIFNGTVVQRHPTHAVTFVDNHDSQPEEALESFVEEWFKPLAYALTLTRDQGYPSVFYGDYYGIPTHGVPAMKSKIDPILEARQKYAYGTQRDYLDHPDVIGWTREGDGVHADSGLATLMSDGPGGSKWMEVGKNNAGEVWYDITGNQTNTVTINKDGWGQFHVSGGSVSIYVQQ

SEQ ID NO: 25411 - protein, 483 aa, Bacillus licheniformis
HHNGTNGTMMQYFEWYLPNDGNHWNRLRSDASNLKDKGITAVWIPPAWKGASQNDVGYGAYDLYDLGEFNQKGTVRTKYGTRNQLQAAVTALKSNGIQVYGDVVMNHKGGADATEWVRAVEVNPSNRNQEVSGDYTIEAWTKFDFPGRGNTHSNFKWRWYHVDGVDWDQSRQLQNRIYKFRGKGWDWEVDTENGNYDYLMYADIDMDHPEVVNELRNWGVWYTNTLGLDGFRIDAVKHIKYSFTRDWLTHVRNTTGKNMFAVAEFWKNDIGAIENYLSKTNWNHSVFDVPLHYNLYNASRSGGNYDMRQIFNGTVVQRHPTHAVTFVDNHDSQPEEALESFVEEWFKPLAYALTLTRDQGYPSVFYGDYYGIPTHGVPAMKSKIDPILEARQKYAYGTQRDYLDHPDVIGWTREGDGVHADSGLATLMSDGPGGSKWMEVGKNNAGEVWYDITGNQTNTVTINKDGWGQFHVSGGSVSIYVQQ

SEQ ID NO: 25412 - protein, 483 aa, Bacillus licheniformis
HHNGTNGTMMQYFEWYLPNDGNHWNRLRSDASNLKDKGITAVWIPPAWKGASQNDVGYGAYDLYDLGEFNQKGTVRTKYGTRNQLQAAVTALKSNGIQVYGDVVMNHKGGADATEWVRAVEVNPSNRNQEVSGDYTIEAWTKFDFPGRGNTHSNFKWRWYHFDGVDWDQSRQLQNRIYKFRGKGWDWEVDTENGNYDYLMYADIDMDHPEVVNELRNWGVWYTNTLGLDGFRIDAVKHIKYSFTRDWLTHVRNTTGKNMFAVAEFWKNDIVAIENYLSKTNWNHSVFDVPLHYNLYNASRSGGNYDMRQIFNGTVVQRHPTHAVTFVDNHDSQPEEALESFVEEWFKPLAYALTLTRDQGYPSVFYGDYYGIPTHGVPAMKSKIDPILEARQKYAYGTQRDYLDHPDVIGWTREGDGVHADSGLATLMSDGPGGSKWMEVGKNNAGEVWYDITGNQTNTVTINKDGWGQFHVSGGSVSIYVQQ

SEQ ID NO: 25413 - protein, 483 aa, Bacillus licheniformis
HHNGTNGTMMQYFEWYLPNDGNHWNRLRSDASNLKDKGITAVWIPPAWKGASQNDVGYGAYDLYDLGEFNQKGTVRTKYGTRNQLQAAVTALKSNGIQVYGDVVMNHKGGADATEWVRAVEVNPSNRNQEVSGDYTIEAWTKFDFPGRGNTHSNFKWRWYHFDGVDWDQSRQLQNRWYKFRGKGWDWEVDTENGNYDYLMYADIDMDHPEVVNELRNWGVWYTNTLGLDGFRIDAVKHIKYSFTRDWLTHVRNTTGKNMFAVAEFWKNDIGAIENYLSKTNWNHSVFDVPLHYNLYNASRSGGNYDMRQIFNGTVVQRHPTHAVTFVDNHDSQPEEALESFVEEWFKPLAYALTLTRDQGYPSVFYGDYYGIPTHGVPAMKSKIDPILEARQKYAYGTQRDYLDHPDVIGWTREGDGVHADSGLATLMSDGPGGSKWMEVGKNNAGEVWYDITGNQTNTVTINKDGWGQFHVSGGSVSIYVQQ

SEQ ID NO: 25414 - protein, 483 aa, Bacillus licheniformis
HHNGTYGTMMQYFEWYLPNDGNHWNRLRSDASNLKDKGITAVWIPPAWKGASQNDVGYGAYDLYDLGEFNQKGTVRTKYGTRNQLQAAVTALKSNGIQVYGDVVMNHKGGADATEWVRAVEVNPSNRNQEVSGDYTIEAWTKFDFPGRGNTHSNFKWRWYHFDGVDWDQSRQLQNRIYKFRGKGWDWEVDTENGNYDYLMYADIDMDHPEVVNELRNWGVWYTNTLGLDGFRIDAVKHIKYSFTRDWLTHVRNTTGKNMFAVAEFWKNDIGAIENYLSKTNWNHSVFDVPLHYNLYNASRSGGNYDMRQIFNGTVVQRHPTHAVTFVDNHDSQPEEALESFVEEWFKPLAYALTLTRDQGYPSVFYGDYYGIPTHGVPAMKSKIDPILEARQKYAYGTQRDYLDHPDVIGWTREGDGVHADSGLATLMSDGPGGSKWMEVGKNNAGEVWYDITGNQTNTVTINKDGWGQFHVSGGSVSIYVQQ

SEQ ID NO: 25415 - protein, 483 aa, Bacillus licheniformis
HHNGTNGTMMQYFEWYLPNDGNHWNRLDSDASNLKDKGITAVWIPPAWKGASQNDVGYGAYDLYDLGEFNQKGTVRTKYGTRNQLQAAVTALKSNGIQVYGDVVMNHKGGADATEWVRAVEVNPSNRNQEVSGDYTIEAWTKFDFPGRGNTHSNFKWRWYHFDGVDWDQSRQLQNRIYKFRGKGWDWEVDTENGNYDYLMYADIDMDHPEVVNELRNWGVWYTNTLGLDGFRIDAVKHIKYSFTRDWLTHVRNTTGKNMFAVAEFWKNDIGAIENYLSKTNWNHSVFDVPLHYNLYNASRSGGNYDMRQIFNGTVVQRHPTHAVTFVDNHDSQPEEALESFVEEWFKPLAYALTLTRDQGYPSVFYGDYYGIPTHGVPAMKSKIDPILEARQKYAYGTQRDYLDHPDVIGWTREGDGVHADSGLATLMSDGPGGSKWMEVGKNNAGEVWYDITGNQTNTVTINKDGWGQFHVSGGSVSIYVQQ

SEQ ID NO: 25416 - protein, 483 aa, Bacillus licheniformis
HHNGTNGTMMQYFEWYLPNDGNHWNRLRSDASNLKDKGITAVWIPPAWKGASQNDVGYGAYDLYDLGEFNQKGTVRTKYGTRNQLQAAVTALKSNGIQVYGDVVMNHKGGADATEWVRAVEVNPSNRNQEVSGDYTIEAWTKFDFPGRGNTHSNFKWRWYHFDGVDWDQSRALQNRIYKFRGKGWDWEVDTENGNYDYLMYADIDMDHPEVVNELRNWGVWYTNTLGLDGFRIDAVKHIKYSFTRDWLTHVRNTTGKNMFAVAEFWKNDIGAIENYLSKTNWNHSVFDVPLHYNLYNASRSGGNYDMRQIFNGTVVQRHPTHAVTFVDNHDSQPEEALESFVEEWFKPLAYALTLTRDQGYPSVFYGDYYGIPTHGVPAMKSKIDPILEARQKYAYGTQRDYLDHPDVIGWTREGDGVHADSGLATLMSDGPGGSKWMEVGKNNAGEVWYDITGNQTNTVTINKDGWGQFHVSGGSVSIYVQQ

SEQ ID NO: 25417 - protein, 483 aa, Bacillus licheniformis
HHNGTNGTMMQYFEWYLPNDGNHWNRLRSDASNLKDKGITAVWIPPAWKGASQNDVGYGAYDLYDLGEFNQKGTVRTKYGTRNQLQAAVTALKSNGIQVYGDVVMNHKGGADATEWVRAVEVNPSNRNQEVSGDYTIEAWTKFDFPGRGNTHSNFKWRWYHFDGVDWDQSRQLQNRIYKFRGKGWDWEVDTENGNYDYLMYADIDMDHPEVVNELRNWGVWYTNTLGLDGFRIDAVKHIKYSFTRDWLTHVRNTTGKNMFAVAEFWKNDIGAIENYLSKTNWNHSVFWVPLHYNLYNASRSGGNYDMRQIFNGTVVQRHPTHAVTFVDNHDSQPEEALESFVEEWFKPLAYALTLTRDQGYPSVFYGDYYGIPTHGVPAMKSKIDPILEARQKYAYGTQRDYLDHPDVIGWTREGDGVHADSGLATLMSDGPGGSKWMEVGKNNAGEVWYDITGNQTNTVTINKDGWGQFHVSGGSVSIYVQQ

SEQ ID NO: 25418 - protein, 483 aa, Bacillus licheniformis
HHNGTNGTMMQYFEWYLPNDGNHWNRLRSDASNLKDKGITAVWIPPAWKGASQNDVGYGAYDLYDLGEFNQKGTVRTKYGTRNQLQAAVTALKSNGIQVYGDVVMNHKGGADATEWVRAVEVNPSNRNQEVSGDYTIEAWTKFDFPGRGNTHSNFKWRWYHFDGVDWDQSRQLQNRIYKFRGKGWDWEVDTENGNYDYLMYADIDMDHPEVVNELDNWGVWYTNTLGLDGFRIDAVKHIKYSFTRDWLTHVRNTTGKNMFAVAEFWKNDIGAIENYLSKTNWNHSVFDVPLHYNLYNASRSGGNYDMRQIFNGTVVQRHPTHAVTFVDNHDSQPEEALESFVEEWFKPLAYALTLTRDQGYPSVFYGDYYGIPTHGVPAMKSKIDPILEARQKYAYGTQRDYLDHPDVIGWTREGDGVHADSGLATLMSDGPGGSKWMEVGKNNAGEVWYDITGNQTNTVTINKDGWGQFHVSGGSVSIYVQQ

SEQ ID NO: 25419 - protein, 483 aa, Bacillus licheniformis
HHNGTNGTMMQYFEWYLPNDGNHWNRLRSDASNLKDKGITAVWIPPAWKGASQNDVGYGAYDLYDLGEFNQKGTVRTKYGTRNQLQAAVTALKSNGIQVYGDVVMNHKGGADATEWVRAVEVNPSNRNQEVSGDYTIEAWTKFDFPGRGNTHSNFKWRWYHFDGVDWDQSRQLQNRIYKFRGKGWDWEVDTENGNYDYLMYADIDMDHPEVVNELRNWGVWYTNWLGLDGFRIDAVKHIKYSFTRDWLTHVRNTTGKNMFAVAEFWKNDIGAIENYLSKTNWNHSVFDVPLHYNLYNASRSGGNYDMRQIFNGTVVQRHPTHAVTFVDNHDSQPEEALESFVEEWFKPLAYALTLTRDQGYPSVFYGDYYGIPTHGVPAMKSKIDPILEARQKYAYGTQRDYLDHPDVIGWTREGDGVHADSGLATLMSDGPGGSKWMEVGKNNAGEVWYDITGNQTNTVTINKDGWGQFHVSGGSVSIYVQQ

SEQ ID NO: 25420 - protein, 483 aa, Bacillus licheniformis
HHNGTNGTMMQYFEWYLPNDGNHWNRLRSDASNLKDKGITAVWIPPAWKGASQNDVGYGAYDLYDLGEFNQKGTVRTKYGTRNQLQAAVTALKSNGIQVYGDVVMNHKGGADATEWVRAVEVNPSNRNQEVSGDYTIEAWTKFDFPGRGNTHSNFKWRWYHFDGVDWDQSRQLQNRIYKFRGKGWDWEVDTENGNYDYLMYADIDMDHPEVVNELRNWGVWVTNTLGLDGFRIDAVKHIKYSFTRDWLTHVRNTTGKNMFAVAEFWKNDIGAIENYLSKTNWNHSVFDVPLHYNLYNASRSGGNYDMRQIFNGTVVQRHPTHAVTFVDNHDSQPEEALESFVEEWFKPLAYALTLTRDQGYPSVFYGDYYGIPTHGVPAMKSKIDPILEARQKYAYGTQRDYLDHPDVIGWTREGDGVHADSGLATLMSDGPGGSKWMEVGKNNAGEVWYDITGNQTNTVTINKDGWGQFHVSGGSVSIYVQQ

SEQ ID NO: 25421 - protein, 483 aa, Bacillus licheniformis
HHNGTNGVMMQYFEWYLPNDGNHWNRLRSDASNLKDKGITAVWIPPAWKGASQNDVGYGAYDLYDLGEFNQKGTVRTKYGTRNQLQAAVTALKSNGIQVYGDVVMNHKGGADATEWVRAVEVNPSNRNQEVSGDYTIEAWTKFDFPGRGNTHSNFKWRWYHFDGVDWDQSRQLQNRIYKFRGKGWDWEVDTENGNYDYLMYADIDMDHPEVVNELRNWGVWYTNTLGLDGFRIDAVKHIKYSFTRDWLTHVRNTTGKNMFAVAEFWKNDIGAIENYLSKTNWNHSVFDVPLHYNLYNASRSGGNYDMRQIFNGTVVQRHPTHAVTFVDNHDSQPEEALESFVEEWFKPLAYALTLTRDQGYPSVFYGDYYGIPTHGVPAMKSKIDPILEARQKYAYGTQRDYLDHPDVIGWTREGDGVHADSGLATLMSDGPGGSKWMEVGKNNAGEVWYDITGNQTNTVTINKDGWGQFHVSGGSVSIYVQQ

SEQ ID NO: 25422 - protein, 483 aa, Bacillus licheniformis
HHNATNGTMMQYFEWYLPNDGNHWNRLRSDASNLKDKGITAVWIPPAWKGASQNDVGYGAYDLYDLGEFNQKGTVRTKYGTRNQLQAAVTALKSNGIQVYGDVVMNHKGGADATEWVRAVEVNPSNRNQEVSGDYTIEAWTKFDFPGRGNTHSNFKWRWYHFDGVDWDQSRQLQNRIYKFRGKGWDWEVDTENGNYDYLMYADIDMDHPEVVNELRNWGVWYTNTLGLDGFRIDAVKHIKYSFTRDWLTHVRNTTGKNMFAVAEFWKNDIGAIENYLSKTNWNHSVFDVPLHYNLYNASRSGGNYDMRQIFNGTVVQRHPTHAVTFVDNHDSQPEEALESFVEEWFKPLAYALTLTRDQGYPSVFYGDYYGIPTHGVPAMKSKIDPILEARQKYAYGTQRDYLDHPDVIGWTREGDGVHADSGLATLMSDGPGGSKWMEVGKNNAGEVWYDITGNQTNTVTINKDGWGQFHVSGGSVSIYVQQ

SEQ ID NO: 25423 - protein, 483 aa, Bacillus licheniformis
HHNGTNGTMMQYFEWYLPNDGNHWNRLRSDASNLKDKGITAVWIPPAWKGASQNDVGYGAYDLYDLGEFNQKGTVRTKYGTRNQLQAAVTALKSNGIQVYGDVVMNHKGGADATEWVRAVEVNPSNRNQEVSGDYTIEAWTKFDFPGRGNTHSNFKWRWYHFDGVDWDQSRQLQNRIYKFRGKGWDWEVDTENGNYDYLMYADIDMDHPEVVNELRNWGVWYTNTLGLDGFRIDAVKHIKYSFTRDWLTHVRNTTGKNMFAVAEFWKNDIGAIENYLSKTNWNHSVFDVPLHYNHYNASRSGGNYDMRQIFNGTVVQRHPTHAVTFVDNHDSQPEEALESFVEEWFKPLAYALTLTRDQGYPSVFYGDYYGIPTHGVPAMKSKIDPILEARQKYAYGTQRDYLDHPDVIGWTREGDGVHADSGLATLMSDGPGGSKWMEVGKNNAGEVWYDITGNQTNTVTINKDGWGQFHVSGGSVSIYVQQ

SEQ ID NO: 25424 - protein, 483 aa, Bacillus licheniformis
HHNGTNGTMMQYFEWYLPNDGNHWNRLRSDASNLKDKGITAVWIPPAWKGASQNDVGYGAYDLYDLGEFNQKGTVRTKYGTRNQLQAAVTALKSNGIQVYGDVVMNHKGGADATEWVRAVEVNPSNRNQEVSGDYTIEAWTKFDFPGRGNTHSNFKWRWYHFDGVDWDQSRQLQNRIYKFRGKGWDWEVDTENGNYDYLMYADIDMDHPEVVNELRNWGVWYTNTLGLDGFRVDAVKHIKYSFTRDWLTHVRNTTGKNMFAVAEFWKNDIGAIENYLSKTNWNHSVFDVPLHYNLYNASRSGGNYDMRQIFNGTVVQRHPTHAVTFVDNHDSQPEEALESFVEEWFKPLAYALTLTRDQGYPSVFYGDYYGIPTHGVPAMKSKIDPILEARQKYAYGTQRDYLDHPDVIGWTREGDGVHADSGLATLMSDGPGGSKWMEVGKNNAGEVWYDITGNQTNTVTINKDGWGQFHVSGGSVSIYVQQ

SEQ ID NO: 25425 - protein, 483 aa, Bacillus licheniformis
HHNGTNGTMMQYFEWYLPNDGNHWNRLRSDASNLKDKGITAVWIPPAWKGASQNDVGYGAYDLYDLGEFNQKGTVRTKYGTRNQLQAAVTALKSNGIQVYGDVVMNHKGGADATEWVRAVEVNPSNRNQEVSGDYTIEAWTKFDFPGRGNTHSNFKWRWYHFDGVDWDQSRQLQNRIYKFRGKGWDWEVDTENGNYDYLMYADIDMDHPEVVNELRNWGVWYTNTLGLDGFRIDAVKHIKYSFTRDWLTHVRNTTGKNMFAVAEFWKNDIGAIENYPSKTNWNHSVFDVPLHYNLYNASRSGGNYDMRQIFNGTVVQRHPTHAVTFVDNHDSQPEEALESFVEEWFKPLAYALTLTRDQGYPSVFYGDYYGIPTHGVPAMKSKIDPILEARQKYAYGTQRDYLDHPDVIGWTREGDGVHADSGLATLMSDGPGGSKWMEVGKNNAGEVWYDITGNQTNTVTINKDGWGQFHVSGGSVSIYVQQ

SEQ ID NO: 25426 - protein, 483 aa, Bacillus licheniformis
HHNGTNGTMMQYFEWYLPNDGNHWNRLRSDASNLKDKGITAVWIPPAWKGASQNDVGYGAYDLYDLGEFNQKGTVRTKYGTRNQLQAAVTALKSNGIQVYGDVVMNHKGGADATEWVRAVEVNPSNRNQEVSGDYTIEAWTKFDFPGRGNTHSNFKWRWYHFDGVDWDQSRQLQNRIYKFRGKGWDWEVDTENGNYDYLMYADIDMDHPEVVNELRNWGVWYTNTLGLDGFRIDAVKHIKYSFTRDWLTHVRNTTGKNMFAVAEFWKNDIGAIEEYLSKTNWNHSVFDVPLHYNLYNASRSGGNYDMRQIFNGTVVQRHPTHAVTFVDNHDSQPEEALESFVEEWFKPLAYALTLTRDQGYPSVFYGDYYGIPTHGVPAMKSKIDPILEARQKYAYGTQRDYLDHPDVIGWTREGDGVHADSGLATLMSDGPGGSKWMEVGKNNAGEVWYDITGNQTNTVTINKDGWGQFHVSGGSVSIYVQQ

SEQ ID NO: 25427 - protein, 483 aa, Bacillus licheniformis
HHNGTNGTMMQYFEWYLPNDGKHWNRLRSDASNLKDKGITAVWIPPAWKGASQNDVGYGAYDLYDLGEFNQKGTVRTKYGTRNQLQAAVTALKSNGIQVYGDVVMNHKGGADATEWVRAVEVNPSNRNQEVSGDYTIEAWTKFDFPGRGNTHSNFKWRWYHFDGVDWDQSRQLQNRIYKFRGKGWDWEVDTENGNYDYLMYADIDMDHPEVVNELRNWGVWYTNTLGLDGFRIDAVKHIKYSFTRDWLTHVRNTTGKNMFAVAEFWKNDIGAIENYLSKTNWNHSVFDVPLHYNLYNASRSGGNYDMRQIFNGTVVQRHPTHAVTFVDNHDSQPEEALESFVEEWFKPLAYALTLTRDQGYPSVFYGDYYGIPTHGVPAMKSKIDPILEARQKYAYGTQRDYLDHPDVIGWTREGDGVHADSGLATLMSDGPGGSKWMEVGKNNAGEVWYDITGNQTNTVTINKDGWGQFHVSGGSVSIYVQQ

SEQ ID NO: 25428 - protein, 483 aa, Bacillus licheniformis
HHNGTNGTMMQYFEWYLPNDGNHWNRLRSDASNLKDKGITAVWIPPAWKGASQNDVGYGAYDLYDLGEFNQKGTVRTKYGTRNQLQAAVTALKSNGIQVYGDVVMNHKGGADATEWVRAVEVNPSNRNQEVSGDYTIEAWTKFDFPGRGNTHSNFKWRWYHFDGVDWDQSRQLQNRIYKFRGKGWDWEVDTENGNYDYLMYADIDMDHPEVVNELRNWGVWYFNTLGLDGFRIDAVKHIKYSFTRDWLTHVRNTTGKNMFAVAEFWKNDIGAIENYLSKTNWNHSVFDVPLHYNLYNASRSGGNYDMRQIFNGTVVQRHPTHAVTFVDNHDSQPEEALESFVEEWFKPLAYALTLTRDQGYPSVFYGDYYGIPTHGVPAMKSKIDPILEARQKYAYGTQRDYLDHPDVIGWTREGDGVHADSGLATLMSDGPGGSKWMEVGKNNAGEVWYDITGNQTNTVTINKDGWGQFHVSGGSVSIYVQQ

SEQ ID NO: 25429 - protein, 483 aa, Bacillus licheniformis
HHNGTNGTMMQYFEWYLPNDGNHWNRLRSDASNLKDKGITAVWIPPAWKGASQNDVGYGAYDLYDLGEFNQKGTVRTKYGTRNQLQAAVTALKSNGIQVYGDVVMNHKGGADATEWVRAVEVNPSNRNQEVSGDYTIEAWTKFDFPGRGNTHSNFKWRWYHFDGVDWDQSRQLQNRIYKFRGKGWDWEVDTENGNYDYLMYADIDMDHPEVVNELRNWGVWYTNTLGLDGFRIDAVKHIKYSFTRDWLTHVRNTTGKNMFAVAEFWKNDIGAIENYLSKTNWNHSVFDVPLHYNLYNASRSGGNYDMRQIFNGTVVNRHPTHAVTFVDNHDSQPEEALESFVEEWFKPLAYALTLTRDQGYPSVFYGDYYGIPTHGVPAMKSKIDPILEARQKYAYGTQRDYLDHPDVIGWTREGDGVHADSGLATLMSDGPGGSKWMEVGKNNAGEVWYDITGNQTNTVTINKDGWGQFHVSGGSVSIYVQQ

SEQ ID NO: 25430 - protein, 483 aa, Bacillus licheniformis
HHNGTNGTMMQYFEWYLPNDGNHWNRLRSDASNLKDKGITAVWIPPAWKGASQNDVGYGAYDLYDLGEFNQKGTVRTKYGTRNQLQAAVTALKSNGIQVYGDVVMNHKGGADATEWVRAVEVNPSNRNQEVSGDYTIEAWTKFDFPGRGNTHSNFKWRWYHFDGVDWDQSRCLQNRIYKFRGKGWDWEVDTENGNYDYLMYADIDMDHPEVVNELRNWGVWYTNTLGLDGFRIDAVKHIKYSFTRDWLTHVRNTTGKNMFAVAEFWKNDIGAIENYLSKTNWNHSVFDVPLHYNLYNASRSGGNYDMRQIFNGTVVQRHPTHAVTFVDNHDSQPEEALESFVEEWFKPLAYALTLTRDQGYPSVFYGDYYGIPTHGVPAMKSKIDPILEARQKYAYGTQRDYLDHPDVIGWTREGDGVHADSGLATLMSDGPGGSKWMEVGKNNAGEVWYDITGNQTNTVTINKDGWGQFHVSGGSVSIYVQQ

SEQ ID NO: 25431 - protein, 483 aa, Bacillus licheniformis
HHNGTNGTMMQYFEWYLPNDGNHWNMLRSDASNLKDKGITAVWIPPAWKGASQNDVGYGAYDLYDLGEFNQKGTVRTKYGTRNQLQAAVTALKSNGIQVYGDVVMNHKGGADATEWVRAVEVNPSNRNQEVSGDYTIEAWTKFDFPGRGNTHSNFKWRWYHFDGVDWDQSRQLQNRIYKFRGKGWDWEVDTENGNYDYLMYADIDMDHPEVVNELRNWGVWYTNTLGLDGFRIDAVKHIKYSFTRDWLTHVRNTTGKNMFAVAEFWKNDIGAIENYLSKTNWNHSVFDVPLHYNLYNASRSGGNYDMRQIFNGTVVQRHPTHAVTFVDNHDSQPEEALESFVEEWFKPLAYALTLTRDQGYPSVFYGDYYGIPTHGVPAMKSKIDPILEARQKYAYGTQRDYLDHPDVIGWTREGDGVHADSGLATLMSDGPGGSKWMEVGKNNAGEVWYDITGNQTNTVTINKDGWGQFHVSGGSVSIYVQQ

SEQ ID NO: 25432 - protein, 483 aa, Bacillus licheniformis
HHNGTNGTMMQYFEWYLPNDGNHWNRLRSDASNLKDKNITAVWIPPAWKGASQNDVGYGAYDLYDLGEFNQKGTVRTKYGTRNQLQAAVTALKSNGIQVYGDVVMNHKGGADATEWVRAVEVNPSNRNQEVSGDYTIEAWTKFDFPGRGNTHSNFKWRWYHFDGVDWDQSRQLQNRIYKFRGKGWDWEVDTENGNYDYLMYADIDMDHPEVVNELRNWGVWYTNTLGLDGFRIDAVKHIKYSFTRDWLTHVRNTTGKNMFAVAEFWKNDIGAIENYLSKTNWNHSVFDVPLHYNLYNASRSGGNYDMRQIFNGTVVQRHPTHAVTFVDNHDSQPEEALESFVEEWFKPLAYALTLTRDQGYPSVFYGDYYGIPTHGVPAMKSKIDPILEARQKYAYGTQRDYLDHPDVIGWTREGDGVHADSGLATLMSDGPGGSKWMEVGKNNAGEVWYDITGNQTNTVTINKDGWGQFHVSGGSVSIYVQQ

SEQ ID NO: 25433 - protein, 483 aa, Bacillus licheniformis
HHNGTNGTMMQYFEWYLPNDGNHWNRLRSDASNLKDKGITAVWIPPAWKGASQNDVGYGAYDLYDLGEFNQKGTVRTKYGTRNQLQAAVTALKSNGIQVYGDVVMNHKGGADATEWVRAVEVNPSNRNQEVSGDYTIEAWTKFDFPGRGNTHSNFKWRWYHFDGVDWDQSRQLQNKIYKFRGKGWDWEVDTENGNYDYLMYADYDMDHPEVVNELRNWGVWYTNTLGLDGFRIDAVKHIKYSFTRDWLTHVRNTTGKNMFAVAEFWKNDIGAIENYLSKTNWNHSVFDVPLHYNLYNASRSGGNYDMRQIFNGTVVQRHPTHAVTFVDNHDSQPEEALESFVEEWFKPLAYALTLTRDQGYPSVFYGDYYGIPTHGVPAMKSKIDPILEARQKYAYGTQRDYMDHPDVIGWTREGDGVHADSGLATLMSDGPGGSKWMEVGKNNAGEVWYDITGNQTNTVTINKDGWGQFHVSGGSVSIYVQQ

SEQ ID NO: 25434 - protein, 483 aa, Bacillus licheniformis
HHNGTNGTMMQYFEWYLPNDGNHWNRLRSDASNLKDKGITAVWIPPAWKGASQNDVGYGAYDLYDLGEFNQKGTVRTKYGTRNQLQAAVTALKSNGIQVYGDVVMNHKGGADATEWVRAVEVNPSNRNQEVSGDYTIEAWTKFDFPGRGNTHSNFKWRWYHFDGVDWDQSRQLQNRIYKFRGKGWDWEVDTENGNYDYLMYADIDMDHPEVVNELRNWGVWYTNTLGLDGFRIDAVKHIKYSFTRDWLTHVRNTTGKNMFAVAEFWKNDIGAIENYLSKTNWNHSVFDVPLHYNLYNASRSGGNYDMRQIFNGTVVQRHPTHAVTFVDNHDSQPEEALESFVEEWFKPLAYALTLTRDQGYPSVFYGDYYGIPTHGVPAMKSKIDPILEARQKYAYGTQRDYLDHPDVIGWTREGDGVHADSGLATLMSDGPGGSKWMEVGKNNAGEVWYDITGNQTNTVTINKDGWGQFHVSGGSVRIYVQQ

SEQ ID NO: 25435 - protein, 483 aa, Bacillus licheniformis
HHNGTNGTMMQYFEWYLPNDGNHWNRLRSDASNLKDKGITAVWIPPAWKGASQNDVGYGAYDLYDLGEFNQKGTVRTKYGTRNQLQAAVTALKSNGIQVYGDVVMNHKGGADATEWVRAVEVNPSNRNQEVSGDYTIEAWTKFDFPGRGNTHSNFKWRWYHFDGVDWDQSRQLQNRIYKFRGKGWDWEVDTENGNYDYLMYADIDMDHPEVVNELRNWGVWYTNTLGLDGFRIDAVKHIKYSFTRDWLTHVRNTTGKNMFAVAEFWKNDIGAIENYLSKTNWNHSVFDVPLHYNLYNASRSGGNYDMRQIFNGTVVQRHPTHAVTFVDNHDSQPEEALESFVEEWFKPLAYALTLTRDQGYPSVFYGDYYGIPTHGVPAMKSKIDPILEARQKYAYGTQRDYLDHPDVIGWTREGDGVHADSGLATLMSDGPGGSKWMEVGKKNAGEVWYDITGNQTNTVTINKDGWGQFHVSGGSVSIYVQQ

SEQ ID NO: 25436 - protein, 483 aa, Bacillus licheniformis
HHNGTNGTMMQYFEWYLPNDGNHWNRLRSDASNIKDKGITAVWIPPAWKGASQNDVGYGAYDLYDLGEFNQKGTVRTKYGTRNQLQAAVTALKSNGIQVYGDVVMNHKGGADATEWVRAVEVNPSNRNQEVSGDYTIEAWTKFDFPGRGNTHSNFKWRWYHFDGVDWDQSRQLQNRIYKFRGKGWDWEVDTENGNYDYLMYADIDMDHPEVVNELRNWGVWYTNTLGLDGFRIDAVKHIKYSFTRDWLTHVRNTTGKNMFAVAEFWKNDIGAIENYLSKTNWNHSVFDVPLHYNLYNASRSGGNYDMRQIFNGTVVQRHPTHAVTFVDNHDSQPEEALESFVEEWFKPLAYALTLTRDQGYPSVFYGDYYGIPTHGVPAMKSKIDPILEARQKYAYGTQRDYLDHPDVIGWTREGDGVHADSGLATLMSDGPGGSKWMEVGKNNAGEVWYDITGNQTNTVTINKDGWGQFHVSGGSVSIYVQQ

SEQ ID NO: 25437 - protein, 483 aa, Bacillus subtilis
HHNGTNGTMMQYFEWYLPNDGNHWNRLRSDASNLKDKGITAVWIPPAWKGASQNDVGYGAYDLYDLGEFNQKGTVRTKYGTRNQLQAAVTALKSNGIQVYGDVVMNHKGGADATEWVRAVEVNPSNRNQEVSGDYTIEAWTKFDFPGRGNTHSNFKWRWYHFDGVDWDQSRQLQNRIYKFRGKGWDWEVDTENGNYDYLMYADIDMDHPEVVNELRNWGVWYTNTLGLDGFRIDAVKHIKYSFTRDWLTHVRNTTGKNMFAVAEFWKNDIGAIENYLSKTNWNHSVFDVPLHYNLYNASRSGGNYDMRQIFNGTVVQRHPTHAVTFVDNHDSQPEEALESFVEEWFKPLAYALTLTRDQGYPSVFYGDYYGIPTHGVPAMKSKIDPILEARQKYAYGTQRDYLDHPDVIGWTREGDGVHANSGLAALMSDGPGGSKWMDVGKNNAGEVWYDITGNQTNTVTINKDGWGQFHVNGGSASIYIQQ

SEQ ID NO: 25438 - protein, 483 aa, Bacillus licheniformis
HHNGTNGTMMQYFEWYLPNDGNHWNRLRSDASNLKDKGITAVWIPPAWKGASQNDVGYGAYDLYDLGEFNQKGTVRTKYGTRNQLQAAVTALKSNGIQVYGDVVMNHKGGADATEWVRAVEVNPSNRNQEVSGDYTIEAWTKFTFPGRGNTHSNFKWRWYHFDGVDWDQSRQLQNRIYKFRGKGWDWEVDTENGNYDYLMYADIDMDHPEVVNELRNWGVWYTNTLGLDGFRIDAVKHIKYSFTRDWLTHVRNTTGKNMFAVAEFWKNDIGAIENYLSKTNWNHSVFDVPLHYNLYNASRSGGNYDMRQIFNGTVVQRHPTHAVTFVDNHDSQPEEALESFVEEWFKPLAYALTLTRDQGYPSVFYGDYYGIPTHGVPAMKSKIDPILEARQKYAYGTQRDYLDHPDVIGWTREGDGVHADSGLATLMSDGPGGSKWMEVGKNNAGEVWYDITGNQTNTVTINKDGWGQFHVSGGSVSIYVQQ

SEQ ID NO: 25439 - protein, 483 aa, Bacillus licheniformis
HHNGTNGTMMQYFEWYLPNDGNHWNRLRSDASNLKDKGITAVWIPPAWKGASQNDVGYGAYDLYDLGEFNQKGTVRTKYGTRNQLQAAVTALKSNGIQVYGDVVMNHKGGADATEWVRAVEVNPSNRNQEVSGDYTIEAWTKFDFPGRGNTHSNFKWRWYHFDGVDWDQSRQLQNRIYKFRGKGWDWEVDTENGNYDYLMYADIDMDHPEVVNELRNWGVWYTNTLGLDGFRIDAVKHIKYSFTRDWLTHVRNTTGKNMFAVAEFWKNDIRAIENYLSKTNWNHSVFDVPLHYNLYNASRSGGNYDMRQIFNGTVVQRHPTHAVTFVDNHDSQPEEALESFVEEWFKPLAYALTLTRDQGYPSVFYGDYYGIPTHGVPAMKSKIDPILEARQKYAYGTQRDYLDHPDVIGWTREGDGVHADSGLATLMSDGPGGSKWMEVGKNNAGEVWYDITGNQTNTVTINKDGWGQFHVSGGSVSIYVQQ

SEQ ID NO: 25440 - protein, 483 aa, Bacillus licheniformis
HHNGTNGTMMQYFEWYLPNDGNHWNRLRSDASNLKDKGITAVWIPPAWKGASQNDVGYGAYDLYDLGEFNQKGTVRTKYGTRNQLQAAVTALKSNGIQVYGDVVMNHKGGADATEWVRAVEVNPSNRNQEVSGDYTIEAWTKFDFPGRGNTHSNFKWRWYHFDGVDWDQSRQLQNRGYKFRGKGWDWEVDTENGNYDYLMYADIDMDHPEVVNELRNWGVWYTNTLGLDGFRIDAVKHIKYSFTRDWLTHVRNTTGKNMFAVAEFWKNDIGAIENYLSKTNWNHSVFDVPLHYNLYNASRSGGNYDMRQIFNGTVVQRHPTHAVTFVDNHDSQPEEALESFVEEWFKPLAYALTLTRDQGYPSVFYGDYYGIPTHGVPAMKSKIDPILEARQKYAYGTQRDYLDHPDVIGWTREGDGVHADSGLATLMSDGPGGSKWMEVGKNNAGEVWYDITGNQTNTVTINKDGWGQFHVSGGSVSIYVQQ

SEQ ID NO: 25441 - protein, 483 aa, Bacillus licheniformis
HHNGTNGTMMQYFEWYLPNDGNHWNRLRSDASNLKDKGITAVWIPPAWKGASQNDVGYGAYDLYDLGEFNQKGTVRTKYGTRNQLQAAVTALKSNGIQVYGDVVMNHKGGADATEWVRAVEVNPSNRNQEVSGDYTIEAWTKFDFPGRGNTHSNFKWRWYHFDGVDWDQSRQLQNRIYKFRGKGWDWEVDTENGNYDYLMYADIDMDHPEVVNELRNWGVWYTNTLGLDGFRIDAVKHIKYSFTRDWLTHVRNTTGKNMFAVAEFWKNDIGAIENYLSKTNWNHSVFDVPLHYNLYNASRSGGNYDMRQIFNGTVVQRHPTHAVTFVDNHDSQPEEALESFVEEWFKPLAYALTLTRDQGYPSVFYGDYYGIPTHGVPAMKSKIDPILEARQKYAYGTQRDYLDHPDVIGWTREGDGVHADSGLATLMSDGPGGSKWMEVGKNNAGEVWYDITGRQTNTVTINKDGWGQFHVSGGSVSIYVQQ

SEQ ID NO: 25442 - protein, 483 aa, Bacillus licheniformis
HHNGTNGTMMQYFEWYLPNDGNHWNRLRSDASNLKDKGITAVWIPPAWKGASQNDVGYGAYDLYDLGEFNQKGTVRTKYGTRNQLQAAVTALKSNGIQVYGDVVMNHKGGADATEWVRAVEVNPSNRNQEVSGDYTIEAWTKFDFPGRGNTHSNFKWRWYHFDGVDWDQSRQLQNRIYKFRGKGWDWEVDTENGNYDYLMYADIDMDHPEVVNELRNWGVWYTNTLGLDGFRIDAVKHIKYSFTRDWLTHVRNTTGKNMFAVAEFWKNDIGAIENYLSATNWNHSVFDVPLHYNLYNASRSGGNYDMRQIFNGTVVQRHPTHAVTFVDNHDSQPEEALESFVEEWFKPLAYALTLTRDQGYPSVFYGDYYGIPTHGVPAMKSKIDPILEARQKYAYGTQRDYLDHPDVIGWTREGDGVHADSGLATLMSDGPGGSKWMEVGKNNAGEVWYDITGNQTNTVTINKDGWGQFHVSGGSVSIYVQQ

SEQ ID NO: 25443 - protein, 483 aa, Bacillus licheniformis
HHNGTNGTMMQYFEWYLPNDGNHWNRLRSDASNLKDKGITAVWIPPAWKGASQNDVGYGAYDLYDLGEFNQKGTVRTKYGTRNQLQAAVTALKSNGIQVYGDVVMNHKGGADATEWVRAVEVNPSNRNQEVSGDYTIEAWTKFDFPGRGNTHSNFKWRWYHFDVVDWDQSRQLQNRIYKFRGKGWDWEVDTENGNYDYLMYADIDMDHPEVVNELRNWGVWYTNTLGLDGFRIDAVKHIKYSFTRDWLTHVRNTTGKNMFAVAEFWKNDIGAIENYLSKTNWNHSVFDVPLHYNLYNASRSGGNYDMRQIFNGTVVQRHPTHAVTFVDNHDSQPEEALESFVEEWFKPLAYALTLTRDQGYPSVFYGDYYGIPTHGVPAMKSKIDPILEARQKYAYGTQRDYLDHPDVIGWTREGDGVHADSGLATLMSDGPGGSKWMEVGKNNAGEVWYDITGNQTNTVTINKDGWGQFHVSGGSVSIYVQQ

SEQ ID NO: 25444 - protein, 483 aa, Bacillus licheniformis
HHNGTNGTMMQYFEWYLPNDGNHWNRLRSDASNLKDKGITAVWIPPAWKGASQNDVGYGAYDLYDLGEFNQKGTVRTKYGTRNQLQAAVTAVKSNGIQVYGDVVMNHKGGADATEWVRAVEVNPSNRNQEVSGDYTIEAWTKFDFPGRGNTHSNFKWRWYHFDGVDWDQSRQLQNRIYKFRGKGWDWEVDTENGNYDYLMYADIDMDHPEVVNELRNWGVWYTNTLGLDGFRIDAVKHIKYSFTRDWLTHVRNTTGKNMFAVAEFWKNDIGAIENYLSKTNWNHSVFDVPLHYNLYNASRSGGNYDMRQIFNGTVVQRHPTHAVTFVDNHDSQPEEALESFVEEWFKPLAYALTLTRDQGYPSVFYGDYYGIPTHGVPAMKSKIDPILEARQKYAYGTQRDYLDHPDVIGWTREGDGVHADSGLATLMSDGPGGSKWMEVGKNNAGEVWYDITGNQTNTVTINKDGWGQFHVSGGSVSIYVQQ

SEQ ID NO: 25445 - protein, 483 aa, Bacillus licheniformis
HHNGTNGTMMQYFEWYLPNDGNHWNRLRSDASNLKDKGITAVWIPPAWKGASQNDVGYGAYDLYDLGEFNQKGTVRTKYGTRNQLQAAVTALKSNGIQVYGDVVMNHKGGADATEWVRAVEVNPSNRNQEVSGDYTIEAWTKFDFPGRGNTHSNFKWRWYHFDGVDWDQSRQLQNRIYKFRGKGWDWEVDTENGNYDYLMYADIDMDHPEVVNELRNWGVWYTITLGLDGFRIDAVKHIKYSFTRDWLTHVRNTTGKNMFAVAEFWKNDIGAIENYLSKTNWNHSVFDVPLHYNLYNASRSGGNYDMRQIFNGTVVQRHPTHAVTFVDNHDSQPEEALESFVEEWFKPLAYALTLTRDQGYPSVFYGDYYGIPTHGVPAMKSKIDPILEARQKYAYGTQRDYLDHPDVIGWTREGDGVHADSGLATLMSDGPGGSKWMEVGKNNAGEVWYDITGNQTNTVTINKDGWGQFHVSGGSVSIYVQQ

SEQ ID NO: 25446 - protein, 483 aa, Bacillus licheniformis
HHNGTNGTMMQYFEWYLPNDGNHWNRLRSDASNLKDKGITAVWIPPAWKGASQNDVGYGAYDLYDLGEFNQKGTVRTKYGTRNQLQAAVTALKSNGIQVYGDVVMNHKGGADATEWVRAVEVNPSNRNQEVSGDYTIEAWTKFDFPGRGNTHSNFKWRWYHFDGVDWDQSRQLQNRIYKFRGKGWDWEVDTENGNYDYLMYADIDMDHPEVVNELRNWGVWYTNTLGLDGFRIDAVKHIKYSFTRDWLTHVRNTTGKNMFAVAEFWKNDIGAIENYLSKTNWNHSVFDVPLHYNLYNASRSGGNYDMRQIFNGTVVQRHPTHAVTFVDNHDSQPEEALESFVEEWFKPLAYALTLTRDQGYPSVFYGDYYGIPTHGVPAMKSKIDPILEARQKYAYGTQRDYLDHPDVIGWTREGDGVHADSGLATLMSDGPGGSKWMEVGKNNAGEVWYDITGFQTNTVTINKDGWGQFHVSGGSVSIYVQQ

SEQ ID NO: 25447 - protein, 483 aa, Bacillus licheniformis
HHNGTNGTMMQYFEWYLPNDGNHWNRLRSDASNLKDKGITAVWIPPAWKGASQNDVGYGAYDLYDLGEFNQKGTVRTKYGTRNQLQAAVTALKSNGIQVYGDVVMNHKGGADATCWVRAVEVNPSNRNQEVSGDYTIEAWTKFDFPGRGNTHSNFKWRWYHFDGVDWDQSRQLQNRIYKFRGKGWDWEVDTENGNYDYLMYADIDMDHPEVVNELRNWGVWYTNTLGLDGFRIDAVKHIKYSFTRDWLTHVRNTTGKNMFAVAEFWKNDIGAIENYLSKTNWNHSVFDVPLHYNLYNASRSGGNYDMRQIFNGTVVQRHPTHAVTFVDNHDSQPEEALESFVEEWFKPLAYALTLTRDQGYPSVFYGDYYGIPTHGVPAMKSKIDPILEARQKYAYGTQRDYLDHPDVIGWTREGDGVHADSGLATLMSDGPGGSKWMEVGKNNAGEVWYDITGNQTNTVTINKDGWGQFHVSGGSVSIYVQQ

SEQ ID NO: 25448 - protein, 483 aa, Bacillus licheniformis
HHNGTNGTMMQYFEWYLPNDGNHWNRLRSDASNLKDKGITAVWIPPAWKGASQNDVGYGAYDLYDLGEFNQKGTVRTKYGTRNQLQAAVTALKSNGIQVYGDVVMNHKGGADATEWVRAVEVNPSNRNQEVSGDYTIEAWTKFDFPGRGNTHSNFKWRWYHFDGVDWDQSRQLQNRIYKFRGKGWDWEVDTENGNYDYLMYADIDMDHPECVNELRNWGVWYTNTLGLDGFRIDAVKHIKYSFTRDWLTHVRNTTGKNMFAVAEFWKNDIGAIENYLSKTNWNHSVFDVPLHYNLYNASRSGGNYDMRQIFNGTVVQRHPTHAVTFVDNHDSQPEEALESFVEEWFKPLAYALTLTRDQGYPSVFYGDYYGIPTHGVPAMKSKIDPILEARQKYAYGTQRDYLDHPDVIGWTREGDGVHADSGLATLMSDGPGGSKWMEVGKNNAGEVWYDITGNQTNTVTINKDGWGQFHVSGGSVSIYVQQ

SEQ ID NO: 25449 - protein, 483 aa, Bacillus licheniformis
HHNGTNGTMMQYFEWYLPNDGNHWNRLRSDASNLKDKGITAVWIPPAWKGASQNDVGYGAYDLYDLGEFNQKGTVRTKYGTRNQLQAAVTALKSNGIQVYGDVVMNHKGGADATEWVRAVEVNPSNRNQEVSGDYTIEAWTKFDFPGRGNTHSNFKWRWYHFDGVDWDQSRQLQNRIYKFRGKGWDWEYDTENGNYDYLMYADIDMDHPEVVNELRNWGVWYTNTLGLDGFRIDAVKHIKYSFTRDWLTHVRNTTGKNMFAVAEFWKNDIGAIENYLSKTNWNHSVFDVPLHYNLYNASRSGGNYDMRQIFNGTVVQRHPTHAVTFVDNHDSQPEEALESFVEEWFKPLAYALTLTRDQGYPSVFYGDYYGIPTHGVPAMKSKIDPILEARQKYAYGTQRDYLDHPDVIGWTREGDGVHADSGLATLMSDGPGGSKWMEVGKNNAGEVWYDITGNQTNTVTINKDGWGQFHVSGGSVSIYVQQ

SEQ ID NO: 25450 - protein, 483 aa, Bacillus licheniformis
HHNGTNGTMMQYFEWYLPNDGNHWNRLRSDASNLKDKGITAVWIPPAWKGASQNDVGYGAYDLYDLGEFHQKGTVRTKYGTRNQLQAAVTALKSNGIQVYGDVVMNHKGGADATEWVRAVEVNPSNRNQEVSGDYTIEAWTKFDFPGRGNTHSNFKWRWYHFDGVDWDQSRQLQNRIYKFRGKGWDWEVDTENGNYDYLMYADIDMDHPEVVNELRNWGVWYTNTLGLDGFRIDAVKHIKYSFTRDWLTHVRNTTGKNMFAVAEFWKNDIGAIENYLSKTNWNHSVFDVPLHYNLYNASRSGGNYDMRQIFNGTVVQRHPTHAVTFVDNHDSQPEEALESFVEEWFKPLAYALTLTRDQGYPSVFYGDYYGIPTHGVPAMKSKIDPILEARQKYAYGTQRDYLDHPDVIGWTREGDGVHADSGLATLMSDGPGGSKWMEVGKNNAGEVWYDITGNQTNTVTINKDGWGQFHVSGGSVSIYVQQ

SEQ ID NO: 25451 - protein, 483 aa, Bacillus licheniformis
HHNGTNGTMMQYFEWYLPNDGNHWNRLRSDASNLKDKGITAVWIPPAWKGASQNDVGYGAYDLYDLGEFNQKGTVRTKYGTRNQLQAAVTALKSNGIQVYGDVVMNHKGGADVTEWVRAVEVNPSNRNQEVSGDYTIEAWTKFDFPGRGNTHSNFKWRWYHFDGVDWDQSRQLQNRIYKFRGKGWDWEVDTENGNYDYLMYADIDMDHPEVVNELRNWGVWYTNTLGLDGFRIDAVKHIKYSFTRDWLTHVRNTTGKNMFAVAEFWKNDIGAIENYLSKTNWNHSVFDVPLHYNLYNASRSGGNYDMRQIFNGTVVQRHPTHAVTFVDNHDSQPEEALESFVEEWFKPLAYALTLTRDQGYPSVFYGDYYGIPTHGVPAMKSKIDPILEARQKYAYGTQRDYLDHPDVIGWTREGDGVHADSGLATLMSDGPGGSKWMEVGKNNAGEVWYDITGNQTNTVTINKDGWGQFHVSGGSVSIYVQQ

SEQ ID NO: 25452 - protein, 483 aa, Bacillus licheniformis
HHNGTNGTMMQYFEWYLPNDGNHWNRLRSDASNLKDKGITAVWIPPAWKGASQNDVGYGAYDLYDLGEFNQKGTVRTKYGTRNQLQAAVTKLKSNGIQVYGDVVMNHKGGADATEWVRAVEVNPSNRNQEVSGDYTIEAWTKFDFPGRGNTHSNFKWRWYHFDGVDWDQSRQLQNRIYKFRGKGWDWEVDTENGNYDYLMYADIDMDHPEVVNELRNWGVWYTNTLGLDGFRIDAVKHIKYSFTRDWLTHVRNTTGKNMFAVAEFWKNDIGAIENYLSKTNWNHSVFDVPLHYNLYNASRSGGNYDMRQIFNGTVVQRHPTHAVTFVDNHDSQPEEALESFVEEWFKPLAYALTLTRDQGYPSVFYGDYYGIPTHGVPAMKSKIDPILEARQKYAYGTQRDYLDHPDVIGWTREGDGVHADSGLATLMSDGPGGSKWMEVGKNNAGEVWYDITGNQTNTVTINKDGWGQFHVSGGSVSIYVQQ

SEQ ID NO: 25453 - protein, 483 aa, Bacillus licheniformis
HHNQTNGTMMQYFEWYLPNDGNHWNRLRSDASNLKDKGITAVWIPPAWKGASQNDVGYGAYDLYDLGEFNQKGTVRTKYGTRNQLQAAVTALKSNGIQVYGDVVMNHKGGADATEWVRAVEVNPSNRNQEVSGDYTIEAWTKFDFPGRGNTHSNFKWRWYHFDGVDWDQSRQLQNRIYKFRGKEWDWEVDTENGNYDYLMYADIDMDHPEVVNELRNWGVWYTNTLGLDGFRIDAVKHIKYSFTRDWLTHVRNTTGKNMFAVAEFWKNDIGAIENYLSKTNWNHSVFDVPLHYNLYNASRSGGNYDMRQIFNGTVVQRHPTHAVTFVDNHDSQPEEALESFVEEWFKPLAYALTLTRDQGYPSVFYGDYYGIPTHGVPAMKSKIDPILEARQKYAYGTQRDYMDHPDVIGWTREGDGVHADSGLATLMSDGPGGSKWMEVGKNNAGEVWYDITGNQTNTVTINKDGWGQFHVSGGSVSIYVQQ

SEQ ID NO: 25454 - protein, 483 aa, Bacillus licheniformis
HHNGTHGTMMQYFEWYLPNDGNHWNRLRSDASNLKDKGITAVWIPPAWKGASQNDVGYGAYDLYDLGEFNQKGTVRTKYGTRNQLQAAVTALKSNGIQVYGDVVMNHKGGADATEWVRAVEVNPSNRNQEVSGDYTIEAWTKFDFPGRGNTHSNFKWRWYHFDGVDWDQSRQLQNRIYKFRGKGWDWEVDTENGNYDYLMYADIDMDHPEVVNELRNWGVWYTNTLGLDGFRIDAVKHIKYSFTRDWLTHVRNTTGKNMFAVAEFWKNDIGAIENYLSKTNWNHSVFDVPLHYNLYNASRSGGNYDMRQIFNGTVVQRHPTHAVTFVDNHDSQPEEALESFVEEWFKPLAYALTLTRDQGYPSVFYGDYYGIPTHGVPAMKSKIDPILEARQKYAYGTQRDYLDHPDVIGWTREGDGVHADSGLATLMSDGPGGSKWMEVGKNNAGEVWYDITGNQTNTVTINKDGWGQFHVSGGSVSIYVQQ

SEQ ID NO: 25455 - protein, 483 aa, Bacillus licheniformis
HHNGTNGTMMQYFEWYLPNDGNHWNRLRSDASNLKDKGITAVWIPPAWKGASQNDVGYGAYDLYDLGEFNQKGTVRTKYGTRNQLQAAVTALKSNGIQVYGDVVMNHKGGADAREWVRAVEVNPSNRNQEVSGDYTIEAWTKFDFPGRGNTHSNFKWRWYHFDGVDWDQSRQLQNRIYKFRGKGWDWEVDTENGNYDYLMYADIDMDHPEVVNELRNWGVWYTNTLGLDGFRIDAVKHIKYSFTRDWLTHVRNTTGKNMFAVAEFWKNDIGAIENYLSKTNWNHSVFDVPLHYNLYNASRSGGNYDMRQIFNGTVVQRHPTHAVTFVDNHDSQPEEALESFVEEWFKPLAYALTLTRDQGYPSVFYGDYYGIPTHGVPAMKSKIDPILEARQKYAYGTQRDYLDHPDVIGWTREGDGVHADSGLATLMSDGPGGSKWMEVGKNNAGEVWYDITGNQTNTVTINKDGWGQFHVSGGSVSIYVQQ

SEQ ID NO: 25456 - protein, 483 aa, Bacillus licheniformis
HHNGTNGTMMQYFEWYLPNDGNHWNRLRSDASNLKDKGITAVWIPPAWKGASQNDVGYGAYDLYDLGEFNQKGTVRTKYGTRNQLQAAVTALKSNGIQVYGDVVMNHKGGADATEWVRAVEVNPSNRNQEVSGDDTIEAWTKFDFPGRGNTHSNFKWRWYHFDGVDWDQSRQLQNRIYKFRGKGWDWEVDTENGNYDYLMYADIDMDHPEVVNELRNWGVWYTNTLGLDGFRIDAVKHIKYSFTRDWLTHVRNTTGKNMFAVAEFWKNDIGAIENYLSKTNWNHSVFDVPLHYNLYNASRSGGNYDMRQIFNGTVVQRHPTHAVTFVDNHDSQPEEALESFVEEWFKPLAYALTLTRDQGYPSVFYGDYYGIPTHGVPAMKSKIDPILEARQKYAYGTQRDYLDHPDVIGWTREGDGVHADSGLATLMSDGPGGSKWMEVGKNNAGEVWYDITGNQTNTVTINKDGWGQFHVSGGSVSIYVQQ

SEQ ID NO: 25457 - protein, 483 aa, Bacillus licheniformis
HHNGTNGTMMQYFEWYLPNDGNHWNRLRSDASNLKDKGITAVWIPPAWKGASQNDVGYGAYDLYDLGEFNQKGTVRTKYGTRNQLQAAVTALKSNGIQVYGDVVMNHKGGADATEWVRAVEVNPSNRNQEVSGDYTIEAWTKFDFPGRGNTHSNFKWRWYHFDGVDWDQSRQLQNRIYKFRGKGWDWEVDTENGNYDYLMYADIDMDHPEVVNELRNWGVWYTNTLGLDGHRIDAVKHIKYSFTRDWLTHVRNTTGKNMFAVAEFWKNDIGAIENYLSKTNWNHSVFDVPLHYNLYNASRSGGNYDMRQIFNGTVVQRHPTHAVTFVDNHDSQPEEALESFVEEWFKPLAYALTLTRDQGYPSVFYGDYYGIPTHGVPAMKSKIDPILEARQKYAYGTQRDYLDHPDVIGWTREGDGVHADSGLATLMSDGPGGSKWMEVGKNNAGEVWYDITGNQTNTVTINKDGWGQFHVSGGSVSIYVQQ

SEQ ID NO: 25458 - protein, 483 aa, Bacillus licheniformis
HHNGTNHTMMQYFEWYLPNDGNHWNRLRSDASNLKDKGITAVWIPPAWKGASQNDVGYGAYDLYDLGEFNQKGTVRTKYGTRNQLQAAVTALKSNGIQVYGDVVMNHKGGADATEWVRAVEVNPSNRNQEVSGDYTIEAWTKFDFPGRGNTHSNFKWRWYHFDGVDWDQSRQLQNRIYKFRGKGWDWEVDTENGNYDYLMYADIDMDHPEVVNELRNWGVWYTNTLGLDGFRIDAVKHIKYSFTRDWLTHVRNTTGKNMFAVAEFWKNDIGAIENYLSKTNWNHSVFDVPLHYNLYNASRSGGNYDMRQIFNGTVVQRHPTHAVTFVDNHDSQPEEALESFVEEWFKPLAYALTLTRDQGYPSVFYGDYYGIPTHGVPAMKSKIDPILEARQKYAYGTQRDYLDHPDVIGWTREGDGVHADSGLATLMSDGPGGSKWMEVGKNNAGEVWYDITGNQTNTVTINKDGWGQFHVSGGSVSIYVQQ

SEQ ID NO: 25459 - protein, 483 aa, Bacillus licheniformis
HHNGTNGTMMQYFEWYLPNDGNHWNRLRSDASNLKDKGITAVWIPPAWKGASQNDVGYGAYDLYDLGEFNQKGTVRTKYGTRNQLQAAVTALKSNGIQVYGDVVMNHKGGADATEWVRAVEVNPSNRNQEVSGDYTIEAWTKFDFPGRGNTHSNFKWRWYHFDGVDWDQSRQLQNRIYKFRGKGWDWEVDTENGNYDYLMYADIDMDHPEVVNELRNWGVWYTNTLGLDGFRIDAVKHIKYSFTRDWLTHVRNTTGKNMFAVAEFWKNDIGAIENYLSKTNWNHSVFDDPLHYNLYNASRSGGNYDMRQIFNGTVVQRHPTHAVTFVDNHDSQPEEALESFVEEWFKPLAYALTLTRDQGYPSVFYGDYYGIPTHGVPAMKSKIDPILEARQKYAYGTQRDYLDHPDVIGWTREGDGVHADSGLATLMSDGPGGSKWMEVGKNNAGEVWYDITGNQTNTVTINKDGWGQFHVSGGSVSIYVQQ

SEQ ID NO: 25460 - protein, 483 aa, Bacillus licheniformis
HHNGTNGTMMQYFEWYLPNDGNHWNRLRSDASNLKDKGITAVWIPPAWKGASQNDVGYGAYDLYDLGEFNQKGTVCTKYGTRNQLQAAVTALKSNGIQVYGDVVMNHKGGADATEWVRAVEVNPSNRNQEVSGDYTIEAWTKFDFPGRGNTHSNFKWRWYHFDGVDWDQSRQLQNRIYKFRGKGWDWEVDTENGNYDYLMYADIDMDHPEVVNELRNWGVWYTNTLGLDGFRIDAVKHIKYSFTRDWLTHVRNTTGKNMFAVAEFWKNDIGAIENYLSKTNWNHSVFDVPLHYNLYNASRSGGNYDMRQIFNGTVVQRHPTHAVTFVDNHDSQPEEALESFVEEWFKPLAYALTLTRDQGYPSVFYGDYYGIPTHGVPAMKSKIDPILEARQKYAYGTQRDYLDHPDVIGWTREGDGVHADSGLATLMSDGPGGSKWMEVGKNNAGEVWYDITGNQTNTVTINKDGWGQFHVSGGSVSIYVQQ

SEQ ID NO: 25461 - protein, 483 aa, Bacillus licheniformis
HHNGTNGTMMQYFEWYLPNDGNHWNRLFSDASNLKDKGITAVWIPPAWKGASQNDVGYGAYDLYDLGEFNQKGTVRTKYGTRNQLQAAVTALKSNGIQVYGDVVMNHKGGADATEWVRAVEVNPSNRNQEVSGDYTIEAWTKFDFPGRGNTHSNFKWRWYHFDGVDWDQSRQLQNRIYKFRGKGWDWEVDTENGNYDYLMYADIDMDHPEVVNELRNWGVWYTNTLGLDGFRIDAVKHIKYSFTRDWLTHVRNTTGKNMFAVAEFWKNDIGAIENYLSKTNWNHSVFDVPLHYNLYNASRSGGNYDMRQIFNGTVVQRHPTHAVTFVDNHDSQPEEALESFVEEWFKPLAYALTLTRDQGYPSVFYGDYYGIPTHGVPAMKSKIDPILEARQKYAYGTQRDYLDHPDVIGWTREGDGVHADSGLATLMSDGPGGSKWMEVGKNNAGEVWYDITGNQTNTVTINKDGWGQFHVSGGSVSIYVQQ

SEQ ID NO: 25462 - protein, 483 aa, Bacillus licheniformis
HHNGTCGTMMQYFEWYLPNDGNHWNRLRSDASNLKDKGITAVWIPPAWKGASQNDVGYGAYDLYDLGEFNQKGTVRTKYGTRNQLQAAVTALKSNGIQVYGDVVMNHKGGADATEWVRAVEVNPSNRNQEVSGDYTIEAWTKFDFPGRGNTHSNFKWRWYHFDGVDWDQSRQLQNRIYKFRGKGWDWEVDTENGNYDYLMYADIDMDHPEVVNELRNWGVWYTNTLGLDGFRIDAVKHIKYSFTRDWLTHVRNTTGKNMFAVAEFWKNDIGAIENYLSKTNWNHSVFDVPLHYNLYNASRSGGNYDMRQIFNGTVVQRHPTHAVTFVDNHDSQPEEALESFVEEWFKPLAYALTLTRDQGYPSVFYGDYYGIPTHGVPAMKSKIDPILEARQKYAYGTQRDYLDHPDVIGWTREGDGVHADSGLATLMSDGPGGSKWMEVGKNNAGEVWYDITGNQTNTVTINKDGWGQFHVSGGSVSIYVQQ

SEQ ID NO: 25463 - protein, 483 aa, Bacillus licheniformis
HHNGTNGTMMQYFEWYLPNDGNHWNRLRSDASNLKDKGITAVWIPPAWKGASQNDVGYGAYDLYDLGEFNQKGTVRTKYGTRNQLQAAVTALKSNGIQVYGDVVMNHKGGADATEWVRAVEVNPSNRNQEVSGDYTIEAWTKFDFPGRGNTHSNFKWRWYHFDGVDWDQSRQLQNRIYKFRGKGWDWEVDTENGNYDYLMYADIDMDHPEVVNELRNWGVWYTNTLGLDGFRIDAVKHIKYSFTRDWLTHVRNTTGKNMFAVAEFWKNDIGAIENYLSKTNWNHSVFDVPLHYNLYNASRSGGNYDMRQIFNGTVVQRHPTHAVTFVDNHDSQPEEALESYVEEWFKPLAYALTLTRDQGYPSVFYGDYYGIPTHGVPAMKSKIDPILEARQKYAYGTQRDYLDHPDVIGWTREGDGVHADSGLATLMSDGPGGSKWMEVGKNNAGEVWYDITGNQTNTVTINKDGWGQFHVSGGSVSIYVQQ

SEQ ID NO: 25464 - protein, 483 aa, Bacillus licheniformis
HHNGTNGTMMQYFERYLPNDGNHWNRLRSDASNLKDKGITAVWIPPAWKGASQNDVGYGAYDLYDLGEFNQKGTVRTKYGTRNQLQAAVTALKSNGIQVYGDVVMNHKGGADATEWVRAVEVNPSNRNQEVSGDYTIEAWTKFDFPGRGNTHSNFKWRWYHFDGVDWDQSRQLQNRIYKFRGKGWDWEVDTENGNYDYLMYADIDMDHPEVVNELRNWGVWYTNTLGLDGFRIDAVKHIKYSFTRDWLTHVRNTTGKNMFAVAEFWKNDIGAIENYLSKTNWNHSVFDVPLHYNLYNASRSGGNYDMRQIFNGTVVQRHPTHAVTFVDNHDSQPEEALESFVEEWFKPLAYALTLTRDQGYPSVFYGDYYGIPTHGVPAMKSKIDPILEARQKYAYGTQRDYLDHPDVIGWTREGDGVHADSGLATLMSDGPGGSKWMEVGKNNAGEVWYDITGNQTNTVTINKDGWGQFHVSGGSVSIYVQQ

SEQ ID NO: 25465 - protein, 483 aa, Bacillus licheniformis
HHNGTNGTMMQYFEWYLPNDGNHWNRLRSDASNLKDKGITAVWIPPAWKGASQNDVGYGAYDLYDLGEFNQKGTVRTKYGTRNQLQAAVTALKSNGIQVYGDVVMNHKGGADATEWVRAVEVNPSNRNQEVSGDYTIEAWTKFDFCGRGNTHSNFKWRWYHFDGVDWDQSRQLQNRIYKFRGKGWDWEVDTENGNYDYLMYADIDMDHPEVVNELRNWGVWYTNTLGLDGFRIDAVKHIKYSFTRDWLTHVRNTTGKNMFAVAEFWKNDIGAIENYLSKTNWNHSVFDVPLHYNLYNASRSGGNYDMRQIFNGTVVQRHPTHAVTFVDNHDSQPEEALESFVEEWFKPLAYALTLTRDQGYPSVFYGDYYGIPTHGVPAMKSKIDPILEARQKYAYGTQRDYLDHPDVIGWTREGDGVHADSGLATLMSDGPGGSKWMEVGKNNAGEVWYDITGNQTNTVTINKDGWGQFHVSGGSVSIYVQQ

SEQ ID NO: 25466 - protein, 483 aa, Bacillus licheniformis
HHNGTNGTMMQYFEWYLPNDGNHWNRLRSDASNLKDKGITAVWIPPAWKGASQNDVGYGAYDLYDLGEFNQKGTVRTKYGTRNQLQAAVTALKSNGIQVYGDVVMNHKGGADATEWVRAVEVNPSNRNQEVSGDYTIEAWTKFDFPGRGNTHSNFKWRWYHFDGVDWDQSRQLQNRIYKFRGKGWDWEVDTENGNYDYLMYADIDMDMPEVVNELRNWGVWYTNTLGLDGFRIDAVKHIKYSFTRDWLTHVRNTTGKNMFAVAEFWKNDIGAIENYLSKTNWNHSVFDVPLHYNLYNASRSGGNYDMRQIFNGTVVQRHPTHAVTFVDNHDSQPEEALESFVEEWFKPLAYALTLTRDQGYPSVFYGDYYGIPTHGVPAMKSKIDPILEARQKYAYGTQRDYLDHPDVIGWTREGDGVHADSGLATLMSDGPGGSKWMEVGKNNAGEVWYDITGNQTNTVTINKDGWGQFHVSGGSVSIYVQQ

SEQ ID NO: 25467 - protein, 483 aa, Bacillus licheniformis
HHNGTNGTMMQYFEWYLPNDGNHWNRLRSDAFNLKDKGITAVWIPPAWKGASQNDVGYGAYDLYDLGEFNQKGTVRTKYGTRNQLQAAVTALKSNGIQVYGDVVMNHKGGADATEWVRAVEVNPSNRNQEVSGDYTIEAWTKFDFPGRGNTHSNFKWRWYHFDGVDWDQSRQLQNRIYKFRGKGWDWEVDTENGNYDYLMYADIDMDHPEVVNELRNWGVWYTNTLGLDGFRIDAVKHIKYSFTRDWLTHVRNTTGKNMFAVAEFWKNDIGAIENYLSKTNWNHSVFDVPLHYNLYNASRSGGNYDMRQIFNGTVVQRHPTHAVTFVDNHDSQPEEALESFVEEWFKPLAYALTLTRDQGYPSVFYGDYYGIPTHGVPAMKSKIDPILEARQKYAYGTQRDYLDHPDVIGWTREGDGVHADSGLATLMSDGPGGSKWMEVGKNNAGEVWYDITGNQTNTVTINKDGWGQFHVSGGSVSIYVQQ

SEQ ID NO: 25468 - protein, 483 aa, Bacillus licheniformis
HHNGTNGTMMQYFEWYLPNDGNHWNRLRSDASNLKDKGITAVWIPPAWKGASQNDVGYGAYDLYDLGEFNQKGTVRTKYGTRNQLQAAVTALKSNGIQVYGDVVMNHKGGADATEWVRAVEVNPSNRNQEVSGDYTIEAWTKFDFPGRGNTHSNFKWRWYHFDGVDWDQSRQLQNRIYKFRGKGWDWEVDTENGNYDYLMYADIDMDHPEVVNELRNWGVWYTNTLGLDGFRIDAVKHIKYSFTRDWLTHVRNTTGKNMFAVAEFWKNDIGAIENYLSKTNWNHSVFDVPLHYNLYNASRSGGNYDMRQIFNGTVVQRHPTHAVTFVDNHDSQPEEALESFVEEWFKPLAYALTLTRDQGYPSVFYGDYYGIPTHGVPAMKSKIDPILEARQKYAYGTQRDYLDHPDVIGWTREGDGVHADSGLATLMSDGPGGSKWMEVGKNNAGEVWYDITGNQTNTVTINKDGWGQFHVSGGSVEIYVQQ

SEQ ID NO: 25469 - protein, 483 aa, Bacillus licheniformis
HHNGTNGTMMQYFEWYLPNDGNHWNRLRSDASNLKDKGITAVWIPPAWKGASQNDVGYGAYDLYDLGEFNQKGTVRTKYGTRNQLQAAVTALKSNGIQVYGDVVMNHKGGADATEWVRAVEVNPSNRNQEVSGDYTIEAWTKFDFPGRGNTHSNFKWRWYHFDGVDWDQSRQLQNRKYKFRGKGWDWEVDTENGNYDYLMYADIDMDHPEVVNELRNWGVWYTNTLGLDGFRIDAVKHIKYSFTRDWLTHVRNTTGKNMFAVAEFWKNDIGAIENYLSKTNWNHSVFDVPLHYNLYNASRSGGNYDMRQIFNGTVVQRHPTHAVTFVDNHDSQPEEALESFVEEWFKPLAYALTLTRDQGYPSVFYGDYYGIPTHGVPAMKSKIDPILEARQKYAYGTQRDYLDHPDVIGWTREGDGVHADSGLATLMSDGPGGSKWMEVGKNNAGEVWYDITGNQTNTVTINKDGWGQFHVSGGSVSIYVQQ

SEQ ID NO: 25470 - protein, 483 aa, Bacillus licheniformis
HHNGTNGPMMQYFEWYLPNDGNHWNRLRSDASNLKDKGITAVWIPPAWKGASQNDVGYGAYDLYDLGEFNQKGTVRTKYGTRNQLQAAVTALKSNGIQVYGDVVMNHKGGADATEWVRAVEVNPSNRNQEVSGDYTIEAWTKFDFPGRGNTHSNFKWRWYHFDGVDWDQSRQLQNRIYKFRGKGWDWEVDTENGNYDYLMYADIDMDHPEVVNELRNWGVWYTNTLGLDGFRIDAVKHIKYSFTRDWLTHVRNTTGKNMFAVAEFWKNDIGAIENYLSKTNWNHSVFDVPLHYNLYNASRSGGNYDMRQIFNGTVVQRHPTHAVTFVDNHDSQPEEALESFVEEWFKPLAYALTLTRDQGYPSVFYGDYYGIPTHGVPAMKSKIDPILEARQKYAYGTQRDYLDHPDVIGWTREGDGVHADSGLATLMSDGPGGSKWMEVGKNNAGEVWYDITGNQTNTVTINKDGWGQFHVSGGSVSIYVQQ

SEQ ID NO: 25471 - protein, 483 aa, Bacillus licheniformis
HHNGTNGTMMQYFEWYLPNDGNHWNRLRSDASNLKDKGITAVWIPPAWKGASQNDVGYGAYDLYDLGEFNQKGTVRTKYGTRNQLQAAVTALKSNGIQVYGDVVMNHKGGADATEWVRAVEVNPSNRNQEVSGDYTIEAWTKFDFPGRGNTHSNFKWRWYHFDGVDWDQSRQLQNRRYKFRGKGWDWEVDTENGNYDYLMYADIDMDHPEVVNELRNWGVWYTNTLGLDGFRIDAVKHIKYSFTRDWLTHVRNTTGKNMFAVAEFWKNDIGAIENYLSKTNWNHSVFDVPLHYNLYNASRSGGNYDMRQIFNGTVVQRHPTHAVTFVDNHDSQPEEALESFVEEWFKPLAYALTLTRDQGYPSVFYGDYYGIPTHGVPAMKSKIDPILEARQKYAYGTQRDYLDHPDVIGWTREGDGVHADSGLATLMSDGPGGSKWMEVGKNNAGEVWYDITGNQTNTVTINKDGWGQFHVSGGSVSIYVQQ

SEQ ID NO: 25472 - protein, 483 aa, Bacillus licheniformis
HHNGTNGTMMQYFEWYLPNDGNHWNRLRSDASNLKDKGITAVWIPPAWKGASQNDVGYGAYDLYDLGEFNDKGTVRTKYGTRNQLQAAVTALKSNGIQVYGDVVMNHKGGADATEWVRAVEVNPSNRNQEVSGDYTIEAWTKFDFPGRGNTHSNFKWRWYHFDGVDWDQSRQLQNRIYKFRGKGWDWEVDTENGNYDYLMYADIDMDHPEVVNELRNWGVWYTNTLGLDGFRIDAVKHIKYSFTRDWLTHVRNTTGKNMFAVAEFWKNDIGAIENYLSKTNWNHSVFDVPLHYNLYNASRSGGNYDMRQIFNGTVVQRHPTHAVTFVDNHDSQPEEALESFVEEWFKPLAYALTLTRDQGYPSVFYGDYYGIPTHGVPAMKSKIDPILEARQKYAYGTQRDYLDHPDVIGWTREGDGVHADSGLATLMSDGPGGSKWMEVGKNNAGEVWYDITGNQTNTVTINKDGWGQFHVSGGSVSIYVQQ

SEQ ID NO: 25473 - protein, 483 aa, Bacillus licheniformis
HHNGTNGTMMQYFEWYLPNDGNHWNRLKSDASNLKDKGITAVWIPPAWKGASQNDVGYGAYDLYDLGEFNQKGTVRTKYGTRNQLQAAVTALKSNGIQVYGDVVMNHKGGADATEWVRAVEVNPSNRNQEVSGDYTIEAWTKFDFPGRGNTHSNFKWRWYHFDGVDWDQSRQLQNRIYKFRGKGWDWEVDTENGNYDYLMYADIDMDHPEVVNELRNWGVWYTNTLGLDGFRIDAVKHIKYSFTRDWLTHVRNTTGKNMFAVAEFWKNDIGAIENYLSKTNWNHSVFDVPLHYNLYNASRSGGNYDMRQIFNGTVVQRHPTHAVTFVDNHDSQPEEALESFVEEWFKPLAYALTLTRDQGYPSVFYGDYYGIPTHGVPAMKSKIDPILEARQKYAYGTQRDYLDHPDVIGWTREGDGVHADSGLATLMSDGPGGSKWMEVGKNNAGEVWYDITGNQTNTVTINKDGWGQFHVSGGSVSIYVQQ

SEQ ID NO: 25474 - protein, 483 aa, Bacillus licheniformis
HHNGTNGTMMQYFEWYLPNDGNHWNRLRSDASNLKDKGITAVWIPPAWKGASQNDVGYGAYDLYDLGEFNQKGTVRTKYGTRNQLQAAVTALKSNGIQVYGDVVMNHKGGADATEWVRAVEVNPSNRNQEVSGDYPIEAWTKFDFPGRGNTHSNFKWRWYHFDGVDWDQSRQLQNRIYKFRGKGWDWEVDTENGNYDYLMYADIDMDHPEVVNELRNWGVWYTNTLGLDGFRIDAVKHIKYSFTRDWLTHVRNTTGKNMFAVAEFWKNDIGAIENYLSKTNWNHSVFDVPLHYNLYNASRSGGNYDMRQIFNGTVVQRHPTHAVTFVDNHDSQPEEALESFVEEWFKPLAYALTLTRDQGYPSVFYGDYYGIPTHGVPAMKSKIDPILEARQKYAYGTQRDYLDHPDVIGWTREGDGVHADSGLATLMSDGPGGSKWMEVGKNNAGEVWYDITGNQTNTVTINKDGWGQFHVSGGSVSIYVQQ

SEQ ID NO: 25475 - protein, 483 aa, Bacillus licheniformis
HHNGTNGTMMQYFEWYLPNDGNHWNRLRSDASNLKDKGITAVWIPPAWKGASQNDVGYGAYDLYDLGEFNQKGTVRTKYGTRNQLQAAVTALKSNGIQVYGDVVMNHKGGADATEWVRAVEVNPSNRNQEVSGDYTIEAWTKFDFPGRGNTHSNFKWRWYHFDGVDWDQSRQLQNRIYKFRGKGWDWEVDTENGNYDYLMYADIDMDHPEVVNELRNWGVWYTNTLGLDGFRIDAVKHIKYSFTRDWLTHVRNTTGKNMFATAEFWKNDIGAIENYLSKTNWNHSVFDVPLHYNLYNASRSGGNYDMRQIFNGTVVQRHPTHAVTFVDNHDSQPEEALESFVEEWFKPLAYALTLTRDQGYPSVFYGDYYGIPTHGVPAMKSKIDPILEARQKYAYGTQRDYLDHPDVIGWTREGDGVHADSGLATLMSDGPGGSKWMEVGKNNAGEVWYDITGNQTNTVTINKDGWGQFHVSGGSVSIYVQQ

SEQ ID NO: 25476 - protein, 483 aa, Bacillus licheniformis
HHNGTNGTMMQYFEWYLPNDGNHWNRLRSDASNLKDKGITAVWIPPAWKGASQNDVGYGAYDLYDLGEFNQKGTVRTKYGTRNQLQAAVTALKSNGIQVYGDVVMNHKGGADATEWVRAVEVNPSNRNQEVSGDYTIEAWTKFDFPGRGNTHSNFKWRWYHFDGVDWDQSRQLQNRIYKFRGKGWDWEVDTENGNYDYLMYADIDMDHPEVVNELRNWGVWYTNTLGLDGFRIDAVKHIKYSFTRDWLTHVRNTTGKNMFAVAEFWKNDIGAIENYLSKTNWNHSVFDVPLHYNLYNASRSPGNYDMRQIFNGTVVQRHPTHAVTFVDNHDSQPEEALESFVEEWFKPLAYALTLTRDQGYPSVFYGDYYGIPTHGVPAMKSKIDPILEARQKYAYGTQRDYLDHPDVIGWTREGDGVHADSGLATLMSDGPGGSKWMEVGKNNAGEVWYDITGNQTNTVTINKDGWGQFHVSGGSVSIYVQQ

SEQ ID NO: 25477 - protein, 483 aa, Bacillus licheniformis
HHNGTNGTMMQYFEWYLPNDGNHWNRLRSDASNLKDKGITAVWIPPAWKGASQNDVGYGAYDLYDLGEFNQKGTVRTKYGTRNQLQAAVTALKSNGIQVYGDVVMNHKGGADATEWVRAVEVNPSNRNQEVSGDYTIEAWTKFDFPGRGNTHSNFKWRWYHFDGVDWDQSRQLQNRIYKFRGKEWDWEVDTENGNYDYLMYADIDMDHPEVVNELRNWGVWYTNTLGLDGFRIDAVKHIKYSFTRDWLTHVRNTTGKNMFAVAEFWKNDIGAIENYLSKTNWNHSVFDVPLHYNLYNASRSGGNYDMRQIFNGTVVQRHPTHAVTFVDNHDSQPEEALESFVEEWFKPLAYALTLTRDQGYPSVFYGDYYGIPTHGVPAMKSKIDPILEARQKYAYGTQRDYLDHPDVIGWTREGDGVHADSGLATLMSDGPGGSKWMEVGKNNAGEVWRDITGNQTNEVTINKDGWGEFHVSGGSVSIYVQQ

SEQ ID NO: 25478 - protein, 483 aa, Bacillus licheniformis
HHNGTNGTMMQYFEWYLPNDGNHWNRLRSDASNLKDKGITAVWIPPAWKGASQNDVGYGAYDLYDLGEFNQKGTVRTKYGTREQLQAAVTALKSNGIQVYGDVVMNHKGGADATEWVRAVEVNPSNRNQEVSGDYTIEAWTKFDFPGRGNTHSNFKWRWYHFDGVDWDQSRQLQNRIYKFRGKEWDWEVDTENGNYDYLMYADIDMDHPEVVNELRDWGVWYTRTLGLDGFRIDAVKHIKYSFTRDWLTHVRNTTGKNMFAVAEFWKNDIGAIENYLSKTNWNHSVFDVPLHYNLYNASRSGGNYDMRQIFNGTVVQRHPTHAVTFVDNHDSQPEEALESFVEEWFKPLAYALTLTRDQGYPSVFYGDYYGIPTHGVPAMKSKIDPILEARQKYAYGTQRDYLDHPDVIGWTREGDGVHADSGLATLMSDGPGGSKWMEVGKNNAGEVWYDITGNQTNTVTINKDGWGQFHVSGGSVSIYVQQ

SEQ ID NO: 25479 - protein, 483 aa, Bacillus licheniformis
HHNGTNGTMMQYFEWYLPNDGNHWNRLRSDASNLKDKGITAVWIPPAWKGASQNDVGYGAYDLYDLGEFNQKGTVRTKYGTRNQLQAAVTALKSNGIQVYGDVVMNHKGGADATEWVRAVEVNPSNRNQEVSGDYTIEAWTKFDFPGRGNTHSNFKWRWYHFDGVDWDQSRQLQNRIYKFRGKGWDWEVDTENGNYDYLMYADIDMDHPEVVNELRNWGVWYTRTLGLDGFRIDAVKHIKYSFTRDWLTHVRNTTGKNMFAVAEFWKNDIGAIENYLSKTNWNHSVFDVPLHYNLYNASRSGGNYDMRQIFNGTVVQRHPTHAVTFVDNHDSQPEEALESFVEEWFKPLAYALTLTRDQGYPSVFYGDYYGIPTHGVPAMKSKIDPILEARQKYAYGTQRDYLDHPDVIGWTREGDGVHADSGLATLMSDGPGGSKWMEVGKNNAGEVWYDITGNQTNTVTINKDGWGQFHVSGGSVSIYVQQ

SEQ ID NO: 25480 - protein, 483 aa, Bacillus licheniformis
HHNGTNGTMMQYFEWYLPNDGNHWNRLRSDASNLKDKGITAVWIPPAWKGASQNDVGYGAYDLYDLGEFNQKGTVRTKYGTRNQLQAAVTALKSNGIQVYGDVVMNHKGGADATEWVRAVEVNPSNRNQEVSGDYTIEAWTKFDFPGRGNTHSNFKWRWYHFDGVDWDQSRQLQNRIYKFRGKGWDWEVDTENGNYDYLMYADIDMDHPEVVNELRNWGVWYTNTLGLDGFRIDAVKHIKYSFTRDWLTHVRNTTGKNMFAVAEFWKNDIGAIENYLSKTNWNHSVFDVPLHYNLYNASRSGGNYDMRQIFNGTVVQRHPTHAVTFVDNHDSQPEEALESFVEEWFKPLAYALTLTRDQGYPSVFYGDYYGIPTHGVPAMKSKISPILEARQKYAYGTQRDYLDHPDVIGWTREGDGVHADSGLATLMSDGPGGSKWMEVGKNNAGEVWYDITGNQTNTVTINKDGWGQFHVSGGSVSIYVQQ

SEQ ID NO: 25481 - protein, 483 aa, Bacillus licheniformis
HHNGTNGTMMQYFEWYLPNDGNHWNRLRSDASNLKDKGITAVWIPPAWKGASQNDVGYGAYDLYDLGEFNQKGTVRTKYGTRNQLQAAVTALKSNGIQVYGDVVMNHKGGADATEWVRAVEVNPSNRNQEVSGDYTIEAWTKFDFPGRGNTHSNFKWRWYHFDGVDWDQSRQLQNRIYKFRGKGWDWEVDTENGNYDYLMYADIDMDHPEVVNELRNWGVWYTNTLGLDGFRIDAVKHIKYSFTRDWLTHVRNTTGKNMFAVAEFWKNDIGAIENYLSKTNWNHSVFDVCLHYNLYNASRSGGNYDMRQIFNGTVVQRHPTHAVTFVDNHDSQPEEALESFVEEWFKPLAYALTLTRDQGYPSVFYGDYYGIPTHGVPAMKSKIDPILEARQKYAYGTQRDYLDHPDVIGWTREGDGVHADSGLATLMSDGPGGSKWMEVGKNNAGEVWYDITGNQTNTVTINKDGWGQFHVSGGSVSIYVQQ

SEQ ID NO: 25482 - protein, 483 aa, Bacillus licheniformis
HHNGTNGTMMQYFEWYLPNDGNHWNRLRSDASNLKDKGITAVWIPPAWKGASQNDVGYGAYDLYDLGEFNQKGTVRTKYGTRNQLQAAVTALKSNGIQVYGDVVMNHKGGADATEWVRAVEVNPSNRNQEVSGDYTIEAWTKFDFPGRGNTHSNFKWRWYHFDGVDWDQSRQLQNRIYKFRGKGWDWEVDTENGNYDYLMYADIDMDHPEVVNELRNWGVWYTNTLGLDGFRIDAVKHIKYSFTRDWLTHVRNTTGKNMFAVAEFWKNDIGAIENYLSKTNWNHSVFDVPLHYNLYNASRSGGNYDMRQIFNGTVVQRHPTHAVTFVDNHDSQPEEALESFVEEWFKPLAYALTLTRDQGYPSVFYGDYYGIPTHGVPAMKSKIDPILEARQKYAYGTQRDYLDHPDVIGWTREGDGVHADSGLATLMSDGPGHSKWMEVGKNNAGEVWYDITGNQTNTVTINKDGWGQFHVSGGSVSIYVQQ

SEQ ID NO: 25483 - protein, 483 aa, Bacillus licheniformis
HHNGTNGTMMQYFEWYLPNDGNHWNRLRSDASNLKDKGITAVWIPPAWKGASQNDVGYGAYDLYDLGEFNQKGTVRTKYGTRNQLQAAVTALKSNGIQVYGDVVMNHKGGADATEWVRAVEVNPSNRNQEVSGDYTIEAWTKFDFPGRGNTHSNFKWRWYHFDGVDWDQSRQLQNRIYKFRGKGWDWEVDTENGNYDYLMYADIDMDHPEVVNELRNWGVWYTNTLGLDGFRIDAVKHIKYSFTRDWLTHVRNTTGKNMFAVAEFWKNDIGAIENYLSKTNWNHSVFDVPLHYNLYNASRSGGNYDMRQIFNGTVVQRHPTHAVTFVDNHDSQPEEALESFVEEWFKPLAYALTLTRDQGYPSVFYGDYYGIPTHGVPAMKSKIDPILEARQKYAYGTQRDYLDHPDVIGWTREGDGVHADSGLATLMSDGPGGSKWMEVGKNNVGEVWYDITGNQTNTVTINKDGWGQFHVSGGSVSIYVQQ

SEQ ID NO: 25484 - protein, 483 aa, Bacillus licheniformis
HHNGTNGTMMQYFEWYLPNDGNHWNRLRSDASNLKDKGITAVWIPPAWKGASQNDVGYGAYDLYDLGEFNQKGTVRTKYGTRNQLQAAVTALKSNGIQVYGDVVMNHKGGADATEWVRAVEVNPSNRNQEVSGDYTIEAWTKFDFPGRGNTHSNFKWRWYHFDGVDWDQSRQLQNRIYKFRGKGWDWEVDTENGNYDYLMYADIDMDHPEVVNELRNWGVWYTNTLGLDGFRIDAVKHIKYSFTRDWLTHVRNTTGKNMFAVAEFWKNDIGAIENYLSKTNWNHSVFDVPLHYNLYNASRSGGWYDMRQIFNGTVVQRHPTHAVTFVDNHDSQPEEALESFVEEWFKPLAYALTLTRDQGYPSVFYGDYYGIPTHGVPAMKSKIDPILEARQKYAYGTQRDYLDHPDVIGWTREGDGVHADSGLATLMSDGPGGSKWMEVGKNNAGEVWYDITGNQTNTVTINKDGWGQFHVSGGSVSIYVQQ

SEQ ID NO: 25485 - protein, 483 aa, Bacillus licheniformis
HHNGTNGTMMQYFEWYLPNDGNHWNRLRSDASNLKDKGITAVWIPPAWKGASQNDVGYGAYDLYDLGEFNQKGTVRTKYGTRNQLQAAVTALKSNGIQVYGDVVMNHKGGADATEWVRAVEVNPSNRNQEVSGDYTIEAWTKFDFPGRGNTHSNFKWRWYHFDGVDWDQSRQLQNRIYKFRGKGWDWEVDTENGNYDYLMYADIDMDHPEVVNELRNWGVWYTNTLGLDGFRIYAVKHIKYSFTRDWLTHVRNTTGKNMFAVAEFWKNDIGAIENYLSKTNWNHSVFDVPLHYNLYNASRSGGNYDMRQIFNGTVVQRHPTHAVTFVDNHDSQPEEALESFVEEWFKPLAYALTLTRDQGYPSVFYGDYYGIPTHGVPAMKSKIDPILEARQKYAYGTQRDYLDHPDVIGWTREGDGVHADSGLATLMSDGPGGSKWMEVGKNNAGEVWYDITGNQTNTVTINKDGWGQFHVSGGSVSIYVQQ

SEQ ID NO: 25486 - protein, 483 aa, Bacillus licheniformis
HHNGTNGTMMQYFEWYLPNDGNHWNRLRSDASNLKDKGITAVWIPPAWKGASQNDVGYGAYDLYDLGEFNQKGTVRTKYGTRNQLQAAVTALKSNGIQVYGDVVMNHKGGADATEWVRAVEVNPSNRNQEVSGDYTIEAWTKFDFPGRGNTHSNFKWRWYHFDGVDWDQSRQLQNRIYKFRGKGWDWEVDTENGNYDYLMYADIDMDHPEVVNELRNWGVWYTNTLGLDGFRIDAVKHIKYSFTRDWLTHVRNTTGKNMFAVAEFWKNDIGAIENYLSKTNWNHSVFDVPLHYNLYNASRSGGNYDMRQIFNGTVVQRHPTHAVTFVDNHDSQPEEALESFVEEWFKPLAYALTLTRDQGYPSVFYGDYYGIPTHGVPAMKSKIDPILEARQKYAYGTQRDYLDHPDVIGWTREGDGVHADSGLFTLMSDGPGGSKWMEVGKNNAGEVWYDITGNQTNTVTINKDGWGQFHVSGGSVSIYVQQ

SEQ ID NO: 25487 - protein, 483 aa, Bacillus licheniformis
HHNGTNGTMMQYFEWYLPNDGNHWNRLRSDASNLKDKGITDVWIPPAWKGASQNDVGYGAYDLYDLGEFNQKGTVRTKYGTRNQLQAAVTALKSNGIQVYGDVVMNHKGGADATEWVRAVEVNPSNRNQEVSGDYTIEAWTKFDFPGRGNTHSNFKWRWYHFDGVDWDQSRQLQNRIYKFRGKGWDWEVDTENGNYDYLMYADIDMDHPEVVNELRNWGVWYTNTLGLDGFRIDAVKHIKYSFTRDWLTHVRNTTGKNMFAVAEFWKNDIGAIENYLSKTNWNHSVFDVPLHYNLYNASRSGGNYDMRQIFNGTVVQRHPTHAVTFVDNHDSQPEEALESFVEEWFKPLAYALTLTRDQGYPSVFYGDYYGIPTHGVPAMKSKIDPILEARQKYAYGTQRDYLDHPDVIGWTREGDGVHADSGLATLMSDGPGGSKWMEVGKNNAGEVWYDITGNQTNTVTINKDGWGQFHVSGGSVSIYVQQ

SEQ ID NO: 25488 - protein, 483 aa, Bacillus licheniformis
HHNGTNGTMMQYFEWYLPNDGNHWNRLRSDASNLKDKGITAVWIGPAWKGASQNDVGYGAYDLYDLGEFNQKGTVRTKYGTRNQLQAAVTALKSNGIQVYGDVVMNHKGGADATEWVRAVEVNPSNRNQEVSGDYTIEAWTKFDFPGRGNTHSNFKWRWYHFDGVDWDQSRQLQNRIYKFRGKGWDWEVDTENGNYDYLMYADIDMDHPEVVNELRNWGVWYTNTLGLDGFRIDAVKHIKYSFTRDWLTHVRNTTGKNMFAVAEFWKNDIGAIENYLSKTNWNHSVFDVPLHYNLYNASRSGGNYDMRQIFNGTVVQRHPTHAVTFVDNHDSQPEEALESFVEEWFKPLAYALTLTRDQGYPSVFYGDYYGIPTHGVPAMKSKIDPILEARQKYAYGTQRDYLDHPDVIGWTREGDGVHADSGLATLMSDGPGGSKWMEVGKNNAGEVWYDITGNQTNTVTINKDGWGQFHVSGGSVSIYVQQ

SEQ ID NO: 25489 - protein, 483 aa, Bacillus licheniformis
HHNGTNGTMMQYFEWYLPNDGNHWNRLRSDASNLKDKGITAVWIPPAWKGASQNDVGYGAYDLYDLGEFNQKGTVRTKYGTRNQLQAAVTALKSNGIQVYGDVVMNHKGGADATEWVRAVEVNPSNRNQEVSGTYTIEAWTKFDFPGRGNTHSNFKWRWYHFDGVDWDQSRQLQNRIYKFRGKGWDWEVDTENGNYDYLMYADIDMDHPEVVNELRNWGVWYTNTLGLDGFRIDAVKHIKYSFTRDWLTHVRNTTGKNMFAVAEFWKNDIGAIENYLSKTNWNHSVFDVPLHYNLYNASRSGGNYDMRQIFNGTVVQRHPTHAVTFVDNHDSQPEEALESFVEEWFKPLAYALTLTRDQGYPSVFYGDYYGIPTHGVPAMKSKIDPILEARQKYAYGTQRDYLDHPDVIGWTREGDGVHADSGLATLMSDGPGGSKWMEVGKNNAGEVWYDITGNQTNTVTINKDGWGQFHVSGGSVSIYVQQ

SEQ ID NO: 25490 - protein, 483 aa, Bacillus licheniformis
HHNGTNGTMMQYFEWYLPNDGNWWNRLRSDASNLKDKGITAVWIPPAWKGASQNDVGYGAYDLYDLGEFNQKGTVRTKYGTRNQLQAAVTALKSNGIQVYGDVVMNHKGGADATEWVRAVEVNPSNRNQEVSGDYTIEAWTKFDFPGRGNTHSNFKWRWYHFDGVDWDQSRQLQNRIYKFRGKGWDWEVDTENGNYDYLMYADIDMDHPEVVNELRNWGVWYTNTLGLDGFRIDAVKHIKYSFTRDWLTHVRNTTGKNMFAVAEFWKNDIGAIENYLSKTNWNHSVFDVPLHYNLYNASRSGGNYDMRQIFNGTVVQRHPTHAVTFVDNHDSQPEEALESFVEEWFKPLAYALTLTRDQGYPSVFYGDYYGIPTHGVPAMKSKIDPILEARQKYAYGTQRDYLDHPDVIGWTREGDGVHADSGLATLMSDGPGGSKWMEVGKNNAGEVWYDITGNQTNTVTINKDGWGQFHVSGGSVSIYVQQ

SEQ ID NO: 25491 - protein, 483 aa, Bacillus licheniformis
HHNGYNGTMMQYFEWYLPNDGNHWNRLRSDASNLKDKGITAVWIPPAWKGASQNDVGYGAYDLYDLGEFNQKGTVRTKYGTRNQLQAAVTALKSNGIQVYGDVVMNHKGGADATEWVRAVEVNPSNRNQEVSGDYTIEAWTKFDFPGRGNTHSNFKWRWYHFDGVDWDQSRQLQNRIYKFRGKGWDWEVDTENGNYDYLMYADIDMDHPEVVNELRNWGVWYTNTLGLDGFRIDAVKHIKYSFTRDWLTHVRNTTGKNMFAVAEFWKNDIGAIENYLSKTNWNHSVFDVPLHYNLYNASRSGGNYDMRQIFNGTVVQRHPTHAVTFVDNHDSQPEEALESFVEEWFKPLAYALTLTRDQGYPSVFYGDYYGIPTHGVPAMKSKIDPILEARQKYAYGTQRDYLDHPDVIGWTREGDGVHADSGLATLMSDGPGGSKWMEVGKNNAGEVWYDITGNQTNTVTINKDGWGQFHVSGGSVSIYVQQ

SEQ ID NO: 25492 - protein, 483 aa, Bacillus licheniformis
HHNGTNGTMMQYFEWYLPNDGNHWHRLRSDASNLKDKGITAVWIPPAWKGASQNDVGYGAYDLYDLGEFNQKGTVRTKYGTRNQLQAAVTALKSNGIQVYGDVVMNHKGGADATEWVRAVEVNPSNRNQEVSGDYTIEAWTKFDFPGRGNTHSNFKWRWYHFDGVDWDQSRQLQNRIYKFRGKEWDWEVDTENGNYDYLMYADIDMDHPEVVNELRNWGVWYTNTLGLDGFRIDAVKHIKYSFTRDWLTHVRNTTGKNMFAVAEFWKNDIGAIENYLSKTNWNHSVFDVPLHYNLYNASRSGGNYDMRQIFNGTVVQRHPTHAVTFVDNHDSQPEEALESFVEEWFKPLAYALTLTRDQGYPSVFYGDYYGIPTHGVPAMKSKIDPILEARQKYAYGTQRDYLDHPDVIGWTREGDGVHADSGLATLMSDGPGGSKWMEVGKNNAGEVWYDITGNQTNTVTINKDGWGQFHVSGGSVSIYVQQ

SEQ ID NO: 25493 - protein, 483 aa, Bacillus licheniformis
HHNGTNGTMMQYFEWYLPNDGNHWNRLRSDASNLKDKGITAVWIPPAWKGASQNDVGYGAYDLYDLGEFNQKGTVRTKYGTRNQLQAAVTALKSNGIQVYGDVVMNHKGGADATEWVRAVEVNPSNRNQEVSGDYTIEAWTKFDFPGRGNTHSNFKWRWYHFDGVDWDQSRQLQNRIYKFRGKGWDWEVDTENGNYDYLMYADIDMDHPEVVNELRNWGVWYTNTLGLDGFRIDAVKHIKYSFTRDWLTHVRNTTGKNMFAVAEFWKNDIGAIENYLSKTNWNHSYFDVPLHYNLYNASRSGGNYDMRQIFNGTVVQRHPTHAVTFVDNHDSQPEEALESFVEEWFKPLAYALTLTRDQGYPSVFYGDYYGIPTHGVPAMKSKIDPILEARQKYAYGTQRDYLDHPDVIGWTREGDGVHADSGLATLMSDGPGGSKWMEVGKNNAGEVWYDITGNQTNTVTINKDGWGQFHVSGGSVSIYVQQ

SEQ ID NO: 25494 - protein, 483 aa, Bacillus licheniformis
HHNGTNGTMMQYFEWYLPNDGNHWNRLRSDASNLKDKGITAVWIPPAWKGASQNDVGYGAYDLYDLGEFNQKGTVRTKYGTRNQLQAAVTALKSNGIQVYGDVVMNHKGGADATEWVRAVEVNPSNRNQEVSGDYTIEAWTKFDFPGRGNTHSNFKWRWYHFDGVDWDQSRQLQNRIYKFRGKGWDWEVDTENGNYDYLMYADIDMDHPEVVNELRNWGVWYTNTLGLDGFRIDAVKHIKYSFTRDWLTHVRNTTGKNMFAVAEFWKNDIGAIENYLSKTNWNHSVFDVILHYNLYNASRSGGNYDMRQIFNGTVVQRHPTHAVTFVDNHDSQPEEALESFVEEWFKPLAYALTLTRDQGYPSVFYGDYYGIPTHGVPAMKSKIDPILEARQKYAYGTQRDYLDHPDVIGWTREGDGVHADSGLATLMSDGPGGSKWMEVGKNNAGEVWYDITGNQTNTVTINKDGWGQFHVSGGSVSIYVQQ

SEQ ID NO: 25495 - protein, 483 aa, Bacillus licheniformis
HHNGTNGTMMQYFEWYLPNDGNHWNRLRSDASNLKDKGITAVWIPPAWKGASQNDVGYGAYDLYDLGEFNQKGTVRTKYGTRNQLQAAVTALKSNGIQVYGDVVMNHKGGADATEWVRAVEVNPSNRNQEVSGDYTIEAWTKFDFPGRGNTHSNFKWRWYHFDGVDWDQSRQLQNRIYKFRGKGWDWEVDTENGNYDYLMYADIDMDHPEVVNELRNWGVWYTNTLGLDGFRIDAVKHIKYSFTRDWLTHVRNTTGKNMFAVAEFWKNDIGAIENYLSKTNWNHSVFDVPLHYNLYNASRSGGNYDMRQIFNGTVVQRHPTHAVTFVDNHDSQPEEALESFVEEWFKPLAYALTLTRDQGYPSVFYGDYYGIPTHGVPAMKSKIDPILEARQKYAYGTQRDYLDHPDVIGWTREGDGVHADSGLATLMSDGPGGSKWMEVGKNNAGEVWYDITGNQTNTVTIAKDGWGQFHVSGGSVSIYVQQ

SEQ ID NO: 25496 - protein, 483 aa, Bacillus licheniformis
HHNGTNGTMMQYFEWYLPNDGNHWNRLRSDASNLKDKGITAVWIPPAWKGASQNDVGYGAYDLYDLGEFNQKGTVRTKYGTRNQLQAAVTALKSNGIQVYGDVVMNHKGGADATEWVRAVEVNPSNRNQEVSGDYTIEAWTKFDFPGRGNTHSNFKWRWYHFDGVDWDQSRQLQNRIYKFRGKGWDWEVDTENGNYDYLMYADIDMDHPEVVNELRNWGVWYTNTLGLDGFRIDAVKHIKYSFTRDWLTHVRNTTGKNMFAVAEFWKNDIGAIENYLSKTNWNHSVFDVPLHYNLYNASRSGGNYDMRQIFNGTVVQRHPTHAVTFVDNHDSQPEEALESFVEEWFKPLAYALTLTRDQGYPSVFYGDYYGIPTHGVPAMKSKIDKILEARQKYAYGTQRDYLDHPDVIGWTREGDGVHADSGLATLMSDGPGGSKWMEVGKNNAGEVWYDITGNQTNTVTINKDGWGQFHVSGGSVSIYVQQ

SEQ ID NO: 25497 - protein, 483 aa, Bacillus licheniformis
HHNGTNGTMMQYFEWYLPNDGNHWNRLRSDASNLKDKGITAVWIPPAWKGASQNDVGYGAYDLYDLGEFNQKGTVRTKYGTRNQLQAAVTALKSNGIQVYGDVVMNHKGGADATEWVRAVEVNPSNRNQEVSGDYTIEAWTKFDFPGRGNTHSNFKWRWYHFDGVDWDQSRQLQNRAYKFRGKGWDWEVDTENGNYDYLMYADIDMDHPEVVNELRNWGVWYTNTLGLDGFRIDAVKHIKYSFTRDWLTHVRNTTGKNMFAVAEFWKNDIGAIENYLSKTNWNHSVFDVPLHYNLYNASRSGGNYDMRQIFNGTVVQRHPTHAVTFVDNHDSQPEEALESFVEEWFKPLAYALTLTRDQGYPSVFYGDYYGIPTHGVPAMKSKIDPILEARQKYAYGTQRDYLDHPDVIGWTREGDGVHADSGLATLMSDGPGGSKWMEVGKNNAGEVWYDITGNQTNTVTINKDGWGQFHVSGGSVSIYVQQ

SEQ ID NO: 25498 - protein, 483 aa, Bacillus licheniformis
HHNGTNGTMMQYFEWYLPNDGNHWNRLRSDASNLKDKGITAVWIPPAWKGASQNDVGYGAYDLYDLGEFNQKGTVRTKYGTRNQLQAAVTDLKSNGIQVYGDVVMNHKGGADATEWVRAVEVNPSNRNQEVSGDYTIEAWTKFDFPGRGNTHSNFKWRWYHFDGVDWDQSRQLQNRIYKFRGKGWDWEVDTENGNYDYLMYADIDMDHPEVVNELRNWGVWYTNTLGLDGFRIDAVKHIKYSFTRDWLTHVRNTTGKNMFAVAEFWKNDIGAIENYLSKTNWNHSVFDVPLHYNLYNASRSGGNYDMRQIFNGTVVQRHPTHAVTFVDNHDSQPEEALESFVEEWFKPLAYALTLTRDQGYPSVFYGDYYGIPTHGVPAMKSKIDPILEARQKYAYGTQRDYLDHPDVIGWTREGDGVHADSGLATLMSDGPGGSKWMEVGKNNAGEVWYDITGNQTNTVTINKDGWGQFHVSGGSVSIYVQQ

SEQ ID NO: 25499 - protein, 483 aa, Bacillus licheniformis
HHNGTNGTMMQYFEWYLPNDGNHWNRLRSDASNLKDKGITAVWIPPAWKGASQNDVGYGAYDLYDLGEFNQKGTVRTKYGTRNQLQAAVTALKSNGIQVYGDVVMNHKGGADAVEWVRAVEVNPSNRNQEVSGDYTIEAWTKFDFPGRGNTHSNFKWRWYHFDGVDWDQSRQLQNRIYKFRGKGWDWEVDTENGNYDYLMYADIDMDHPEVVNELRNWGVWYTNTLGLDGFRIDAVKHIKYSFTRDWLTHVRNTTGKNMFAVAEFWKNDIGAIENYLSKTNWNHSVFDVPLHYNLYNASRSGGNYDMRQIFNGTVVQRHPTHAVTFVDNHDSQPEEALESFVEEWFKPLAYALTLTRDQGYPSVFYGDYYGIPTHGVPAMKSKIDPILEARQKYAYGTQRDYLDHPDVIGWTREGDGVHADSGLATLMSDGPGGSKWMEVGKNNAGEVWYDITGNQTNTVTINKDGWGQFHVSGGSVSIYVQQ

SEQ ID NO: 25500 - protein, 483 aa, Bacillus subtilis
HHNGTNGTMMQYFEWYLPNDGNHWNRLRSDASNLKDKGITAVWIPPAWKGASQNDVGYGAYDLYDLGEFNQKGTVRTKYGTRNQLQAAVTALKSNGIQVYGDVVMNHKGGADATEWVRAVEVNPSNRNQEVSGDYTIEAWTKFDFPGRGNTHSNFKWRWYHFDGVDWDQSRQLQNRIYLFRGKGWDWEVDTENGNYDYLMYADIDMDHPEVVNELRNWGVWYTNTLGLDGFRIDAVKHIKYSFTRDWLTHVRNTTGKNMFAVAEFWKNDIGAIENYLSKTNWNHSVFDVPLHYNLYNASRSGGNYDMRQIFNGTVVQRHPTHAVTFVDNHDSQPEEALESFVEEWFKPLAYALTLTRDQGYPSVFYGDYYGIPTHGVPAMKSKIDPILEARQKYAYGTQRDYLDHPDVIGWTREGDGVHADSGLATLMSDGPGGSKWMEVGKNNAGEVWYDITGNQTNTVTINKDGWGQFHVSGGSVSIYVQQ

SEQ ID NO: 25501 - protein, 483 aa, Bacillus licheniformis
HHNGTNGTMMQYFEWYLPNDGNHWYRLRSDASNLKDKGITAVWIPPAWKGASQNDVGYGAYDLYDLGEFNQKGTVRTKYGTRNQLQAAVTALKSNGIQVYGDVVMNHKGGADATEWVRAVEVNPSNRNQEVSGDYTIEAWTKFDFPGRGNTHSNFKWRWYHFDGVDWDQSRQLQNRIYKFRGKGWDWEVDTENGNYDYLMYADIDMDHPEVVNELRNWGVWYTNTLGLDGFRIDAVKHIKYSFTRDWLTHVRNTTGKNMFAVAEFWKNDIGAIENYLSKTNWNHSVFDVPLHYNLYNASRSGGNYDMRQIFNGTVVQRHPTHAVTFVDNHDSQPEEALESFVEEWFKPLAYALTLTRDQGYPSVFYGDYYGIPTHGVPAMKSKIDPILEARQKYAYGTQRDYLDHPDVIGWTREGDGVHADSGLATLMSDGPGGSKWMEVGKNNAGEVWYDITGNQTNTVTINKDGWGQFHVSGGSVSIYVQQ

SEQ ID NO: 25502 - protein, 483 aa, Bacillus licheniformis
HHNGTNGTMMQYFEWYLPNDGNHWNRLRSDASNLKDKGITAVWIPPAWKGASQNDVGYGAYDLYDLGEFNQKGTVRTKYGTRNQLQAAVTALKSNGIQVYGDVVMNHKGGADATEWVRAVEVNPSNRNQEVSGDYTIEAWTKFDFPGRGNTHSNFKWRWYHFDGVDWDQSRQLQNRIYKFRGKGWDWEVDTENGNYDYLMYADIDMDHPEVVNELRNWGVWYTNTLGLDGFRIDAVKHIKYSFTRDWLTHVRNTTGKNMFAVAEFGKNDIGAIENYLSKTNWNHSVFDVPLHYNLYNASRSGGNYDMRQIFNGTVVQRHPTHAVTFVDNHDSQPEEALESFVEEWFKPLAYALTLTRDQGYPSVFYGDYYGIPTHGVPAMKSKIDPILEARQKYAYGTQRDYLDHPDVIGWTREGDGVHADSGLATLMSDGPGGSKWMEVGKNNAGEVWYDITGNQTNTVTINKDGWGQFHVSGGSVSIYVQQ

SEQ ID NO: 25503 - protein, 483 aa, Bacillus licheniformis
HHNQTNGTMMQYFEWYLPNDGNHWNRLRSDASNLKDKGITAVWIPPAWKGASQNDVGYGAYDLYDLGEFNQKGTVRTKYGTRNQLQAAVTALKSNGIQVYGDVVMNHKGGADATEWVRAVEVNPSNRNQEVSGDYTIEAWTKFDFPGRGNTHSNFKWRWYHFDGVDWDQSRQLQNRIYKFRGKEWDWEVDEENGNYDYLMYADYDMDHPEVVNELRNWGVWYTNTLGLDGFRIDAVKHIKYSFTRDWLTHVRNTTGKNMFAVAEFWKNDIGAIENYLSKTNWNHSVFDVPLHYNLYNASRSGGNYDMRQIFNGTVVQRHPTHAVTFVDNHDSQPEEALESFVEEWFKPLAYALTLTRDQGYPSVFYGDYYGIPTHGVPAMKSKIDPILEARQKYAYGTQRDYMDHPDVIGWTREGDGVHADSGLATLMSDGPGGSKWMEVGKNNAGEVWYDITGNQTNTVTINKDGWGQFHVSGGSVSIYVQQ

SEQ ID NO: 25504 - protein, 483 aa, Bacillus licheniformis
HHNGTNGTMMQYFEWYLPNDGNHWNRLRSDASNLKDKGITAVWIPPAWKGASQNDVGYGAYDLYDLGEFNQKGTVRTKYGTRNQLQAAVTALKSNGIQVYGDVVMNHKGGADATEWVRAVEVNPSNRNQEVSGDYTIEAWTKFDFPGRGNTHSNFKWRWYHFDGVDWDQSRQLQNRIYKFRGKGWDWEVDTENGNYDYLMYADIDMDHPEVVNELRNWGVWYTNTLGLDGFRIDAVKHIKYSFTRDWLTHVRNTTGKNMFAVAEFWKNDIGAIENYLSKTNWNHSVFDVPLHYNLYNASRSGGNYDMRQIFNGTVVQRHPTHAVTFVDNHDSQPEEALESFVEEWFKPLAYALTLTRDQMYPSVFYGDYYGIPTHGVPAMKSKIDPILEARQKYAYGTQRDYLDHPDVIGWTREGDGVHADSGLATLMSDGPGGSKWMEVGKNNAGEVWYDITGNQTNTVTINKDGWGQFHVSGGSVSIYVQQ

SEQ ID NO: 25505 - protein, 483 aa, Bacillus licheniformis
HHNGTNGTMMQYFEWYLPNDGNHWNRLRSDASNLKDKGITAVWIPPAWKGASQNDVGYGAYDLYDLGEFNQKGTVRTKYGTRNQLQAAVTALKSNGIQVYGDVVMNHKGGADATEWVRAVEVNPSNRNQEVSGDYTIEAWTKFDFPGRGNTHSNFKWRWYHFDGVDWDQSRQLQNRIYKFRGKGWDWEVDTENGNYDYLMYADIDMDHPEVVNELRNWGVWYTNTLGLDGFRIDAVKHIKYSFTRDWLTHVRNTTGKNMFAVAEFWKNDIGAIENYLSKTNWNHSVFDVFLHYNLYNASRSGGNYDMRQIFNGTVVQRHPTHAVTFVDNHDSQPEEALESFVEEWFKPLAYALTLTRDQGYPSVFYGDYYGIPTHGVPAMKSKIDPILEARQKYAYGTQRDYLDHPDVIGWTREGDGVHADSGLATLMSDGPGGSKWMEVGKNNAGEVWYDITGNQTNTVTINKDGWGQFHVSGGSVSIYVQQ

SEQ ID NO: 25506 - protein, 483 aa, Bacillus licheniformis
HHNGTNGTMMQYFEWYLPNDGNHWNRLRSDASNHKDKGITAVWIPPAWKGASQNDVGYGAYDLYDLGEFNQKGTVRTKYGTRNQLQAAVTALKSNGIQVYGDVVMNHKGGADATEWVRAVEVNPSNRNQEVSGDYTIEAWTKFDFPGRGNTHSNFKWRWYHFDGVDWDQSRQLQNRIYKFRGKGWDWEVDTENGNYDYLMYADIDMDHPEVVNELRNWGVWYTNTLGLDGFRIDAVKHIKYSFTRDWLTHVRNTTGKNMFAVAEFWKNDIGAIENYLSKTNWNHSVFDVPLHYNLYNASRSGGNYDMRQIFNGTVVQRHPTHAVTFVDNHDSQPEEALESFVEEWFKPLAYALTLTRDQGYPSVFYGDYYGIPTHGVPAMKSKIDPILEARQKYAYGTQRDYLDHPDVIGWTREGDGVHADSGLATLMSDGPGGSKWMEVGKNNAGEVWYDITGNQTNTVTINKDGWGQFHVSGGSVSIYVQQ

SEQ ID NO: 25507 - protein, 483 aa, Bacillus licheniformis
HHNGTNGTMMQYFEWYLPNDGNHWNRLRSDASNLKDKGITAVWIPPAWKGASQNDVGYGAYDLYDLGEFNQKGTVRTKYGTRNQLQAAVTALKSNGIQVYGDVVMNHKGGADAQEWVRAVEVNPSNRNQEVSGDYTIEAWTKFDFPGRGNTHSNFKWRWYHFDGVDWDQSRQLQNRIYKFRGKGWDWEVDTENGNYDYLMYADIDMDHPEVVNELRNWGVWYTNTLGLDGFRIDAVKHIKYSFTRDWLTHVRNTTGKNMFAVAEFWKNDIGAIENYLSKTNWNHSVFDVPLHYNLYNASRSGGNYDMRQIFNGTVVQRHPTHAVTFVDNHDSQPEEALESFVEEWFKPLAYALTLTRDQGYPSVFYGDYYGIPTHGVPAMKSKIDPILEARQKYAYGTQRDYLDHPDVIGWTREGDGVHADSGLATLMSDGPGGSKWMEVGKNNAGEVWYDITGNQTNTVTINKDGWGQFHVSGGSVSIYVQQ

SEQ ID NO: 25508 - protein, 483 aa, Bacillus licheniformis
HHNGTNGTMMQYFEWYLPNDGNHWNRLRSDASNLKDKGITAVWIPPAWKGASQNDVGYGAYDLYDLGEFNQKGTVRTKYGTRNQLQAAVTALKSNGIQVYGDVVMNHKGGADATEWVRAVEVNPSNRNQEVSGDYTIEAWTKFDFPGRGNTHSNFKWRWYHFDGVDWDQSRQLQNRIYKFRGKGWDWEVDTENGNYDYLMYADIDMDHSEVVNELRNWGVWYTNTLGLDGFRIDAVKHIKYSFTRDWLTHVRNTTGKNMFAVAEFWKNDIGAIENYLSKTNWNHSVFDVPLHYNLYNASRSGGNYDMRQIFNGTVVQRHPTHAVTFVDNHDSQPEEALESFVEEWFKPLAYALTLTRDQGYPSVFYGDYYGIPTHGVPAMKSKIDPILEARQKYAYGTQRDYLDHPDVIGWTREGDGVHADSGLATLMSDGPGGSKWMEVGKNNAGEVWYDITGNQTNTVTINKDGWGQFHVSGGSVSIYVQQ

SEQ ID NO: 25509 - protein, 483 aa, Bacillus licheniformis
HHNGTNSTMMQYFEWYLPNDGNHWNRLRSDASNLKDKGITAVWIPPAWKGASQNDVGYGAYDLYDLGEFNQKGTVRTKYGTRNQLQAAVTALKSNGIQVYGDVVMNHKGGADATEWVRAVEVNPSNRNQEVSGDYTIEAWTKFDFPGRGNTHSNFKWRWYHFDGVDWDQSRQLQNRIYKFRGKGWDWEVDTENGNYDYLMYADIDMDHPEVVNELRNWGVWYTNTLGLDGFRIDAVKHIKYSFTRDWLTHVRNTTGKNMFAVAEFWKNDIGAIENYLSKTNWNHSVFDVPLHYNLYNASRSGGNYDMRQIFNGTVVQRHPTHAVTFVDNHDSQPEEALESFVEEWFKPLAYALTLTRDQGYPSVFYGDYYGIPTHGVPAMKSKIDPILEARQKYAYGTQRDYLDHPDVIGWTREGDGVHADSGLATLMSDGPGGSKWMEVGKNNAGEVWYDITGNQTNTVTINKDGWGQFHVSGGSVSIYVQQ

SEQ ID NO: 25510 - protein, 483 aa, Bacillus licheniformis
HHNGTNGTMMQYFEWYLPHDGNHWNRLRSDASNLKDKGITAVWIPPAWKGASQNDVGYGAYDLYDLGEFNQKGTVRTKYGTRNQLQAAVTALKSNGIQVYGDVVMNHKGGADATEWVRAVEVNPSNRNQEVSGDYTIEAWTKFDFPGRGNTHSNFKWRWYHFDGVDWDQSRQLQNRIYKFRGKGWDWEVDTENGNYDYLMYADIDMDHPEVVNELRNWGVWYTNTLGLDGFRIDAVKHIKYSFTRDWLTHVRNTTGKNMFAVAEFWKNDIGAIENYLSKTNWNHSVFDVPLHYNLYNASRSGGNYDMRQIFNGTVVQRHPTHAVTFVDNHDSQPEEALESFVEEWFKPLAYALTLTRDQGYPSVFYGDYYGIPTHGVPAMKSKIDPILEARQKYAYGTQRDYLDHPDVIGWTREGDGVHADSGLATLMSDGPGGSKWMEVGKNNAGEVWYDITGNQTNTVTINKDGWGQFHVSGGSVSIYVQQ

SEQ ID NO: 25511 - protein, 483 aa, Bacillus licheniformis
HHNGTNGTMMQYFEWYLPNDGNHWNRLRSDASNLKDKGITAVWIPPAWKGASQNDVGYGAYDLYDLGEFNQKGTVRTKYGTRNQLQAAVTALKSNGIQVYGDVVMNHKGGADATEWVRAVEVNPSNRNQEVSGDYTIEAWTKFDFPGRGNTHSNFKWRWYHFDGVDWDQSRQLQNRIYKFRGKGWDWEVDTENGNYDYLMYADIDMDHPEVVNELRNWGVWYTNTLGLDGFRIDAVKHIKYSFTRDWLTHVRNTTGKNMFAVAEFWKNDIGAIENYLSKTNWNHSVFDVPLHYNLYNASRSGGNYDMRQIFNGTVVQRHPTHAVTFVDNHDSQPEEALESFVEEWFKPLAYALTLTRDQGYPSVFYGDYYGIPTHGVPAMKSKIDPILEARQKYAYGTQRDYLDHPDVIGWTREGDGVHADSGLTTLMSDGPGGSKWMEVGKNNAGEVWYDITGNQTNTVTINKDGWGQFHVSGGSVSIYVQQ

SEQ ID NO: 25512 - protein, 483 aa, Bacillus licheniformis
HHNGTNGTMMQYYEWYLPNDGNHWNRLRSDASNLKDKGITAVWIPPAWKGASQNDVGYGAYDLYDLGEFNQKGTVRTKYGTRNQLQAAVTALKSNGIQVYGDVVMNHKGGADATEWVRAVEVNPSNRNQEVSGDYTIEAWTKFDFPGRGNTHSNFKWRWYHFDGVDWDQSRQLQNRIYKFRGKGWDWEVDTENGNYDYLMYADIDMDHPEVVNELRNWGVWYTNTLGLDGFRIDAVKHIKYSFTRDWLTHVRNTTGKNMFAVAEFWKNDIGAIENYLSKTNWNHSVFDVPLHYNLYNASRSGGNYDMRQIFNGTVVQRHPTHAVTFVDNHDSQPEEALESFVEEWFKPLAYALTLTRDQGYPSVFYGDYYGIPTHGVPAMKSKIDPILEARQKYAYGTQRDYLDHPDVIGWTREGDGVHADSGLATLMSDGPGGSKWMEVGKNNAGEVWYDITGNQTNTVTINKDGWGQFHVSGGSVSIYVQQ

SEQ ID NO: 25513 - protein, 483 aa, Bacillus licheniformis
HHNGTNGTMMQYFEWYLPNDGNHWNRLRSDASNLKDKGITAVWIPPAWKGASQNDVGYGAYDLYDLGEFNQKGTVRTKYGTRNQLQAAVTWLKSNGIQVYGDVVMNHKGGADATEWVRAVEVNPSNRNQEVSGDYTIEAWTKFDFPGRGNTHSNFKWRWYHFDGVDWDQSRQLQNRIYKFRGKGWDWEVDTENGNYDYLMYADIDMDHPEVVNELRNWGVWYTNTLGLDGFRIDAVKHIKYSFTRDWLTHVRNTTGKNMFAVAEFWKNDIGAIENYLSKTNWNHSVFDVPLHYNLYNASRSGGNYDMRQIFNGTVVQRHPTHAVTFVDNHDSQPEEALESFVEEWFKPLAYALTLTRDQGYPSVFYGDYYGIPTHGVPAMKSKIDPILEARQKYAYGTQRDYLDHPDVIGWTREGDGVHADSGLATLMSDGPGGSKWMEVGKNNAGEVWYDITGNQTNTVTINKDGWGQFHVSGGSVSIYVQQ

SEQ ID NO: 25514 - protein, 483 aa, Bacillus licheniformis
HHNMTNGTMMQYFEWYLPNDGNHWNRLRSDASNLKDKGITAVWIPPAWKGASQNDVGYGAYDLYDLGEFNQKGTVRTKYGTRNQLQAAVTALKSNGIQVYGDVVMNHKGGADATEWVRAVEVNPSNRNQEVSGDYTIEAWTKFDFPGRGNTHSNFKWRWYHFDGVDWDQSRQLQNRIYKFRGKGWDWEVDTENGNYDYLMYADIDMDHPEVVNELRNWGVWYTNTLGLDGFRIDAVKHIKYSFTRDWLTHVRNTTGKNMFAVAEFWKNDIGAIENYLSKTNWNHSVFDVPLHYNLYNASRSGGNYDMRQIFNGTVVQRHPTHAVTFVDNHDSQPEEALESFVEEWFKPLAYALTLTRDQGYPSVFYGDYYGIPTHGVPAMKSKIDPILEARQKYAYGTQRDYLDHPDVIGWTREGDGVHADSGLATLMSDGPGGSKWMEVGKNNAGEVWYDITGNQTNTVTINKDGWGQFHVSGGSVSIYVQQ

SEQ ID NO: 25515 - protein, 483 aa, Bacillus licheniformis
HHNGTNGTMMQYFEWYLPNDGNHWNRLRSDASNLKDKGITAVWIPPAWKGASQNDVGYGAYDLYDLGEFNQKGTVRTKYGTRNQLQAAVTALKSNGIQVYGDVVMNHKGGADATEWVRAVEVNPSNRCQEVSGDYTIEAWTKFDFPGRGNTHSNFKWRWYHFDGVDWDQSRQLQNRIYKFRGKGWDWEVDTENGNYDYLMYADIDMDHPEVVNELRNWGVWYTNTLGLDGFRIDAVKHIKYSFTRDWLTHVRNTTGKNMFAVAEFWKNDIGAIENYLSKTNWNHSVFDVPLHYNLYNASRSGGNYDMRQIFNGTVVQRHPTHAVTFVDNHDSQPEEALESFVEEWFKPLAYALTLTRDQGYPSVFYGDYYGIPTHGVPAMKSKIDPILEARQKYAYGTQRDYLDHPDVIGWTREGDGVHADSGLATLMSDGPGGSKWMEVGKNNAGEVWYDITGNQTNTVTINKDGWGQFHVSGGSVSIYVQQ

SEQ ID NO: 25516 - protein, 483 aa, Bacillus licheniformis
HHNGTNGTMMQYFEWYLPNDGNHWNRLRSDASNLKDKGITAVWIPPAWKGASQNDVGYGAYDLYDLGEFNQKGTVRTKYGTRNQLQAAVTALKSNGIQVYGDVVMNHKGGADATEWVRAVEVNPSNRNQEVSGDYTIEAWTKFDFPGRGNTHSNFKWRWYHFDGVDWDQSRQLQNRIYKFRGKGWDWEVDTENGNYDYLMYADIDMDHPEVVNELRNWGVWYTNTLGLDGFRIDAVKHIKYSFTRDWLTHVRNTTGKNMFAVAEFWKNDIGAIENYLSKTNWNHSVFDVPLHYCLYNASRSGGNYDMRQIFNGTVVQRHPTHAVTFVDNHDSQPEEALESFVEEWFKPLAYALTLTRDQGYPSVFYGDYYGIPTHGVPAMKSKIDPILEARQKYAYGTQRDYLDHPDVIGWTREGDGVHADSGLATLMSDGPGGSKWMEVGKNNAGEVWYDITGNQTNTVTINKDGWGQFHVSGGSVSIYVQQ

SEQ ID NO: 25517 - protein, 483 aa, Bacillus licheniformis
HHNGTNGTMMQYFEWYLPNDGNHWNRLRSDASNLKDKGITAVWIPPAWKGASQNDVGYGAYDLYDLGEFNQKGTVRTKYGTRNQLQAAVTALKSNGIQVYGDVVMNHKGGADATEWVRAVEVNPSNRNQEVSGDYTIEAWTKFDFPGRGNTHSNFKWRWYHFDGVDWDQSRQLQNRIYKFRGKGWDWEVDTENGNYDYLMYADIDMDHPEVVNELRNWGVWYTNTLGLDGFRIDAVKHIKYSFTRDWLTHVRNTTGKNMFAVAEFWKNDIGAIENYLSKTNWNHSVFDVPLHYNLYNASRSGGNYDMRQIFNGTVVQRHPTHAVTFVDNHDSQPEEALESFVEEWFKPLAYALTLTRDQGYPSVFYGDYYGIPTHGVPAMKSKIDPILEARQKYAYGTQRDYLDHPDVIGWTREGDGVHADSGLATLMSDGPGGSKWMEVGKVNAGEVWYDITGNQTNTVTINKDGWGQFHVSGGSVSIYVQQ

SEQ ID NO: 25518 - protein, 483 aa, Bacillus licheniformis
HHNGTNGTMMQYFEWYLPNDGNHWNRLRSDASNLKDKGITAVWIPPAWKGASQNDVGYGAYDLYDLGEFNQKGTVRTKYGTRNQLQAAVTALKSNGIQVYGDVVMNHKGGADATEWVRAVEVNPSNRNQEVSGDYTIEAWTKFDFPGRGNTHSNFKWRWYHFDGVDWDQSRQLQNRIYKFRGKGWDWEVDTENGNYDYLMYADIDMDHPEVVNELRNWGVWYTNTLGLDGFRIDAVKHIKYSFTRDWLTHVRNTTGKNMFAVAEFWKNDIGAIENYLSETNWNHSVFDVPLHYNLYNASRSGGNYDMRQIFNGTVVQRHPTHAVTFVDNHDSQPEEALESFVEEWFKPLAYALTLTRDQGYPSVFYGDYYGIPTHGVPAMKSKIDPILEARQKYAYGTQRDYLDHPDVIGWTREGDGVHADSGLATLMSDGPGGSKWMEVGKNNAGEVWYDITGNQTNTVTINKDGWGQFHVSGGSVSIYVQQ

SEQ ID NO: 25519 - protein, 483 aa, Bacillus licheniformis
HHNGTNGTMMQYFEWYLPNDGNHWNRLRSDASNLKDKGITAVWIPPAWKGASQNDVGYGAYDLYDLGEFNQKGTLRTKYGTRNQLQAAVTALKSNGIQVYGDVVMNHKGGADATEWVRAVEVNPSNRNQEVSGDYTIEAWTKFDFPGRGNTHSNFKWRWYHFDGVDWDQSRQLQNRIYKFRGKGWDWEVDTENGNYDYLMYADIDMDHPEVVNELRNWGVWYTNTLGLDGFRIDAVKHIKYSFTRDWLTHVRNTTGKNMFAVAEFWKNDIGAIENYLSKTNWNHSVFDVPLHYNLYNASRSGGNYDMRQIFNGTVVQRHPTHAVTFVDNHDSQPEEALESFVEEWFKPLAYALTLTRDQGYPSVFYGDYYGIPTHGVPAMKSKIDPILEARQKYAYGTQRDYLDHPDVIGWTREGDGVHADSGLATLMSDGPGGSKWMEVGKNNAGEVWYDITGNQTNTVTINKDGWGQFHVSGGSVSIYVQQ

SEQ ID NO: 25520 - protein, 483 aa, Bacillus licheniformis
HHNGTNGTMMQYFEWYLPNDGNHWNRLRSDASNLKDKGITAVWIPPAWKGASQNDVGYGAYDLYDLGEFNQKGTVRTKYGTRNQLQAAVTALKSNGIQVYGDVVMNHKGGADATEWVRAVEVNPSNRNQEVSGDYTIEAWTKFDFPGRGNTHSNFKWRWYHFDGVDWDQSRQLQNRIYKFRGKGWDWEVDTENGNYDYLMYADIDMDHPEVVNELRNWGVWYTNTLGLDGFRIDAVKHIKYSFTRDWLTHVRNTTGKNMFAVAEFWKNDIGAIENYLSKTNWNHSVFDVPLHYNLYNASRSGGNYDMRQIFNGTVVQRHPTHAVTFVDNHDSQPEEALESFVEEWFKPLAYALTLTRDQGYPSVFYGDYYGIPTHGVPAMKSKIDPILEARQKYAYGTQRDYLDHPDVIGWTREGDGVHADSGLATLMSDGPGGSKWMEVGKNNAGEVWYGITGNQTNTVTINKDGWGQFHVSGGSVSIYVQQ

SEQ ID NO: 25521 - protein, 483 aa, Bacillus licheniformis
HHNGTVGTMMQYFEWYLPNDGNHWNRLRSDASNLKDKGITAVWIPPAWKGASQNDVGYGAYDLYDLGEFNQKGTVRTKYGTRNQLQAAVTALKSNGIQVYGDVVMNHKGGADATEWVRAVEVNPSNRNQEVSGDYTIEAWTKFDFPGRGNTHSNFKWRWYHFDGVDWDQSRQLQNRIYKFRGKGWDWEVDTENGNYDYLMYADIDMDHPEVVNELRNWGVWYTNTLGLDGFRIDAVKHIKYSFTRDWLTHVRNTTGKNMFAVAEFWKNDIGAIENYLSKTNWNHSVFDVPLHYNLYNASRSGGNYDMRQIFNGTVVQRHPTHAVTFVDNHDSQPEEALESFVEEWFKPLAYALTLTRDQGYPSVFYGDYYGIPTHGVPAMKSKIDPILEARQKYAYGTQRDYLDHPDVIGWTREGDGVHADSGLATLMSDGPGGSKWMEVGKNNAGEVWYDITGNQTNTVTINKDGWGQFHVSGGSVSIYVQQ

SEQ ID NO: 25522 - protein, 483 aa, Bacillus licheniformis
HHNGTNGTMMQYFEWYLPNDGNHWNRLRSDASNLKDKGITAVWIPPAWKGASQNDVGYGAYDLYDLGEFNQKGTVRTKYGTRNQLQAAVTALKSNGIQVYGDVVMNHKGGADATEWVRAVEVNPSNRNQEVSGDYTIEAWTKFDFPGRGNTHSNFKWRWYHFDGVDWDQSRQLQNRIYKFRGKGWDWEVDTENGNYDYLMYADIDMDHPEVVNELRNWGVWYTNTLGLDGFRIDAVKHIKYSFTRDWLTHVRNTTGKNMFAVAEFWMNDIGAIENYLSKTNWNHSVFDVPLHYNLYNASRSGGNYDMRQIFNGTVVQRHPTHAVTFVDNHDSQPEEALESFVEEWFKPLAYALTLTRDQGYPSVFYGDYYGIPTHGVPAMKSKIDPILEARQKYAYGTQRDYLDHPDVIGWTREGDGVHADSGLATLMSDGPGGSKWMEVGKNNAGEVWYDITGNQTNTVTINKDGWGQFHVSGGSVSIYVQQ

SEQ ID NO: 25523 - protein, 483 aa, Bacillus licheniformis
HHNGTNGTMMQYFEWYLPNDGNHWNRLRSDASNLKDKGITAVWIPPAWKGASQNDVGYGAYDLYDLGEFNQKGTVRTKYGTRNQLQAAVTALKSNGIQVYGDVVMNHKGGADATEWVRAVEVNPSNRNQEVSGDYTIEAWTKFDFPGRGNTHSNFKWRWYHFDGVDWDQSRQLQNRIYKFRGKGWDWEVDTENGNYDYLMYADIDMDHPEVVNELRNWGVWYTNTLGLDGFRIDAVKHIKYSFTRDWLTHVRNTTGKNMFAVAEFWKNDIGAIENYLSKTNWNHSVFDVPLHYNLYNASRSGGNYDMRQIFNGTVVQRHPTHAYTFVDNHDSQPEEALESFVEEWFKPLAYALTLTRDQGYPSVFYGDYYGIPTHGVPAMKSKIDPILEARQKYAYGTQRDYLDHPDVIGWTREGDGVHADSGLATLMSDGPGGSKWMEVGKNNAGEVWYDITGNQTNTVTINKDGWGQFHVSGGSVSIYVQQ

SEQ ID NO: 25524 - protein, 483 aa, Bacillus licheniformis
HHNGTNGTMMQYFEWYLPNDGNHWNRLRSDASNLKDKGITAVWIPPAWKGASQNDVGYGAYDLYDLGEFNQKGTVRTKYGTRNQLQAAVTALKSNGIQVYGDVVMNHKGGADATEWVRAVEVNPSNRNQEVSGDYTIEAWTKFDFPGRGNTHSNFKWRWYHFDGVDWDQSRQLQNRIYKFRGKGWDWEVDTENGNYDYLMYADIDMDHPEVVNELHNWGVWYTNTLGLDGFRIDAVKHIKYSFTRDWLTHVRNTTGKNMFAVAEFWKNDIGAIENYLSKTNWNHSVFDVPLHYNLYNASRSGGNYDMRQIFNGTVVQRHPTHAVTFVDNHDSQPEEALESFVEEWFKPLAYALTLTRDQGYPSVFYGDYYGIPTHGVPAMKSKIDPILEARQKYAYGTQRDYLDHPDVIGWTREGDGVHADSGLATLMSDGPGGSKWMEVGKNNAGEVWYDITGNQTNTVTINKDGWGQFHVSGGSVSIYVQQ

SEQ ID NO: 25525 - protein, 483 aa, Bacillus licheniformis
HHNGTNGTMMQYFEWYLPNDGNHWNRLRSDASNLKDKGITAVWIPPAWKGASQNDVGYGAYDLYDLGEFNQKGTVRTKYGTRNQLQAAVTALKSNGIQVYGDVVMNHKGGADATSWVRAVEVNPSNRNQEVSGDYTIEAWTKFDFPGRGNTHSNFKWRWYHFDGVDWDQSRQLQNRIYKFRGKGWDWEVDTENGNYDYLMYADIDMDHPEVVNELRNWGVWYTNTLGLDGFRIDAVKHIKYSFTRDWLTHVRNTTGKNMFAVAEFWKNDIGAIENYLSKTNWNHSVFDVPLHYNLYNASRSGGNYDMRQIFNGTVVQRHPTHAVTFVDNHDSQPEEALESFVEEWFKPLAYALTLTRDQGYPSVFYGDYYGIPTHGVPAMKSKIDPILEARQKYAYGTQRDYLDHPDVIGWTREGDGVHADSGLATLMSDGPGGSKWMEVGKNNAGEVWYDITGNQTNTVTINKDGWGQFHVSGGSVSIYVQQ

SEQ ID NO: 25526 - protein, 483 aa, Bacillus subtilis
HHNGTNGTMMQYFEWYLPNDGNHWNRLRSDASNLKDKGITAVWIPPAWKGASQNDVGYGAYDLYDLGEFNQKGTVRTKYGTRNQLQAAVTALKSNGIQVYGDVVMNHKGGADATEWVRAVEVNPSNRNQEVSGDYTIEAWTKFDFPGRGNTHSNFKWRWYHFDGVDWDQSRQLQNRIYKFRGKGWDWEVDTENGNYDYLMYADIDMDHPEVVNELRNWGVWYTNTLGLDGFRIDAVKHIKYSFTRDWLTHVRNTTGKNMFAVAEFWKNDIGAIENYLSKTNWNHSVFDVPLHYNLYNASRSGGNYDMRQIFNGTVVQRHPTHAVTFVDNHDSQPEEALESFVEEWFKPLAYALTLTRDQGYPSVFYGDYYGIPTHGVPAMKSKIDPILEARQKYAYGTQRDYLDHPDVIGWTREGDGVHADSGLATLMSDGPEGSKWMEVGKNNAGEVWYDITGNQTNTVTINKDGWGQFHVSGGSVSIYVQK

SEQ ID NO: 25527 - protein, 483 aa, Bacillus licheniformis
HHNGTNGTMMQYFEWYLPNDGNHWNRLRSDASNLKDKGITAVWIPPAWKGASQNDVGYGAYDLYDLGEFNQKGTVRTKYGTRNQLQAAVTALKSNGIQVYGDVVMNHKGGADATEWVRAVEVNPSNRNQEVSGDYTIEAWTKFDFPGRGNTHSNFKWRWYHFDGVDWDQSRQLQNRIYKFRGKGWDWEVDTENGNYDYLMYADIDMDHPEVVNELRNWGVWYTNTLGLDGFRIDAVKHIKYSFTRDWLTHVRNTTGKNMFAVAEFWKNDIGAIENYLSKTNWNHSVFDVPLHYNLYLASRSGGNYDMRQIFNGTVVQRHPTHAVTFVDNHDSQPEEALESFVEEWFKPLAYALTLTRDQGYPSVFYGDYYGIPTHGVPAMKSKIDPILEARQKYAYGTQRDYLDHPDVIGWTREGDGVHADSGLATLMSDGPGGSKWMEVGKNNAGEVWYDITGNQTNTVTINKDGWGQFHVSGGSVSIYVQQ

SEQ ID NO: 25528 - protein, 483 aa, Bacillus licheniformis
HHNGTNGTMMQYFEWYLPNDGNHWNRLRSDASNLKDKGITAVWIPPAWKGASQNDVGYGAYDLYDLGEFNQKGTVRTKYGTRNQLQAAVTALKSNGIQVYGDVVMNHKGGADATEWVRAVEVNPSNRNQEVSGDYTIEAWTKFDFPGRGNTHSNFKWRWYHFDGVDWDQSRQLQNRIYKFRGKGWDWEVDTENGNYDYLMYADIDMDHPDVVNELRNWGVWYTNTLGLDGFRIDAVKHIKYSFTRDWLTHVRNTTGKNMFAVAEFWKNDIGAIENYLSKTNWNHSVFDVPLHYNLYNASRSGGNYDMRQIFNGTVVQRHPTHAVTFVDNHDSQPEEALESFVEEWFKPLAYALTLTRDQGYPSVFYGDYYGIPTHGVPAMKSKIDPILEARQKYAYGTQRDYLDHPDVIGWTREGDGVHADSGLATLMSDGPGGSKWMEVGKNNAGEVWYDITGNQTNTVTINKDGWGQFHVSGGSVSIYVQQ

SEQ ID NO: 25529 - protein, 483 aa, Bacillus licheniformis
HHNGTNGTMMQYFEWYLPNDGNHWNRLRSDASNLKDKGITAVWIPPAWKGASQNDVGYGAYDLYDLGEFNQKGTVRTKYGTRNQLQAAVTALKSNGIQVYGDVVMNHKGGADATEWVRAVEVNPSNRNQEVSGDYTIEAWTKFDFPGRGNTHSNFKWRWYHFDGVDWDQSRQLQNRIYKFRGKGWDWEVDTENGNYDYLMYADIDMDHPEVVNELRNWGVWYTNTLGLDGFRIDAVKHIKYSFTRDWLTHVRNTTGKNMFAVAEFWKNDIGAIENYLSKTNWNHSVFDVPLHYNMYNASRSGGNYDMRQIFNGTVVQRHPTHAVTFVDNHDSQPEEALESFVEEWFKPLAYALTLTRDQGYPSVFYGDYYGIPTHGVPAMKSKIDPILEARQKYAYGTQRDYLDHPDVIGWTREGDGVHADSGLATLMSDGPGGSKWMEVGKNNAGEVWYDITGNQTNTVTINKDGWGQFHVSGGSVSIYVQQ

SEQ ID NO: 25530 - protein, 483 aa, Bacillus licheniformis
HHNGTNGTMMQYFEWYLPNDGNHWNRLRSDASNLKDKGITAVWIPPAWKGASQNDVGYGAYDLYDLGEFNQKGTVRTKYGTRNQLQAAVTALKSNGIQVYGDVVMNHKGGADATEWVRAVEVNPSNRNQEVSGDYTIEAWTKFDFPGRGNTHSNFKWRWYHFDGVDWDQSRQLQNRIYKFRGKGWDWEVDTENGNYDYLMYADIDMDHPEVVNELRNWGVWYTNTLGLDGFRIDAVKHIKYSFTRDWLTHVRNTTGKNMFAVAEFWKNDIGAIENYLSKTNWNHSVFDVPLHYNLYNASRSGGMYDMRQIFNGTVVQRHPTHAVTFVDNHDSQPEEALESFVEEWFKPLAYALTLTRDQGYPSVFYGDYYGIPTHGVPAMKSKIDPILEARQKYAYGTQRDYLDHPDVIGWTREGDGVHADSGLATLMSDGPGGSKWMEVGKNNAGEVWYDITGNQTNTVTINKDGWGQFHVSGGSVSIYVQQ

SEQ ID NO: 25531 - protein, 483 aa, Bacillus licheniformis
HHNGTNGTMMQYFEWYLPNDGNHWNRLRSDASNLKDKGITAVWIPPAWKGASQNDVGYGAYDVYDLGEFNQKGTVRTKYGTRNQLQAAVTALKSNGIQVYGDVVMNHKGGADATEWVRAVEVNPSNRNQEVSGDYTIEAWTKFDFPGRGNTHSNFKWRWYHFDGVDWDQSRQLQNRIYKFRGKGWDWEVDTENGNYDYLMYADIDMDHPEVVNELRNWGVWYTNTLGLDGFRIDAVKHIKYSFTRDWLTHVRNTTGKNMFAVAEFWKNDIGAIENYLSKTNWNHSVFDVPLHYNLYNASRSGGNYDMRQIFNGTVVQRHPTHAVTFVDNHDSQPEEALESFVEEWFKPLAYALTLTRDQGYPSVFYGDYYGIPTHGVPAMKSKIDPILEARQKYAYGTQRDYLDHPDVIGWTREGDGVHADSGLATLMSDGPGGSKWMEVGKNNAGEVWYDITGNQTNTVTINKDGWGQFHVSGGSVSIYVQQ

SEQ ID NO: 25532 - protein, 483 aa, Bacillus licheniformis
HHNGTNGTMMQYFEWYLPNDGNHWNRLRSDASNLKDKGITAVWIPPAWKGASQNDVGYGAYDLYDLGEFNQKGTVRTKYGTRNQLQAAVTALKSNGIQVYGDVVMNHKGGADATEWVRAVEVNPSNRNQEVSGDYTIEAWTKFDFPGRGNTHSNFKWRWYHFDGVDWDQSRQLQNRIYKFRGKGWDWEVDTENGNYDYLMYADIDMDHPEVVNELRNWGVWYTNTLGLDGFRIDAVKHIKYSFTRDWLTHVRNTTGKNMCAVAEFWKNDIGAIENYLSKTNWNHSVFDVPLHYNLYNASRSGGNYDMRQIFNGTVVQRHPTHAVTFVDNHDSQPEEALESFVEEWFKPLAYALTLTRDQGYPSVFYGDYYGIPTHGVPAMKSKIDPILEARQKYAYGTQRDYLDHPDVIGWTREGDGVHADSGLATLMSDGPGGSKWMEVGKNNAGEVWYDITGNQTNTVTINKDGWGQFHVSGGSVSIYVQQ

SEQ ID NO: 25533 - protein, 483 aa, Bacillus licheniformis
HHNGTNGTMMQYFEWYLPNDGNHWNRLRSDASNLKDKGITAVWIPPAWKGASQNDVGYGAYDLYDLGEFNQKGTVRTKYGTRNQLQAAVTALKSNGIQVYGDVVMNHKGGADATEWVRAVEVNPSNRNQEVSGDYTIEAWTKFDFPGRGNTHSNFKWRWYHFDGVDWDQSRQLQNRIYKFRGKGWDWEVDTENGNYDYLMYADIDMDHLEVVNELRNWGVWYTNTLGLDGFRIDAVKHIKYSFTRDWLTHVRNTTGKNMFAVAEFWKNDIGAIENYLSKTNWNHSVFDVPLHYNLYNASRSGGNYDMRQIFNGTVVQRHPTHAVTFVDNHDSQPEEALESFVEEWFKPLAYALTLTRDQGYPSVFYGDYYGIPTHGVPAMKSKIDPILEARQKYAYGTQRDYLDHPDVIGWTREGDGVHADSGLATLMSDGPGGSKWMEVGKNNAGEVWYDITGNQTNTVTINKDGWGQFHVSGGSVSIYVQQ

SEQ ID NO: 25534 - protein, 483 aa, Bacillus licheniformis
HHNGTNGTMMQYFEWYLPNDGNHWNRLRSDASNLKDKGITAVWIPPAWKGASQNDVGYGAYDLYDLGEFNQKGTVRTKYGTRNQLQAAVTALKSNGIQVYGDVVMNHKGGADATEWVRAVEVNPSNRNQEVSGDYTIEAWTKFDFPGRGNTHSNFKWRWYHFDGVDWDQSRQLQNRIYKFRGKGWDWEVDTENGNYDYLMYADIDMDHPEVVNELRNWGVWYTNTLGLDGFRIDAVKHIKYSFTRDWLTHVRNTTGKNMFAVAEFWKNDIGAIENYLSKTNWNHSVFDVPLHYNLYNASRSGGNYDMRQIFNGTVVQRHPTHAVTFVDNHDSQPEEALESFVEEWFKPLAYALTLTRDQGYPSVFYGDYYGIPTHGVPAMKSKIDPILEARQKYAYGTQRDYLDHPDVIGWTREGDGVHADSGLATLMSDGPGGSKWMEVGKNNAGEVWYIITGNQTNTVTINKDGWGQFHVSGGSVSIYVQQ

SEQ ID NO: 25535 - protein, 483 aa, Bacillus licheniformis
HHNGTNGTMMQYFEWYLPNDGNHWNRLRSDASNLKDKGITAVWIPPAWKGASQNDVGYGAYDLYDLGEFNQKGTVRTKYGTRNQLQAAVTALKSNGIQVYGDVVMNHKGGADATEWVRAVEVNPSNRNQEVSGDYTIEAWTKFDFPGRGNTHSNFKWRWYHFDGVDWDQSRQLQNRIYKFRGKGWDWEVDTENGNYDYLMYADIDMDHPEVVNELRNWGVWYTNTLGLDGFRIDAVKHIKYSFTRDWLTHVRNTTGKNMFAVAEFWKNDIGAIENYLSKTNWNHAVFDVPLHYNLYNASRSGGNYDMRQIFNGTVVQRHPTHAVTFVDNHDSQPEEALESFVEEWFKPLAYALTLTRDQGYPSVFYGDYYGIPTHGVPAMKSKIDPILEARQKYAYGTQRDYLDHPDVIGWTREGDGVHADSGLATLMSDGPGGSKWMEVGKNNAGEVWYDITGNQTNTVTINKDGWGQFHVSGGSVSIYVQQ

SEQ ID NO: 25536 - protein, 483 aa, Bacillus licheniformis
HHNGTNGTMMQYFEWYLPNDGNHWNRLRSDASNLKDKGITAVWIPPAWKGASQNDVGYGAYDLYDLGEFNQKGTVRTKYGTRNQLQAAVTALKSNGIQVYGDVVMNHKGGADATEWVRAVEVNPSNRNQEVSGDYTIEAWTKFDFPGRGNTHSNFKWRWYHFDGVDWDQSRQLQNRIYKFRGKGWDWEVDTENGNYDYLMYADIDMDHPEVVNELRNWGVWYTNTLGLDGFRIDAVKHIKYSFTRDWLTHVRNTTGKNMFAVAEFWKNDIGAIENYLSKTNWNHSVFDVPLHYNLYNASRSGGNYDMRQIFNGTVVQRHPTHAVTFVDNHDSQPEEALESFVEEWFKPLAYALTLTRDQGYPSVFYGDYYGIPTHGVPAMKSKIDPILEARQKYAYGTQRDYLDHPDVIGWTREGDGVHADSGLATLMSDGPGGSKWMEVGKNNAGEVWYDITWNQTNTVTINKDGWGQFHVSGGSVSIYVQQ

SEQ ID NO: 25537 - protein, 483 aa, Bacillus licheniformis
HHNGTNGTMMQYFEWYLPNDGNHWNRLRSDASNLKDKGITAVWIPPAWKGASQNDVGYGAYDLYDLGEFNQKGTVRTKYGTRNQLQAAVTALKSNGIQVYGDVVMNHKGGADATEWVRAVEVNPSNRNQEVSGDYTIEAWTKFDFPGRGNTHSNFKWRWYHFDGVDWDQSRQLQNRIYKFRGKGWDWEVDTENGNYDYLMYADIDMDHPEVVNELRNWGVWYTNTLGLDGFRIDAVKHIKYSFTRDWLTHVRNTTGKNMFAVAEFWKNDIGAIENYLSKTNWNHSVFDVPLHYNLYNASRSMGNYDMRQIFNGTVVQRHPTHAVTFVDNHDSQPEEALESFVEEWFKPLAYALTLTRDQGYPSVFYGDYYGIPTHGVPAMKSKIDPILEARQKYAYGTQRDYLDHPDVIGWTREGDGVHADSGLATLMSDGPGGSKWMEVGKNNAGEVWYDITGNQTNTVTINKDGWGQFHVSGGSVSIYVQQ

SEQ ID NO: 25538 - protein, 483 aa, Bacillus licheniformis
HHNGTNGTMMQYFEWYLPNDGNHWNRLRSDASNLKDKGITAVWIPPAWKGASQNDVGYGAYDLYDLGEFNQKGTVRTKYGTRNQLQAAVTALKSNGIQVYGDVVMNHKGGADATEWVRAVEVNPSNRNQEVSGDYTIEAWTKFDFPGRGNTHSNFKWRWYHFDGVDWDQSRQLQNRIYKFRGKGWDWEVDTENGNYDYLMYADIDMDHPEVVNELRNWGVWYTNTLGLDGFRIDAVKHIKYSFTRDWLTHVRNTTGKNMFIVAEFWKNDIGAIENYLSKTNWNHSVFDVPLHYNLYNASRSGGNYDMRQIFNGTVVQRHPTHAVTFVDNHDSQPEEALESFVEEWFKPLAYALTLTRDQGYPSVFYGDYYGIPTHGVPAMKSKIDPILEARQKYAYGTQRDYLDHPDVIGWTREGDGVHADSGLATLMSDGPGGSKWMEVGKNNAGEVWYDITGNQTNTVTINKDGWGQFHVSGGSVSIYVQQ

SEQ ID NO: 25539 - protein, 483 aa, Bacillus licheniformis
HHNGKNGTMMQYFEWYLPNDGNHWNRLRSDASNLKDKGITAVWIPPAWKGASQNDVGYGAYDLYDLGEFNQKGTVRTKYGTRNQLQAAVTALKSNGIQVYGDVVMNHKGGADATEWVRAVEVNPSNRNQEVSGDYTIEAWTKFDFPGRGNTHSNFKWRWYHFDGVDWDQSRQLQNRIYKFRGKGWDWEVDTENGNYDYLMYADIDMDHPEVVNELRNWGVWYTNTLGLDGFRIDAVKHIKYSFTRDWLTHVRNTTGKNMFAVAEFWKNDIGAIENYLSKTNWNHSVFDVPLHYNLYNASRSGGNYDMRQIFNGTVVQRHPTHAVTFVDNHDSQPEEALESFVEEWFKPLAYALTLTRDQGYPSVFYGDYYGIPTHGVPAMKSKIDPILEARQKYAYGTQRDYLDHPDVIGWTREGDGVHADSGLATLMSDGPGGSKWMEVGKNNAGEVWYDITGNQTNTVTINKDGWGQFHVSGGSVSIYVQQ

SEQ ID NO: 25540 - protein, 483 aa, Bacillus licheniformis
HHNGTNGTMMQYFEWYLPNDGNHWNRLRSDASNLKDKGITAVWIPPAWKGASQNDVGYGAYDLYDLGEFNQKGTVRTKYGTRNQLQAAVTALKSNGIQVYGDVVMNHKGGADATEWVRAVEVNPSNRNQEVSGDYTIEAWTKFDFPGRGNTHSNFKWRWYHFDGVDWDQSRQLQNRIYKFRGKGWDWEVDTENGNYDYLMYADIDMDHPEVVNELRNWGVWYTNTLGLDGFRIDAVKHIKYSFTRDWLTHVRNTTGKNMFAVAEFWKNDIGAIENYLSKTNYNHSVFDVPLHYNLYNASRSGGNYDMRQIFNGTVVQRHPTHAVTFVDNHDSQPEEALESFVEEWFKPLAYALTLTRDQGYPSVFYGDYYGIPTHGVPAMKSKIDPILEARQKYAYGTQRDYLDHPDVIGWTREGDGVHADSGLATLMSDGPGGSKWMEVGKNNAGEVWYDITGNQTNTVTINKDGWGQFHVSGGSVSIYVQQ

SEQ ID NO: 25541 - protein, 483 aa, Bacillus licheniformis
HHNGTNGTMMQYFEWYLPNDGNHWNRLRSDASNLKDKGITAVWIPPAWKGASQNDVGYGAYDLYDLGEFNQKGTVRTKYGTRNQLQAAVTALKSNGIQVYGDVVMNHKGGADATEWVRAVEVNPSNRNQEVSGDYTIEAWTKFDFPGRGNTHSNFKWRWYHFDGVDWDQSRQLQNRIYKFRGKGWDWEVDTENGNYDYLMYADIDMDNPEVVNELRNWGVWYTNTLGLDGFRIDAVKHIKYSFTRDWLTHVRNTTGKNMFAVAEFWKNDIGAIENYLSKTNWNHSVFDVPLHYNLYNASRSGGNYDMRQIFNGTVVQRHPTHAVTFVDNHDSQPEEALESFVEEWFKPLAYALTLTRDQGYPSVFYGDYYGIPTHGVPAMKSKIDPILEARQKYAYGTQRDYLDHPDVIGWTREGDGVHADSGLATLMSDGPGGSKWMEVGKNNAGEVWYDITGNQTNTVTINKDGWGQFHVSGGSVSIYVQQ

SEQ ID NO: 25542 - protein, 483 aa, Bacillus licheniformis
HHNGTNGTMMQYFEWYLPNDGNHWNRLRSDASNLKDKGITAVWIPPAWKGASQNDVGYGAYDLYDLGEFNQKGTVRTKYGTRNQLQAAVTALKSNGIQVYGDVVMNHKGGADATEWVRAVEVNPSNRLQEVSGDYTIEAWTKFDFPGRGNTHSNFKWRWYHFDGVDWDQSRQLQNRIYKFRGKGWDWEVDTENGNYDYLMYADIDMDHPEVVNELRNWGVWYTNTLGLDGFRIDAVKHIKYSFTRDWLTHVRNTTGKNMFAVAEFWKNDIGAIENYLSKTNWNHSVFDVPLHYNLYNASRSGGNYDMRQIFNGTVVQRHPTHAVTFVDNHDSQPEEALESFVEEWFKPLAYALTLTRDQGYPSVFYGDYYGIPTHGVPAMKSKIDPILEARQKYAYGTQRDYLDHPDVIGWTREGDGVHADSGLATLMSDGPGGSKWMEVGKNNAGEVWYDITGNQTNTVTINKDGWGQFHVSGGSVSIYVQQ

SEQ ID NO: 25543 - protein, 483 aa, Bacillus licheniformis
HHNGTNGTMMQYFEWYLPNDGNHWNRLRSDASNLKDKGITAVWIPPAWKGASQNDVGYGAYDLYDLGEFNQKGTVRTKYGTRNQLQAAVTALKSNGIQVYGDVVMNHKGGADATEWVRAVEVNPSNRNQEVSGDYTIEAWTKFDFPGRGNTHSNFKWRWYHFDGVDWDQSRQLQNRIYKFRGKGWDWEVDTENGNYDYLMYADIDMDHPEVVNELRNWGVWYTNTLGLDGFRIDAVKHINYSFTRDWLTHVRNTTGKNMFAVAEFWKNDIGAIENYLSKTNWNHSVFDVPLHYNLYNASRSGGNYDMRQIFNGTVVQRHPTHAVTFVDNHDSQPEEALESFVEEWFKPLAYALTLTRDQGYPSVFYGDYYGIPTHGVPAMKSKIDPILEARQKYAYGTQRDYLDHPDVIGWTREGDGVHADSGLATLMSDGPGGSKWMEVGKNNAGEVWYDITGNQTNTVTINKDGWGQFHVSGGSVSIYVQQ

SEQ ID NO: 25544 - protein, 483 aa, Bacillus licheniformis
HHNGTNGSMMQYFEWYLPNDGNHWNRLRSDASNLKDKGITAVWIPPAWKGASQNDVGYGAYDLYDLGEFNQKGTVRTKYGTRNQLQAAVTALKSNGIQVYGDVVMNHKGGADATEWVRAVEVNPSNRNQEVSGDYTIEAWTKFDFPGRGNTHSNFKWRWYHFDGVDWDQSRQLQNRIYKFRGKGWDWEVDTENGNYDYLMYADIDMDHPEVVNELRNWGVWYTNTLGLDGFRIDAVKHIKYSFTRDWLTHVRNTTGKNMFAVAEFWKNDIGAIENYLSKTNWNHSVFDVPLHYNLYNASRSGGNYDMRQIFNGTVVQRHPTHAVTFVDNHDSQPEEALESFVEEWFKPLAYALTLTRDQGYPSVFYGDYYGIPTHGVPAMKSKIDPILEARQKYAYGTQRDYLDHPDVIGWTREGDGVHADSGLATLMSDGPGGSKWMEVGKNNAGEVWYDITGNQTNTVTINKDGWGQFHVSGGSVSIYVQQ

SEQ ID NO: 25545 - protein, 483 aa, Bacillus licheniformis
HHNGTNGTMMQYFEWYLPNDGNHWNRLRSDASNLKDKGITAVWIPPAWKGASQNDVGYGAYDLYDLGEFNQKGTVRTKYGTRNQLQAAVTALKSNGIQVYGDVVMNHKGGADATEWVRAVEVNPSNRNQEVSGDYTIEAWTKFDFPGRGNTHSNFKWRWYHFDGVDWDQSRQLQNRIYKFRGKGWDWEVDTENGNYDYLMYADIDMDHPEVVNELRNWGVWYTNTLGLDGFRIDAVKHIKYSFTRDWLTHVRNTTGKNMFAVAEFWKNDIGAIENYLSKTNWNHSVFDVPLHYNLYNASRSGGNYDMRQIFNGTVVQRHPTHAVTFVDNHDSQPEEALESFVEEWFKPLAYALTLTRDQGYPSVFYGDYYGIPTHGVPAMKSKIDPILEARQKYAYGTQRDYLDHPDVIGWTREGDGVHADSGLGTLMSDGPGGSKWMEVGKNNAGEVWYDITGNQTNTVTINKDGWGQFHVSGGSVSIYVQQ

SEQ ID NO: 25546 - protein, 483 aa, Bacillus licheniformis
HHNGTNGTMMQYFEWYLPNDGNHWNRLRSDASNLKDKGITAVWIPPAWKGASQNDVGYGAYDLYDLGEFNQKGTVRTKYGTRNQLQAAVTALKSNGIQVYGDVVMNHKGGADATEWVRAVEVNPSNRNQEVSGDYTIEAWTKFDFPGRGNTHSNFKWRWYHFDGVDWDQSRQLQNRIYKFRGKGWDWEVDTENGNYDYLMYADIDMDHPEVVNGLRNWGVWYTNTLGLDGFRIDAVKHIKYSFTRDWLTHVRNTTGKNMFAVAEFWKNDIGAIENYLSKTNWNHSVFDVPLHYNLYNASRSGGNYDMRQIFNGTVVQRHPTHAVTFVDNHDSQPEEALESFVEEWFKPLAYALTLTRDQGYPSVFYGDYYGIPTHGVPAMKSKIDPILEARQKYAYGTQRDYLDHPDVIGWTREGDGVHADSGLATLMSDGPGGSKWMEVGKNNAGEVWYDITGNQTNTVTINKDGWGQFHVSGGSVSIYVQQ

SEQ ID NO: 25547 - protein, 483 aa, Bacillus licheniformis
HHNGTNGTMMQYFEWYLPNDGNHWNRLRSDASNLKDKGITAVWIPPAWKGASQNDVGYGAYDLYDLGEFNQKGTVRTKYGTRNQLQAAVTALKSNGIQVYGDVVMNHKGGADATEWVRAVEVNPSNRNQEVSGDYTIEAWTKFDFPGRGNTHSNFKWRWYHFDGVDWDQSRQLQNRIYKFRGKGWDWEVDTENGNYDYLMYADIDMDHPEVVNELRNWGVWYTNTLGLDGFRIDAVKHIKYSFTRDWLTHVRNTTGKNMFAVAEFWKNDIGAIENYLSKTNWNHSVFDVPLHYNLYNASRSGGNYDMRQIFNGTVVQRHPTHAVTFVDNHDSQPEEALESFVEEWFKPLAYALTLTRDQGYPSVFYGDYYGIPTHGVPAMKSKIDPILEARQKYAYGTQRDYLDHPDVIGWTREGDGVHADSGLATLMSDGPGGSKWMEVGKNNAGEVWYDITGNQTNTVTINKDGWGQFHVSGGSVDIYVQQ

SEQ ID NO: 25548 - protein, 483 aa, Bacillus licheniformis
HHNGTNGTMMQYFEWYLPNDGNHWNRLRSDASNLKDKGITAVWIPPAWKGASQNDVGYGAYDLYDLGEFNQKGTVRTKYGTMNQLQAAVTALKSNGIQVYGDVVMNHKGGADATEWVRAVEVNPSNRNQEVSGDYTIEAWTKFDFPGRGNTHSNFKWRWYHFDGVDWDQSRQLQNRIYKFRGKGWDWEVDTENGNYDYLMYADIDMDHPEVVNELRNWGVWYTNTLGLDGFRIDAVKHIKYSFTRDWLTHVRNTTGKNMFAVAEFWKNDIGAIENYLSKTNWNHSVFDVPLHYNLYNASRSGGNYDMRQIFNGTVVQRHPTHAVTFVDNHDSQPEEALESFVEEWFKPLAYALTLTRDQGYPSVFYGDYYGIPTHGVPAMKSKIDPILEARQKYAYGTQRDYLDHPDVIGWTREGDGVHADSGLATLMSDGPGGSKWMEVGKNNAGEVWYDITGNQTNTVTINKDGWGQFHVSGGSVSIYVQQ

SEQ ID NO: 25549 - protein, 483 aa, Bacillus licheniformis
HHNGTTGTMMQYFEWYLPNDGNHWNRLRSDASNLKDKGITAVWIPPAWKGASQNDVGYGAYDLYDLGEFNQKGTVRTKYGTRNQLQAAVTALKSNGIQVYGDVVMNHKGGADATEWVRAVEVNPSNRNQEVSGDYTIEAWTKFDFPGRGNTHSNFKWRWYHFDGVDWDQSRQLQNRIYKFRGKGWDWEVDTENGNYDYLMYADIDMDHPEVVNELRNWGVWYTNTLGLDGFRIDAVKHIKYSFTRDWLTHVRNTTGKNMFAVAEFWKNDIGAIENYLSKTNWNHSVFDVPLHYNLYNASRSGGNYDMRQIFNGTVVQRHPTHAVTFVDNHDSQPEEALESFVEEWFKPLAYALTLTRDQGYPSVFYGDYYGIPTHGVPAMKSKIDPILEARQKYAYGTQRDYLDHPDVIGWTREGDGVHADSGLATLMSDGPGGSKWMEVGKNNAGEVWYDITGNQTNTVTINKDGWGQFHVSGGSVSIYVQQ

SEQ ID NO: 25550 - protein, 483 aa, Bacillus licheniformis
HHNGTNGTMMQYFEWYLPNDGNHWNRRRSDASNLKDKGITAVWIPPAWKGASQNDVGYGAYDLYDLGEFNQKGTVRTKYGTRNQLQAAVTALKSNGIQVYGDVVMNHKGGADATEWVRAVEVNPSNRNQEVSGDYTIEAWTKFDFPGRGNTHSNFKWRWYHFDGVDWDQSRQLQNRIYKFRGKGWDWEVDTENGNYDYLMYADIDMDHPEVVNELRNWGVWYTNTLGLDGFRIDAVKHIKYSFTRDWLTHVRNTTGKNMFAVAEFWKNDIGAIENYLSKTNWNHSVFDVPLHYNLYNASRSGGNYDMRQIFNGTVVQRHPTHAVTFVDNHDSQPEEALESFVEEWFKPLAYALTLTRDQGYPSVFYGDYYGIPTHGVPAMKSKIDPILEARQKYAYGTQRDYLDHPDVIGWTREGDGVHADSGLATLMSDGPGGSKWMEVGKNNAGEVWYDITGNQTNTVTINKDGWGQFHVSGGSVSIYVQQ

SEQ ID NO: 25551 - protein, 483 aa, Bacillus licheniformis
HHNGTNGTMMQYFEWYLPNDGNHWNRLRSDASNLKDKGITAVWIPPAWKGASQNDVGYGAYDLYDLGEFNQKGTVRTKYGTRNQLQAAVTALKSNGIQVYGDVVMNHKGGADATEWVRAVEVNPSNRNQEVSGDYTIEAWTKFDFPGRGNTHSNFKWRWYHFDGVDWDQSRQLQNRIYKFRGKGWDWEVDTENGNYDYLMYADIDMDHPEVVNELRNWGVWYTNTLGLDGFRIDAVKHIKYSFTRDWLTHVRNTTGKNMFAVAEFWKNDIGAIENYLSKTNWNHSVFDVPLHYNLYNASRSGGNYDMRQIFNGTVVQRHPTHAVTFVDNHDSQPEEALESFVEEWFKPLAYALTLTRDQGCPSVFYGDYYGIPTHGVPAMKSKIDPILEARQKYAYGTQRDYLDHPDVIGWTREGDGVHADSGLATLMSDGPGGSKWMEVGKNNAGEVWYDITGNQTNTVTINKDGWGQFHVSGGSVSIYVQQ

SEQ ID NO: 25552 - protein, 483 aa, Bacillus licheniformis
HHNGTNGTMMQYFEWYLPNDGNHWNRLRSDASNLKDKGITAVWIPPAWKGASQNDVGYGAYDLYDLGEFNQKGTVRTKYGTRNQLQAAVTALKSNGIQVYGDVVMNHKGGADATEWVRAVEVNPSNRNQEVSGDYTIEAWTKFDFPGRGNTHSNFKWRWYHFDGVDWDQSRQLQNRIYKFRGKGWDWEVDTENGNYDYLMYADIDMDHPEVVNELRNWGVWYTNTLGLDGFRIDAVKHIKYSFTRDWLTHVRNTTGKNMFAVAEFWKNDIGAIENYLSKTNWNHSVFDVPLHYNLYNASRSGGNYDMRQIFNGTVVQRHPTHAVTFVDNHDSQPEEALESFVEEWFKPLAYALTLTRDQYYPSVFYGDYYGIPTHGVPAMKSKIDPILEARQKYAYGTQRDYLDHPDVIGWTREGDGVHADSGLATLMSDGPGGSKWMEVGKNNAGEVWYDITGNQTNTVTINKDGWGQFHVSGGSVSIYVQQ

SEQ ID NO: 25553 - protein, 483 aa, Bacillus licheniformis
HHNGTNGTMMQYFEWYLPNDGNHWNRLRSDASNLKDKGITAVWIPPAWKGASQNDVGYGAYDLYDLGEFNQKGTVRTKYGTRNQLQAAVTALKSNGIQVYGDVVMNHKGGADATEWVRAVEVNPSNRNQEVSGDYTIEAWTKFDFPGRGNTHSNFKWRWYHFDGVDWDQSRQLQNRIYKFRGKGWDWEVDTENGNYDYLMYADIDMDHPEVVNELRNWGVWYTNTLGLDGFRIDAVKHIKYSFTRDWLTHVRNTTGKNMFAVAEFWKNDIGAIENYLSKTNWNHSVFDVPLHYNLYNASRSGGNYDMRQIFNGTVVQRHPTHAVTFVDNHDSQPEEALESFVEEWFKPLAYALTLTRDQGKPSVFYGDYYGIPTHGVPAMKSKIDPILEARQKYAYGTQRDYLDHPDVIGWTREGDGVHADSGLATLMSDGPGGSKWMEVGKNNAGEVWYDITGNQTNTVTINKDGWGQFHVSGGSVSIYVQQ

SEQ ID NO: 25554 - protein, 483 aa, Bacillus licheniformis
HHNGTNCTMMQYFEWYLPNDGNHWNRLRSDASNLKDKGITAVWIPPAWKGASQNDVGYGAYDLYDLGEFNQKGTVRTKYGTRNQLQAAVTALKSNGIQVYGDVVMNHKGGADATEWVRAVEVNPSNRNQEVSGDYTIEAWTKFDFPGRGNTHSNFKWRWYHFDGVDWDQSRQLQNRIYKFRGKGWDWEVDTENGNYDYLMYADIDMDHPEVVNELRNWGVWYTNTLGLDGFRIDAVKHIKYSFTRDWLTHVRNTTGKNMFAVAEFWKNDIGAIENYLSKTNWNHSVFDVPLHYNLYNASRSGGNYDMRQIFNGTVVQRHPTHAVTFVDNHDSQPEEALESFVEEWFKPLAYALTLTRDQGYPSVFYGDYYGIPTHGVPAMKSKIDPILEARQKYAYGTQRDYLDHPDVIGWTREGDGVHADSGLATLMSDGPGGSKWMEVGKNNAGEVWYDITGNQTNTVTINKDGWGQFHVSGGSVSIYVQQ

SEQ ID NO: 25555 - protein, 483 aa, Bacillus licheniformis
HHNGTNGTMMQYFEWYLPNDGGHWNRLRSDASNLKDKGITAVWIPPAWKGASQNDVGYGAYDLYDLGEFNQKGTVRTKYGTRNQLQAAVTALKSNGIQVYGDVVMNHKGGADATEWVRAVEVNPSNRNQEVSGDYTIEAWTKFDFPGRGNTHSNFKWRWYHFDGVDWDQSRQLQNRIYKFRGKGWDWEVDTENGNYDYLMYADIDMDHPEVVNELRNWGVWYTNTLGLDGFRIDAVKHIKYSFTRDWLTHVRNTTGKNMFAVAEFWKNDIGAIENYLSKTNWNHSVFDVPLHYNLYNASRSGGNYDMRQIFNGTVVQRHPTHAVTFVDNHDSQPEEALESFVEEWFKPLAYALTLTRDQGYPSVFYGDYYGIPTHGVPAMKSKIDPILEARQKYAYGTQRDYLDHPDVIGWTREGDGVHADSGLATLMSDGPGGSKWMEVGKNNAGEVWYDITGNQTNTVTINKDGWGQFHVSGGSVSIYVQQ

SEQ ID NO: 25556 - protein, 483 aa, Bacillus licheniformis
HHNGTNGTMMQYFEWYLPNDGNHWNRLRSDASNLKDKGITAVWIPPAWKGASQNDVGYGAYDLYDLGEFNQKGTVRTKYGTRNQLQAAVTALKSNGIQVYGDVVMNHKGGADATEWVRAVEVNPSNRNQEVSGDYTIEAWTKFDFPGRGNTHSNFKWRWYHFDGVDWDQSRQLQNRIYKFRGKGWDWEVDTENGNYDYLMYADIDMDHPEVVNELENWGVWYTNTLGLDGFRIDAVKHIKYSFTRDWLTHVRNTTGKNMFAVAEFWKNDIGAIENYLSKTNWNHSVFDVPLHYNLYNASRSGGNYDMRQIFNGTVVQRHPTHAVTFVDNHDSQPEEALESFVEEWFKPLAYALTLTRDQGYPSVFYGDYYGIPTHGVPAMKSKIDPILEARQKYAYGTQRDYLDHPDVIGWTREGDGVHADSGLATLMSDGPGGSKWMEVGKNNAGEVWYDITGNQTNTVTINKDGWGQFHVSGGSVSIYVQQ

SEQ ID NO: 25557 - protein, 483 aa, Bacillus licheniformis
HHNGTNGTMMQYFEWYLPNDGNHWNRLRSDASNLKDKGITAVWIPPAWKGASQNDVGYGAYDLYDLGEFNQKGTIRTKYGTRNQLQAAVTALKSNGIQVYGDVVMNHKGGADATEWVRAVEVNPSNRNQEVSGDYTIEAWTKFDFPGRGNTHSNFKWRWYHFDGVDWDQSRQLQNRIYKFRGKGWDWEVDTENGNYDYLMYADIDMDHPEVVNELRNWGVWYTNTLGLDGFRIDAVKHIKYSFTRDWLTHVRNTTGKNMFAVAEFWKNDIGAIENYLSKTNWNHSVFDVPLHYNLYNASRSGGNYDMRQIFNGTVVQRHPTHAVTFVDNHDSQPEEALESFVEEWFKPLAYALTLTRDQGYPSVFYGDYYGIPTHGVPAMKSKIDPILEARQKYAYGTQRDYLDHPDVIGWTREGDGVHADSGLATLMSDGPGGSKWMEVGKNNAGEVWYDITGNQTNTVTINKDGWGQFHVSGGSVSIYVQQ

SEQ ID NO: 25558 - protein, 483 aa, Bacillus licheniformis
HHNGTNGTMMQYFEWYLPNDGNHWNRLRSDASNLKDKGITAVWIPPAWKGASQNDVGYGAYDLYDLGEFNQKGTVRTKYGTRNQLQAAVTALKSNGIQVYGDVVMNHKGGADATEWVRAVEVNPSNRNQEVSGDYTIEAWTKFDFPGRGNTHSNFKWRWWHFDGVDWDQSRQLQNRIYKFRGKGWDWEVDTENGNYDYLMYADIDMDHPEVVNELRNWGVWYTNTLGLDGFRIDAVKHIKYSFTRDWLTHVRNTTGKNMFAVAEFWKNDIGAIENYLSKTNWNHSVFDVPLHYNLYNASRSGGNYDMRQIFNGTVVQRHPTHAVTFVDNHDSQPEEALESFVEEWFKPLAYALTLTRDQGYPSVFYGDYYGIPTHGVPAMKSKIDPILEARQKYAYGTQRDYLDHPDVIGWTREGDGVHADSGLATLMSDGPGGSKWMEVGKNNAGEVWYDITGNQTNTVTINKDGWGQFHVSGGSVSIYVQQ

SEQ ID NO: 25559 - protein, 483 aa, Bacillus licheniformis
HHNGTNGTMMQYFEWYLPNDGNHWNRLRSDASNLKDKGITAVWIPPAWKGASQNDVGYGAYDLYDLGEFNQKGTVRTKYGTRNQLQAAVTALKSNGIQVYGDVVMNHKGGADATEWVRAVEVNPSNRNQEVSGDYTIEAWTKFDFPGRGNTHSNFKWRWYHFDGVDWDQSRQLQNRIYKFRGKGWDWEVDTENGNYDYLMYADIDMDHPEVVNELTNWGVWYTNTLGLDGFRIDAVKHIKYSFTRDWLTHVRNTTGKNMFAVAEFWKNDIGAIENYLSKTNWNHSVFDVPLHYNLYNASRSGGNYDMRQIFNGTVVQRHPTHAVTFVDNHDSQPEEALESFVEEWFKPLAYALTLTRDQGYPSVFYGDYYGIPTHGVPAMKSKIDPILEARQKYAYGTQRDYLDHPDVIGWTREGDGVHADSGLATLMSDGPGGSKWMEVGKNNAGEVWYDITGNQTNTVTINKDGWGQFHVSGGSVSIYVQQ

SEQ ID NO: 25560 - protein, 483 aa, Bacillus licheniformis
HHNGTNGTMMQYFEWYLPNDGNHWNRLRSDASNLKDKGKTAVWIPPAWKGASQNDVGYGAYDLYDLGEFNQKGTVRTKYGTRNQLQAAVTALKSNGIQVYGDVVMNHKGGADATEWVRAVEVNPSNRNQEVSGDYTIEAWTKFDFPGRGNTHSNFKWRWYHFDGVDWDQSRQLQNRIYKFRGKGWDWEVDTENGNYDYLMYADIDMDHPEVVNELRNWGVWYTNTLGLDGFRIDAVKHIKYSFTRDWLTHVRNTTGKNMFAVAEFWKNDIGAIENYLSKTNWNHSVFDVPLHYNLYNASRSGGNYDMRQIFNGTVVQRHPTHAVTFVDNHDSQPEEALESFVEEWFKPLAYALTLTRDQGYPSVFYGDYYGIPTHGVPAMKSKIDPILEARQKYAYGTQRDYLDHPDVIGWTREGDGVHADSGLATLMSDGPGGSKWMEVGKNNAGEVWYDITGNQTNTVTINKDGWGQFHVSGGSVSIYVQQ

SEQ ID NO: 25561 - protein, 483 aa, Bacillus licheniformis
HHNGTNGTMMQYFEWYLPNDGNHWNRLRSDASNLKDKGITAVWIPPAWKGASQNDVGYGAYDLYDLGEFNQKGTVRTKYGTRNQLQAAVTALKSNGIQVYGDVVMNHKGGADATEWVRAVEVNPSNRNQEVSGDYTIEAWTKFDFPGRGNTHSNFKWRWYHFDGVDWDQSRQLQNRIYKFRGKGWDWEVDTENGNYDYLMYADIDMDHPEVVNELRNWGVWYTNTLGLDGFRIDAVKHIKYSFTRDWLTHVRNTTRKNMFAVAEFWKNDIGAIENYLSKTNWNHSVFDVPLHYNLYNASRSGGNYDMRQIFNGTVVQRHPTHAVTFVDNHDSQPEEALESFVEEWFKPLAYALTLTRDQGYPSVFYGDYYGIPTHGVPAMKSKIDPILEARQKYAYGTQRDYLDHPDVIGWTREGDGVHADSGLATLMSDGPGGSKWMEVGKNNAGEVWYDITGNQTNTVTINKDGWGQFHVSGGSVSIYVQQ

SEQ ID NO: 25562 - protein, 483 aa, Bacillus licheniformis
HHNGTNGTMMQYFEWYLPNDGNHWNRLRSDASNLKDKGITAVWIPPAWKGASQNDVGYGAYDLYDLGEFNQKGTVRTKYGTRNQLQAAVTALKSNGIQVYGDVVMNHKGGADATEWVRAVEVNPSNRNQEVSGFYTIEAWTKFDFPGRGNTHSNFKWRWYHFDGVDWDQSRQLQNRIYKFRGKGWDWEVDTENGNYDYLMYADIDMDHPEVVNELRNWGVWYTNTLGLDGFRIDAVKHIKYSFTRDWLTHVRNTTGKNMFAVAEFWKNDIGAIENYLSKTNWNHSVFDVPLHYNLYNASRSGGNYDMRQIFNGTVVQRHPTHAVTFVDNHDSQPEEALESFVEEWFKPLAYALTLTRDQGYPSVFYGDYYGIPTHGVPAMKSKIDPILEARQKYAYGTQRDYLDHPDVIGWTREGDGVHADSGLATLMSDGPGGSKWMEVGKNNAGEVWYDITGNQTNTVTINKDGWGQFHVSGGSVSIYVQQ

SEQ ID NO: 25563 - protein, 483 aa, Bacillus licheniformis
HHNGTNGTMMQYFEWYLPNDGNHWNRLRSDASNLKDKGITAVWIPPAWKGASQNDVGYGAYDLYDLGEFNQKGTVRTKYGTRNQLQAAVTALKSNGIQVYGDVVMNHKGGADATEWVRAVEVNPSNRNQEVSGDYTIEAWTKFDFPGRGNTHSNFKWRWYHFDGVDWDQSRQLQNRIYKFRGKGWDWEVDTENGNYDYLMYADIDMDHPESVNELRNWGVWYTNTLGLDGFRIDAVKHIKYSFTRDWLTHVRNTTGKNMFAVAEFWKNDIGAIENYLSKTNWNHSVFDVPLHYNLYNASRSGGNYDMRQIFNGTVVQRHPTHAVTFVDNHDSQPEEALESFVEEWFKPLAYALTLTRDQGYPSVFYGDYYGIPTHGVPAMKSKIDPILEARQKYAYGTQRDYLDHPDVIGWTREGDGVHADSGLATLMSDGPGGSKWMEVGKNNAGEVWYDITGNQTNTVTINKDGWGQFHVSGGSVSIYVQQ

SEQ ID NO: 25564 - protein, 483 aa, Bacillus licheniformis
HHNGTNGTMMQYFEWYLPNDGNHWNRLRSDASNLKDKGITAVWIPPAWKGASQNDVGYGAYDLYDLGEFNQKGTVRTKYGTRNQLQAAVTALKSNGIQVYGDVVMNHKGGADATEWVRAVEVNPSNRNQEVSGDTTIEAWTKFDFPGRGNTHSNFKWRWYHFDGVDWDQSRQLQNRIYKFRGKGWDWEVDTENGNYDYLMYADIDMDHPEVVNELRNWGVWYTNTLGLDGFRIDAVKHIKYSFTRDWLTHVRNTTGKNMFAVAEFWKNDIGAIENYLSKTNWNHSVFDVPLHYNLYNASRSGGNYDMRQIFNGTVVQRHPTHAVTFVDNHDSQPEEALESFVEEWFKPLAYALTLTRDQGYPSVFYGDYYGIPTHGVPAMKSKIDPILEARQKYAYGTQRDYLDHPDVIGWTREGDGVHADSGLATLMSDGPGGSKWMEVGKNNAGEVWYDITGNQTNTVTINKDGWGQFHVSGGSVSIYVQQ

SEQ ID NO: 25565 - protein, 483 aa, Bacillus licheniformis
HHNGTNNTMMQYFEWYLPNDGNHWNRLRSDASNLKDKGITAVWIPPAWKGASQNDVGYGAYDLYDLGEFNQKGTVRTKYGTRNQLQAAVTALKSNGIQVYGDVVMNHKGGADATEWVRAVEVNPSNRNQEVSGDYTIEAWTKFDFPGRGNTHSNFKWRWYHFDGVDWDQSRQLQNRIYKFRGKGWDWEVDTENGNYDYLMYADIDMDHPEVVNELRNWGVWYTNTLGLDGFRIDAVKHIKYSFTRDWLTHVRNTTGKNMFAVAEFWKNDIGAIENYLSKTNWNHSVFDVPLHYNLYNASRSGGNYDMRQIFNGTVVQRHPTHAVTFVDNHDSQPEEALESFVEEWFKPLAYALTLTRDQGYPSVFYGDYYGIPTHGVPAMKSKIDPILEARQKYAYGTQRDYLDHPDVIGWTREGDGVHADSGLATLMSDGPGGSKWMEVGKNNAGEVWYDITGNQTNTVTINKDGWGQFHVSGGSVSIYVQQ

SEQ ID NO: 25566 - protein, 483 aa, Bacillus licheniformis
HHNGTNGTMMQYFEWYLPNDGNHWNRLRSDASNLKDKGITAVWIPPAWKGASQNDVGYGAYDLYDLGEFNQKGTVRTKYGTRNQLQAAVTALKSNGIQVYGDVVMNHKGGADATEWVRAVEVNPSNRNQEVSGDYTIEAWTKFDFPGRGNTHSNFKWRWYHFDGVDWDQSRQLQNRIYKFRGKGWDWEVDTENGNYDYLMYADIDMDHPEVVNELRNWGVWYTNTLGLDGFRIDAVKHIKYSFTRDWLTCVRNTTGKNMFAVAEFWKNDIGAIENYLSKTNWNHSVFDVPLHYNLYNASRSGGNYDMRQIFNGTVVQRHPTHAVTFVDNHDSQPEEALESFVEEWFKPLAYALTLTRDQGYPSVFYGDYYGIPTHGVPAMKSKIDPILEARQKYAYGTQRDYLDHPDVIGWTREGDGVHADSGLATLMSDGPGGSKWMEVGKNNAGEVWYDITGNQTNTVTINKDGWGQFHVSGGSVSIYVQQ

SEQ ID NO: 25567 - protein, 483 aa, Bacillus licheniformis
HHNGTNGTMMQYFEWYLPNDGNHWNRLRSDASNLKDKGITAVWIPPAWKGASQNDVGYGAYDLYDLGEFNQKGTVRTKYGTRNQLQAAVTALKSNGIQVYGDVVMNHKGGADATEWVRAVEVNPSNRNQEVSGDYTIEAWTKFDFPGRGNTHSNFKWRWYHFDGVDWDQSRQLQNRIYKFRGKGWDWEVDTENGNYDYLMYADIDMDHEEVVNELRNWGVWYTNTLGLDGFRIDAVKHIKYSFTRDWLTHVRNTTGKNMFAVAEFWKNDIGAIENYLSKTNWNHSVFDVPLHYNLYNASRSGGNYDMRQIFNGTVVQRHPTHAVTFVDNHDSQPEEALESFVEEWFKPLAYALTLTRDQGYPSVFYGDYYGIPTHGVPAMKSKIDPILEARQKYAYGTQRDYLDHPDVIGWTREGDGVHADSGLATLMSDGPGGSKWMEVGKNNAGEVWYDITGNQTNTVTINKDGWGQFHVSGGSVSIYVQQ

SEQ ID NO: 25568 - protein, 483 aa, Bacillus licheniformis
HHNGTNGTMMQYFEWYLPNDGNHWNRLRSDASNLKDKGITAVWIPPAWKGASQNDVGYGAYDLYDLGEFNQKGTVRTKYGTRNQLQAAVTALKSNGIQVYGDVVMNHKGGADATEWVRAVEVNPSNRNQEVSGDYTIEAWTKFDFPGRGNTHSNFKWRWYHFDGVDWDQSRQLQNRIYKFRGKGWDWEVDTENGNYDYLMYADIDMDHPWVVNELRNWGVWYTNTLGLDGFRIDAVKHIKYSFTRDWLTHVRNTTGKNMFAVAEFWKNDIGAIENYLSKTNWNHSVFDVPLHYNLYNASRSGGNYDMRQIFNGTVVQRHPTHAVTFVDNHDSQPEEALESFVEEWFKPLAYALTLTRDQGYPSVFYGDYYGIPTHGVPAMKSKIDPILEARQKYAYGTQRDYLDHPDVIGWTREGDGVHADSGLATLMSDGPGGSKWMEVGKNNAGEVWYDITGNQTNTVTINKDGWGQFHVSGGSVSIYVQQ

SEQ ID NO: 25569 - protein, 483 aa, Bacillus licheniformis
HHNGTNGTMMQYFEWYLPNDGNHWNRLRSDASNLKDKGITAVWIPPAWKGASQNDVGYGAYDLYDLGEFNQKGTVRTKYGTRNQLQAAVTALKSNGIQVYGDVVMNHKGGADATEWVRAVEVNPSNRNQEVSGDYTIEAWTKFDFPGRGNTHSNFKWRWYHFDGVDWDQSRQLQNRIYKFRGKGWDWEVDTENGNYDYLMYADIDMDHPEVVNELRNWGVWYTNTLGLDGFRIDAVKHIKYSFTRDWLTHVRNTTGKNMFAVAEFWKNDIGAIENYLSKTNWNHSVFDVPLHYNLYNASRSGGNYDMRQIFNGTVVQRHPTHAVTFVDNHDSQPETALESFVEEWFKPLAYALTLTRDQGYPSVFYGDYYGIPTHGVPAMKSKIDPILEARQKYAYGTQRDYLDHPDVIGWTREGDGVHADSGLATLMSDGPGGSKWMEVGKNNAGEVWYDITGNQTNTVTINKDGWGQFHVSGGSVSIYVQQ

SEQ ID NO: 25570 - protein, 483 aa, Bacillus licheniformis
HHNGTNGTMMQYFEWYLPNDGNHWNRLRSDASNLKDKGITAVWIPPAWKGASQNDVGYGAYDLYDLGEFNQKGTVRTKYGTRNQLQAAVTALKSNGIQVYGDVVMNHKGGADATEWVRAVEVNPSNRNQEVSGDYTIEAWTKFDFPGRGNTHSNFKWRWYHFDGVDWDQSRQLQNRIYKFRGKGWDWEVDTENGNYDYLMYADIDMDHPEVVNELRNWGVWYTNTLGLDGFRIDAVKHIKYSFTRDWLTHVRNTTGKNMFAVAEFWKNDIGAIENYLSKTNWNHSVFDVPLHYNLYNASRSGGNYDMRQIFNGTVVQRHPTHAVTFVDNHDSQPEEALESFVEQWFKPLAYALTLTRDQGYPSVFYGDYYGIPTHGVPAMKSKIDPILEARQKYAYGTQRDYLDHPDVIGWTREGDGVHADSGLATLMSDGPGGSKWMEVGKNNAGEVWYDITGNQTNTVTINKDGWGQFHVSGGSVSIYVQQ

SEQ ID NO: 25571 - protein, 483 aa, Bacillus licheniformis
HHNGTWGTMMQYFEWYLPNDGNHWNRLRSDASNLKDKGITAVWIPPAWKGASQNDVGYGAYDLYDLGEFNQKGTVRTKYGTRNQLQAAVTALKSNGIQVYGDVVMNHKGGADATEWVRAVEVNPSNRNQEVSGDYTIEAWTKFDFPGRGNTHSNFKWRWYHFDGVDWDQSRQLQNRIYKFRGKGWDWEVDTENGNYDYLMYADIDMDHPEVVNELRNWGVWYTNTLGLDGFRIDAVKHIKYSFTRDWLTHVRNTTGKNMFAVAEFWKNDIGAIENYLSKTNWNHSVFDVPLHYNLYNASRSGGNYDMRQIFNGTVVQRHPTHAVTFVDNHDSQPEEALESFVEEWFKPLAYALTLTRDQGYPSVFYGDYYGIPTHGVPAMKSKIDPILEARQKYAYGTQRDYLDHPDVIGWTREGDGVHADSGLATLMSDGPGGSKWMEVGKNNAGEVWYDITGNQTNTVTINKDGWGQFHVSGGSVSIYVQQ

SEQ ID NO: 25572 - protein, 483 aa, Bacillus licheniformis
HHNGTNGTMMQYFEWYLPNDGNHWNRLRSDASNLKDKGITAVWIPPAWKGASQNDVGYGAYDLYDLGEFNQKGTVRTKYGTRNQLQAAVTALKSNGIQVYGDVVMNHKGGADATEWVRAVEVNPSNRNQEVSGDYTIEAWTKFDFPGRGNTHSNFKWRWYHFDGVDWDQSRQLQNRIYKFRGKGWDWEVDTENGNYDYLMYADIDMDHPEVVNELRNWGVWYTNTLGLDGFRIDAVKHIKYSFTRDWLTHVRNTTGKNMFAVAEFWKNDIGAIENYLSKTNWNHSVFDVPLHYNLVNASRSGGNYDMRQIFNGTVVQRHPTHAVTFVDNHDSQPEEALESFVEEWFKPLAYALTLTRDQGYPSVFYGDYYGIPTHGVPAMKSKIDPILEARQKYAYGTQRDYLDHPDVIGWTREGDGVHADSGLATLMSDGPGGSKWMEVGKNNAGEVWYDITGNQTNTVTINKDGWGQFHVSGGSVSIYVQQ

SEQ ID NO: 25573 - protein, 483 aa, Bacillus licheniformis
HHNGTNGTMMQYFEWYLPNDGNHWNRLRSDASNLKDKGITAVWIPPAWKGASQNDVGYGAYDLYDLGEFMQKGTVRTKYGTRNQLQAAVTALKSNGIQVYGDVVMNHKGGADATEWVRAVEVNPSNRNQEVSGDYTIEAWTKFDFPGRGNTHSNFKWRWYHFDGVDWDQSRQLQNRIYKFRGKGWDWEVDTENGNYDYLMYADIDMDHPEVVNELRNWGVWYTNTLGLDGFRIDAVKHIKYSFTRDWLTHVRNTTGKNMFAVAEFWKNDIGAIENYLSKTNWNHSVFDVPLHYNLYNASRSGGNYDMRQIFNGTVVQRHPTHAVTFVDNHDSQPEEALESFVEEWFKPLAYALTLTRDQGYPSVFYGDYYGIPTHGVPAMKSKIDPILEARQKYAYGTQRDYLDHPDVIGWTREGDGVHADSGLATLMSDGPGGSKWMEVGKNNAGEVWYDITGNQTNTVTINKDGWGQFHVSGGSVSIYVQQ

SEQ ID NO: 25574 - protein, 483 aa, Bacillus licheniformis
HHNGTNGTMMQYFEWYLPNDGNHWNRLRSDASNLKDKGITAVWIPPAWKGASQNDVGYGAYDLYDLGEFNQKGTVRTKYGTRNQLQAAVTALKSNGIQVYGDVVMNHKGGADATEWVRAVEVNPSNRNQEVSGDYTIEAWTKFDFPGRGNTHSNFKWRWWHFDGVDWDQSRQLQNKIYKFRGKGWDWEVDTENGNYDYLMYADYDMDHPEVVNELRNWGVWYTNTLGLDGFRIDAVKHIKYSFTRDWLTHVRNTTGKNMFAVAEFWKNDIGAIENYLSKTNWNHSVFDVPLHYNLYNASRSGGNYDMRQIFNGTVVQRHPTHAVTFVDNHDSQPEEALESFVEEWFKPLAYALTLTRDQGYPSVFYGDYYGIPTHGVPAMKSKIDPILEARQKYAYGTQRDYLDHPDVIGWTREGDGVHADSGLATLMSDGPGGSKWMEVGKNNAGEVWYDITGNQTGTVTINKDGWGQFHVSGGSVSIYVQQ

SEQ ID NO: 25575 - protein, 483 aa, Bacillus licheniformis
HHNGTNGTMMQYFEWYLPNDGNHWNRLRSDASNLKDKGITAVWIPPAWKGASQNDVGYGAYDLYDLGEFNQKGTVRTKYGTRNQLQAAVTALKSNGIQVYGDVVMNHKGGADATEWVRAVEVNPSNRNQEVSGDYTIEAWTKFDFPGRGNTHSNFKWRWYHFDGVDWDQSRQLQNRIYKFRGKGWDWEVDTENGNYDYLMYADIDMDHPEVVNELRNWGVWYTNTLGLDGFRIDAVKHIKYSFTRDWLTHVRNTTGKNMFAVAEFWKNDIGAIENYLSKTNWNHSVFNVPLHYNLYNASRSGGNYDMRQIFNGTVVQRHPTHAVTFVDNHDSQPEEALESFVEEWFKPLAYALTLTRDQGYPSVFYGDYYGIPTHGVPAMKSKIDPILEARQKYAYGTQRDYLDHPDVIGWTREGDGVHADSGLATLMSDGPGGSKWMEVGKNNAGEVWYDITGNQTNTVTINKDGWGQFHVSGGSVSIYVQQ

SEQ ID NO: 25576 - protein, 483 aa, Bacillus licheniformis
HHNGTNGTMMQYFEWYLPNDGNHWNRLRSDASNLKDKGITAVWIPPAWKGASQNDVGYGAYDLYDLGEFNQKGTVRTKYGTRNQLQAAVTALKSNGIQVYGDVVMNHKGGADATEWVRAVEVNPSNRNQEVSGDYTIEAWTKFDFPGRGNTHSNFKWRWYHFDGVDWDQSRQLQNRIYKFRGKGWDWEVDTENGNYDYLMYADIDMDHPEVVNELRNWGVWYTNTLGLDGFRIDAVKHIKYSFTRDWLTHVRNTTGKNMFAVAEFWKNDIGAIENYLSKTNWNHSVFDVPFHYNLYNASRSGGNYDMRQIFNGTVVQRHPTHAVTFVDNHDSQPEEALESFVEEWFKPLAYALTLTRDQGYPSVFYGDYYGIPTHGVPAMKSKIDPILEARQKYAYGTQRDYLDHPDVIGWTREGDGVHADSGLATLMSDGPGGSKWMEVGKNNAGEVWYDITGNQTNTVTINKDGWGQFHVSGGSVSIYVQQ

SEQ ID NO: 25577 - protein, 483 aa, Bacillus licheniformis
HHNGTNGTMMQYFEWYLPNDGNHWNRLRSDASNLKDKGITAVWIPPAWKGASQNDVGYGAYDLYDLGEFNQKGTVRTKYGTRNQLQAAVTALKSNGIQVYGDVVMNHKGGADATEWVRAVEVNPSNRNQEVSGDYTIEAWTKFDFPGRGNTHSNFKWRWYHFDGVDWDQSRQLQNRIYKFRGKGWDWEVDTENGNYDYLMYADIDMDHPEVVNELRNWGVWYTNTLGLDGFRIDAVKHIKYSFTRDWLTHVRNTTGKNMFAVAEFWKNDIGAIENYLSKTNWNHSVFDVPLHYNLYNASRNGGNYDMRQIFNGTVVQRHPTHAVTFVDNHDSQPEEALESFVEEWFKPLAYALTLTRDQGYPSVFYGDYYGIPTHGVPAMKSKIDPILEARQKYAYGTQRDYLDHPDVIGWTREGDGVHADSGLATLMSDGPGGSKWMEVGKNNAGEVWYDITGNQTNTVTINKDGWGQFHVSGGSVSIYVQQ

SEQ ID NO: 25578 - protein, 483 aa, Bacillus licheniformis
HHNGTNGTMMQYFEWYLPNDGNHWNRLRSDASNLKDKGITAVWIPPAWKGASQNDVGYGAYDLYDLGEFNQKGTVRTKYGTRNQLQAAVTALKSNGIQVYGDVVMNHKGGADATEWVRAVEVNPSNRNQEVSGDYTIEAWTKFDFPGRGNTHSNFKWRWYHFDGVDWDQSRQLQNRIYKFRGKGWDWEVDTENGNYDYLMYADIDMDHPEVVNELRNWGVWYTNTLGLDGFRIDAVKHIKYSFTRDWLTHVRNTTGKNMFAVAEFWKNDIGAIENYLSKTNWNHSVFDVPLHYNLYNASRSGGNYDMRQIFNGTVVQRHPTHAVTFVDNHDSQPEEALESFVEEWFKPLAYALTLTRDQGYPSVFFGDYYGIPTHGVPAMKSKIDPILEARQKYAYGTQRDYLDHPDVIGWTREGDGVHADSGLATLMSDGPGGSKWMEVGKNNAGEVWYDITGNQTNTVTINKDGWGQFHVSGGSVSIYVQQ

SEQ ID NO: 25579 - protein, 483 aa, Bacillus licheniformis
HHNGTNGTMMQYFEWYLPNDGNHWNRLRSDASNLKDKGITAVWIPPAWKGASQNDVGYGAYDLYDLGEFNQKGTVRTKYGTRNQLQAAVTALKSNGIQVYGDVVMNHKGGADATEWVRAVEVNPSNRNQEVSGDYTIEAWTKFDFPGRGNTHSNFKWRWYHFDGVDWDQSRQLQNRIYKFRGKGWDWEVDTENGNYDYLMYADIDMDHPEVVNELRNWGVWYTNTLGLDGFRIDAVKHIKYSFTRDWLTHVRNTTGKNMFAVAEFWKNDIGAIENYLSKTNWNHSVFQVPLHYNLYNASRSGGNYDMRQIFNGTVVQRHPTHAVTFVDNHDSQPEEALESFVEEWFKPLAYALTLTRDQGYPSVFYGDYYGIPTHGVPAMKSKIDPILEARQKYAYGTQRDYLDHPDVIGWTREGDGVHADSGLATLMSDGPGGSKWMEVGKNNAGEVWYDITGNQTNTVTINKDGWGQFHVSGGSVSIYVQQ

SEQ ID NO: 25580 - protein, 483 aa, Bacillus licheniformis
HHNGTNGTMMQYFEWYLPNDGNHWNRLRSDASNLKDKGITAVWIPPAWKGASQNDVGYGAYDLYDLGEFNQKGTVRTKYGTRNQLQAAVTALKSNGIQVYGDVVMNHKGGADATEWVRAVEVNPSNRNQEVSGDYTIEAWTKFDFPGRGNTHSNFKWRWYHFDGVDWDQSRQLQNRIYKFRGKGWDWEVDTENGNYDYLMYADIDMDHPEVVNELRNWGVWYTNTLGLDGFRIDAVKHIKYSFTRDWLTHVRNTTGKNMFAVAEFWKNDIGAIENYLSKTNWNHSVFDTPLHYNLYNASRSGGNYDMRQIFNGTVVQRHPTHAVTFVDNHDSQPEEALESFVEEWFKPLAYALTLTRDQGYPSVFYGDYYGIPTHGVPAMKSKIDPILEARQKYAYGTQRDYLDHPDVIGWTREGDGVHADSGLATLMSDGPGGSKWMEVGKNNAGEVWYDITGNQTNTVTINKDGWGQFHVSGGSVSIYVQQ

SEQ ID NO: 25581 - protein, 483 aa, Bacillus licheniformis
HHNGTNGTMMQYFEWYLPNDGNHWNRLRSDASNLKDKGITAVWIPPAWKGASQNDVGYGAYDLYDLGEFNQKGTVRTKYGTRNQLQRAVTALKSNGIQVYGDVVMNHKGGADATEWVRAVEVNPSNRNQEVSGDYTIEAWTKFDFPGRGNTHSNFKWRWYHFDGVDWDQSRQLQNRIYKFRGKEWDWEVDTENGNYDYLMYADIDMDHPEVVNELRNWGVWYTNTLGLDGFRIDAVKHIKYSFTRDWLTHVRNTTGKNMFAVAEFWKNDIGAIENYLSKTNWNHSVFDVPLHYNLYNASRSGGNYDMRQIFNGTVVQRHPTHAVTFVDNHDSQPEEALESFVEEWFKPLAYALTLTRDQGYPSVFYGDYYGIPTHGVPAMKSKIDPILEARQKYAYGTQRDYLDHPDVIGWTREGDGVHADSGLATLMSDGPGGSKWMEVGKNNAGERWRDITGNQTNTVTINKDGWGQFHVSGGSVSIYVQQ

SEQ ID NO: 25582 - protein, 483 aa, Bacillus licheniformis
HHNGTNGTMMQYFEWYLPNDGNHWNRLRSDASNLKDKGITAVWIPPAWKGASQNDVGYGAYDLYDLGEFNQKGTVRTKYGTRNQLQAAVTALKSNGIQVYGDVVMNHKGGADATEWVRAVEVNPSNRNQEVSGDYTIEAWTKFDFPGRGNTHSNFKWRWYHFDGVDWDQSRQLQNRIYKFRGKGWDWEVDTENGNYDYLMYADIDMDHPEVVNELRNWGVWYTNTLGLDGFRIDAVKHIKYSFTRDWLTHVRNTTGKNMFAVAEFWKNDIGAIENYLSKTNWNHSVFDVPLHYNLYNASRSGGNYDMRQIFNGTVVQRHPTHASTFVDNHDSQPEEALESFVEEWFKPLAYALTLTRDQGYPSVFYGDYYGIPTHGVPAMKSKIDPILEARQKYAYGTQRDYLDHPDVIGWTREGDGVHADSGLATLMSDGPGGSKWMEVGKNNAGEVWYDITGNQTNTVTINKDGWGQFHVSGGSVSIYVQQ

SEQ ID NO: 25583 - protein, 483 aa, Bacillus licheniformis
HHNGTNGTMMQYFEWYLPNDGNHWNRLRSDASNLKDKGITAVWIPPAWKGASQNDVGYGAYDLYDLGEFNQKGTVRTKYGTRNQLQAAVTALKSNGIQVYGDVVMNHKGGADATEWVRAVEVNPSNRNQEVSGDYTIEAWTKFDFPGRGNTHSNFKWRWYHFDGVDWDQSRQLQNRIYKFRGKGWDWEVDTENGNYDYLMYADIDMDHPEVVNELRNWGVWYTNTLGLDGFRIDAVKHIKYSFTRDWLAHVRNTTGKNMFAVAEFWKNDIGAIENYLSKTNWNHSVFDVPLHYNLYNASRSGGNYDMRQIFNGTVVQRHPTHAVTFVDNHDSQPEEALESFVEEWFKPLAYALTLTRDQGYPSVFYGDYYGIPTHGVPAMKSKIDPILEARQKYAYGTQRDYLDHPDVIGWTREGDGVHADSGLATLMSDGPGGSKWMEVGKNNAGEVWYDITGNQTNTVTINKDGWGQFHVSGGSVSIYVQQ

SEQ ID NO: 25584 - protein, 483 aa, Bacillus licheniformis
HHNGTNGTMMQYFEWYLPNDGNHWNRLRSDASNLKDKGITAVWIPPAWKGASQNDVGYGAYDLYDLGEFNQKGTVRTKYGTRNQLQAAVTALKSNGIQVYGDVVMNHKGGADATEWVRAVEVNPSNRNQEVSGDYTIEAWTKFDFPGRGNTHSNFKWRWYHFDGVDWDQSRQLQNRIYKFRGKGWDWEVDTENGNYDYLMYADIDMDHPEVVNELRNWGVWYTNTLGLDGFRIDAVKHIKYSFTRDWLTHVRNTTGKNMFAVAEFWKNDIGAIENYLSKTNWNHSVFDVPLHYNLYNASRSGGNYDMRQIFNGTVVQRHPTHAVTFVDNHDSQPEEALESFVEEWFKPLAYALTLTRDQGYPSVFYGDYYGIPTHGVPAMKSKIDPILEARQKYAYGTQRDYLDHPDVIGWTREGDGVHADSGLATLMSDGPGGSKWMEVGKNNAGEVWYDITGNQTNNVTINKDGWGQFHVSGGSVSIYVQQ

SEQ ID NO: 25585 - protein, 483 aa, Bacillus licheniformis
HHNGTNGTMMQYFEWYLPNQGNHWNRLRSDASNLKDKGITAVWIPPAWKGASQNDVGYGAYDLYDLGEFNQKGTVRTKYGTRNQLQAAVTALKSNGIQVYGDVVMNHKGGADATEWVRAVEVNPSNRNQEVSGDYTIEAWTKFDFPGRGNTHSNFKWRWYHFDGVDWDQSRQLQNRIYKFRGKGWDWEVDTENGNYDYLMYADIDMDHPEVVNELRNWGVWYTNTLGLDGFRIDAVKHIKYSFTRDWLTHVRNTTGKNMFAVAEFWKNDIGAIENYLSKTNWNHSVFDVPLHYNLYNASRSGGNYDMRQIFNGTVVQRHPTHAVTFVDNHDSQPEEALESFVEEWFKPLAYALTLTRDQGYPSVFYGDYYGIPTHGVPAMKSKIDPILEARQKYAYGTQRDYLDHPDVIGWTREGDGVHADSGLATLMSDGPGGSKWMEVGKNNAGEVWYDITGNQTNTVTINKDGWGQFHVSGGSVSIYVQQ

SEQ ID NO: 25586 - protein, 483 aa, Bacillus licheniformis
HHNGTNGTMMQYFEWYLPNDGNHWNRLRSDASNLKDKGITAVWIPPAWKGASQNDVGYGAYDLYDLGEFNQKGTVRTKYGTRNQLQAAVTALKSNGIQVYGDVVMNHKGGADATEWVRAVEVNPSNRNQEVSGDYTIEAWTKFQFPGRGNTHSNFKWRWYHFDGVDWDQSRQLQNRIYKFRGKGWDWEVDTENGNYDYLMYADIDMDHPEVVNELRNWGVWYTNTLGLDGFRIDAVKHIKYSFTRDWLTHVRNTTGKNMFAVAEFWKNDIGAIENYLSKTNWNHSVFDVPLHYNLYNASRSGGNYDMRQIFNGTVVQRHPTHAVTFVDNHDSQPEEALESFVEEWFKPLAYALTLTRDQGYPSVFYGDYYGIPTHGVPAMKSKIDPILEARQKYAYGTQRDYLDHPDVIGWTREGDGVHADSGLATLMSDGPGGSKWMEVGKNNAGEVWYDITGNQTNTVTINKDGWGQFHVSGGSVSIYVQQ

SEQ ID NO: 25587 - protein, 483 aa, Bacillus licheniformis
HHNGTNGTMMQYFEWYLPNDGNHWNRLRSDASNLKDKGITAVWIPPAWKGASQNDVGYGAYDLYDLGEFNQKGTVRTKYGTRNQLQAAVTALKSNGIQVYGDVVMNHKGGADATEWVRAVEVNPSNRWQEVSGDYTIEAWTKFDFPGRGNTHSNFKWRWYHFDGVDWDQSRQLQNRIYKFRGKGWDWEVDTENGNYDYLMYADIDMDHPEVVNELRNWGVWYTNTLGLDGFRIDAVKHIKYSFTRDWLTHVRNTTGKNMFAVAEFWKNDIGAIENYLSKTNWNHSVFDVPLHYNLYNASRSGGNYDMRQIFNGTVVQRHPTHAVTFVDNHDSQPEEALESFVEEWFKPLAYALTLTRDQGYPSVFYGDYYGIPTHGVPAMKSKIDPILEARQKYAYGTQRDYLDHPDVIGWTREGDGVHADSGLATLMSDGPGGSKWMEVGKNNAGEVWYDITGNQTNTVTINKDGWGQFHVSGGSVSIYVQQ

SEQ ID NO: 25588 - protein, 483 aa, Bacillus licheniformis
HHNGTNGTMMQYFEWYLPNDGNHWNRLRSDASNLKDKGITAVWIPPAWKGASQNDVGYGAYDLYDLGEFNQKGTVRTKYGTRNQLQAAVTALKSNGIQVYGDVVMNHKGGADATEWVRAVEVNPSNRNQEVSGDYTIEAWTKFDFPGRGNTHSNFKWRWYHFDGVDWDQSRQLQNRIYKFRGKGWDWEVDTENGNYDYLMYADIDMDHPEVVNELRNWGVWYTNTLGLDGFRIDAVKHIKYSFTRDWLTHVRNTTGKNMFAVAEFWKNDIGAIENYLSKTNWGHSVFDVPLHYNLYNASRSGGNYDMRQIFNGTVVQRHPTHAVTFVDNHDSQPEEALESFVEEWFKPLAYALTLTRDQGYPSVFYGDYYGIPTHGVPAMKSKIDPILEARQKYAYGTQRDYLDHPDVIGWTREGDGVHADSGLATLMSDGPGGSKWMEVGKNNAGEVWYDITGNQTNTVTINKDGWGQFHVSGGSVSIYVQQ

SEQ ID NO: 25589 - protein, 483 aa, Bacillus licheniformis
HHNGTNGTMMQYFEWYLPNDGNHWNRLRSDASNLKDKGITAVWIPPAWKGASQNDVGYGAYDLYDLGEFNQKGTVRTKYGTRNQLQAAVTALKSNGIQVYGDVVMNHKGGADATEWVRAVEVNPSNRNQEVSGDYTIEAWTKFDFPGRGNTHSNFKWRWYHFDGVDWDQSRQLQNRIYKFRGKGWDWEVDTENGNYDYLMYADIDMDHPEVVNELRNWGVWYTNTLGLDGFRIDAVKHIKYSFTRDWLTHVRNTTGKNMFAVAEFWKNDIGAIENYLSKTNWNHSVFDVPLHYNLYNASRSGGNYDMRQIFNGTVVQRHPTHAVTFVDNHDSQPEEALESFVEEWFKPLAYALTLTRDQNYPSVFYGDYYGIPTHGVPAMKSKIDPILEARQKYAYGTQRDYLDHPDVIGWTREGDGVHADSGLATLMSDGPGGSKWMEVGKNNAGEVWYDITGNQTNTVTINKDGWGQFHVSGGSVSIYVQQ

SEQ ID NO: 25590 - protein, 483 aa, Bacillus licheniformis
HHNGTNGTMMQYFEWYLPNDGNHWNRLRSDASNLKDKGITAVWIPPAWKGASQNDVGYGAYDLYDLGEFNQKGTVRTKYGTRNQLQAAVTALKSNGIQVYGDVVMNHKGGADATEWVRAVEVNPSNRNQEVSGDYTIEAWTKFDFPGRGNTHSNFKWRWYHFDGVDWDQSRQLQNRIYKFRGKGWDWEVDTENGNYDYLMYADIDMDHPEVVNELRNWGVWYTNTLGLDGFRIDAVKHIKYSFTRDWLTHVRNTTGKNMFAVAEFWKNDIGAIENYLSKTNWNHSVFDVPLGYNLYNASRSGGNYDMRQIFNGTVVQRHPTHAVTFVDNHDSQPEEALESFVEEWFKPLAYALTLTRDQGYPSVFYGDYYGIPTHGVPAMKSKIDPILEARQKYAYGTQRDYLDHPDVIGWTREGDGVHADSGLATLMSDGPGGSKWMEVGKNNAGEVWYDITGNQTNTVTINKDGWGQFHVSGGSVSIYVQQ

SEQ ID NO: 25591 - protein, 483 aa, Bacillus licheniformis
HHNGTNGTMMQYFEWYLPNDGNHWNRLRSDASNLKDKGITAVWIPPAWKGASQNDVGYGAYDLYDLGEFNQKGTVRTKYGTRNQLQAAVTALKSNGIQVYGDVVMNHKGGADATEWVRAVEVNPSNRNQEVSGDYTIEAWTKFDFPGRGNTHSNFKWRWYHFDGVDWDQSRQLQNRIYKFRGKGWDWEVDTENGNYDYLMYADIDMDHPCVVNELRNWGVWYTNTLGLDGFRIDAVKHIKYSFTRDWLTHVRNTTGKNMFAVAEFWKNDIGAIENYLSKTNWNHSVFDVPLHYNLYNASRSGGNYDMRQIFNGTVVQRHPTHAVTFVDNHDSQPEEALESFVEEWFKPLAYALTLTRDQGYPSVFYGDYYGIPTHGVPAMKSKIDPILEARQKYAYGTQRDYLDHPDVIGWTREGDGVHADSGLATLMSDGPGGSKWMEVGKNNAGEVWYDITGNQTNTVTINKDGWGQFHVSGGSVSIYVQQ

SEQ ID NO: 25592 - protein, 483 aa, Bacillus licheniformis
HHNGTNGTMMQYFEWYLPNDGNHWNRLRSDASNLKDKGITAVWIPPAWKGASQNDVGYGAYDLYDLGEFNQKGTVRTKYGTRNQLQAAVTALKSNGIQVYGDVVMNHKGGADATEWVRAVEVNPSNRNQEVSGDYTIEAWTKFDFPGRGNTHSNFKWRWYHFDGVDWDQSRQLQNRIYKFRGKGVDWEVDTENGNYDYLMYADIDMDHPEVVNELRNWGVWYTNTLGLDGFRIDAVKHIKYSFTRDWLTHVRNTTGKNMFAVAEFWKNDIGAIENYLSKTNWNHSVFDVPLHYNLYNASRSGGNYDMRQIFNGTVVQRHPTHAVTFVDNHDSQPEEALESFVEEWFKPLAYALTLTRDQGYPSVFYGDYYGIPTHGVPAMKSKIDPILEARQKYAYGTQRDYLDHPDVIGWTREGDGVHADSGLATLMSDGPGGSKWMEVGKNNAGEVWYDITGNQTNTVTINKDGWGQFHVSGGSVSIYVQQ

SEQ ID NO: 25593 - protein, 483 aa, Bacillus licheniformis
HHNGTNGTMMQYFEWYLPNDGNHWNRLRSDASNLKDKGITAVWIPPAWKGASQNDVGYGAYDLYDLGEFNQKGTVRTKYGTRNQLQAAVTALKSNGIQVYGDVVMNHKGGADATEWVRAVEVNPSNRNQEVSGDYTIEAWTKFDFPGRGNTHSNFKWRWYHFDGVDWDQSRQLQNRIYKFRGKGWDWEVDTENGNYDYLMYADIDMDHPEVVNELRNWGVWYTNTLGLDGFRIDAVKHIKYSFTRDWLTHVRNTTGKNMFAVAEFWKNDIGAIENYLSKTNWNHSVFDVPLHYNLYNASRSGGNYDMRQIFNGTVVQRHPTHAVTFVDNHDSQPEEALESFVECWFKPLAYALTLTRDQGYPSVFYGDYYGIPTHGVPAMKSKIDPILEARQKYAYGTQRDYLDHPDVIGWTREGDGVHADSGLATLMSDGPGGSKWMEVGKNNAGEVWYDITGNQTNTVTINKDGWGQFHVSGGSVSIYVQQ

SEQ ID NO: 25594 - protein, 483 aa, Bacillus licheniformis
HHNGTNGTMMQYFEWYLPNDGNHWNRLRSDASNLKDKGITAVWIPPAWKGASQNDVGYGAYDLYDLGEFNQKGTVRTKYGTRNQLQAAVTALKSNGIQVYGDVVMNHKGGADATEWVRAVEVNPSNRNQEVSGDYTIEAWTKFDFPGRGNTHSNFKWRWYHFDGVDWDQSRQLQNRIYKFRGKGWDWEVDTENGNYDYLMYADIDMDHPEVVNELRNWGVWYTNTLGLDGFRIDAVKHIKYSFTRDWLTHVRNTTGKNMFAVAEFWKNDIGAIENYLSKTNWNHSVFDVPLHYNLYNASRSGGNYDMRQIFNGTVVQRHPTHAVTFVDNHDSQPEEALESFVEEWFKPLAYALTLTRDQGYPSVFYGDYYGIPTHGVPAMKSKIDPILEARQKYAYGTQRDYLDHPDVIGWTREGDGVHADSGLATLMSDGPGGSKWMEVHKNNAGEVWYDITGNQTNTVTINKDGWGQFHVSGGSVSIYVQQ

SEQ ID NO: 25595 - protein, 483 aa, Bacillus licheniformis
HHNGTNGTMMQYFEWYLPNDGNHWNRLRSDASNLKDKGITAVWIPPAWKGASQNDVGYGAYDLYDLGEFNQKGTVRTKYGTRNQLQAAVTALKSNGIQVYGDVVMNHKGGADATEWVRAVEVNPSNRNQEVSGDYTIEAWTKFDFPGRGNTHSNFKWRWYHFDGVDWDQSRQLQNRIYKFRGKGWDWEVDTENGNYDYLMYADIDMDHDEVVNELRNWGVWYTNTLGLDGFRIDAVKHIKYSFTRDWLTHVRNTTGKNMFAVAEFWKNDIGAIENYLSKTNWNHSVFDVPLHYNLYNASRSGGNYDMRQIFNGTVVQRHPTHAVTFVDNHDSQPEEALESFVEEWFKPLAYALTLTRDQGYPSVFYGDYYGIPTHGVPAMKSKIDPILEARQKYAYGTQRDYLDHPDVIGWTREGDGVHADSGLATLMSDGPGGSKWMEVGKNNAGEVWYDITGNQTNTVTINKDGWGQFHVSGGSVSIYVQQ

SEQ ID NO: 25596 - protein, 483 aa, Bacillus licheniformis
HHNGTNGTMFQYFEWYLPNDGNHWNRLRSDASNLKDKGITAVWIPPAWKGASQNDVGYGAYDLYDLGEFNQKGTVRTKYGTRNQLQAAVTALKSNGIQVYGDVVMNHKGGADATEWVRAVEVNPSNRNQEVSGDYTIEAWTKFDFPGRGNTHSNFKWRWYHFDGVDWDQSRQLQNRIYKFRGKGWDWEVDTENGNYDYLMYADIDMDHPEVVNELRNWGVWYTNTLGLDGFRIDAVKHIKYSFTRDWLTHVRNTTGKNMFAVAEFWKNDIGAIENYLSKTNWNHSVFDVPLHYNLYNASRSGGNYDMRQIFNGTVVQRHPTHAVTFVDNHDSQPEEALESFVEEWFKPLAYALTLTRDQGYPSVFYGDYYGIPTHGVPAMKSKIDPILEARQKYAYGTQRDYLDHPDVIGWTREGDGVHADSGLATLMSDGPGGSKWMEVGKNNAGEVWYDITGNQTNTVTINKDGWGQFHVSGGSVSIYVQQ

SEQ ID NO: 25597 - protein, 483 aa, Bacillus licheniformis
HHNGTNGTMMQYFEWYLPNDGNHWNRLRSDASNLKDKGITAVWIPPAWKGASQNDVGYGAYDLYDLGEFNQKGTVRTKYGTRNQLQAAVTALKSNGIQVYGDVVMNHKGGADATEWVRAVEVNPSNRNQEVSGDGTIEAWTKFDFPGRGNTHSNFKWRWYHFDGVDWDQSRQLQNRIYKFRGKGWDWEVDTENGNYDYLMYADIDMDHPEVVNELRNWGVWYTNTLGLDGFRIDAVKHIKYSFTRDWLTHVRNTTGKNMFAVAEFWKNDIGAIENYLSKTNWNHSVFDVPLHYNLYNASRSGGNYDMRQIFNGTVVQRHPTHAVTFVDNHDSQPEEALESFVEEWFKPLAYALTLTRDQGYPSVFYGDYYGIPTHGVPAMKSKIDPILEARQKYAYGTQRDYLDHPDVIGWTREGDGVHADSGLATLMSDGPGGSKWMEVGKNNAGEVWYDITGNQTNTVTINKDGWGQFHVSGGSVSIYVQQ

SEQ ID NO: 25598 - protein, 483 aa, Bacillus licheniformis
HHNGTNGTMMQYFEWYLPNDGNHWNRLRSDASNLKDKGITAVWIPPAWKGASQNDVGYGAYDLYDLGEFNQKGTVRTKYGTRNQLQAAVTALKSNGIQVYGDVVMNHKGGADATEWVRAVEVNPSNRNQEVSGDYTIEAWTKFDFPGRGNTHSNFKWRWYHFDGVDWDQSRQLQNKIYKFRGKEWDWEVDEENGNYDYLMYADYDMDHPEVVNELRNWGVWYTNTLGLDGFRIDAVKHIKYSFTRDWLTHVRNTTGKNMFAVAEFWKNDIGAIENYLSKTNWNHSVFDVPLHYNLYNASRSGGNYDMRQIFNGTVVQRHPTHAVTFVDNHDSQPEEALESFVEEWFKPLAYALTLTRDQGYPSVFYGDYYGIPTHGVPAMKSKIDPILEARQKYAYGTQRDYMDHPDVIGWTREGDGVHADSGLATLMSDGPGGSKWMEVGKNNAGEVWYDITGNQTNTVTINKDGWGQFHVSGGSVSIYVQQ

SEQ ID NO: 25599 - protein, 483 aa, Bacillus licheniformis
HHNGTNGTMMQYFEWYLPNDGNHWNRLRSDASNLKDKGITAVWIPPAWKGASQNDVGYGAYDLYDLGEFNQKGTVRTKYGTRNQLQAAVTALKSNGIQVYGDVVMNHKGGADATEWVRAVEVNPSNRNQEVSGDYTIEAWTKFDFPGRGNTHSNFKWRWYHFDGVDWDQSRQLQNRIYKFRGEGWDWEVDTENGNYDYLMYADIDMDHPEVVNELRNWGVWYTNTLGLDGFRIDAVKHIKYSFTRDWLTHVRNTTGKNMFAVAEFWKNDIGAIENYLSKTNWNHSVFDVPLHYNLYNASRSGGNYDMRQIFNGTVVQRHPTHAVTFVDNHDSQPEEALESFVEEWFKPLAYALTLTRDQGYPSVFYGDYYGIPTHGVPAMKSKIDPILEARQKYAYGTQRDYLDHPDVIGWTREGDGVHADSGLATLMSDGPGGSKWMEVGKNNAGEVWYDITGNQTNTVTINKDGWGQFHVSGGSVSIYVQQ

SEQ ID NO: 25600 - protein, 483 aa, Bacillus licheniformis
HHNGTNGTMMQYFEWYLPNDGNHWNRLRSDASNLKDKGITAVWIPPAWKGASQNDVGYGAYDLYDLGEFNQKGTVRTKYGTRNQLQAAVTALKSNGIQVYGDVVMNHKGGADATEWVRAVEVNPSNRNQEVSSDYTIEAWTKFDFPGRGNTHSNFKWRWYHFDGVDWDQSRQLQNRIYKFRGKGWDWEVDTENGNYDYLMYADIDMDHPEVVNELRNWGVWYTNTLGLDGFRIDAVKHIKYSFTRDWLTHVRNTTGKNMFAVAEFWKNDIGAIENYLSKTNWNHSVFDVPLHYNLYNASRSGGNYDMRQIFNGTVVQRHPTHAVTFVDNHDSQPEEALESFVEEWFKPLAYALTLTRDQGYPSVFYGDYYGIPTHGVPAMKSKIDPILEARQKYAYGTQRDYLDHPDVIGWTREGDGVHADSGLATLMSDGPGGSKWMEVGKNNAGEVWYDITGNQTNTVTINKDGWGQFHVSGGSVSIYVQQ

SEQ ID NO: 25601 - protein, 483 aa, Bacillus licheniformis
HHNGTNGTMMQYFEWYLPNVGNHWNRLRSDASNLKDKGITAVWIPPAWKGASQNDVGYGAYDLYDLGEFNQKGTVRTKYGTRNQLQAAVTALKSNGIQVYGDVVMNHKGGADATEWVRAVEVNPSNRNQEVSGDYTIEAWTKFDFPGRGNTHSNFKWRWYHFDGVDWDQSRQLQNRIYKFRGKGWDWEVDTENGNYDYLMYADIDMDHPEVVNELRNWGVWYTNTLGLDGFRIDAVKHIKYSFTRDWLTHVRNTTGKNMFAVAEFWKNDIGAIENYLSKTNWNHSVFDVPLHYNLYNASRSGGNYDMRQIFNGTVVQRHPTHAVTFVDNHDSQPEEALESFVEEWFKPLAYALTLTRDQGYPSVFYGDYYGIPTHGVPAMKSKIDPILEARQKYAYGTQRDYLDHPDVIGWTREGDGVHADSGLATLMSDGPGGSKWMEVGKNNAGEVWYDITGNQTNTVTINKDGWGQFHVSGGSVSIYVQQ

SEQ ID NO: 25602 - protein, 483 aa, Bacillus licheniformis
HHNGTNGTMMQYFEWYLPNDGNHWNRLRSDASNLKDKGITAVWIPPAWKGASQNDVGYGAYDLYDLGEFNQKGTVRTKYGTRNQLQAAVTALKSNGIQVYGDVVMNHKGGADATEWVRAVEVNPSNRNQEVSGDYTIEAWTKFDFPGRGNTHSNFKWRWYHFDGVDWDQSRQLQQRIYKFRGKGWDWEVDTENGNYDYLMYADIDMDHPEVVNELRNWGVWYTNTLGLDGFRIDAVKHIKYSFTRDWLTHVRNTTGKNMFAVAEFWKNDIGAIENYLSKTNWNHSVFDVPLHYNLYNASRSGGNYDMRQIFNGTVVQRHPTHAVTFVDNHDSQPEEALESFVEEWFKPLAYALTLTRDQGYPSVFYGDYYGIPTHGVPAMKSKIDPILEARQKYAYGTQRDYLDHPDVIGWTREGDGVHADSGLATLMSDGPGGSKWMEVGKNNAGEVWYDITGNQTNTVTINKDGWGQFHVSGGSVSIYVQQ

SEQ ID NO: 25603 - protein, 483 aa, Bacillus licheniformis
HHNGTNGTMMQYFEWYLPNDGNHWNRLRSDASNLKDKGITAVWIPPAWKGASQNDVGYGAYDLYDLGEFNQKGTVRTKYGTRNQLQAAVTALKSNGIQVYGDVVMNHKGGADATEWVRAVEVNPSNRNQEVSGDYTIEAWTKFDFPGRGNTHSNFKWRWYHFDGVDWDQSRQLQNRIYKFRGKGWDWEVDTENGNYDYLMYADIDMDHPEVVNELRNWGVWYTNTLGLDGFRIDAVKHIKYSFTRDWLTHVRNTTGKNMFAVAEFWKNDIGAIENYLSKTNWNHSVFDVPLHYNLYNASRSGGNYDMRQIFNGTVVQRHPTHAVTFVDNHDSQPEEALESFVEEWFKPLAYTLTLTRDQGYPSVFYGDYYGIPTHGVPAMKSKIDPILEARQKYAYGTQRDYLDHPDVIGWTREGDGVHADSGLATLMSDGPGGSKWMEVGKNNAGEVWYDITGNQTNTVTINKDGWGQFHVSGGSVSIYVQQ

SEQ ID NO: 25604 - protein, 483 aa, Bacillus licheniformis
HHNGTNGTMMQYFEWYLPNDGNHWNRLRSDASNLKDKGITAVWIPPAWKGASQNDVGYGAYDLYDLGEFNQKGTVRTKYGTRNQLQAAVTALKSNGIQVYGDVVMNHKGGADATEWVRAVEVNPSNRNQEVSGDYTIEAWTKFDFPGRGNTHSNFKWRWYHFDGVDWDQSRQLQNRIYKFRGKGWDWEVDTENGNYDYLMYADIDMDHPEVVNELRNWGVWYTNTLGLDGFRIDAVKHIKYSFTRDWLTHVRNTTGKNMFAVAEFWKNDIGAIENYLSKTNWNHSVFDVPLHYNLYNASRSGGNYDMRQIFNGTVVQRHPTHAVTFVDNHDSQPEEALESFVEEWFKPLAYALTLTRDQGYPSVFYGDYYGIPTHGVPAMKSKIDPILEARQKYAYGTQRDYLDHPDVIGWTREGDGVHADSGLATLMSDGPGGSKWMEVGKNNAGEVWYDITGNQTNTVTINKDGWGQFHVSGGSVMIYVQQ

SEQ ID NO: 25605 - protein, 483 aa, Bacillus licheniformis
HHNGTNGTMMQYFEWYLPNDGNHWSRLRSDASNLKDKGITAVWIPPAWKGASQNDVGYGAYDLYDLGEFNQKGTVRTKYGTRNQLQAAVTALKSNGIQVYGDVVMNHKGGADATEWVRAVEVNPSNRNQEVSGDYTIEAWTKFDFPGRGNTHSNFKWRWYHFDGVDWDQSRQLQNRIYKFRGKGWDWEVDTENGNYDYLMYADIDMDHPEVVNELRNWGVWYTNTLGLDGFRIDAVKHIKYSFTRDWLTHVRNTTGKNMFAVAEFWKNDIGAIENYLSKTNWNHSVFDVPLHYNLYNASRSGGNYDMRQIFNGTVVQRHPTHAVTFVDNHDSQPEEALESFVEEWFKPLAYALTLTRDQGYPSVFYGDYYGIPTHGVPAMKSKIDPILEARQKYAYGTQRDYLDHPDVIGWTREGDGVHADSGLATLMSDGPGGSKWMEVGKNNAGEVWYDITGNQTNTVTINKDGWGQFHVSGGSVSIYVQQ

SEQ ID NO: 25606 - protein, 483 aa, Bacillus licheniformis
HHNGTNGTMMQYFEWYLPNDGNHWNRFRSDASNLKDKGITAVWIPPAWKGASQNDVGYGAYDLYDLGEFNQKGTVRTKYGTRNQLQAAVTALKSNGIQVYGDVVMNHKGGADATEWVRAVEVNPSNRNQEVSGDYTIEAWTKFDFPGRGNTHSNFKWRWYHFDGVDWDQSRQLQNRIYKFRGKGWDWEVDTENGNYDYLMYADIDMDHPEVVNELRNWGVWYTNTLGLDGFRIDAVKHIKYSFTRDWLTHVRNTTGKNMFAVAEFWKNDIGAIENYLSKTNWNHSVFDVPLHYNLYNASRSGGNYDMRQIFNGTVVQRHPTHAVTFVDNHDSQPEEALESFVEEWFKPLAYALTLTRDQGYPSVFYGDYYGIPTHGVPAMKSKIDPILEARQKYAYGTQRDYLDHPDVIGWTREGDGVHADSGLATLMSDGPGGSKWMEVGKNNAGEVWYDITGNQTNTVTINKDGWGQFHVSGGSVSIYVQQ

SEQ ID NO: 25607 - protein, 483 aa, Bacillus licheniformis
HHNGTNGTMMQYFEWYLPNDGNHWNRLRSDASNLKDKGITAVWIPPAWKGASQNDVGYGAYDLYDLGEFNQKGTVRTKYGTRNQLQAAVTALKSNGIQVYGDVVMNHKGGADATEWVRAVEVNPSNRNQEVSGDYTIEAWTKFDFPGRGNTHSNFKWRWYHFDGVDWDQSRQLQNRIYKFRGKGWDWEVDTENGNYDYLMYADIDMDHPEVVNELRNWGVWYTNTLGLDGFRIDAVKHIKYSFTRDWLTHVRNTTGKNMFAVAEFWKNDIGAIENYLSKTNWNHSVFDVPEHYNLYNASRSGGNYDMRQIFNGTVVQRHPTHAVTFVDNHDSQPEEALESFVEEWFKPLAYALTLTRDQGYPSVFYGDYYGIPTHGVPAMKSKIDPILEARQKYAYGTQRDYLDHPDVIGWTREGDGVHADSGLATLMSDGPGGSKWMEVGKNNAGEVWYDITGNQTNTVTINKDGWGQFHVSGGSVSIYVQQ

SEQ ID NO: 25608 - protein, 483 aa, Bacillus licheniformis
HHNGTNGTMMQYFEWYLPNDGNHWNRLRSDASNLKDKGITAVWIPPAWKGASQNDVGYGAYDLYDLGEFNQKGTVRTKYGTRNQLQAAVTALKSNGIQVYGDVVMNHKGGADATEWVRAVEVNPSNRNQEVSGDYTIEAWTKFDFPGRGNTHSNFKWRWYHFDGVDWDQSRQLQNRIYKFRGKGWDWEVDTENGNYDYLMYADIDMDHPEVVNELRNWGVWYTNTLGLDGFRIDAVKHIKYSFTRDWLTHVRNTTGKNMFAVAEFWKNDIGAIENYLSKTNWNHSVFDVPLHYNLYNASRSGGNYDMRQIFNGTVVQRHPTHAVTFVDNHDSQPEEALESFVEEWFKPLAYALTLTRDQGRPSVFYGDYYGIPTHGVPAMKSKIDPILEARQKYAYGTQRDYLDHPDVIGWTREGDGVHADSGLATLMSDGPGGSKWMEVGKNNAGEVWYDITGNQTNTVTINKDGWGQFHVSGGSVSIYVQQ

SEQ ID NO: 25609 - protein, 483 aa, Bacillus licheniformis
HHNGTNGTMMQYFEWYLPNDGNHWNRLRSDASNLKDKGITAVWIPPAWKGASQNDVGYGAYDLYDLGEFNQKGTVRTKYGTRNQLQAAVTALKSNGIQVYGDVVMNHKGGADATEWVRAVEVNPSNRNQEVSGDYTIEAWTKFDFPGRGNTHSNFKWRWYHFDGVDWDQSRQLQNRIYKFRGKGWDWEVDTENGNYDYLMYADIDMDHPEVVNELRNWGVWYTNTLGLDGFRIDAVKHIKYSFTRDWLTHVRNTTGKNMFAVAEFWKNDIGAIENYLSKTNWNHSVFDVPLHYNLYNASRSGGNYDMRQIFNGTVVQRHPTHAVTFVDNHDSQPEEALESFVEEWFKPLAYALTLTRDQGYPSVFYGDYYGIPTHGVPAMKSKIDPILEARQKYAYGTQRDYLDHPDVIGWTREGDGVHADSGLATLMSDGPGGSKWMEVGKNNAGEVWYDITGNQTNTVTINKDGWGQFHVSGGAVSIYVQQ

SEQ ID NO: 25610 - protein, 483 aa, Bacillus licheniformis
HHNGMNGTMMQYFEWYLPNDGNHWNRLRSDASNLKDKGITAVWIPPAWKGASQNDVGYGAYDLYDLGEFNQKGTVRTKYGTRNQLQAAVTALKSNGIQVYGDVVMNHKGGADATEWVRAVEVNPSNRNQEVSGDYTIEAWTKFDFPGRGNTHSNFKWRWYHFDGVDWDQSRQLQNRIYKFRGKGWDWEVDTENGNYDYLMYADIDMDHPEVVNELRNWGVWYTNTLGLDGFRIDAVKHIKYSFTRDWLTHVRNTTGKNMFAVAEFWKNDIGAIENYLSKTNWNHSVFDVPLHYNLYNASRSGGNYDMRQIFNGTVVQRHPTHAVTFVDNHDSQPEEALESFVEEWFKPLAYALTLTRDQGYPSVFYGDYYGIPTHGVPAMKSKIDPILEARQKYAYGTQRDYLDHPDVIGWTREGDGVHADSGLATLMSDGPGGSKWMEVGKNNAGEVWYDITGNQTNTVTINKDGWGQFHVSGGSVSIYVQQ

SEQ ID NO: 25611 - protein, 483 aa, Bacillus licheniformis
HHNGQNGTMMQYFEWYLPNDGNHWNRLRSDASNLKDKGITAVWIPPAWKGASQNDVGYGAYDLYDLGEFNQKGTVRTKYGTRNQLQAAVTALKSNGIQVYGDVVMNHKGGADATEWVRAVEVNPSNRNQEVSGDYTIEAWTKFDFPGRGNTHSNFKWRWYHFDGVDWDQSRQLQNRIYKFRGKGWDWEVDTENGNYDYLMYADIDMDHPEVVNELRNWGVWYTNTLGLDGFRIDAVKHIKYSFTRDWLTHVRNTTGKNMFAVAEFWKNDIGAIENYLSKTNWNHSVFDVPLHYNLYNASRSGGNYDMRQIFNGTVVQRHPTHAVTFVDNHDSQPEEALESFVEEWFKPLAYALTLTRDQGYPSVFYGDYYGIPTHGVPAMKSKIDPILEARQKYAYGTQRDYLDHPDVIGWTREGDGVHADSGLATLMSDGPGGSKWMEVGKNNAGEVWYDITGNQTNTVTINKDGWGQFHVSGGSVSIYVQQ

SEQ ID NO: 25612 - protein, 483 aa, Bacillus licheniformis
HHNGTNGTMMQYFEWYLPNDGNHWNRLRSDASNLKDKGITAVWIPPAWKGASQNDVGYGAYDLYDLGEFNQKGTVRTKYGTRNQLQAAVTALKSNGIQVYGDVVMNHKGGADATEWVRAVEVNPSNRNQEVSGDYTIEAWTKFDFPGRGNTHSNFKWRWYHFDGVDWDQSRQLQNRIYKFRGKGWDWEVDTENGNYDYLMYADIDMDHPEVVNELRNWGVWYTNTLGLDGFRIDAVKHIKYSFTRDWLTHVRNTTGKNMFAVAEFWKNDIGAIENYLSKVNWNHSVFDVPLHYNLYNASRSGGNYDMRQIFNGTVVQRHPTHAVTFVDNHDSQPEEALESFVEEWFKPLAYALTLTRDQGYPSVFYGDYYGIPTHGVPAMKSKIDPILEARQKYAYGTQRDYLDHPDVIGWTREGDGVHADSGLATLMSDGPGGSKWMEVGKNNAGEVWYDITGNQTNTVTINKDGWGQFHVSGGSVSIYVQQ

SEQ ID NO: 25613 - protein, 483 aa, Bacillus licheniformis
HHNGTNGTMMQYFEWYLPNDGNHWHRLRSDASNLKDKGITAVWIPPAWKGASQNDVGYGAYDLYDLGEFNQKGTVRTKYGTRNQLQAAVTALKSNGIQVYGDVVMNHKGGADATEWVRAVEVNPSNRNQEVSGDYTIEAWTKFDFPGRGNTHSNFKWRWYHFDGVDWDQSRQLQNKIYKFRGKEWDWEVDTENGNYDYLMYADYDMDHPEVVNELRNWGVWYTNTLGLDGFRIDAVKHIKYSFTRDWLTHVRNTTGKNMFAVAEFWKNDIGAIENYLSKTNWNHSVFDVPLHYNLYNASRSGGNYDMRQIFNGTVVQRHPTHAVTFVDNHDSQPEEALESFVEEWFKPLAYALTLTRDQGYPSVFYGDYYGIPTHGVPAMKSKIDPILEARQKYAYGTQRDYLDHPDVIGWTREGDGVHADSGLATLMSDGPGGSKWMEVGKNNAGEVWYDITGNQTNTVTINKDGWGQFHVSGGSVSIWVQQ

SEQ ID NO: 25614 - protein, 483 aa, Bacillus licheniformis
HHNGTNGTMMQYFEWYLPNDGNHWNRLRSDASNLKDKGITAVWIPPAWKGASQNDVGYGAYDLYDLGEFNQKGTVRTKYGTRNQLQAAVTALKSNGIQVYGDVVMNHKGGADATEWVRAVEVNPSNRNQEVSGDYFIEAWTKFDFPGRGNTHSNFKWRWYHFDGVDWDQSRQLQNRIYKFRGKGWDWEVDTENGNYDYLMYADIDMDHPEVVNELRNWGVWYTNTLGLDGFRIDAVKHIKYSFTRDWLTHVRNTTGKNMFAVAEFWKNDIGAIENYLSKTNWNHSVFDVPLHYNLYNASRSGGNYDMRQIFNGTVVQRHPTHAVTFVDNHDSQPEEALESFVEEWFKPLAYALTLTRDQGYPSVFYGDYYGIPTHGVPAMKSKIDPILEARQKYAYGTQRDYLDHPDVIGWTREGDGVHADSGLATLMSDGPGGSKWMEVGKNNAGEVWYDITGNQTNTVTINKDGWGQFHVSGGSVSIYVQQ

SEQ ID NO: 25615 - protein, 483 aa, Bacillus licheniformis
HHNGTNGTMMQYFEWYLPNDGNHWNRLRSDASNLKDKGITAVWIPPAWKGASQNDVGYGAYDLYDLGEFNQKGTVRTKYGTRNQLQAAVTALKSNGIQVYGDVVMNHKGGADATEWVRAVEVNPSNRNQEVSGDYTIEAWTKFDFPGRGNTHSNFKWRWYHFDGVDWDQSRQLQNRIYKFRGKGWDWEVDTENGNYDYLMYADIDMDHPEVVNELRNWGVWYTNTLGLDGFRIDAVKHIKYSFTRDWLTHVRNTTGKNMFAVAEFWKNDIGAIENYLSKTNWNHSVFDVPLHYNLYNASRSGGNYDMRQIFNGTVVQRHPTHAVTFVDNHDSQPEEALESFVEEWFKPLAYALTLTRDQGYPSVFYGDYYGIPTHGVPAMKSKIDPILEARQKYAYGTQRDYLDHPDVIGWTREGDGVHADSGLATLMSDGPGGSKWMEVGKNNAGEVWYDITGMQTNTVTINKDGWGQFHVSGGSVSIYVQQ

SEQ ID NO: 25616 - protein, 483 aa, Bacillus licheniformis
HHNGTNGTMMQYFEWYLPNDGNHWNRLRSDASNLKDKGITAVWIPPAWKGASQNDVGYGAYDLYDLGEFNQKGTVRTKYGTRNQLQAAVTALKSEGIQVYGDVVMNHKGGADATEWVRAVEVNPSNRNQEVSGDYTIEAWTKFDFPGRGNTHSNFKWRWYHFDGVDWDQSRQLQNRIYKFRGKGWDWEVDTENGNYDYLMYADIDMDHPEVVNELRNWGVWYTNTLGLDGFRIDAVKHIKYSFTRDWLTHVRNTTGKNMFAVAEFWKNDIGAIENYLSKTNWNHSVFDVPLHYNLYNASRSGGNYDMRQIFNGTVVQRHPTHAVTFVDNHDSQPEEALESFVEEWFKPLAYALTLTRDQGYPSVFYGDYYGIPTHGVPAMKSKIDPILEARQKYAYGTQRDYLDHPDVIGWTREGDGVHADSGLATLMSDGPGGSKWMEVGKNNAGEVWYDITGNQTNTVTINKDGWGQFHVSGGSVSIYVQQ

SEQ ID NO: 25617 - protein, 483 aa, Bacillus licheniformis
HHNGTNGTMMQYFEWYLPNDGNHWNRLRSDASNLKDKGITAVWIPPAWKGASQNDVGYGAYDLYDLGEFNQCGTVRTKYGTRNQLQAAVTALKSNGIQVYGDVVMNHKGGADATEWVRAVEVNPSNRNQEVSGDYTIEAWTKFDFPGRGNTHSNFKWRWYHFDGVDWDQSRQLQNRIYKFRGKGWDWEVDTENGNYDYLMYADIDMDHPEVVNELRNWGVWYTNTLGLDGFRIDAVKHIKYSFTRDWLTHVRNTTGKNMFAVAEFWKNDIGAIENYLSKTNWNHSVFDVPLHYNLYNASRSGGNYDMRQIFNGTVVQRHPTHAVTFVDNHDSQPEEALESFVEEWFKPLAYALTLTRDQGYPSVFYGDYYGIPTHGVPAMKSKIDPILEARQKYAYGTQRDYLDHPDVIGWTREGDGVHADSGLATLMSDGPGGSKWMEVGKNNAGEVWYDITGNQTNTVTINKDGWGQFHVSGGSVSIYVQQ

SEQ ID NO: 25618 - protein, 483 aa, Bacillus licheniformis
HHNGTNGTMMQYFEWYLPNDGNHWNRLRSDASNLKDKGITAVWIPPAWKGASQNDVGYGAYDLYDLGEFNQKGTVRTKYGTRNQLQAAVTALKSNGIQVYGDVVMNHKGGADATEWVRAVEVNPSNRNQEVSGDYTIEAWTKFDFPGRGNTHSNFKWRWYHFDGVDWDQSRQLQNRIYKFRGKGWDWEVDTENGNYDYLMYADIDMDHPEVVNELRNWGVWYTNTLGLDGFRIDAVKHIKYSFTRDWLLHVRNTTGKNMFAVAEFWKNDIGAIENYLSKTNWNHSVFDVPLHYNLYNASRSGGNYDMRQIFNGTVVQRHPTHAVTFVDNHDSQPEEALESFVEEWFKPLAYALTLTRDQGYPSVFYGDYYGIPTHGVPAMKSKIDPILEARQKYAYGTQRDYLDHPDVIGWTREGDGVHADSGLATLMSDGPGGSKWMEVGKNNAGEVWYDITGNQTNTVTINKDGWGQFHVSGGSVSIYVQQ

SEQ ID NO: 25619 - protein, 483 aa, Bacillus licheniformis
HHNGTNGTMMQYFEWYLPNDGNHWNRLRSDASNLKDKGITAVWIPPAWKGASQNDVGYGAYDLYDLGEFNQKGTVRTKYGTRNQLQAAVTALKSNGIQVYGDVVMNHKGGADATEWVRAVEVNPSNRNQEVSGDYTIEAWTKFDFPGRGNTHSNFKWRWYHFDGVDWDQSRQLQNRIYKFRGKGWDWEVDTENGNYDYLMYADIDMDHPEVVNELRNWGVWYTATLGLDGFRIDAVKHIKYSFTRDWLTHVRNTTGKNMFAVAEFWKNDIGAIENYLSKTNWNHSVFDVPLHYNLYNASRSGGNYDMRQIFNGTVVQRHPTHAVTFVDNHDSQPEEALESFVEEWFKPLAYALTLTRDQGYPSVFYGDYYGIPTHGVPAMKSKIDPILEARQKYAYGTQRDYLDHPDVIGWTREGDGVHADSGLATLMSDGPGGSKWMEVGKNNAGEVWYDITGNQTNTVTINKDGWGQFHVSGGSVSIYVQQ

SEQ ID NO: 25620 - protein, 483 aa, Bacillus subtilis
HHNGTNGTLMQYFEWYLPNDGNHWNRLRSDASNLKDKGITAVWIPPAWKGASQNDVGYGAYDLYDLGEFNQKGTVRTKYGTRNQLQAAVTALKSNGIQVYGDVVMNHKGGADATEWVRAVEVNPSNRNQEVSGDYTIEAWTKFDFPGRGNTHSNFKWRWYHFDGVDWDQSRQLQNRIYKFRGKGWDWEVDTENGNYDYLMYADIDMDHPEVVNELRNWGVWYTNTLGLDGFRIDAVKHIKYSFTRDWLTHVRNTTGKNMFAVAEFWKNDIGAIENYLSKTNWNHSVFDVPLHYNLYNASRSGGNYDMRQIFNGTVVQRHPTHAVTFVDNHDSQPEEALESFVEEWFKPLAYALTLTRDQGYPSVFYGDYYGIPTHGVPAMKSKIDPILEARQKYAYGTQRDYLDHPDVIGWTREGDGVHADSGLATLMSDGPGGSKWMEVGKNNAGEVWYDITGNQTNTVTINKDGWGQFHVSGGSVSIYVQQ

SEQ ID NO: 25621 - protein, 483 aa, Bacillus licheniformis
HHNGTNGTMMQYFEWYLPNDGNHWNRLRSDASNLKDKGITAVWIPPAWKGASQNDVGYGAYDLYDLGEFNQKGTVRTKYGTRNQLQAAVTALKSNGIQVYGDVVMNHKGGADATEWVRAVEVNPSNRNQEVSGDYTIEAWTKFDFPGRGNTHSNFKWRWYHFDGVDWDQSRQLQNRIYKFRGKGWDWEVDTENGNYDYLMYADIDMDHPEVVNELRNWGVWYTNTLGLDGFRIDAVKHIKYSFTRDWLTHVRNTTGKNMFAVAEFWKNDIGAIENYLSKTNWNHSVFDVPLHYNLYNASRSGGNYDMRQIFNGTVVQRHPTHAVTFVDNHDSQPEEALESFVEEWFKPLAYALTLTRDQGYPSVFYGDYYGIPTHGVPAMKSKIDPILEARQKYAYGTQRDYLDHPDVIGWTREGDGVHADSGLATLMSDGPGGSKWMEVGKNNAGEVWYDITGNQTNTVTINKDGWGQFHFSGGSVSIYVQQ

SEQ ID NO: 25622 - protein, 483 aa, Bacillus licheniformis
HHNGTNGTMMQYFEWYLPNDGNHWNRLRSDASNLKDKGITAVWIPPAWKGASQNDVGYGAYDLYDLGEFNQKGTVRTKYGTRNQLQAAVTALKSNGIQVYGDVVMNHKGGADATEWVRAVEVNPSNRNQEVSGDYTIEAWTKFDFPGRGNTHSNFKWRWYHFDGVDWDQSRQLQNRIYKFRGKGWDWEVDTENGNYDYLMYADIDMDHPEVVNELRNWGVWYTNTLGLDGFRIDAVKHIKYSFTRDWLTHVRNTTGKNMFAVAEFWKNDIGAIENYLSKTNWNHSVFDVPLHYNLYNASRSGGNYDMRQIFNGTVVQRHPTHAVTFVDNHDSQPEEALESFVEEWFKPLAYALTLTRDQGYPSVFYGDYYGIPTHGVPAMKSKIDPILEARQKYAYGTQRDYLDHPDVIGWTREGDGVHADSGLATLMSDGPGGSKWMEVGKNNAGEVWYDITGGQTNTVTINKDGWGQFHVSGGSVSIYVQQ

SEQ ID NO: 25623 - protein, 483 aa, Bacillus licheniformis
HHNGTNGTMMQYFEWYLPNDGNHWNRLRSDASNLKDKGITAVWIPPAWKGASQNDVGYGAYDLYDLGEFNQNGTVRTKYGTRNQLQAAVTALKSNGIQVYGDVVMNHKGGADATEWVRAVEVNPSNRNQEVSGDYTIEAWTKFDFPGRGNTHSNFKWRWYHFDGVDWDQSRQLQNRIYKFRGKGWDWEVDTENGNYDYLMYADIDMDHPEVVNELRNWGVWYTNTLGLDGFRIDAVKHIKYSFTRDWLTHVRNTTGKNMFAVAEFWKNDIGAIENYLSKTNWNHSVFDVPLHYNLYNASRSGGNYDMRQIFNGTVVQRHPTHAVTFVDNHDSQPEEALESFVEEWFKPLAYALTLTRDQGYPSVFYGDYYGIPTHGVPAMKSKIDPILEARQKYAYGTQRDYLDHPDVIGWTREGDGVHADSGLATLMSDGPGGSKWMEVGKNNAGEVWYDITGNQTNTVTINKDGWGQFHVSGGSVSIYVQQ

SEQ ID NO: 25624 - protein, 483 aa, Bacillus licheniformis
HHNGTNGTMMQYFEWYLPNDGNHWNRLRSDASNLKDKGITAVWIPPAWKGASQNDVGYGAYDLYDLGEFNQKGTVRTKYGTRNQLQAAVTALKSNGIQVYGDVVMNHKGGADATEWVRAVEVNPSNRNQEVSGDYTIEAWTKFDFPGRGNTHSNFKWRWYHFDGVDWDQSRQLMNRIYKFRGKGWDWEVDTENGNYDYLMYADIDMDHPEVVNELRNWGVWYTNTLGLDGFRIDAVKHIKYSFTRDWLTHVRNTTGKNMFAVAEFWKNDIGAIENYLSKTNWNHSVFDVPLHYNLYNASRSGGNYDMRQIFNGTVVQRHPTHAVTFVDNHDSQPEEALESFVEEWFKPLAYALTLTRDQGYPSVFYGDYYGIPTHGVPAMKSKIDPILEARQKYAYGTQRDYLDHPDVIGWTREGDGVHADSGLATLMSDGPGGSKWMEVGKNNAGEVWYDITGNQTNTVTINKDGWGQFHVSGGSVSIYVQQ

SEQ ID NO: 25625 - protein, 483 aa, Bacillus licheniformis
HHNGTNGTMMQYFEWYLPNDGNHWNRLRSDASNLKDKGITAVWIPPAWKGASQNDVGYGAYDLYDLGEFNQKGTVRTKYGTRNQLQAAVTALKSNGIQVYGDVVMNHKGGADATEWVRAVEVNPSNRNQEVSGDYTIEAWTKFDFPGRGNTHSNFKWRWYHFDGVDWDQSRQLQNRIYKFRGKGWDWEVDTENGNYDYLMYADIDMDHPEVVNELRNWGVWYTNTLGLDGFRIDAVKHIKYSFTRDWLTHVRNTTGKNMFAVAEFWKNDIGAIENYLSKTNWNHSVFDVPLHYNLYNASRSNGNYDMRQIFNGTVVQRHPTHAVTFVDNHDSQPEEALESFVEEWFKPLAYALTLTRDQGYPSVFYGDYYGIPTHGVPAMKSKIDPILEARQKYAYGTQRDYLDHPDVIGWTREGDGVHADSGLATLMSDGPGGSKWMEVGKNNAGEVWYDITGNQTNTVTINKDGWGQFHVSGGSVSIYVQQ

SEQ ID NO: 25626 - protein, 483 aa, Bacillus licheniformis
HHNGTNGTMMQYFEWYLPNDGNHWNRLRSDASNLKDKGITAVWIPPAWKGASQNDVGYGAYDLYDLGEFNQKGTVRTKYGTRNQLQAAVTALKSNGIQVYGDVVMNHKGGADATEWVRAVEVNPSNRNQEVSGDYTIEAWTKFDFPGRGNTHSNFKWRWYHFDGVDWDQSRQLQNRIYKFRGKGWDWEVDTENGNYDYLMYADIDMDHPEVVNELRNWGVWYTNTLGLDGFRIDAVKHIKYSFTRDWLTHVRNTTGKNMFAVAEFWKNDIGAIENYLSKTNWNHSVFDVPLHYNLYNASRSGGNYDMRQIFNGTVVQRHPTHAVTFVDNHISQPEEALESFVEEWFKPLAYALTLTRDQGYPSVFYGDYYGIPTHGVPAMKSKIDPILEARQKYAYGTQRDYLDHPDVIGWTREGDGVHADSGLATLMSDGPGGSKWMEVGKNNAGEVWYDITGNQTNTVTINKDGWGQFHVSGGSVSIYVQQ

SEQ ID NO: 25627 - protein, 483 aa, Bacillus licheniformis
HHNGTNGTMMQYFEWYLPNDGNHWNRLRSDASNLKDKGITAVWIPPAWKGASQNDVGYGAYDLYDLGEFNQKGTVRTKYGTRNQLQAAVTALKSNGIQVYGDVVMNHKGGADATEWVRAVEVNPSNRNQEVSGDYTIEAWTKFDFPGRGNTHSNFKWRWYHFDGVDWDQSRQLQNRIYKFRGKGWDWEVDTENGNYDYLMYADIDMDHPEVVNELRNWGVWYTNTLGLDGFRIDAVKHIKYSFTRDWLTHVRNTTGKNMFAVAEFWKNDIGAIENYLSKTNWNHSVFDVDLHYNLYNASRSGGNYDMRQIFNGTVVQRHPTHAVTFVDNHDSQPEEALESFVEEWFKPLAYALTLTRDQGYPSVFYGDYYGIPTHGVPAMKSKIDPILEARQKYAYGTQRDYLDHPDVIGWTREGDGVHADSGLATLMSDGPGGSKWMEVGKNNAGEVWYDITGNQTNTVTINKDGWGQFHVSGGSVSIYVQQ

SEQ ID NO: 25628 - protein, 483 aa, Bacillus licheniformis
HHNGTNGTMMQYFEWYLPNDGNHWNRLRSDASNLKDKGITAVWIPPAWKGASQNDVGYGAYDLYDLGEFNQKGTVRTKYGTRNQLQAAVTALKSNGIQVYGDVVMNHKGGADATEWVRAVEVNPSNRNQEVSGDYTIEAWTKFDFPGRGNTHSNFKWRWYHFDGVDWDQSRQLQNRIYKFRGKGWDWEVDTENGNYDYLMYADIDMDHPEVVNELRNWGVWYTNTLGLDGFRIDAVKHIKYSFTRDWLTHVRNTTGKNMFAVAEFWKNDIGAIENYLSKTNWNHSVFDVPLHYNLYNASRSGGYYDMRQIFNGTVVQRHPTHAVTFVDNHDSQPEEALESFVEEWFKPLAYALTLTRDQGYPSVFYGDYYGIPTHGVPAMKSKIDPILEARQKYAYGTQRDYLDHPDVIGWTREGDGVHADSGLATLMSDGPGGSKWMEVGKNNAGEVWYDITGNQTNTVTINKDGWGQFHVSGGSVSIYVQQ

SEQ ID NO: 25629 - protein, 483 aa, Bacillus licheniformis
HHNGFNGTMMQYFEWYLPNDGNHWNRLRSDASNLKDKGITAVWIPPAWKGASQNDVGYGAYDLYDLGEFNQKGTVRTKYGTRNQLQAAVTALKSNGIQVYGDVVMNHKGGADATEWVRAVEVNPSNRNQEVSGDYTIEAWTKFDFPGRGNTHSNFKWRWYHFDGVDWDQSRQLQNRIYKFRGKGWDWEVDTENGNYDYLMYADIDMDHPEVVNELRNWGVWYTNTLGLDGFRIDAVKHIKYSFTRDWLTHVRNTTGKNMFAVAEFWKNDIGAIENYLSKTNWNHSVFDVPLHYNLYNASRSGGNYDMRQIFNGTVVQRHPTHAVTFVDNHDSQPEEALESFVEEWFKPLAYALTLTRDQGYPSVFYGDYYGIPTHGVPAMKSKIDPILEARQKYAYGTQRDYLDHPDVIGWTREGDGVHADSGLATLMSDGPGGSKWMEVGKNNAGEVWYDITGNQTNTVTINKDGWGQFHVSGGSVSIYVQQ

SEQ ID NO: 25630 - protein, 483 aa, Bacillus licheniformis
HHNGTNGTMMQYFEWYLPNDGNHWNRLRSDASNLKDKGITAVWIPPAWKGASQNDVGYGAYDLYDLGEFNQKGTVRTKYGTRNQLQAAVTALKSNGIQVYGDVVMNHKGGADATEWVRAVEVNPSNRNQEVSGDYTIEAWTKFSFPGRGNTHSNFKWRWYHFDGVDWDQSRQLQNRIYKFRGKGWDWEVDTENGNYDYLMYADIDMDHPEVVNELRNWGVWYTNTLGLDGFRIDAVKHIKYSFTRDWLTHVRNTTGKNMFAVAEFWKNDIGAIENYLSKTNWNHSVFDVPLHYNLYNASRSGGNYDMRQIFNGTVVQRHPTHAVTFVDNHDSQPEEALESFVEEWFKPLAYALTLTRDQGYPSVFYGDYYGIPTHGVPAMKSKIDPILEARQKYAYGTQRDYLDHPDVIGWTREGDGVHADSGLATLMSDGPGGSKWMEVGKNNAGEVWYDITGNQTNTVTINKDGWGQFHVSGGSVSIYVQQ

SEQ ID NO: 25631 - protein, 483 aa, Bacillus licheniformis
HHNGTNGTMMQYFEWYLPNDGNHWNRLRSDASNLKDKGITAVWIPPAWKGASQNDVGYGAYDLYDLGEFNQKGTVRTKYGTRNQLQAAVTALKSNGIQVYGDVVMNHKGGADATEWVRAVEVNPSNRNQEVSGDYTIEAWTKFDFPGRGNTHSNFKWRWYHFDGVDWDQSRQLQNRIYKFRGKEWDWEVDTENGNYDYLMYADIDMDHPEVVNELRNWGVWYTNTLGLDGFRIDAVKHIKYSFTRDWLTHVRNTTGKNMFAVAEFWKNDIGAIENYLSKTNWNHSVFDVPLHYNLYNASRSGGNYDMRQIFNGTVVQRHPTHAVTFVDNHDSQPEEALESFVEEWFKPLAYALTLTRDQGYPSVFYGDYYGIPTHGVPAMKSKIDPILEARQKYAYGTQRDYLDHPDVIGWTREGDGKHADSGLATLMSDGPGGSKWMEVGKNNAGERWYDITGNQTNTVTINKDGWGQFHVSGGSVSIYVQQ

SEQ ID NO: 25632 - protein, 483 aa, Bacillus licheniformis
HHNGTNGTMMQYFEWYLPNDGNHWNRLRSDASNLKDKGITAVWIPPAWKGASQNDVGYGAYDLYDLGEFNQKGTVRTKYGTRNQLQAAVTALKSNGIQVYGDVVMNHKGGADATEWVRAVEVNPSNRNQEVSGDYTIEAWTKFDFPGRGNTHSNFKWRWYHFDGVDWDQCRQLQNRIYKFRGKGWDWEVDTENGNYDYLMYADIDMDHPEVVNELRNWGVWYTNTLGLDGFRIDAVKHIKYSFTRDWLTHVRNTTGKNMFAVAEFWKNDIGAIENYLSKTNWNHSVFDVPLHYNLYNASRSGGNYDMRQIFNGTVVQRHPTHAVTFVDNHDSQPEEALESFVEEWFKPLAYALTLTRDQGYPSVFYGDYYGIPTHGVPAMKSKIDPILEARQKYAYGTQRDYLDHPDVIGWTREGDGVHADSGLATLMSDGPGGSKWMEVGKNNAGEVWYDITGNQTNTVTINKDGWGQFHVSGGSVSIYVQQ

SEQ ID NO: 25633 - protein, 483 aa, Bacillus licheniformis
HHNGTNGTMMQYFEWYLPNDGNHWNRLRSDASNLKDKGITAVWIPPAWKGASQNDVGYGAYDLYDLGEFNQKGTVRTKYGTRNQLQAAVTSLKSNGIQVYGDVVMNHKGGADATEWVRAVEVNPSNRNQEVSGDYTIEAWTKFDFPGRGNTHSNFKWRWYHFDGVDWDQSRQLQNRIYKFRGKGWDWEVDTENGNYDYLMYADIDMDHPEVVNELRNWGVWYTNTLGLDGFRIDAVKHIKYSFTRDWLTHVRNTTGKNMFAVAEFWKNDIGAIENYLSKTNWNHSVFDVPLHYNLYNASRSGGNYDMRQIFNGTVVQRHPTHAVTFVDNHDSQPEEALESFVEEWFKPLAYALTLTRDQGYPSVFYGDYYGIPTHGVPAMKSKIDPILEARQKYAYGTQRDYLDHPDVIGWTREGDGVHADSGLATLMSDGPGGSKWMEVGKNNAGEVWYDITGNQTNTVTINKDGWGQFHVSGGSVSIYVQQ

SEQ ID NO: 25634 - protein, 483 aa, Bacillus licheniformis
HHNGTNGTMMQYFEWYLPNDGNHWNRLRSDASNLKDKGITAVWIPPAWKGASQNDVGYGAYDLYDLGEFNQKGTVRTKYGTRNQLQAAVTALKSNGIQVYGDVVMNHKGGADATEWVRAVEVNPSNRNQEVSGDYTIEAWTKFDFPGRGNTHSNFKWRWYHFDGVDWDQSRQLQNRIYKFRGKGMDWEVDTENGNYDYLMYADIDMDHPEVVNELRNWGVWYTNTLGLDGFRIDAVKHIKYSFTRDWLTHVRNTTGKNMFAVAEFWKNDIGAIENYLSKTNWNHSVFDVPLHYNLYNASRSGGNYDMRQIFNGTVVQRHPTHAVTFVDNHDSQPEEALESFVEEWFKPLAYALTLTRDQGYPSVFYGDYYGIPTHGVPAMKSKIDPILEARQKYAYGTQRDYLDHPDVIGWTREGDGVHADSGLATLMSDGPGGSKWMEVGKNNAGEVWYDITGNQTNTVTINKDGWGQFHVSGGSVSIYVQQ

SEQ ID NO: 25635 - protein, 483 aa, Bacillus licheniformis
HHNGTNGTMMQYFEWYLPNDGNHWNRLRSDASNLKDKGITAVWIPPAWKGASQNDVGYGAYDLYDLGEFNQKGTVRTKYGTRNQLQAAVTALKSNGIQVYGDVVMNHKGGADATEWVRAVEVNPSNRNQEVSGDYTIEAWTKFDFPGRGNTHSNFKWRWYHFDGVDWDQSRQLQNRIYKFRGKGWDWEVDTENGNYDYLMYADIDMDHPEVVNELRNWGVWYTNTLGLDGFRIDAVKHIKYSFTRDWLTHVRNTTGKNMFAVAEFWKNDIHAIENYLSKTNWNHSVFDVPLHYNLYNASRSGGNYDMRQIFNGTVVQRHPTHAVTFVDNHDSQPEEALESFVEEWFKPLAYALTLTRDQGYPSVFYGDYYGIPTHGVPAMKSKIDPILEARQKYAYGTQRDYLDHPDVIGWTREGDGVHADSGLATLMSDGPGGSKWMEVGKNNAGEVWYDITGNQTNTVTINKDGWGQFHVSGGSVSIYVQQ

SEQ ID NO: 25636 - protein, 483 aa, Bacillus licheniformis
HHNGTNGTMMQYFEWYLPNDGNHWNRLRSDASNLKDKGITAVWIPPAWKGASQNDVGYGAYDLYDLGEFNQKGTVRTKYGTRNQLQAAVTALKSLGIQVYGDVVMNHKGGADATEWVRAVEVNPSNRNQEVSGDYTIEAWTKFDFPGRGNTHSNFKWRWYHFDGVDWDQSRQLQNRIYKFRGKGWDWEVDTENGNYDYLMYADIDMDHPEVVNELRNWGVWYTNTLGLDGFRIDAVKHIKYSFTRDWLTHVRNTTGKNMFAVAEFWKNDIGAIENYLSKTNWNHSVFDVPLHYNLYNASRSGGNYDMRQIFNGTVVQRHPTHAVTFVDNHDSQPEEALESFVEEWFKPLAYALTLTRDQGYPSVFYGDYYGIPTHGVPAMKSKIDPILEARQKYAYGTQRDYLDHPDVIGWTREGDGVHADSGLATLMSDGPGGSKWMEVGKNNAGEVWYDITGNQTNTVTINKDGWGQFHVSGGSVSIYVQQ

SEQ ID NO: 25637 - protein, 483 aa, Bacillus licheniformis
HHNGTNGTMMQYFEWYLPNDGNHWNRLRSDASNLKDKGITAVWIPPAWKGASQNDVGYGAYDLYDLGEFNQKGTVRTKYGTRNQLQAAVTALKSNGIQVYGDVVMNHKGGADATEWVRAVEVNPSNRNQEVSGDYTIEAWTKFDFPGRGNTHSNFKWRWYHFDGVDWDQSRQLQNRIYKFRGKGWDWEVDTENGNYDYLMYADIDMDHPEVVNELRNWGVWYTNTLGLDGFRIDAVKHIKYSFTRDWLTHVRNTTGKNMFAVAEFWKNDIGAIENYLSKTNWNHSVFDVPLHYNLYNASRSGGNYDMRQIFNGTVVQRHPTHAVTFVDNHDSQPEEALESWVEEWFKPLAYALTLTRDQGYPSVFYGDYYGIPTHGVPAMKSKIDPILEARQKYAYGTQRDYLDHPDVIGWTREGDGVHADSGLATLMSDGPGGSKWMEVGKNNAGEVWYDITGNQTNTVTINKDGWGQFHVSGGSVSIYVQQ

SEQ ID NO: 25638 - protein, 483 aa, Bacillus licheniformis
HHNGTNGTMMQYFEWYLPNDGNHWNRLRSDASNLKDKGITAVWIPPAWKGASQNDVGYGAYDLYDLGEFNQKGTVRTKYGTRNQLQAAVTALKSNGIQVYGDVVMNHKGGADATEWVRAVEVNPSNRNQEVSGDYTIEAWTKFDFPGRGNTHSNFKWRWYHFDGVDWDQSRQLQNRIYKFRGKGWDWEVDTENGNYDYLMYADIDMDHPEVVNELRNWGVWYTNTLGLDGFRIDAVKHIKYSFTRDWLTHVRNTTGKNMFAVAEFWKNDIGAIENYLSKTNWNHSVFDVPLHYNLYNASRSGGNYDMRQIFNGTVVQRHPTHAGTFVDNHDSQPEEALESFVEEWFKPLAYALTLTRDQGYPSVFYGDYYGIPTHGVPAMKSKIDPILEARQKYAYGTQRDYLDHPDVIGWTREGDGVHADSGLATLMSDGPGGSKWMEVGKNNAGEVWYDITGNQTNTVTINKDGWGQFHVSGGSVSIYVQQ

SEQ ID NO: 25639 - protein, 483 aa, Bacillus licheniformis
HHNGTNGTMMQYFEWYLPNDGNHWNRLRSDASNLKDKGITAVWIPPAWKGASQNDVGYGAYDLYDLGEFNQKGTVRTKYGTRNQLQAAVTALKSNGIQVYGDVVMNHKGGADATEWVRAVEVNPSNRNQEVSGDYTIEAWTKFDFPGRGNTHSNFKWRWYHFDGVDWDQSRQLQNRIYKFRGKGWDWEVDTENGNYDYLMYADIDMDHPEVVNELRNWGVWYTNTLGLDGFRIDAVKHIKYSFTRDWLTHVRNTTGKNMFAVAEFWKNDIGAIENYLSKTNWNHSVFDVPLHYNLYNASRSGGNYDMRQIFNGTVVQRHPTHAVTFVDNHDSQPEEALESFVEEWFKPLAYALTLTRDQGYPSVFYGDYYGIPTHGVPAMKSKIDPILEARQKYAYGTQRDYLDHPDVIGWTREGDGVHADSGLATLMSDGPGGSKWMEVGKNNAGEVWYDITGNQTNQVTINKDGWGQFHVSGGSVSIYVQQ

SEQ ID NO: 25640 - protein, 483 aa, Bacillus licheniformis
HHNGTNGTMMQYFEWYLPNDGNHWNRLRSDASNLKDKGITAVWIPPAWKGASQNDVGYGAYDLYDLGEFNQKGTVRTKYGTRNQLQAAVTALKSNGIQVYGDVVMNHKGGADATEWVRAVEVNPSNRNQEVSKDYTIEAWTKFDFPGRGNTHSNFKWRWYHFDGVDWDQSRQLQNRIYKFRGKGWDWEVDTENGNYDYLMYADIDMDHPEVVNELRNWGVWYTNTLGLDGFRIDAVKHIKYSFTRDWLTHVRNTTGKNMFAVAEFWKNDIGAIENYLSKTNWNHSVFDVPLHYNLYNASRSGGNYDMRQIFNGTVVQRHPTHAVTFVDNHDSQPEEALESFVEEWFKPLAYALTLTRDQGYPSVFYGDYYGIPTHGVPAMKSKIDPILEARQKYAYGTQRDYLDHPDVIGWTREGDGVHADSGLATLMSDGPGGSKWMEVGKNNAGEVWYDITGNQTNTVTINKDGWGQFHVSGGSVSIYVQQ

SEQ ID NO: 25641 - protein, 483 aa, Bacillus licheniformis
HHNGTNGTMMQYFEWYLPNDGNHWNRLRSDASNLKDKGITAVWIPPAWKGASQNDVGYGAYDLYDLGEFNQKGTVRTKYGTRNQLQAAVTALKSNGIQVYGDVVMNHKGGADATEWVRYVEVNPSNRNQEVSGDYTIEAWTKFDFPGRGNTHSNFKWRWYHFDGVDWDQSRQLQNRIYKFRGKGWDWEVDTENGNYDYLMYADIDMDHPEVVNELRNWGVWYTNTLGLDGFRIDAVKHIKYSFTRDWLTHVRNTTGKNMFAVAEFWKNDIGAIENYLSKTNWNHSVFDVPLHYNLYNASRSGGNYDMRQIFNGTVVQRHPTHAVTFVDNHDSQPEEALESFVEEWFKPLAYALTLTRDQGYPSVFYGDYYGIPTHGVPAMKSKIDPILEARQKYAYGTQRDYLDHPDVIGWTREGDGVHADSGLATLMSDGPGGSKWMEVGKNNAGEVWYDITGNQTNTVTINKDGWGQFHVSGGSVSIYVQQ

SEQ ID NO: 25642 - protein, 483 aa, Bacillus licheniformis
HHNGTNGTMMQYFEWYLPNDGNHWNRLRSDASNLKDKGITAVWIPPAWKGASQNDVGYGAYDLYDLGEFNQKGTVRTKYGTRNQLQAAVTALKSNGIQVYGDVVMNHKGGADATEWVRAVEVNPSNRNQEVSGDYTIEAWTKFDFPGRGNTHSNFKWRWYHFDGVDWDQSRQLQNRIYKFRGKGWDWEVDTENGNYDYLMYADIDMDHPEVVNELRNWGVWYTNTLGLDGFRIDAVKHIKYSFTRDWLTHVRNTTGKNMFAVAEFWKNDIGAIENYLSKTNWNHSVFDVPLHYNLYNASRSGGNYDMRQIFNGTVVQRHPTHAVTFVDNHDSQPEEALESFVEGWFKPLAYALTLTRDQGYPSVFYGDYYGIPTHGVPAMKSKIDPILEARQKYAYGTQRDYLDHPDVIGWTREGDGVHADSGLATLMSDGPGGSKWMEVGKNNAGEVWYDITGNQTNTVTINKDGWGQFHVSGGSVSIYVQQ

SEQ ID NO: 25643 - protein, 483 aa, Bacillus licheniformis
HHNGTNGTMMQYFEWYLPNDGNHWNRLRSDASNLKDKGITAVWIPPAWKGASQNDVGYGAYDLYDLGEFNQKGTVRTKYGTRNQLQAAVTALKSNGIQVYGDVVMNHKGGADATEWVRAVEVNPSNRNQEVSGDYTIEAWTKFDFPGRGNTHSNFKWRWYHFDGVDWDQSRQLQNRIYKFRGKGWDWEVDTENGNYDYLMYADIDMDSPEVVNELRNWGVWYTNTLGLDGFRIDAVKHIKYSFTRDWLTHVRNTTGKNMFAVAEFWKNDIGAIENYLSKTNWNHSVFDVPLHYNLYNASRSGGNYDMRQIFNGTVVQRHPTHAVTFVDNHDSQPEEALESFVEEWFKPLAYALTLTRDQGYPSVFYGDYYGIPTHGVPAMKSKIDPILEARQKYAYGTQRDYLDHPDVIGWTREGDGVHADSGLATLMSDGPGGSKWMEVGKNNAGEVWYDITGNQTNTVTINKDGWGQFHVSGGSVSIYVQQ

SEQ ID NO: 25644 - protein, 483 aa, Bacillus licheniformis
HHNGTNGTMMQYFEWYLPNDGNHWNRLRSDASNLKDKGITAVWIPPAWKGASQNDVGYGAYDLYDLGEFNQKGTVRTKYGTRNQLQAAVTALKSNGIQVYGDVVMNHKGGADATEWVRAVEVNPSNRNQEVSGDYTIEAWTKFDFPGRGNTHSNFKWRWYHFDGVDWDQSRQLQNRIYKFRGKGWDWEVDTENGNYDYLMYADIDMDHPEVVNELRNWGVWYTNTLGLDGFRIDAFKHIKYSFTRDWLTHVRNTTGKNMFAVAEFWKNDIGAIENYLSKTNWNHSVFDVPLHYNLYNASRSGGNYDMRQIFNGTVVQRHPTHAVTFVDNHDSQPEEALESFVEEWFKPLAYALTLTRDQGYPSVFYGDYYGIPTHGVPAMKSKIDPILEARQKYAYGTQRDYLDHPDVIGWTREGDGVHADSGLATLMSDGPGGSKWMEVGKNNAGEVWYDITGNQTNTVTINKDGWGQFHVSGGSVSIYVQQ

SEQ ID NO: 25645 - protein, 483 aa, Bacillus licheniformis
HHNKTNGTMMQYFEWYLPNDGNHWNRLRSDASNLKDKGITAVWIPPAWKGASQNDVGYGAYDLYDLGEFNQKGTVRTKYGTRNQLQAAVTALKSNGIQVYGDVVMNHKGGADATEWVRAVEVNPSNRNQEVSGDYTIEAWTKFDFPGRGNTHSNFKWRWYHFDGVDWDQSRQLQNRIYKFRGKGWDWEVDTENGNYDYLMYADIDMDHPEVVNELRNWGVWYTNTLGLDGFRIDAVKHIKYSFTRDWLTHVRNTTGKNMFAVAEFWKNDIGAIENYLSKTNWNHSVFDVPLHYNLYNASRSGGNYDMRQIFNGTVVQRHPTHAVTFVDNHDSQPEEALESFVEEWFKPLAYALTLTRDQGYPSVFYGDYYGIPTHGVPAMKSKIDPILEARQKYAYGTQRDYLDHPDVIGWTREGDGVHADSGLATLMSDGPGGSKWMEVGKNNAGEVWYDITGNQTNTVTINKDGWGQFHVSGGSVSIYVQQ

SEQ ID NO: 25646 - protein, 483 aa, Bacillus licheniformis
HHNGTNGTMMQYFEWYLPNDGNHWNRLRSDASNLKDKGITAVWIPPAWKGASQNDVGYGAYDLYDLGEFNQKGTVRTKYGTRNQLQAAVTALKSNGIQVYGDVVMNHKGGADATEWVRAVEVNPSNRNQEVSGDYTIEAWTKFDFPGRGNTHSNFKWRWYHFDGVDWDQSRQLQNRIYKFRGKGWDWEVDTENGNYDYLMYADIDMDHPEVVNELRNWNVWYTNTLGLDGFRIDAVKHIKYSFTRDWLTHVRNTTGKNMFAVAEFWKNDIGAIENYLSKTNWNHSVFDVPLHYNLYNASRSGGNYDMRQIFNGTVVQRHPTHAVTFVDNHDSQPEEALESFVEEWFKPLAYALTLTRDQGYPSVFYGDYYGIPTHGVPAMKSKIDPILEARQKYAYGTQRDYLDHPDVIGWTREGDGVHADSGLATLMSDGPGGSKWMEVGKNNAGEVWYDITGNQTNTVTINKDGWGQFHVSGGSVSIYVQQ

SEQ ID NO: 25647 - protein, 483 aa, Bacillus licheniformis
HHNGTNGTMMQYFEWYLPNDGNHWNRLRSDASNLKDKGITAVWIPPAWKGASQNDVGYGAYDLYDLGEFNQKGTVRTKYGTRNQLQAAVTALKSNGIQVYGDVVMNHKGGADATEWVRAVEVNPSNRNQEVSGDYTIEAWTKFDFPGRGNTHSNFKWRWYHFDGVDWDQSRQLQNRIYKFRGKEWDWEVDEENGNYDYLMYADYDMDHPEVVNELRNWGVWYTNTLGLDGFRIDAVKHIKYSFTRDWLEHVRNTTGKNMFAVAEFWKNDIGAIENYLSKTNWNHSVFDVPLHYNLYNASRSGGNYDMRQIFNGTVVQRHPTHAVTFVDNHDSQPEEALESFVEEWFKPLAYALTLTRDQGYPSVFYGDYYGIPTHGVPAMKSKIDPILEARQKYAYGTQRDYLDHPDVIGWTREGDGVHADSGLATLMSDGPGGSKWMEVGKNNAGEVWYDITGNQTNTVTINKDGWGQFHVSGGSVSIYVQQ

SEQ ID NO: 25648 - protein, 483 aa, Bacillus licheniformis
HHNGTNGTMMQYFEWYLPNHGNHWNRLRSDASNLKDKGITAVWIPPAWKGASQNDVGYGAYDLYDLGEFNQKGTVRTKYGTRNQLQAAVTALKSNGIQVYGDVVMNHKGGADATEWVRAVEVNPSNRNQEVSGDYTIEAWTKFDFPGRGNTHSNFKWRWYHFDGVDWDQSRQLQNRIYKFRGKGWDWEVDTENGNYDYLMYADIDMDHPEVVNELRNWGVWYTNTLGLDGFRIDAVKHIKYSFTRDWLTHVRNTTGKNMFAVAEFWKNDIGAIENYLSKTNWNHSVFDVPLHYNLYNASRSGGNYDMRQIFNGTVVQRHPTHAVTFVDNHDSQPEEALESFVEEWFKPLAYALTLTRDQGYPSVFYGDYYGIPTHGVPAMKSKIDPILEARQKYAYGTQRDYLDHPDVIGWTREGDGVHADSGLATLMSDGPGGSKWMEVGKNNAGEVWYDITGNQTNTVTINKDGWGQFHVSGGSVSIYVQQ

SEQ ID NO: 25649 - protein, 483 aa, Bacillus licheniformis
HHNGTNGTMMQYFEWYLPNDGNHWNALRSDASNLKDKGITAVWIPPAWKGASQNDVGYGAYDLYDLGEFNQKGTVRTKYGTRNQLQAAVTALKSNGIQVYGDVVMNHKGGADATEWVRAVEVNPSNRNQEVSGDYTIEAWTKFDFPGRGNTHSNFKWRWYHFDGVDWDQSRQLQNRIYKFRGKGWDWEVDTENGNYDYLMYADIDMDHPEVVNELRNWGVWYTNTLGLDGFRIDAVKHIKYSFTRDWLTHVRNTTGKNMFAVAEFWKNDIGAIENYLSKTNWNHSVFDVPLHYNLYNASRSGGNYDMRQIFNGTVVQRHPTHAVTFVDNHDSQPEEALESFVEEWFKPLAYALTLTRDQGYPSVFYGDYYGIPTHGVPAMKSKIDPILEARQKYAYGTQRDYLDHPDVIGWTREGDGVHADSGLATLMSDGPGGSKWMEVGKNNAGEVWYDITGNQTNTVTINKDGWGQFHVSGGSVSIYVQQ

SEQ ID NO: 25650 - protein, 483 aa, Bacillus licheniformis
HHNGTNGTMMQYFEWYLPNDGNHWNRLRSDASNLKDKGITAVWINPAWKGASQNDVGYGAYDLYDLGEFNQKGTVRTKYGTRNQLQAAVTALKSNGIQVYGDVVMNHKGGADATEWVRAVEVNPSNRNQEVSGDYTIEAWTKFDFPGRGNTHSNFKWRWYHFDGVDWDQSRQLQNRIYKFRGKGWDWEVDTENGNYDYLMYADIDMDHPEVVNELRNWGVWYTNTLGLDGFRIDAVKHIKYSFTRDWLTHVRNTTGKNMFAVAEFWKNDIGAIENYLSKTNWNHSVFDVPLHYNLYNASRSGGNYDMRQIFNGTVVQRHPTHAVTFVDNHDSQPEEALESFVEEWFKPLAYALTLTRDQGYPSVFYGDYYGIPTHGVPAMKSKIDPILEARQKYAYGTQRDYLDHPDVIGWTREGDGVHADSGLATLMSDGPGGSKWMEVGKNNAGEVWYDITGNQTNTVTINKDGWGQFHVSGGSVSIYVQQ

SEQ ID NO: 25651 - protein, 483 aa, Bacillus licheniformis
HHNGTNGTMMQYFEWYLPNDGNHWNRLRSDASNLKDKGITAVWIPPAWKGASQNDVGYGAYDLYDLGEFNQKGTVRTKYGTRNQLQAAVTALKSNGIQVYGDVVMNHKGGADATEWVRAVEVNPSNRNQEVSGDYTIEAWTKFDFPGRGNTHSNFKWRWYHFDGVDWDQSRQLQNRIYKFRGKGWDWEVDTENGNYDYLMYADIDMDHPEVVNELRNWGVWYTNTLGLDGFRIDAVKHIKYSFTRDWLTHVRNTTGKNMFAVAEFWKNDIPAIENYLSKTNWNHSVFDVPLHYNLYNASRSGGNYDMRQIFNGTVVQRHPTHAVTFVDNHDSQPEEALESFVEEWFKPLAYALTLTRDQGYPSVFYGDYYGIPTHGVPAMKSKIDPILEARQKYAYGTQRDYLDHPDVIGWTREGDGVHADSGLATLMSDGPGGSKWMEVGKNNAGEVWYDITGNQTNTVTINKDGWGQFHVSGGSVSIYVQQ

SEQ ID NO: 25652 - protein, 483 aa, Bacillus licheniformis
HHNGTNGTMMQYFEWYLPNDGNHWNRLRSDASNLKDKGITAVWIPPAWKGASQNDVGYGAYDLYDLGEFNQKGTVRTKYGTRNQLQAAVTALKSNGIQVYGDVVMNHKGGADATEWVRAVEVNPSNRNQEVSGDYTIEAWTKFDFPGRGNTHSNYKWRWYHFDGVDWDQSRQLQNRIYKFRGKGWDWEVDTENGNYDYLMYADIDMDHPEVVNELRNWGVWYTNTLGLDGFRIDAVKHIKYSFTRDWLTHVRNTTGKNMFAVAEFWKNDIGAIENYLSKTNWNHSVFDVPLHYNLYNASRSGGNYDMRQIFNGTVVQRHPTHAVTFVDNHDSQPEEALESFVEEWFKPLAYALTLTRDQGYPSVFYGDYYGIPTHGVPAMKSKIDPILEARQKYAYGTQRDYLDHPDVIGWTREGDGVHADSGLATLMSDGPGGSKWMEVGKNNAGEVWYDITGNQTNTVTINKDGWGQFHVSGGSVSIYVQQ

SEQ ID NO: 25653 - protein, 483 aa, Bacillus licheniformis
HHNGTNGTMMQYFEWYLPNDGNHWNRLRSDASNLKDKGITAVWIPPAWKGASQNDVGYGAYDLYDLGEFNQKGTVRTKYGTRNQLQAAVTALKSNGIQVYGDVVMNHKGGADATEWVRAVEVNPSNRNQEVSGDYTIEAWTKFDFPGRGNTHSNFKWRWYHFDGVDWDQSRQLQNRIYKFRGKGWDWEVDTENGNYDYLMYADIDMDHPEVVNELRNWGVWYTNTLGLDGFRIDAVKHIKYSFTRDWLTHVRNTTGKNMFAVAEFWKNDIGAIDNYLSKTNWNHSVFDVPLHYNLYNASRSGGNYDMRQIFNGTVVQRHPTHAVTFVDNHDSQPEEALESFVEEWFKPLAYALTLTRDQGYPSVFYGDYYGIPTHGVPAMKSKIDPILEARQKYAYGTQRDYLDHPDVIGWTREGDGVHADSGLATLMSDGPGGSKWMEVGKNNAGEVWYDITGNQTNTVTINKDGWGQFHVSGGSVSIYVQQ

SEQ ID NO: 25654 - protein, 483 aa, Bacillus licheniformis
HHNGTNGTMMQYFEWYLPNDGNHWNRLRSDASNLKDKGITAVWIPPAWKGASQNDVGYGAYDLYDLGEFNQKGTVRTKYGTRNQLQAAVTALKSNGIQVYGDVVMNHKGGADATEWVRAVEVNPSNRNQEVSGDYTIEAWTKFDFPGRGNTHSNFKWRWYHFDGVDWDQSRQLQNRIYKFRGKGWDWEVDTENGNYDYLMYADIDMDHPEVVNELRNWGVWYTNTLGLDGFRIDAVKHIKYSFTRDWLTHVRNTTGKNMFAVAEFWKNDIGAIENYLSKTNWNHSVFDVPLHYNLYNASRSGGNYDMRQIFNGTVVQRHPTHAVTFVDNHDSQPEEALESFVEEWFKPLAYALTLTRDQGYPSVFYGDYYGIPTHGVPAMKSKIDPILEARQKYAYGTQRDYLDHPDVIGWTREGDGVHADSGLATLMSDGPGGSKWVEVGKNNAGEVWYDITGNQTNTVTINKDGWGQFHVSGGSVSIYVQQ

SEQ ID NO: 25655 - protein, 483 aa, Bacillus licheniformis
HHNGTNGTMMQYFEWYLPNDGNHWNRLRSDASNLKDKGITAVWIPPAWKGASQNDVGYGAYDLYDLGEFNQKGTVRTKYGTRNQLQAAVTALKSNGIQVYGDVVMNHKGGADATEWVRAVEVNPSNRNQEVSGDYTIEAWTKFDFPGRGNTHSNFKWRWYHFDGVDWDQSRQLQNRIYKFRGKGWDWEVDTENGNYDYLMYADIDMDHPEVVNELQNWGVWYTNTLGLDGFRIDAVKHIKYSFTRDWLTHVRNTTGKNMFAVAEFWKNDIGAIENYLSKTNWNHSVFDVPLHYNLYNASRSGGNYDMRQIFNGTVVQRHPTHAVTFVDNHDSQPEEALESFVEEWFKPLAYALTLTRDQGYPSVFYGDYYGIPTHGVPAMKSKIDPILEARQKYAYGTQRDYLDHPDVIGWTREGDGVHADSGLATLMSDGPGGSKWMEVGKNNAGEVWYDITGNQTNTVTINKDGWGQFHVSGGSVSIYVQQ

SEQ ID NO: 25656 - protein, 483 aa, Bacillus licheniformis
HHNGTNGTMMQYFEWYLPNDGNHWNRLRSDASNLKDKGITAVWIPPAWKGASQNDVGYGAYDLYDLGEFNQKGTVRTKYGTRNQLQAAVTALKSNGIQVYGDVVMNHKGGADATEWVRAVEVNPSNRNQEVSGDYTIEAWTKFDFPGRGNTHSNFKWRWYHFDGVDWDQSRQLQNRIYKFRGKGWDWEVDTENGNYDYLMYADIDMDHPEVVNELRNWGVWYTNTLGLDGFRIDAVKHIKYSFTRDWLTHVRNTTGKNMFAVAEFWKNDIGAIENYLSKTNWNHSVFDVPLHYNLYNASRSGGNYDMRQIFNGTVVQRHPTHAVTFVDNHDSQPEEALESFVEEWFKPLAYALTLTRDQGDPSVFYGDYYGIPTHGVPAMKSKIDPILEARQKYAYGTQRDYLDHPDVIGWTREGDGVHADSGLATLMSDGPGGSKWMEVGKNNAGEVWYDITGNQTNTVTINKDGWGQFHVSGGSVSIYVQQ

SEQ ID NO: 25657 - protein, 483 aa, Bacillus licheniformis
HHNGTNGTMMQYFEWYLPNDGNHWNRLRSDASNLKDKGITAVWIPPAWKGASQNDVGYGAYDLYDLGEFNQKGTVRTKYGTRNQLQAAVTALKSNGIQVYGDVVMNHKGGADATEWVRAVEVNPSNRNQEVSGDYTIEAWTKFDFPGRGNTHSNFKWRWYHFDGVDWDQSRQLQNRIYKFRGKGWDWEVDTENGNYDYLMYADIDMDHPEVVNELRNWGVWYTNTLGLDGFRIDAVKHIKYSFTRDWLTHVRNTTGKNMFAVAEFWKNDIGAIENYLSKTNWNHSVFDVPLHYNLYNASRSGGNYDMRQIFNGTVVQRHPTHAVTFVDNHDSQPEEALESFVEEWFKPLAYALTLTRDQGYPSVFYGDYYGIPTHGVPAMKSKIDPILEARQKYAYGTQRDYLDHPDVIGWTREGDGVHADSGLATLMSDGPGGSKWMEVTKNNAGEVWYDITGNQTNTVTINKDGWGQFHVSGGSVSIYVQQ

SEQ ID NO: 25658 - protein, 483 aa, Bacillus licheniformis
HHNGTMGTMMQYFEWYLPNDGNHWNRLRSDASNLKDKGITAVWIPPAWKGASQNDVGYGAYDLYDLGEFNQKGTVRTKYGTRNQLQAAVTALKSNGIQVYGDVVMNHKGGADATEWVRAVEVNPSNRNQEVSGDYTIEAWTKFDFPGRGNTHSNFKWRWYHFDGVDWDQSRQLQNRIYKFRGKGWDWEVDTENGNYDYLMYADIDMDHPEVVNELRNWGVWYTNTLGLDGFRIDAVKHIKYSFTRDWLTHVRNTTGKNMFAVAEFWKNDIGAIENYLSKTNWNHSVFDVPLHYNLYNASRSGGNYDMRQIFNGTVVQRHPTHAVTFVDNHDSQPEEALESFVEEWFKPLAYALTLTRDQGYPSVFYGDYYGIPTHGVPAMKSKIDPILEARQKYAYGTQRDYLDHPDVIGWTREGDGVHADSGLATLMSDGPGGSKWMEVGKNNAGEVWYDITGNQTNTVTINKDGWGQFHVSGGSVSIYVQQ

SEQ ID NO: 25659 - protein, 483 aa, Bacillus licheniformis
HHNGTNGTMMQYFEWYLPNDGNHWNRLRSDASNLKDKGITAVWIPPAWKGASQNDVGYGAYDLYDLGEFNQKGTVRTKYGTRNQLQAAVTALKSNGIQVYGDVVMNHKGGADATEWVRAVEVNPSNRNQEVSGDYTIEAWTKFDFPGRGNTHSNFKWRWYHFDGVDWDVSRQLQNRIYKFRGKGWDWEVDTENGNYDYLMYADIDMDHPEVVNELRNWGVWYTNTLGLDGFRIDAVKHIKYSFTRDWLTHVRNTTGKNMFAVAEFWKNDIGAIENYLSKTNWNHSVFDVPLHYNLYNASRSGGNYDMRQIFNGTVVQRHPTHAVTFVDNHDSQPEEALESFVEEWFKPLAYALTLTRDQGYPSVFYGDYYGIPTHGVPAMKSKIDPILEARQKYAYGTQRDYLDHPDVIGWTREGDGVHADSGLATLMSDGPGGSKWMEVGKNNAGEVWYDITGNQTNTVTINKDGWGQFHVSGGSVSIYVQQ

SEQ ID NO: 25660 - protein, 483 aa, Bacillus licheniformis
HHNGTNGTMMQYFEWYLPNDGNHWNRLRSDASNLKDKGITAVWIPPAWKGASQNDVGYGAYDLYDLGEFNQKGTVRTKYGTRNQLQAAVTALKSNGIQVYGDVVMNHKGGADATEWVRAVEVNPSNRNQEVSGDYTIEAWTKFDFPGRGNTHSNFKWRWYHFDGVDWDQSRQLQNRIYKFRGKGWDWEVDTENGNYDYLMYADIDMDHPEVVNELRNWGVWYTNTLGLDGFRIDAVKHIKYSFTRDWLTHVRNTTGKNMFAVAEFWKNDIGAIENYLSKTNWNHSVFDVPLHYALYNASRSGGNYDMRQIFNGTVVQRHPTHAVTFVDNHDSQPEEALESFVEEWFKPLAYALTLTRDQGYPSVFYGDYYGIPTHGVPAMKSKIDPILEARQKYAYGTQRDYLDHPDVIGWTREGDGVHADSGLATLMSDGPGGSKWMEVGKNNAGEVWYDITGNQTNTVTINKDGWGQFHVSGGSVSIYVQQ

SEQ ID NO: 25661 - protein, 483 aa, Bacillus licheniformis
HHNGTNGTMMQYFEWYLPNDGNHWNRLRSDASNLKDKGITAVWIPPAWKGASQNDVGYGAYDLYDLGEFNQKGTVRTKYGTRNQLQAAVTALKSNGIQVYGDVVMNHKGGADATEWVRAVEVNPSNRNQEVSGDYTIEAWTKFDFPGRGNTHSNFKWRWYHFDGVDWDQSRQLQNRIYKFRGKGWDWEVDTENGNYDYLMYADIDMDHPEVVNELRNWGVWYTNTLGLDGFRIDAVKHIKYSFTRDWLTHVRNTTGKNMFAVAEFWKNDIGAIENYLSKTNWNHSVFDVPLHYNLYNASRSGGNYDMRQIFNGTVVQRHPTHAVTFVDNHDSQPEEALESFVEEWFKPLAYALTLTRDQGNPSVFYGDYYGIPTHGVPAMKSKIDPILEARQKYAYGTQRDYLDHPDVIGWTREGDGVHADSGLATLMSDGPGGSKWMEVGKNNAGEVWYDITGNQTNTVTINKDGWGQFHVSGGSVSIYVQQ

SEQ ID NO: 25662 - protein, 483 aa, Bacillus licheniformis
HHNGTNGTMMQYFEWYLPNDGNHWNRLRSDASNLKDKGITAVWIPPAWKGASQNDVGYGAYDLYDLGEFNQKGTVRTKYGTRNQLQAAVTALKSNGIQVLGDVVMNHKGGADATEWVRAVEVNPSNRNQEVSGDYTIEAWTKFDFPGRGNTHSNFKWRWYHFDGVDWDQSRQLQNRIYKFRGKGWDWEVDTENGNYDYLMYADIDMDHPEVVNELRNWGVWYTNTLGLDGFRIDAVKHIKYSFTRDWLTHVRNTTGKNMFAVAEFWKNDIGAIENYLSKTNWNHSVFDVPLHYNLYNASRSGGNYDMRQIFNGTVVQRHPTHAVTFVDNHDSQPEEALESFVEEWFKPLAYALTLTRDQGYPSVFYGDYYGIPTHGVPAMKSKIDPILEARQKYAYGTQRDYLDHPDVIGWTREGDGVHADSGLATLMSDGPGGSKWMEVGKNNAGEVWYDITGNQTNTVTINKDGWGQFHVSGGSVSIYVQQ

SEQ ID NO: 25663 - protein, 483 aa, Bacillus licheniformis
HHNGTNGTMMQYFEWYLPNDGNHWNRLRSHASNLKDKGITAVWIPPAWKGASQNDVGYGAYDLYDLGEFNQKGTVRTKYGTRNQLQAAVTALKSNGIQVYGDVVMNHKGGADATEWVRAVEVNPSNRNQEVSGDYTIEAWTKFDFPGRGNTHSNFKWRWYHFDGVDWDQSRQLQNRIYKFRGKGWDWEVDTENGNYDYLMYADIDMDHPEVVNELRNWGVWYTNTLGLDGFRIDAVKHIKYSFTRDWLTHVRNTTGKNMFAVAEFWKNDIGAIENYLSKTNWNHSVFDVPLHYNLYNASRSGGNYDMRQIFNGTVVQRHPTHAVTFVDNHDSQPEEALESFVEEWFKPLAYALTLTRDQGYPSVFYGDYYGIPTHGVPAMKSKIDPILEARQKYAYGTQRDYLDHPDVIGWTREGDGVHADSGLATLMSDGPGGSKWMEVGKNNAGEVWYDITGNQTNTVTINKDGWGQFHVSGGSVSIYVQQ

SEQ ID NO: 25664 - protein, 483 aa, Bacillus licheniformis
HHNGTNGTMMQYFEWYLPNDGNHWNRLRSDASNLKDKGITAVWIPPAWKGASQNDVGYGAYDLYDLGEFNQKGTVRTKYGTRNQLQAAVTALKSNGIQVYGDVVMNHKGGADATEWVRAVEVNPSNRNQEVSGDYTIEAWTKFDFPGRGNTHSNFKWRWYHFDGVDWDQSRQLQNRIYKFRGKGWDWEVDTENGNYDYLMYADIDMDHPEVVNELRNWGVWYTNTLGLDGFRIDAVKHIKYSFTRDWLTHVRNTTGKNMFAVAEFWKNDIGAIENYLSKTNWNHSVFDVPLHYNLYNASRSGGNYDMRQIFNGTVLQRHPTHAVTFVDNHDSQPEEALESFVEEWFKPLAYALTLTRDQGYPSVFYGDYYGIPTHGVPAMKSKIDPILEARQKYAYGTQRDYLDHPDVIGWTREGDGVHADSGLATLMSDGPGGSKWMEVGKNNAGEVWYDITGNQTNTVTINKDGWGQFHVSGGSVSIYVQQ

SEQ ID NO: 25665 - protein, 483 aa, Bacillus licheniformis
HHNGTNGTMMQYFEWYLPNDGNHWNRLRSDASNLKDKGITAVWIPPAWKGASQNDVGYGAYDLYDLGEFNQKGTVRTKYGTRNQLQAAVTALKSNGIQVYGDVVMNHKGGADATEWVRAVEVNPSNRNQEVSGDYTIEAWTKFDFPGRGNTHSNFKWRWYHFDGVDWDQSRQLQNRIYKFRGKEWDWEVDTENGNYDYLMYADIDMDHPEVVNELRNWGVWYTNTLGLDGFRIDAVKHIKYSFTRDWLEHVRNTTGKNMFAVAEFWKNDIGAIENYLSKTNWNHSVFDVPLHYNLYNASRSGGNYDMRQIFNGTVVQRHPTHAVTFVDNHDSQPEEALESFVEEWFKPLAYALTLTRDQGYPSVFYGDYYGIPTHGVPAMKSKIDPILEARQKYAYGTQRDYMDHPDVIGWTREGDGVHADSGLATLMSDGPGGSKWMEVGKNNAGEVWYDITGNQTNTVTINKDGWGQFHVSGGSVSIYVQQ

SEQ ID NO: 25666 - protein, 483 aa, Bacillus licheniformis
HHNGTNGTMMQYFEWYLPNDGNHWNRVRSDASNLKDKGITAVWIPPAWKGASQNDVGYGAYDLYDLGEFNQKGTVRTKYGTRNQLQAAVTALKSNGIQVYGDVVMNHKGGADATEWVRAVEVNPSNRNQEVSGDYTIEAWTKFDFPGRGNTHSNFKWRWYHFDGVDWDQSRQLQNRIYKFRGKGWDWEVDTENGNYDYLMYADIDMDHPEVVNELRNWGVWYTNTLGLDGFRIDAVKHIKYSFTRDWLTHVRNTTGKNMFAVAEFWKNDIGAIENYLSKTNWNHSVFDVPLHYNLYNASRSGGNYDMRQIFNGTVVQRHPTHAVTFVDNHDSQPEEALESFVEEWFKPLAYALTLTRDQGYPSVFYGDYYGIPTHGVPAMKSKIDPILEARQKYAYGTQRDYLDHPDVIGWTREGDGVHADSGLATLMSDGPGGSKWMEVGKNNAGEVWYDITGNQTNTVTINKDGWGQFHVSGGSVSIYVQQ

SEQ ID NO: 25667 - protein, 483 aa, Bacillus licheniformis
HHNGTNGTMMQYFEWYLPNDGNHWNRLRSDASNLKDKGITAVWIPPAWKGASQNDVGYGAYDLYDLGEFNQKGTVRTKYGTRNQLQAAVTALKSNGIQVYGDVVMNHKGGADATEWVRAVEVNPSNRNQEVSGDYTIEAWTKFDFPGRGNTHSNFKWRWYHFDGVDWDQSRQLQNRIYKFRGKGWDWEVDTENGNYDYLMYADIDMDHPEVVNELRNWGVWYTNTLGLDGFRIDAVKHIKYSFTRDWLTHVRNTTGKNMFAVAEFWKNDIGAIENYLSKTNWNHSVFDVPLHYNLYNASRSGGNYDMRQIFNGTVSQRHPTHAVTFVDNHDSQPEEALESFVEEWFKPLAYALTLTRDQGYPSVFYGDYYGIPTHGVPAMKSKIDPILEARQKYAYGTQRDYLDHPDVIGWTREGDGVHADSGLATLMSDGPGGSKWMEVGKNNAGEVWYDITGNQTNTVTINKDGWGQFHVSGGSVSIYVQQ

SEQ ID NO: 25668 - protein, 483 aa, Bacillus licheniformis
HHNGTNGTMMQYFEWYLPNDGNHWNRLRSDASNLKDKGITAVWIPPAWKGASQNDVGYGAYDLYDLGEFNQKGTVRTKYGTRNQLQAAVTALKSNGIQVYGDVVMNHKGGADATEWVRAVEVNPSNRNQEVSGDYTIEAWTKFDFPGRGNTHSNFKWRWYHFDGVDWDQSRQLQNRIYKFRGKGWDWEVDTENGNYDYLMYADIDMDHPEVVNELRNWGVWYTNTLGLDGFRIDAVKHIKYSFTRDWLTHVRNTYGKNMFAVAEFWKNDIGAIENYLSKTNWNHSVFDVPLHYNLYNASRSGGNYDMRQIFNGTVVQRHPTHAVTFVDNHDSQPEEALESFVEEWFKPLAYALTLTRDQGYPSVFYGDYYGIPTHGVPAMKSKIDPILEARQKYAYGTQRDYLDHPDVIGWTREGDGVHADSGLATLMSDGPGGSKWMEVGKNNAGEVWYDITGNQTNTVTINKDGWGQFHVSGGSVSIYVQQ

SEQ ID NO: 25669 - protein, 483 aa, Bacillus licheniformis
HHNGTNGTMMQYFEWYLPNDGNHWNRLRSDASNLKDKGITAVWIPPAWKGASQNDVGYGAYDLYDLGEFNQKGTVRTKYGTRNQLQAAVTALKSNGIQVYGDVVMNHKGGADYTEWVRAVEVNPSNRNQEVSGDYTIEAWTKFDFPGRGNTHSNFKWRWYHFDGVDWDQSRQLQNRIYKFRGKGWDWEVDTENGNYDYLMYADIDMDHPEVVNELRNWGVWYTNTLGLDGFRIDAVKHIKYSFTRDWLTHVRNTTGKNMFAVAEFWKNDIGAIENYLSKTNWNHSVFDVPLHYNLYNASRSGGNYDMRQIFNGTVVQRHPTHAVTFVDNHDSQPEEALESFVEEWFKPLAYALTLTRDQGYPSVFYGDYYGIPTHGVPAMKSKIDPILEARQKYAYGTQRDYLDHPDVIGWTREGDGVHADSGLATLMSDGPGGSKWMEVGKNNAGEVWYDITGNQTNTVTINKDGWGQFHVSGGSVSIYVQQ

SEQ ID NO: 25670 - protein, 483 aa, Bacillus licheniformis
HHNGTNGTMMQYFEWYLPNDGNHWNRLRSDASNLKDKGITAVWIPPAWKGASQNDVGYGAYDLYDLGEFNQKGTVRTKYGTRNQLQAAVTALKSNGIQVYGDVVMNHKGGADATEWVRAVEVNPSNRNQEVSGDYTIEAWTKFDFPGRGNTHSNFKWRWYHFDGVDWDQSRQLQNRIYKFRGKGWDWEVDTENGNYDYLMYADIDMDHPEVVNELRNWGVWYTNTLGLDGFRIDAVKHIKYSFTRDWLTHVRNTTGKNMFAVAEFWKNDIGAIENYLSKTNWNHSVFDVYLHYNLYNASRSGGNYDMRQIFNGTVVQRHPTHAVTFVDNHDSQPEEALESFVEEWFKPLAYALTLTRDQGYPSVFYGDYYGIPTHGVPAMKSKIDPILEARQKYAYGTQRDYLDHPDVIGWTREGDGVHADSGLATLMSDGPGGSKWMEVGKNNAGEVWYDITGNQTNTVTINKDGWGQFHVSGGSVSIYVQQ

SEQ ID NO: 25671 - protein, 483 aa, Bacillus licheniformis
HHNGTNGTMMQYFEWYLPNDGNHWNRLRSDASNLKDKGITAVWIPPAWKGASQNDVGYGAYDLYDLGEFNQKGTVRTKYGTREQLQAAVTALKSNGIQVYGDVVMNHKGGADATEWVRAVEVNPSNRNQEVSGDYTIEAWTKFDFPGRGNTHSNFKWRWYHFDGVDWDQSRQLQNRIYKFEGKGWDWEVDTENGNYDYLMYADIDMDHPEVVNELRNWGVWYTNTLGLDGFRIDAVKHIKYSFTRDWLTHVRNTTGKNMFAVAEFWKNDIGAIENYLSKTNWNHSVFDVPLHYNLYNASRSGGNYDMRQIFNGTVVQRHPTHAVTFVDNHDSQPEEALESFVEEWFKPLAYALTLTRDQGYPSVFYGDYYGIPTHGVPAMKSKIDPILEARQKYAYGTQRDYLDHPDVIGWTREGDGVHADSGLATLMSDGPGGSKWMEVGKNNAGEVWYDITGNQTNTVTINKDGWGQFHVSGGSVSIYVQQ

SEQ ID NO: 25672 - protein, 483 aa, Bacillus licheniformis
HHNGTNGTMMQYFEWYLPNDGNHWNRLRSDASNLKDKGITAVWIPPAWKGASQNDVGYGAYDLYDLGEFNQKGTVRTKYGTRNQLQAAVTALKSNGIQVYGDVVMNHKGGADATEWVRAVEVNPSNRNQEVSGDYTIEAWTKFDFPGRGNTHSNFKWRWYHFDGVDWDQSRQLQNRIYKFRGKGWDWEVDTENGNYDYLMYADIDMDHPEVVNELRNWGVWYTNTLGLDGFRIDAVKHIKYSFTRDWLTIVRNTTGKNMFAVAEFWKNDIGAIENYLSKTNWNHSVFDVPLHYNLYNASRSGGNYDMRQIFNGTVVQRHPTHAVTFVDNHDSQPEEALESFVEEWFKPLAYALTLTRDQGYPSVFYGDYYGIPTHGVPAMKSKIDPILEARQKYAYGTQRDYLDHPDVIGWTREGDGVHADSGLATLMSDGPGGSKWMEVGKNNAGEVWYDITGNQTNTVTINKDGWGQFHVSGGSVSIYVQQ

SEQ ID NO: 25673 - protein, 483 aa, Bacillus licheniformis
HHNGTNGTMMQYFEWYLPNDGNHWNRLRSDASNLKDKGITQVWIPPAWKGASQNDVGYGAYDLYDLGEFNQKGTVRTKYGTRNQLQAAVTALKSNGIQVYGDVVMNHKGGADATEWVRAVEVNPSNRNQEVSGDYTIEAWTKFDFPGRGNTHSNFKWRWYHFDGVDWDQSRQLQNRIYKFRGKGWDWEVDTENGNYDYLMYADIDMDHPEVVNELRNWGVWYTNTLGLDGFRIDAVKHIKYSFTRDWLTHVRNTTGKNMFAVAEFWKNDIGAIENYLSKTNWNHSVFDVPLHYNLYNASRSGGNYDMRQIFNGTVVQRHPTHAVTFVDNHDSQPEEALESFVEEWFKPLAYALTLTRDQGYPSVFYGDYYGIPTHGVPAMKSKIDPILEARQKYAYGTQRDYLDHPDVIGWTREGDGVHADSGLATLMSDGPGGSKWMEVGKNNAGEVWYDITGNQTNTVTINKDGWGQFHVSGGSVSIYVQQ

SEQ ID NO: 25674 - protein, 483 aa, Bacillus licheniformis
HHNGTNGTMMQYFEWYLPNDGNHWNRLRSDQSNLKDKGITAVWIPPAWKGASQNDVGYGAYDLYDLGEFNQKGTVRTKYGTRNQLQAAVTALKSNGIQVYGDVVMNHKGGADATEWVRAVEVNPSNRNQEVSGDYTIEAWTKFDFPGRGNTHSNFKWRWYHFDGVDWDQSRQLQNRIYKFRGKGWDWEVDTENGNYDYLMYADIDMDHPEVVNELRNWGVWYTNTLGLDGFRIDAVKHIKYSFTRDWLTHVRNTTGKNMFAVAEFWKNDIGAIENYLSKTNWNHSVFDVPLHYNLYNASRSGGNYDMRQIFNGTVVQRHPTHAVTFVDNHDSQPEEALESFVEEWFKPLAYALTLTRDQGYPSVFYGDYYGIPTHGVPAMKSKIDPILEARQKYAYGTQRDYLDHPDVIGWTREGDGVHADSGLATLMSDGPGGSKWMEVGKNNAGEVWYDITGNQTNTVTINKDGWGQFHVSGGSVSIYVQQ

SEQ ID NO: 25675 - protein, 483 aa, Bacillus licheniformis
HHNGTNGTMMQYFEWYLPNDGNHWNRLRSDASNLKDKGITAVWIPPAWKGASQNDVGYGAYDLYDLGEFNQKGTVRTKYGTRNQLQAAVTALKSNGIQVYGDVVMNHKGGADATEWVRAVEVNPSNRNQEVSGDYWIEAWTKFDFPGRGNTHSNFKWRWYHFDGVDWDQSRQLQNRIYKFRGKGWDWEVDTENGNYDYLMYADIDMDHPEVVNELRNWGVWYTNTLGLDGFRIDAVKHIKYSFTRDWLTHVRNTTGKNMFAVAEFWKNDIGAIENYLSKTNWNHSVFDVPLHYNLYNASRSGGNYDMRQIFNGTVVQRHPTHAVTFVDNHDSQPEEALESFVEEWFKPLAYALTLTRDQGYPSVFYGDYYGIPTHGVPAMKSKIDPILEARQKYAYGTQRDYLDHPDVIGWTREGDGVHADSGLATLMSDGPGGSKWMEVGKNNAGEVWYDITGNQTNTVTINKDGWGQFHVSGGSVSIYVQQ

SEQ ID NO: 25676 - protein, 483 aa, Bacillus licheniformis
HHNGTNGTMMQYFEWYLPNDGNHWNRLRSDASNLKDKGITAVWIPPAWKGASQNDVGYGAYDLYDLGEFNQKGTVRTKYGTRNQLQAAVTALKSNGIQVYGDVVMNHKGGADATEWVRAVEVNPSNRNQEVSGDYTIEAWTKFDFPGRGNTHSNFKWRWYHFDGVDWDQSRQLQNRIYKFRGKGWDWEVDTENGNYDYLMYADIDMDHPEVVNELRNWGVWYTNTLGLDGFRIDAVKHIKYSFTRDWLTHVRNTTGKNMFAVAEFWKNDIGAIENYLSKTNWNHSVFDVPLHYNLYNASRSGGNYDMRQIFSGTVVQRHPTHAVTFVDNHDSQPEEALESFVEEWFKPLAYALTLTRDQGYPSVFYGDYYGIPTHGVPAMKSKIDPILEARQKYAYGTQRDYLDHPDVIGWTREGDGVHADSGLATLMSDGPGGSKWMEVGKNNAGEVWYDITGNQTNTVTINKDGWGQFHVSGGSVSIYVQQ

SEQ ID NO: 25677 - protein, 483 aa, Bacillus licheniformis
HHNGTNGTMMQYFEWYLPNDGNHWHRLRSDASNLKDKGITAVWIPPAWKGASQNDVGYGAYDLYDLGEFNQKGTVRTKYGTRNQLQAAVTALKSNGIQVYGDVVMNHKGGADATEWVRAVEVNPSNRNQEVSGDYTIEAWTKFDFPGRGNTHSNFKWRWYHFDGVDWDQSRQLQNRIYKFRGKEWDWEVDTENGNYDYLMYADIDMDHPEVVNELRNWGVWYTNTLGLDGFRIDAVKHIKYSFTRDWLEHVRNTTGKNMFAVAEFWKNDIGAIENYLSKTNWNHSVFDVPLHYNLYNASRSGGNYDMRQIFNGTVVQRHPTHAVTFVDNHDSQPEEALESFVEEWFKPLAYALTLTRDQGYPSVFYGDYYGIPTHGVPAMKSKIDPILEARQKYAYGTQRDYLDHPDVIGWTREGDGVHADSGLATLMSDGPGGSKWMEVGKNNAGEVWYDITGNQTNTVTINKDGWGQFHVSGGSVSIWVQQ

SEQ ID NO: 25678 - protein, 483 aa, Bacillus licheniformis
HHNGTNFTMMQYFEWYLPNDGNHWNRLRSDASNLKDKGITAVWIPPAWKGASQNDVGYGAYDLYDLGEFNQKGTVRTKYGTRNQLQAAVTALKSNGIQVYGDVVMNHKGGADATEWVRAVEVNPSNRNQEVSGDYTIEAWTKFDFPGRGNTHSNFKWRWYHFDGVDWDQSRQLQNRIYKFRGKGWDWEVDTENGNYDYLMYADIDMDHPEVVNELRNWGVWYTNTLGLDGFRIDAVKHIKYSFTRDWLTHVRNTTGKNMFAVAEFWKNDIGAIENYLSKTNWNHSVFDVPLHYNLYNASRSGGNYDMRQIFNGTVVQRHPTHAVTFVDNHDSQPEEALESFVEEWFKPLAYALTLTRDQGYPSVFYGDYYGIPTHGVPAMKSKIDPILEARQKYAYGTQRDYLDHPDVIGWTREGDGVHADSGLATLMSDGPGGSKWMEVGKNNAGEVWYDITGNQTNTVTINKDGWGQFHVSGGSVSIYVQQ

SEQ ID NO: 25679 - protein, 483 aa, Bacillus licheniformis
HHNGTNGTMMQYFEWYLPNDGNHWNRLRSDASNLKDKGITAVWIPPAWKGASQNDVGYGAYDLYDLGEFNQKGTVRTKYGTRNQLQAAVTALKSNGIQVYGDVVMNHKGGADATEWVRAVEVNPSNRNQEVSGDYTIEAWTKFDFPGRGNTHSNFKWRWYHFDGVDWDQSRQLQNRIYKFRGKGWDWEVDTENGNYDYLMYADIDMDHPEVVNELRNWGVWYTNTLGLDGFRIDAVKHIKYSFTRDWLTHVRNTTGKNMFAVAEFWKNDIGAIENYLSKTNWNHSVFDVPLHYNLYNASRSGGNYDMRQIFNGTVVQRHPTHAVTFVDNHDSQPEEALESFVEEWFKPLAYALTLTRDQGYPSVFYGDYYGIPTHGVPAMKSKIDPILEARQKYAYGTQRDYLDHPDVIGWTREGDGVHADSGLATLMSDGPGGSKWMEVGKNNAGEVWYDITGCQTNTVTINKDGWGQFHVSGGSVSIYVQQ

SEQ ID NO: 25680 - protein, 483 aa, Bacillus licheniformis
HHNGTNGTMMQYFEWYLPNDGNHWNRLRSDASNLKDKGITAVWIPPAWKGASQNDVGYGAYDLYDLGEFNQKGTVRTKYGTRNQLQAAVTQLKSNGIQVYGDVVMNHKGGADATEWVRAVEVNPSNRNQEVSGDYTIEAWTKFDFPGRGNTHSNFKWRWYHFDGVDWDQSRQLQNRIYKFRGKGWDWEVDTENGNYDYLMYADIDMDHPEVVNELRNWGVWYTNTLGLDGFRIDAVKHIKYSFTRDWLTHVRNTTGKNMFAVAEFWKNDIGAIENYLSKTNWNHSVFDVPLHYNLYNASRSGGNYDMRQIFNGTVVQRHPTHAVTFVDNHDSQPEEALESFVEEWFKPLAYALTLTRDQGYPSVFYGDYYGIPTHGVPAMKSKIDPILEARQKYAYGTQRDYLDHPDVIGWTREGDGVHADSGLATLMSDGPGGSKWMEVGKNNAGEVWYDITGNQTNTVTINKDGWGQFHVSGGSVSIYVQQ

SEQ ID NO: 25681 - protein, 483 aa, Bacillus licheniformis
HHNGTNGTMMQYFEWYLPNDGNHWNRLRSDASNLKDKGITAVWIPPAWKGASQNDVGYGAYDLYDLGEFNQKGTVRTKYGTRNQLQAAVTALKSNGIQVYGDVVMNHKGGADATEWVRAVEVNPSNRNQEVSGDYTIEAWTKFDFPGRGNTHSNFKWRWYHFDGVDWDQSRQLQNRIYKFRGKGWDWEVDTENGNYDYLMYADIDMDHPEVVNELRNWGVWYTNTLGLDGFRIDAVKHIKYSFTRDWLTHVRNTTGKNMFAVAEFWKNDIGAIENYLSKTNWNHSVFDVPLHYNLYNASRSGGNYDMRQIFNGTVVQRHPTHAVTFVDNHDSQKEEALESFVEEWFKPLAYALTLTRDQGYPSVFYGDYYGIPTHGVPAMKSKIDPILEARQKYAYGTQRDYLDHPDVIGWTREGDGVHADSGLATLMSDGPGGSKWMEVGKNNAGEVWYDITGNQTNTVTINKDGWGQFHVSGGSVSIYVQQ

SEQ ID NO: 25682 - protein, 483 aa, Bacillus licheniformis
HHNGTNGTMMQYFEWYLPNDGNHWNRLRSDASNLKDKGITAVWIPPAWKGASQNDVGYGAYDLYDLGEFNQKGTVVTKYGTRNQLQAAVTALKSNGIQVYGDVVMNHKGGADATEWVRAVEVNPSNRNQEVSGDYTIEAWTKFDFPGRGNTHSNFKWRWYHFDGVDWDQSRQLQNRIYKFRGKGWDWEVDTENGNYDYLMYADIDMDHPEVVNELRNWGVWYTNTLGLDGFRIDAVKHIKYSFTRDWLTHVRNTTGKNMFAVAEFWKNDIGAIENYLSKTNWNHSVFDVPLHYNLYNASRSGGNYDMRQIFNGTVVQRHPTHAVTFVDNHDSQPEEALESFVEEWFKPLAYALTLTRDQGYPSVFYGDYYGIPTHGVPAMKSKIDPILEARQKYAYGTQRDYLDHPDVIGWTREGDGVHADSGLATLMSDGPGGSKWMEVGKNNAGEVWYDITGNQTNTVTINKDGWGQFHVSGGSVSIYVQQ

SEQ ID NO: 25683 - protein, 483 aa, Bacillus licheniformis
HHNGTNGTMMQYFEWYLPNDGNHWNRLRSDASNLKDKGITAVWIPPAWKGASQNDVGYGAYDLYDLGEFNQKGTVRTKYGTRNQLQAAVTALKSNGIQVYGDVVMNHKGGADATEWVRAVEVNPSNRNQEVSGDYTIEAWTKFDFPGRGNTHSNFKWRWYHFDGVDWDQSRQLQNRIYKFRGKGWDWEVDTENGNYDYLMYADIDMDHPEVVNELRNWGVWYTNTLGLDGFRIDAVKHIKYSFTRDWLTHVRNTTGKNMFAVAEFWKNDIGAIENYLSKTNWNHSVFDVPLHYNLYNASRSGGNYDMRQIFNGTVVQRHPTHAVTFVDNHDSQPEEALESFVEEWFKPLAHALTLTRDQGYPSVFYGDYYGIPTHGVPAMKSKIDPILEARQKYAYGTQRDYLDHPDVIGWTREGDGVHADSGLATLMSDGPGGSKWMEVGKNNAGEVWYDITGNQTNTVTINKDGWGQFHVSGGSVSIYVQQ

SEQ ID NO: 25684 - protein, 483 aa, Bacillus licheniformis
HHNGTNGTMMQYFEWYLPNKGNHWNRLRSDASNLKDKGITAVWIPPAWKGASQNDVGYGAYDLYDLGEFNQKGTVRTKYGTRNQLQAAVTALKSNGIQVYGDVVMNHKGGADATEWVRAVEVNPSNRNQEVSGDYTIEAWTKFDFPGRGNTHSNFKWRWYHFDGVDWDQSRQLQNRIYKFRGKGWDWEVDTENGNYDYLMYADIDMDHPEVVNELRNWGVWYTNTLGLDGFRIDAVKHIKYSFTRDWLTHVRNTTGKNMFAVAEFWKNDIGAIENYLSKTNWNHSVFDVPLHYNLYNASRSGGNYDMRQIFNGTVVQRHPTHAVTFVDNHDSQPEEALESFVEEWFKPLAYALTLTRDQGYPSVFYGDYYGIPTHGVPAMKSKIDPILEARQKYAYGTQRDYLDHPDVIGWTREGDGVHADSGLATLMSDGPGGSKWMEVGKNNAGEVWYDITGNQTNTVTINKDGWGQFHVSGGSVSIYVQQ

SEQ ID NO: 25685 - protein, 483 aa, Bacillus licheniformis
HHNGTNGTMMQYFEWYLPNDGNHWNRLRSDASNLKDKGITAVWIPPAWKGASQNDVGYGAYDLYDLGEFNQKGTVRTKYGTRNQLQAAVTALKSNGIQVYGDVVMNHKGGADATEWVRAVEVNPSNRNQEVSGDYTIEAWTKFDFPGRGNTHSNFKWRWYHFDGVDWDQSRQLQNKIYKFRGKGWDWEVDTENGNYDYLMYADYDMDHPEVVNELRNWGVWYTNTLGLDGFRIDAVKHIKYSFTRDWLTHVRNTTGKNMFAVAEFWKNDIGAIENYLSKTNWNHSVFDVPLHYNLYNASRSGGNYDMRQIFNGTVVQRHPTHAVTFVDNHDSQPEEALESFVEEWFKPLAYALTLTRDQGYPSVFYGDYYGIPTHGVPAMKSKIDPILEARQKYAYGTQRDYLDHPDVIGWTREGDGVHADSGLATLMSDGPGGSKWMEVGKNNAGEVWYDITGNQTNTVTINKDGWGQFHVSGGSVSIYVQQ

SEQ ID NO: 25686 - protein, 483 aa, Bacillus licheniformis
HHNGTNGTMMQYFEWYLPNDGNHWNRLRSDASNLKDKGITAVWIPPAWKGASQNDVGYGAYDLYDLGEFNQKGTVRTKYGTRNQLQAAVTALKSNGIQVYGDVVMNHKGGADATEWVRAVEVNPSNRNQEVSGDYTIEAWTKFDFPGRGNTHSNFKWRWYHFDGVDWDQSRQLQNRIYKFRGKGWDWEVDTENGNYDYLMYADIDMDHPEVVNELRNWGVWYTNTLGLDGFRIDAVKHIKYSFTRDWLTHVRNTTGKNMFAVAEFWKNDIGAIENYLSKTNWNHSVFDVPLHYNLYNASRSGGNYDMRQIFNGTVVQRHPTHAVTFVDNHDSQPEEALESFVEEWFKPLAYALTLTRDQKYPSVFYGDYYGIPTHGVPAMKSKIDPILEARQKYAYGTQRDYLDHPDVIGWTREGDGVHADSGLATLMSDGPGGSKWMEVGKNNAGEVWYDITGNQTNTVTINKDGWGQFHVSGGSVSIYVQQ

SEQ ID NO: 25687 - protein, 483 aa, Bacillus licheniformis
HHNGTNGTMMQYFEWYLPNDGNHWNRLRSDASNLKDKGITAVWIPPAWKGASQNDVGYGAYDLYDLGEFNQKGTVRTKYGTRNQLQAAVTALKSNGIQVYGDVVMNHKGGADATEWVRAVEVNPSNRNQEVSGDYTIEAWTLFDFPGRGNTHSNFKWRWYHFDGVDWDQSRQLQNRIYKFRGKGWDWEVDTENGNYDYLMYADIDMDHPEVVNELRNWGVWYTNTLGLDGFRIDAVKHIKYSFTRDWLTHVRNTTGKNMFAVAEFWKNDIGAIENYLSKTNWNHSVFDVPLHYNLYNASRSGGNYDMRQIFNGTVVQRHPTHAVTFVDNHDSQPEEALESFVEEWFKPLAYALTLTRDQGYPSVFYGDYYGIPTHGVPAMKSKIDPILEARQKYAYGTQRDYLDHPDVIGWTREGDGVHADSGLATLMSDGPGGSKWMEVGKNNAGEVWYDITGNQTNTVTINKDGWGQFHVSGGSVSIYVQQ

SEQ ID NO: 25688 - protein, 483 aa, Bacillus licheniformis
HHNGTNGTMMQYFEWYLPNDGNHWNRLRSDASNLKDKGITAVWIPPAWKGASQNDVGYGAYDLYDLGEFNQKGTVRTKYGTRNQLQAAVTALKSNGIQVYGDVVMNHKGGADATEWVRAVEVNPSNRNQEVSGDYTIEAWTKFDFPGRGNTHSNFKWRWYHFDGVDWDQSRQLQNRIYKFRGKGWDWEVDTENGNYDYLMYADIDMDHPEVVNELRNWGVWYTNTLGLCGFRIDAVKHIKYSFTRDWLTHVRNTTGKNMFAVAEFWKNDIGAIENYLSKTNWNHSVFDVPLHYNLYNASRSGGNYDMRQIFNGTVVQRHPTHAVTFVDNHDSQPEEALESFVEEWFKPLAYALTLTRDQGYPSVFYGDYYGIPTHGVPAMKSKIDPILEARQKYAYGTQRDYLDHPDVIGWTREGDGVHADSGLATLMSDGPGGSKWMEVGKNNAGEVWYDITGNQTNTVTINKDGWGQFHVSGGSVSIYVQQ

SEQ ID NO: 25689 - protein, 483 aa, Bacillus licheniformis
HHNGTNGTMMQYFEWYLPNDGNHWNRLRSDASNLKDKGITAVWIPPAWKGASQNDVGYGAYDLYDLGEFNQKGTVRTKYGTRNQLQAAVTALKSNGIQVYGDVVMNHKGGADATEWVRAVEVNPSNRNQEVSGDYTIEAWTKFDFPGRGNTHSNFKWRWYHFDGWDWDQSRQLQNRIYKFRGKGWDWEVDTENGNYDYLMYADIDMDHPEVVNELRNWGVWYTNTLGLDGFRIDAVKHIKYSFTRDWLTHVRNTTGKNMFAVAEFWKNDIGAIENYLSKTNWNHSVFDVPLHYNLYNASRSGGNYDMRQIFNGTVVQRHPTHAVTFVDNHDSQPEEALESFVEEWFKPLAYALTLTRDQGYPSVFYGDYYGIPTHGVPAMKSKIDPILEARQKYAYGTQRDYLDHPDVIGWTREGDGVHADSGLATLMSDGPGGSKWMEVGKNNAGEVWYDITGNQTNTVTINKDGWGQFHVSGGSVSIYVQQ

SEQ ID NO: 25690 - protein, 483 aa, Bacillus licheniformis
HHNGTNGTMMQYFEWYLPNDGNHWNRLRSDASNLKDKGITAVWIPPAWKGASQNDVGYGAYDLYDLGEFNQKGTVRTKYGTRNQLQAAVTALKSNGIQVYGDVVMNHKGGADATEWVRAVEVNPSNRNQEVSGDYTIEAWTKFDFPGRGNTHSNFKWRWYHFDGVDWDQSRQLQNRIYKFRGKGWDWEVDTENGNYDYLMYADIDMDHPEVVNELRNWGVWYTNCLGLDGFRIDAVKHIKYSFTRDWLTHVRNTTGKNMFAVAEFWKNDIGAIENYLSKTNWNHSVFDVPLHYNLYNASRSGGNYDMRQIFNGTVVQRHPTHAVTFVDNHDSQPEEALESFVEEWFKPLAYALTLTRDQGYPSVFYGDYYGIPTHGVPAMKSKIDPILEARQKYAYGTQRDYLDHPDVIGWTREGDGVHADSGLATLMSDGPGGSKWMEVGKNNAGEVWYDITGNQTNTVTINKDGWGQFHVSGGSVSIYVQQ

SEQ ID NO: 25691 - protein, 483 aa, Bacillus licheniformis
HHNGTNGTMMQYFEWYLPNDGNHWNRLRSDASNLKDKGITAVWIPPAWKGASQNDVGYGTYDLYDLGEFNQKGTVRTKYGTRNQLQAAVTALKSNGIQVYGDVVMNHKGGADATEWVRAVEVNPSNRNQEVSGDYTIEAWTKFDFPGRGNTHSNFKWRWYHFDGVDWDQSRQLQNRIYKFRGKGWDWEVDTENGNYDYLMYADIDMDHPEVVNELRNWGVWYTNTLGLDGFRIDAVKHIKYSFTRDWLTHVRNTTGKNMFAVAEFWKNDIGAIENYLSKTNWNHSVFDVPLHYNLYNASRSGGNYDMRQIFNGTVVQRHPTHAVTFVDNHDSQPEEALESFVEEWFKPLAYALTLTRDQGYPSVFYGDYYGIPTHGVPAMKSKIDPILEARQKYAYGTQRDYLDHPDVIGWTREGDGVHADSGLATLMSDGPGGSKWMEVGKNNAGEVWYDITGNQTNTVTINKDGWGQFHVSGGSVSIYVQQ

SEQ ID NO: 25692 - protein, 483 aa, Bacillus licheniformis
HHNGTNGTMMQYFEWYLPNDGNHWNRLRSDASNLKDKGITAVWIPPAWKGASQNDVGYGAYDLYDLGEFNQKGTVRTKYGTRNQLQAAVTALKSNGIQVYGDVVMNHKGGADATEWVRAVEVNPSNRNQEVSGDYTIEAWTKFDFPGRGNTHSNFKWRWYHFDGVDWDQSRQLQNRIYKFRGKGWDWEVDTENGNYDYLMYADIDMDHPEVVNELYNWGVWYTNTLGLDGFRIDAVKHIKYSFTRDWLTHVRNTTGKNMFAVAEFWKNDIGAIENYLSKTNWNHSVFDVPLHYNLYNASRSGGNYDMRQIFNGTVVQRHPTHAVTFVDNHDSQPEEALESFVEEWFKPLAYALTLTRDQGYPSVFYGDYYGIPTHGVPAMKSKIDPILEARQKYAYGTQRDYLDHPDVIGWTREGDGVHADSGLATLMSDGPGGSKWMEVGKNNAGEVWYDITGNQTNTVTINKDGWGQFHVSGGSVSIYVQQ

SEQ ID NO: 25693 - protein, 483 aa, Bacillus licheniformis
HHNGTNGTMMQYFEWYLPNDGNHWHRLRSDASNLKDKGITAVWIPPAWKGASQNDVGYGAYDLYDLGEFNQKGTVRTKYGTRNQLQAAVTALKSNGIQVYGDVVMNHKGGADATEWVRAVEVNPSNRNQEVSGDYTIEAWTKFDFPGRGNTHSNFKWRWYHFDGVDWDQSRQLQNKIYKFRGKEWDWEVDEENGNYDYLMYADYDMDHPEVVNELRNWGVWYTNTLGLDGFRIDAVKHIKYSFTRDWLTHVRNTTGKNMFAVAEFWKNDIGAIENYLSKTNWNHSVFDVPLHYNLYNASRSGGNYDMRQIFNGTVVQRHPTHAVTFVDNHDSQPEEALESFVEEWFKPLAYALTLTRDQGYPSVFYGDYYGIPTHGVPAMKSKIDPILEARQKYAYGTQRDYLDHPDVIGWTREGDGVHADSGLATLMSDGPGGSKWMEVGKNNAGEVWYDITGNQTNTVTINKDGWGQFHVSGGSVSIWVQQ

SEQ ID NO: 25694 - protein, 483 aa, Bacillus licheniformis
HHNGTNGTMMQYFEWYLPNDGNHWNRLRSDASNLKDKGITAVWIPPAWKGASQNDVGYGAYDLYDLGEFNQKGTVRTKYGTRNQLQAAVTALKSNGIQVYGDVVMNHKGGADATEWVRAVEVNPSNRNQEVSGDYTIEAWTKFDFPGRGNTHSNFKWRWYHFDGVDWDQSRQLQNRIYKFRGKGWDWEVDTENGNYDYLMYADIDMDHPEVVNELRNWGVWYTNTLGLDGFRIDAVKHIKYSFTRDWLTHVRNTTGKNMFAVAEFWKNDIGAIENYLSKTNWNHSVFDVPLHYNLYNASRSGGNYDMRQIFNGTVVQRHPTHAVTFVDNHDSQPEEALESFVEEWFKPLAYALTLTRDQGYPSVFYGDYYGIPTHGVPAMKSKIDPILEARQKYAYGTQRDYLDHPDVIGWTREGDGVHADSGLVTLMSDGPGGSKWMEVGKNNAGEVWYDITGNQTNTVTINKDGWGQFHVSGGSVSIYVQQ

SEQ ID NO: 25695 - protein, 483 aa, Bacillus licheniformis
HHNGTNGTMMQYFEWYLPNDGNHWNRLRSDASNLKDKGITAVWIPPAWKGASQNDVGYGAYDLYDLGEFNQKGTVRTKYGTRNQLQAAVTALKSNGIQVYGDVVMNHKGGADATEWVRAVEVNPSNRNQEVSGDYTIEAWTKFDFPGRGNTHSNFKWRWYHFDGVDWDQSRQLQNRIYKFRGKGWDWEVDTENGNYDYLMYADIDMDHPEVVNELRNWGVWYTNTLGLDGFRIDATKHIKYSFTRDWLTHVRNTTGKNMFAVAEFWKNDIGAIENYLSKTNWNHSVFDVPLHYNLYNASRSGGNYDMRQIFNGTVVQRHPTHAVTFVDNHDSQPEEALESFVEEWFKPLAYALTLTRDQGYPSVFYGDYYGIPTHGVPAMKSKIDPILEARQKYAYGTQRDYLDHPDVIGWTREGDGVHADSGLATLMSDGPGGSKWMEVGKNNAGEVWYDITGNQTNTVTINKDGWGQFHVSGGSVSIYVQQ

SEQ ID NO: 25696 - protein, 483 aa, Bacillus licheniformis
HHNGTNGTMMQYFEWYLPNDGNHWNRLRSDASNLKDKGITAVWIPPAWKGASQNDVGYGAYDLYDLGEFNQKGTVRTKYGTRNQLQAAVTALKSNGIQVYGDVVMNHKGGADATEWVRAVEVNPSNRNQEVSGDYTIEAWTKFDFPGRGNTHSNFKWRWYHFDGVDWDQSRQLQNRIYKFRGKGWDWEVDTENGNYDYLMYADIDMDHPEVVNELRNWGVWYTNTLGLDGFRIDAVKHIKYSFTRDWLTHVRNTTGKNMFAVAEFWKNDIGAIENYLSKTNWNHSVFDVPLHYNLYNASRSGGNYDMRQIFNGTVVQRHPTHAVTFVDNHDSQPEEALESFVEDWFKPLAYALTLTRDQGYPSVFYGDYYGIPTHGVPAMKSKIDPILEARQKYAYGTQRDYLDHPDVIGWTREGDGVHADSGLATLMSDGPGGSKWMEVGKNNAGEVWYDITGNQTNTVTINKDGWGQFHVSGGSVSIYVQQ

SEQ ID NO: 25697 - protein, 483 aa, Bacillus licheniformis
HHNGTNGTMMQYFEWYLPNDGNHWNPLRSDASNLKDKGITAVWIPPAWKGASQNDVGYGAYDLYDLGEFNQKGTVRTKYGTRNQLQAAVTALKSNGIQVYGDVVMNHKGGADATEWVRAVEVNPSNRNQEVSGDYTIEAWTKFDFPGRGNTHSNFKWRWYHFDGVDWDQSRQLQNRIYKFRGKGWDWEVDTENGNYDYLMYADIDMDHPEVVNELRNWGVWYTNTLGLDGFRIDAVKHIKYSFTRDWLTHVRNTTGKNMFAVAEFWKNDIGAIENYLSKTNWNHSVFDVPLHYNLYNASRSGGNYDMRQIFNGTVVQRHPTHAVTFVDNHDSQPEEALESFVEEWFKPLAYALTLTRDQGYPSVFYGDYYGIPTHGVPAMKSKIDPILEARQKYAYGTQRDYLDHPDVIGWTREGDGVHADSGLATLMSDGPGGSKWMEVGKNNAGEVWYDITGNQTNTVTINKDGWGQFHVSGGSVSIYVQQ

SEQ ID NO: 25698 - protein, 483 aa, Bacillus licheniformis
HHNGTNGTMMQYFEWYLPNDGNHWNRLRSDASNLKDKGITAVWIPPAWKGASQNDVGYGAYDLYDLGEFNQKGTVRTKYGTRNQLQAAVTALKSNGIQVYGDVVMNHKGGADATEWVRAVEVNPSNRNQEVSGDYTIEAWTKFDFPGRGNTHSNFKWRWYHFDGVDWDQSRQLQNRIYKFRGKGWDWEVDTENGNYDYLMYADIDMDHPEVVNELRNWGVWYTNTLGLDGFRIDAVKHIKYSFTRDWLTHVRNTTGKNMFAVAEFWKNDIGAIENYLSKTNWNHSVFDVPLHYNLYNASRSGGTYDMRQIFNGTVVQRHPTHAVTFVDNHDSQPEEALESFVEEWFKPLAYALTLTRDQGYPSVFYGDYYGIPTHGVPAMKSKIDPILEARQKYAYGTQRDYLDHPDVIGWTREGDGVHADSGLATLMSDGPGGSKWMEVGKNNAGEVWYDITGNQTNTVTINKDGWGQFHVSGGSVSIYVQQ

SEQ ID NO: 25699 - protein, 483 aa, Bacillus licheniformis
HHNGTNGTMMQYFEWYLPNPGNHWNRLRSDASNLKDKGITAVWIPPAWKGASQNDVGYGAYDLYDLGEFNQKGTVRTKYGTRNQLQAAVTALKSNGIQVYGDVVMNHKGGADATEWVRAVEVNPSNRNQEVSGDYTIEAWTKFDFPGRGNTHSNFKWRWYHFDGVDWDQSRQLQNRIYKFRGKGWDWEVDTENGNYDYLMYADIDMDHPEVVNELRNWGVWYTNTLGLDGFRIDAVKHIKYSFTRDWLTHVRNTTGKNMFAVAEFWKNDIGAIENYLSKTNWNHSVFDVPLHYNLYNASRSGGNYDMRQIFNGTVVQRHPTHAVTFVDNHDSQPEEALESFVEEWFKPLAYALTLTRDQGYPSVFYGDYYGIPTHGVPAMKSKIDPILEARQKYAYGTQRDYLDHPDVIGWTREGDGVHADSGLATLMSDGPGGSKWMEVGKNNAGEVWYDITGNQTNTVTINKDGWGQFHVSGGSVSIYVQQ

SEQ ID NO: 25700 - protein, 483 aa, Bacillus licheniformis
HHNGTNGTMMQYFEWYLPNDGNHWNRLRSDASNLKDKGITAVWIPPAWKGASQNDVGYGAYDLYDLGEFNQKGTVRTKYGTRNQLQAAVTALKSNGIQVYGDVVMNHKGGADATEWVRAVEVNPSNRNQEVSGDYTIEAWTKFDFPGRGNTHSNFKWRWYHFDGVDWDQSRQLQNRIYKFRGKGWDWEVDTENGNYDYLMYADIDMDHPEVVNELRNWGVWYTETLGLDGFRIDAVKHIKYSFTRDWLTHVRNTTGKNMFAVAEFWKNDIGAIENYLSKTNWNHSVFDVPLHYNLYNASRSGGNYDMRQIFNGTVVQRHPTHAVTFVDNHDSQPEEALESFVEEWFKPLAYALTLTRDQGYPSVFYGDYYGIPTHGVPAMKSKIDPILEARQKYAYGTQRDYLDHPDVIGWTREGDGVHADSGLATLMSDGPGGSKWMEVGKNNAGEVWYDITGNQTNTVTINKDGWGQFHVSGGSVSIYVQQ

SEQ ID NO: 25701 - protein, 483 aa, Bacillus licheniformis
HHNGTNGTMMQYFEWYLPNDGNHWNRLRSDASNLKDKGITAVWIPPAWKGASQNDVGYGAYDLYDLGEFNQKGTVRTKYGTRNQLQAAVTALKSNGIQVYGDVVMNHKGGADATEWVRAVEVNPSNRNQEVSGDYTIEAWTKFDFPGRGNTHSNFKWRWYHFDGVDWDQSRQLQNRIYKFRGKGWDWEVDTENGNYDYLMYADIDMDHPEVVNELRNWGVWYTNTLGLDGFRIDAVKHIKYSFTRDWLTHVRNTTGKNMFAVAEFWKNDIGAIENYLSKTNWNHSVFDVPLHYNLYNASRSGGNYDMRQIFNGTVVQRHPTHAVTFVDNHDSQPEEALESFVEEWFKPLAYALTLTRDQGYGSVFYGDYYGIPTHGVPAMKSKIDPILEARQKYAYGTQRDYLDHPDVIGWTREGDGVHADSGLATLMSDGPGGSKWMEVGKNNAGEVWYDITGNQTNTVTINKDGWGQFHVSGGSVSIYVQQ

SEQ ID NO: 25702 - protein, 483 aa, Bacillus licheniformis
HHNGTNGTMMQYFEWYLPNDGNHWNRLRSDASNLKDKGITAVWIPPAWKGASQNDVGYGAYDLYDLGEFNQKGTVRTKYGTRNQLQAAVTALKSNGIQVYGDVVMNHKGGADATEWVRAVEVNPSNRNQEVSGDYTIEAWTKFDFPGRGNTHSNFKWRWYHFDGVDWDQSRQLQNRIYKFRGKGWDWEVDTENGNYDYLMYADIDMDHPEVVNELRNWGVWYTNTLGLDGFRIDAVKHIKYSFTRDWLTHVRNTTGKNMFAVAEFWKNDIGAIENYLSKTNWNHSVFDVPLHYNLYNASRSGGNYDMRQIFNGTVVQRHPTHAVTFVDNHDSQPEEALESFVEEWFKPLAYALTLTRDQGYPSVFYGDYSGIPTHGVPAMKSKIDPILEARQKYAYGTQRDYLDHPDVIGWTREGDGVHADSGLATLMSDGPGGSKWMEVGKNNAGEVWYDITGNQTNTVTINKDGWGQFHVSGGSVSIYVQQ

SEQ ID NO: 25703 - protein, 483 aa, Bacillus licheniformis
HHNGTNGTMMQYFEWYLPNDGNHWNRLRSDASNLKDKGITAVWIPPAWKGASQNDVGYGAYDLYDLGEFNQKGTVRTKYGTRNQLQAAVTALKSNGIQVYGDVVMNHKGGADATEWVRAVEVNPSNRNQEVSGDYTIEAWTKFDFPGRGNTHSNFKWRWYHFDGVDWDQSRQLQNRIYKFRGKGWDWEVDTENGNYDYLMYADIDMDHPEVVNELRNWGVWYTNTLGLDGFRIDAVKHIKYSFTRDWLTHVRNTTGKNMFAVAEFWKNDIGAIENYLSKTNWNHSVFDVPLHYNLYNASRSGGNYDMRQIFNGTVVQRHPTHAVTFVDNHDSQPEEALESFVEEWFKPLAYALTLTRDQGYPSVFYGDYYGIPTHGVPAMKSKIDPILEARQKYAYGTQRDYLDHPDVIGWTREGDGVHADSGLATLMSDGPGGSKWMEVGKNNAGEVWYDITGNQTNTVTINKDDWGQFHVSGGSVSIYVQQ

SEQ ID NO: 25704 - protein, 483 aa, Bacillus licheniformis
HHNGTNGTMMQYFEWYLPNDGNHWNRLRSDASNLKDKGITAVWIPPAWKGASQNDVGYGAYDLYDLGEFNQKGTVRTKYGTRNQLQAAVTALKSNGIQVYGDVVMNHKGGADATEWVRAVEVNPSNRNQEVSGDYTIEAWTWFDFPGRGNTHSNFKWRWYHFDGVDWDQSRQLQNRIYKFRGKGWDWEVDTENGNYDYLMYADIDMDHPEVVNELRNWGVWYTNTLGLDGFRIDAVKHIKYSFTRDWLTHVRNTTGKNMFAVAEFWKNDIGAIENYLSKTNWNHSVFDVPLHYNLYNASRSGGNYDMRQIFNGTVVQRHPTHAVTFVDNHDSQPEEALESFVEEWFKPLAYALTLTRDQGYPSVFYGDYYGIPTHGVPAMKSKIDPILEARQKYAYGTQRDYLDHPDVIGWTREGDGVHADSGLATLMSDGPGGSKWMEVGKNNAGEVWYDITGNQTNTVTINKDGWGQFHVSGGSVSIYVQQ

SEQ ID NO: 25705 - protein, 483 aa, Bacillus licheniformis
HHNGTNGTMMQYFEWYLPNDGNHWNRLRSDASNLKDKGITAVWIPPAWKGASQNDVGYGAYDLYDLGEFNQKGTVRTKYGTRNQLQAAVTALKSNGIQVYGDVVMNHKGGADATEWVRAVEVNPSNRNQEVSGDYTIEAWTKFDFPGRGNTHSNFKWRWYHFDGVDWDQSRQLQNRIYKTRGKGWDWEVDTENGNYDYLMYADIDMDHPEVVNELRNWGVWYTNTLGLDGFRIDAVKHIKYSFTRDWLTHVRNTTGKNMFAVAEFWKNDIGAIENYLSKTNWNHSVFDVPLHYNLYNASRSGGNYDMRQIFNGTVVQRHPTHAVTFVDNHDSQPEEALESFVEEWFKPLAYALTLTRDQGYPSVFYGDYYGIPTHGVPAMKSKIDPILEARQKYAYGTQRDYLDHPDVIGWTREGDGVHADSGLATLMSDGPGGSKWMEVGKNNAGEVWYDITGNQTNTVTINKDGWGQFHVSGGSVSIYVQQ

SEQ ID NO: 25706 - protein, 483 aa, Bacillus licheniformis
HHNGTNGTMMQYFEWYLPNDGNHWNRLRSDASNLKDKGITAVWIPPAWKGASQNDVGYGAYDLYDLGEFNQKGTVRTKYGTRNQLQAAVTALKSNGIQVYGDVVMNHKGGADATEWVRAVEVNPSNRNQEVSGDYTIEAWTKFDFPGRGNTHSNFKWRWYHFDGVDWDQSRQLQNRIYKFRGKGWDWEVDTENGNYDYLMYADIDMDHPEVVNELRNWGVWYTNTLGLDGFRIDAVKHIKYSFTRDWLTHVRNTTGKNMFAVAEFWKNDIGAIENYLSKTNWNHSVFDVPLHYNLYNASRSGGNYDMRQIFNGTVVQRHPTHAVTFVDNHDSQPEEALESFVEEWFKPLAYALTLTRDQGYPSVFYGDYYGIPTHGVPAMKSKIDPILEARQKYAYGTQRDYLDHPDVIGWTREGDGVHADSGLATLMSDGPGGSFWMEVGKNNAGEVWYDITGNQTNTVTINKDGWGQFHVSGGSVSIYVQQ

SEQ ID NO: 25707 - protein, 483 aa, Bacillus licheniformis
HHNGTNGTMMQYFEWYLPNDGNHWNRLRSDASNLKDKGITAVWIPPAWKGASQNDVGYGAYDLYDLGEFNQKGTVRTKYGTRNQLQAAVTALKSNGIQVYGDVVMNHKGGADATEWVRAMEVNPSNRNQEVSGDYTIEAWTKFDFPGRGNTHSNFKWRWYHFDGVDWDQSRQLQNRIYKFRGKGWDWEVDTENGNYDYLMYADIDMDHPEVVNELRNWGVWYTNTLGLDGFRIDAVKHIKYSFTRDWLTHVRNTTGKNMFAVAEFWKNDIGAIENYLSKTNWNHSVFDVPLHYNLYNASRSGGNYDMRQIFNGTVVQRHPTHAVTFVDNHDSQPEEALESFVEEWFKPLAYALTLTRDQGYPSVFYGDYYGIPTHGVPAMKSKIDPILEARQKYAYGTQRDYLDHPDVIGWTREGDGVHADSGLATLMSDGPGGSKWMEVGKNNAGEVWYDITGNQTNTVTINKDGWGQFHVSGGSVSIYVQQ

SEQ ID NO: 25708 - protein, 483 aa, Bacillus licheniformis
HHNGTNGTMMQYFEWYLPNDGNHWNRLRSDASNLKDKGITAVWIPPAWKGASQNDVGYGAYDLYDLGEFNQKGTVRTKYGTRNQLQAAVTALKSNGIQVYGDVVMNHKGGADATEWVRAVEVNPSNRNQEVSGDYTIEAWTKFDFPGRGNTHSNFKWRWWHFDGVDWDQSRQLQNRIYKFRGKEWDWEVDTENGNYDYLMYADYDMDHPEVVNELRNWGVWYTNTLGLDGFRIDAVKHIKYSFTRDWLTHVRNTTGKNMFAVAEFWKNDIGAIENYLSKTNWNHSVFDVPLHYNLYNASRSGGNYDMRQIFNGTVVQRHPTHAVTFVDNHDSQPEEALESFVEEWFKPLAYALTLTRDQGYPSVFYGDYYGIPTHGVPAMKSKIDPILEARQKYAYGTQRDYMDHPDVIGWTREGDGVHADSGLATLMSDGPGGSKWMEVGKNNAGEVWYDITGNQTNTVTINKDGWGQFHVSGGSVSIYVQQ

SEQ ID NO: 25709 - protein, 483 aa, Bacillus licheniformis
HHNGTNGTMWQYFEWYLPNDGNHWNRLRSDASNLKDKGITAVWIPPAWKGASQNDVGYGAYDLYDLGEFNQKGTVRTKYGTRNQLQAAVTALKSNGIQVYGDVVMNHKGGADATEWVRAVEVNPSNRNQEVSGDYTIEAWTKFDFPGRGNTHSNFKWRWYHFDGVDWDQSRQLQNRIYKFRGKGWDWEVDTENGNYDYLMYADIDMDHPEVVNELRNWGVWYTNTLGLDGFRIDAVKHIKYSFTRDWLTHVRNTTGKNMFAVAEFWKNDIGAIENYLSKTNWNHSVFDVPLHYNLYNASRSGGNYDMRQIFNGTVVQRHPTHAVTFVDNHDSQPEEALESFVEEWFKPLAYALTLTRDQGYPSVFYGDYYGIPTHGVPAMKSKIDPILEARQKYAYGTQRDYLDHPDVIGWTREGDGVHADSGLATLMSDGPGGSKWMEVGKNNAGEVWYDITGNQTNTVTINKDGWGQFHVSGGSVSIYVQQ

SEQ ID NO: 25710 - protein, 483 aa, Bacillus licheniformis
HHNGENGTMMQYFEWYLPNDGNHWNRLRSDASNLKDKGITAVWIPPAWKGASQNDVGYGAYDLYDLGEFNQKGTVRTKYGTRNQLQAAVTALKSNGIQVYGDVVMNHKGGADATEWVRAVEVNPSNRNQEVSGDYTIEAWTKFDFPGRGNTHSNFKWRWYHFDGVDWDQSRQLQNRIYKFRGKGWDWEVDTENGNYDYLMYADIDMDHPEVVNELRNWGVWYTNTLGLDGFRIDAVKHIKYSFTRDWLTHVRNTTGKNMFAVAEFWKNDIGAIENYLSKTNWNHSVFDVPLHYNLYNASRSGGNYDMRQIFNGTVVQRHPTHAVTFVDNHDSQPEEALESFVEEWFKPLAYALTLTRDQGYPSVFYGDYYGIPTHGVPAMKSKIDPILEARQKYAYGTQRDYLDHPDVIGWTREGDGVHADSGLATLMSDGPGGSKWMEVGKNNAGEVWYDITGNQTNTVTINKDGWGQFHVSGGSVSIYVQQ

SEQ ID NO: 25711 - protein, 483 aa, Bacillus licheniformis
HHNGTNGTMMQYFEWYLPNDGNHWNRLRSDASNLKDKGITAVWIPPAWKGASQNDVGYGAYDLYDLGEFNQKGTVRTKYGTRNQLQAAVTALKSNGIQVYGDVVMNHKGGADATEWVRAVEVNPSNRNQEVSGDYTIEAWTKFDFPGRGNTHSNFKWRWYHFDGVDWDQSRQLENRIYKFRGKGWDWEVDTENGNYDYLMYADIDMDHPEVVNELRNWGVWYTNTLGLDGFRIDAVKHIKYSFTRDWLTHVRNTTGKNMFAVAEFWKNDIGAIENYLSKTNWNHSVFDVPLHYNLYNASRSGGNYDMRQIFNGTVVQRHPTHAVTFVDNHDSQPEEALESFVEEWFKPLAYALTLTRDQGYPSVFYGDYYGIPTHGVPAMKSKIDPILEARQKYAYGTQRDYLDHPDVIGWTREGDGVHADSGLATLMSDGPGGSKWMEVGKNNAGEVWYDITGNQTNTVTINKDGWGQFHVSGGSVSIYVQQ

SEQ ID NO: 25712 - protein, 483 aa, Bacillus licheniformis
HHNGTNGTMMQYFEWYLPNDGNHWNRLRSDASNLKDKGITAVWIPPAWKGASQNDVGYGAYDLYDLGEFNQKGTVRTKYGTRNQLQAAVTALKSNGIQVYGDVVMNHKGGADATEWVRAVEVNPSNRNQEVSGDYTIEAWTKFDFPGRGNTHSNFKWRWYHFDGVDWDQSRQLQNRIYKFRGKGWDWEVDTENGNYDYLMYADIDMDHPEVVNELRNWGVWYTNTLGLDGFRIDAVKHIKYSFTRDWLTHVRNTTGKNMFAVAEFWKNDIGAIENYLSKTNWNHSVFDVPLHYNLYNASRSGGAYDMRQIFNGTVVQRHPTHAVTFVDNHDSQPEEALESFVEEWFKPLAYALTLTRDQGYPSVFYGDYYGIPTHGVPAMKSKIDPILEARQKYAYGTQRDYLDHPDVIGWTREGDGVHADSGLATLMSDGPGGSKWMEVGKNNAGEVWYDITGNQTNTVTINKDGWGQFHVSGGSVSIYVQQ

SEQ ID NO: 25713 - protein, 483 aa, Bacillus licheniformis
HHNGTNGTMMQYFEWYLPNDGNHWHRLRSDASNLKDKGITAVWIPPAWKGASQNDVGYGAYDLYDLGEFNQKGTVRTKYGTRNQLQAAVTALKSNGIQVYGDVVMNHKGGADATEWVRAVEVNPSNRNQEVSGDYTIEAWTKFDFPGRGNTHSNFKWRWYHFDGVDWDQSRQLQNRIYKFRGKEWDWEVDTENGNYDYLMYADYDMDHPEVVNELRNWGVWYTNTLGLDGFRIDAVKHIKYSFTRDWLTHVRNTTGKNMFAVAEFWKNDIGAIENYLSKTNWNHSVFDVPLHYNLYNASRSGGNYDMRQIFNGTVVQRHPTHAVTFVDNHDSQPEEALESFVEEWFKPLAYALTLTRDQGYPSVFYGDYYGIPTHGVPAMKSKIDPILEARQKYAYGTQRDYMDHPDVIGWTREGDGVHADSGLATLMSDGPGGSKWMEVGKNNAGEVWYDITGNQTNTVTINKDGWGQFHVSGGSVSIYVQQ

SEQ ID NO: 25714 - protein, 483 aa, Bacillus licheniformis
HHNGTNGTMMQYFEWYLPNDGNHWNRLRSDASNLKDKGITAVWIPPAWKGASQNDVGYGAYDLYDLGEFNQKGTVRTKYGTRNQLQAAVTALKSNGIQVYGDVVMNHKGGADATEWVRAVEVNPSNRNQEVSGDYTIEAWTKFDFPGRGNTHSNFKWRWYHFDGVDWDQSRQLQNRIYKFRGKGWDWEVDTENGNYDYLMYADIDMDHPEVVNELRNWGVWYTNTLGLDGFRIDAVKHIKYSFTRDWLTHVRNTTGKNMFAVAEFWKNDIGAIENYLSKTNWNHSVFDVPLHYNLYNASRSGGNYDMRQIFNGTVVQRHPTHAVTFVDNHDSQPEEALESFVEEWFKPLAYALTLTRDQGYPSVFYGDYYGIPTHGVPAMKSKIDPILEARQKYAYGTQRDYLDHPDVIGWTREGDGVHADSGLATLMSDGPGGSKWMEVGKMNAGEVWYDITGNQTNTVTINKDGWGQFHVSGGSVSIYVQQ

SEQ ID NO: 25715 - protein, 483 aa, Bacillus licheniformis
HHNGTNGTMMQYFEWYLPNDGNHWNRLRSDASNLKDKGITAVWIPPAWKGASQNDVGYGAYDLYDLGEFNQKGTVRTKYGTRNQLQAAVTALKSNGIQVYGDVVMNHKGGADATEWVRAVEVNPSNRNQEVSGDYTIEAWTKFDFPGRGNTHSNFKWRWYHFDGVDWDQSRQLQNRIYKFRGKGWDWEVDTENGNYDYLMYADIDMDHPEVVNELRNWGVWYTQTLGLDGFRIDAVKHIKYSFTRDWLTHVRNTTGKNMFAVAEFWKNDIGAIENYLSKTNWNHSVFDVPLHYNLYNASRSGGNYDMRQIFNGTVVQRHPTHAVTFVDNHDSQPEEALESFVEEWFKPLAYALTLTRDQGYPSVFYGDYYGIPTHGVPAMKSKIDPILEARQKYAYGTQRDYLDHPDVIGWTREGDGVHADSGLATLMSDGPGGSKWMEVGKNNAGEVWYDITGNQTNTVTINKDGWGQFHVSGGSVSIYVQQ

SEQ ID NO: 25716 - protein, 483 aa, Bacillus licheniformis
HHNGTNGTMMQYFEWYLPNDGNHWNRLRSDASNLKDKGITAVWIPPAWKGASQNDVGYGAYDLYDLGEFNQKGTVRTKYGTRNQLQAAVTALKSNGIQVYGDVVMNHKGGADAYEWVRAVEVNPSNRNQEVSGDYTIEAWTKFDFPGRGNTHSNFKWRWYHFDGVDWDQSRQLQNRIYKFRGKGWDWEVDTENGNYDYLMYADIDMDHPEVVNELRNWGVWYTNTLGLDGFRIDAVKHIKYSFTRDWLTHVRNTTGKNMFAVAEFWKNDIGAIENYLSKTNWNHSVFDVPLHYNLYNASRSGGNYDMRQIFNGTVVQRHPTHAVTFVDNHDSQPEEALESFVEEWFKPLAYALTLTRDQGYPSVFYGDYYGIPTHGVPAMKSKIDPILEARQKYAYGTQRDYLDHPDVIGWTREGDGVHADSGLATLMSDGPGGSKWMEVGKNNAGEVWYDITGNQTNTVTINKDGWGQFHVSGGSVSIYVQQ

SEQ ID NO: 25717 - protein, 483 aa, Bacillus licheniformis
HHNGTNGTMMQYFEWYLPNDGNHWNRLRSDASQLKDKGITAVWIPPAWKGASQNDVGYGAYDLYDLGEFNQKGTVRTKYGTRNQLQAAVTALKSNGIQVYGDVVMNHKGGADATEWVRAVEVNPSNRNQEVSGDYTIEAWTKFDFPGRGNTHSNFKWRWYHFDGVDWDQSRQLQNRIYKFRGKGWDWEVDTENGNYDYLMYADIDMDHPEVVNELRNWGVWYTNTLGLDGFRIDAVKHIKYSFTRDWLTHVRNTTGKNMFAVAEFWKNDIGAIENYLSKTNWNHSVFDVPLHYNLYNASRSGGNYDMRQIFNGTVVQRHPTHAVTFVDNHDSQPEEALESFVEEWFKPLAYALTLTRDQGYPSVFYGDYYGIPTHGVPAMKSKIDPILEARQKYAYGTQRDYLDHPDVIGWTREGDGVHADSGLATLMSDGPGGSKWMEVGKNNAGEVWYDITGNQTNTVTINKDGWGQFHVSGGSVSIYVQQ

SEQ ID NO: 25718 - protein, 483 aa, Bacillus licheniformis
HHNGTNGTMMQYFEWYLPNDGNHWNRHRSDASNLKDKGITAVWIPPAWKGASQNDVGYGAYDLYDLGEFNQKGTVRTKYGTRNQLQAAVTALKSNGIQVYGDVVMNHKGGADATEWVRAVEVNPSNRNQEVSGDYTIEAWTKFDFPGRGNTHSNFKWRWYHFDGVDWDQSRQLQNRIYKFRGKGWDWEVDTENGNYDYLMYADIDMDHPEVVNELRNWGVWYTNTLGLDGFRIDAVKHIKYSFTRDWLTHVRNTTGKNMFAVAEFWKNDIGAIENYLSKTNWNHSVFDVPLHYNLYNASRSGGNYDMRQIFNGTVVQRHPTHAVTFVDNHDSQPEEALESFVEEWFKPLAYALTLTRDQGYPSVFYGDYYGIPTHGVPAMKSKIDPILEARQKYAYGTQRDYLDHPDVIGWTREGDGVHADSGLATLMSDGPGGSKWMEVGKNNAGEVWYDITGNQTNTVTINKDGWGQFHVSGGSVSIYVQQ

SEQ ID NO: 25719 - protein, 483 aa, Bacillus licheniformis
HHNGTNGTMMQYFEWYLPNDGNHWNRLRSDTSNLKDKGITAVWIPPAWKGASQNDVGYGAYDLYDLGEFNQKGTVRTKYGTRNQLQAAVTALKSNGIQVYGDVVMNHKGGADATEWVRAVEVNPSNRNQEVSGDYTIEAWTKFDFPGRGNTHSNFKWRWYHFDGVDWDQSRQLQNRIYKFRGKGWDWEVDTENGNYDYLMYADIDMDHPEVVNELRNWGVWYTNTLGLDGFRIDAVKHIKYSFTRDWLTHVRNTTGKNMFAVAEFWKNDIGAIENYLSKTNWNHSVFDVPLHYNLYNASRSGGNYDMRQIFNGTVVQRHPTHAVTFVDNHDSQPEEALESFVEEWFKPLAYALTLTRDQGYPSVFYGDYYGIPTHGVPAMKSKIDPILEARQKYAYGTQRDYLDHPDVIGWTREGDGVHADSGLATLMSDGPGGSKWMEVGKNNAGEVWYDITGNQTNTVTINKDGWGQFHVSGGSVSIYVQQ

SEQ ID NO: 25720 - protein, 483 aa, Bacillus licheniformis
HHNGTNGTMMQYFEWYLPNDGNHWNRLRSDADNLKDKGITAVWIPPAWKGASQNDVGYGAYDLYDLGEFNQKGTVRTKYGTRNQLQAAVTALKSNGIQVYGDVVMNHKGGADATEWVRAVEVNPSNRNQEVSGDYTIEAWTKFDFPGRGNTHSNFKWRWYHFDGVDWDQSRQLQNRIYKFRGKGWDWEVDTENGNYDYLMYADIDMDHPEVVNELRNWGVWYTNTLGLDGFRIDAVKHIKYSFTRDWLTHVRNTTGKNMFAVAEFWKNDIGAIENYLSKTNWNHSVFDVPLHYNLYNASRSGGNYDMRQIFNGTVVQRHPTHAVTFVDNHDSQPEEALESFVEEWFKPLAYALTLTRDQGYPSVFYGDYYGIPTHGVPAMKSKIDPILEARQKYAYGTQRDYLDHPDVIGWTREGDGVHADSGLATLMSDGPGGSKWMEVGKNNAGEVWYDITGNQTNTVTINKDGWGQFHVSGGSVSIYVQQ

SEQ ID NO: 25721 - protein, 483 aa, Bacillus licheniformis
HHNGTNGTMMQYFEWYLPNDGNHWNRLRSDASNLKDKGITAVWIPPAWKGASQNDVGYGAYDLYDLGEFNQKGTVRTKYGTRNQLQAAVTALKSNGIQVYGDVVMNHKGGADATEWVRAVEVNPSNRNQEVSGDYTIEAWTKFDFPGRGNTHSNFKWRWYHFDGVDWDQSRQLQNRIYKFRGKGWDWEVDTENGNYDYLMYADIDMDHPEVVNELRNWGVWYTWTLGLDGFRIDAVKHIKYSFTRDWLTHVRNTTGKNMFAVAEFWKNDIGAIENYLSKTNWNHSVFDVPLHYNLYNASRSGGNYDMRQIFNGTVVQRHPTHAVTFVDNHDSQPEEALESFVEEWFKPLAYALTLTRDQGYPSVFYGDYYGIPTHGVPAMKSKIDPILEARQKYAYGTQRDYLDHPDVIGWTREGDGVHADSGLATLMSDGPGGSKWMEVGKNNAGEVWYDITGNQTNTVTINKDGWGQFHVSGGSVSIYVQQ

SEQ ID NO: 25722 - protein, 483 aa, Bacillus licheniformis
HHNGTNGTMMQYFEWYLPNDGNHWNRLRSDASNLKDKGITAVWIPPAWKGASQNDVGYGAYDLYDLGEFNQKGTVRTKYGTRNQLQAAVTALKSNGIQVYGDVVMNHKGGADATEWVRAVEVNPSNRNQEVSGDYTIEAWTKFDFPGRGNTHSNFKWRWYHFDGVDWDQSRQLQNRIYKFRGKGWDWEVDTENGNYDYLMYADIDMDHPEVVNELRNWGVWYTNTLGLDGFRIDAVKHIKYSFTRDWLTHVRNTTGKNMFAVAEFWKNDIGAIENYLSKTNWNHSVFDVPLHYNLYNASRSGGNYDQRQIFNGTVVQRHPTHAVTFVDNHDSQPEEALESFVEEWFKPLAYALTLTRDQGYPSVFYGDYYGIPTHGVPAMKSKIDPILEARQKYAYGTQRDYLDHPDVIGWTREGDGVHADSGLATLMSDGPGGSKWMEVGKNNAGEVWYDITGNQTNTVTINKDGWGQFHVSGGSVSIYVQQ

SEQ ID NO: 25723 - protein, 483 aa, Bacillus licheniformis
HHNGTNGTMMQYFEWYLPNDGNHWNRLRSQASNLKDKGITAVWIPPAWKGASQNDVGYGAYDLYDLGEFNQKGTVRTKYGTRNQLQAAVTALKSNGIQVYGDVVMNHKGGADATEWVRAVEVNPSNRNQEVSGDYTIEAWTKFDFPGRGNTHSNFKWRWYHFDGVDWDQSRQLQNRIYKFRGKGWDWEVDTENGNYDYLMYADIDMDHPEVVNELRNWGVWYTNTLGLDGFRIDAVKHIKYSFTRDWLTHVRNTTGKNMFAVAEFWKNDIGAIENYLSKTNWNHSVFDVPLHYNLYNASRSGGNYDMRQIFNGTVVQRHPTHAVTFVDNHDSQPEEALESFVEEWFKPLAYALTLTRDQGYPSVFYGDYYGIPTHGVPAMKSKIDPILEARQKYAYGTQRDYLDHPDVIGWTREGDGVHADSGLATLMSDGPGGSKWMEVGKNNAGEVWYDITGNQTNTVTINKDGWGQFHVSGGSVSIYVQQ

SEQ ID NO: 25724 - protein, 483 aa, Bacillus licheniformis
HHNGTNGTMMQYFEWYLPNDGNHWNRLRSDASNLKDKGITAVWIPPAWKGASQNDVGYGAYDLYDLGEFNQKGTVRTKYGTRNQLQRAVTALKSNGIQVYGDVVMNHKGGADATEWVRAVEVNPSNRNQEVSGDYTIEAWTKFDFPGRGNTHSNFKWRWYHFDGVDWDQSRQLQNRIYKFRGKEWDWEVDTENGNYDYLMYADIDMDHPEVVNELRNWGVWYTNTLGLDGFRIDAVKHIKYSFTRDWLTHVRNTTGKNMFAVAEFWKNDIGAIENYLSKTNWNHSVFDVPLHYNLYNASRSGGNYDMRQIFNGTVVQRHPTHAVTFVDNHDSQPEEALESFVEEWFKPLAYALTLTRDQGYPSVFYGDYYGIPTHGVPAMKSKIDPILEARQKYAYGTQRDYLDHPDVIGWTREGDGEHADSGLATLMSDGPGGSKWMEVGKNNAGERWYDITGNQTNTVTINKDGWGQFHVSGGSVSIYVQQ

SEQ ID NO: 25725 - protein, 483 aa, Bacillus licheniformis
HHNGTNGTMMQYFEWYLPNDGNHWNRLRSDASNLKDKGITAVWIPPAWKGASQNDVGYGAYDLYDLGEFNQKGTVRTKYGTRNQLQAAVTALKSNGIQVYGDVVMNHKGGADATEWVRAVEVNPSNRNQEVSGDYTIEAWTKFDFPGRGNTHSNFKWRWYHFDGVDWDQSRQLQNRIYKFRGKEWDWEVDTENGNYDYLMYADIDMDHPEVVNELRNWGVWYTNTLGLDGFRIDAVKHIKYSFTRDWLTHVRNTTGKNMFAVAEFWKNDIGAIRNYLSKTNWNHSVFDVPLHYNLYNASRSGGNYDMRQIFNGTVVQRHPTHAVTFVDNHDSQPEEALESFVEEWFKPLAYALTLTRDQGYPSVFYGDYYGIPTHGVPAMKSKIDPILEARQKYAYGTQRDYLDHPDVIGWTREGDGVHADSGLATLMSDGPGGSKWMEVGKNNAGEVWYDITGNQTNTVTINKDGWGQFHVSGGSVSIYVQQ

SEQ ID NO: 25726 - protein, 483 aa, Bacillus licheniformis
HHNGTNGTMMQYFEWYLPNDGNHWNRLRSDASNLKDKGITAVWIPPAWKGASQNDVGYGAYDLYDLGEFNQKGTVRTKYGTRNQLQAAVTALKSNGIQVYGDVVMNHKGGADATEWVRAVEVNPSNRNQEVSGDYTIEAWTKFDFPGRGNTHSNFKWRWYHFDGVDWDQSRQLQNRIYKFRGKGWDWEVDTENGNYDYLMYADIDMDHPEVVNELRNWGVWYTNTLGLDGFRIDAVKHIKYSFTRDWLTHVRNTTGKNMFAVAEFWKNDIWAIENYLSKTNWNHSVFDVPLHYNLYNASRSGGNYDMRQIFNGTVVQRHPTHAVTFVDNHDSQPEEALESFVEEWFKPLAYALTLTRDQGYPSVFYGDYYGIPTHGVPAMKSKIDPILEARQKYAYGTQRDYLDHPDVIGWTREGDGVHADSGLATLMSDGPGGSKWMEVGKNNAGEVWYDITGNQTNTVTINKDGWGQFHVSGGSVSIYVQQ

SEQ ID NO: 25727 - protein, 483 aa, Bacillus licheniformis
HHNGTNGTMMQYFEWYLPNDGNHWNRLRSWASNLKDKGITAVWIPPAWKGASQNDVGYGAYDLYDLGEFNQKGTVRTKYGTRNQLQAAVTALKSNGIQVYGDVVMNHKGGADATEWVRAVEVNPSNRNQEVSGDYTIEAWTKFDFPGRGNTHSNFKWRWYHFDGVDWDQSRQLQNRIYKFRGKGWDWEVDTENGNYDYLMYADIDMDHPEVVNELRNWGVWYTNTLGLDGFRIDAVKHIKYSFTRDWLTHVRNTTGKNMFAVAEFWKNDIGAIENYLSKTNWNHSVFDVPLHYNLYNASRSGGNYDMRQIFNGTVVQRHPTHAVTFVDNHDSQPEEALESFVEEWFKPLAYALTLTRDQGYPSVFYGDYYGIPTHGVPAMKSKIDPILEARQKYAYGTQRDYLDHPDVIGWTREGDGVHADSGLATLMSDGPGGSKWMEVGKNNAGEVWYDITGNQTNTVTINKDGWGQFHVSGGSVSIYVQQ

SEQ ID NO: 25728 - protein, 483 aa, Bacillus licheniformis
HHNGTNGTMMQYFEWYLPNDGNHWNRLRSDASNLKDKGITAVWIPPAWKGASQNDVGYGAYDLYDLGEFNQKGTVRTKYGTRNQLQAAVTALKSNGIQVYGDVVMNHKGGADATEWVRAVEVNPSNRNQEVSGDYTIEAWTKFDFPGRGNTHSNFKWRWYHFDGVDWDQSRQLQNRIYKFRGKGWVWEVDTENGNYDYLMYADIDMDHPEVVNELRNWGVWYTNTLGLDGFRIDAVKHIKYSFTRDWLTHVRNTTGKNMFAVAEFWKNDIGAIENYLSKTNWNHSVFDVPLHYNLYNASRSGGNYDMRQIFNGTVVQRHPTHAVTFVDNHDSQPEEALESFVEEWFKPLAYALTLTRDQGYPSVFYGDYYGIPTHGVPAMKSKIDPILEARQKYAYGTQRDYLDHPDVIGWTREGDGVHADSGLATLMSDGPGGSKWMEVGKNNAGEVWYDITGNQTNTVTINKDGWGQFHVSGGSVSIYVQQ

SEQ ID NO: 25729 - protein, 483 aa, Bacillus licheniformis
HHNGTNGTMMQYFEWYLPNDGNHWNRLRSDASNLKDKGITAVWIPPAWKGASQNDVGYGAYDLYDLGEFNQKGTVRTKYGTRNQLQAAVTALKSNGIQVYGDVVMNHKGGADATEWVRAVEVNPSNRNQEVSGDYTIEAWTKFDFPGRGNTHSNFKWRWYHFDGVDWDQSRQLQNRIYKFRGKGWDWEVDTENGNYDYLMYADIDMDHPEVVNELRNWGVVYTNTLGLDGFRIDAVKHIKYSFTRDWLTHVRNTTGKNMFAVAEFWKNDIGAIENYLSKTNWNHSVFDVPLHYNLYNASRSGGNYDMRQIFNGTVVQRHPTHAVTFVDNHDSQPEEALESFVEEWFKPLAYALTLTRDQGYPSVFYGDYYGIPTHGVPAMKSKIDPILEARQKYAYGTQRDYLDHPDVIGWTREGDGVHADSGLATLMSDGPGGSKWMEVGKNNAGEVWYDITGNQTNTVTINKDGWGQFHVSGGSVSIYVQQ

SEQ ID NO: 25730 - protein, 483 aa, Bacillus licheniformis
HHNGTNGTMMQYFEWYLPNDGNHWNRLRSDASNLKDKGITAVWIPPAWKGASQNDVGYGAYDLYDLGEFNQKGTVRTKYGTRNQLQAAVTALKSNGIQVYGDVVMNHKGGADATEWVRAVEVNPSNRNQEVSGDYTIEAWTKFDFPGRGNTHSNFKWRWYHFDGVDWDQSRQLQNRIYKFRGKGWDWEVDTENGNYDYLMYADIDMDHPEVVNELRNWGVWYTNTLGLDGFRIDAVKHIKYSFTRDWLTHVRNTTGKNMFAVAEFWKNDIGAIENYLSKTNWNHSVFDYPLHYNLYNASRSGGNYDMRQIFNGTVVQRHPTHAVTFVDNHDSQPEEALESFVEEWFKPLAYALTLTRDQGYPSVFYGDYYGIPTHGVPAMKSKIDPILEARQKYAYGTQRDYLDHPDVIGWTREGDGVHADSGLATLMSDGPGGSKWMEVGKNNAGEVWYDITGNQTNTVTINKDGWGQFHVSGGSVSIYVQQ

SEQ ID NO: 25731 - protein, 483 aa, Bacillus licheniformis
HHNGTNGTMMQYFEWYLPNDGNHWNRLRSDAQNLKDKGITAVWIPPAWKGASQNDVGYGAYDLYDLGEFNQKGTVRTKYGTRNQLQAAVTALKSNGIQVYGDVVMNHKGGADATEWVRAVEVNPSNRNQEVSGDYTIEAWTKFDFPGRGNTHSNFKWRWYHFDGVDWDQSRQLQNRIYKFRGKGWDWEVDTENGNYDYLMYADIDMDHPEVVNELRNWGVWYTNTLGLDGFRIDAVKHIKYSFTRDWLTHVRNTTGKNMFAVAEFWKNDIGAIENYLSKTNWNHSVFDVPLHYNLYNASRSGGNYDMRQIFNGTVVQRHPTHAVTFVDNHDSQPEEALESFVEEWFKPLAYALTLTRDQGYPSVFYGDYYGIPTHGVPAMKSKIDPILEARQKYAYGTQRDYLDHPDVIGWTREGDGVHADSGLATLMSDGPGGSKWMEVGKNNAGEVWYDITGNQTNTVTINKDGWGQFHVSGGSVSIYVQQ

SEQ ID NO: 25732 - protein, 483 aa, Bacillus licheniformis
HHNGTNGTMMQYFEWYLPNDGNHWNRLRSDASNLKDKGITAVWIPPAWKGASQNDVGYGAYDLYDLGEFNQKGTVRTKYGTRNQLQAAVTALKSNGIQKYGDVVMNHKGGADATEWVRAVEVNPSNRNQEVSGDYTIEAWTKFDFPGRGNTHSNFKWRWYHFDGVDWDQSRQLQNRIYKFRGKGWDWEVDTENGNYDYLMYADIDMDHPEVVNELRNWGVWYTNTLGLDGFRIDAVKHIKYSFTRDWLTHVRNTTGKNMFAVAEFWKNDIGAIENYLSKTNWNHSVFDVPLHYNLYNASRSGGNYDMRQIFNGTVVQRHPTHAVTFVDNHDSQPEEALESFVEEWFKPLAYALTLTRDQGYPSVFYGDYYGIPTHGVPAMKSKIDPILEARQKYAYGTQRDYLDHPDVIGWTREGDGVHADSGLATLMSDGPGGSKWMEVGKNNAGEVWYDITGNQTNTVTINKDGWGQFHVSGGSVSIYVQQ

SEQ ID NO: 25733 - protein, 483 aa, Bacillus licheniformis
HHNGTNGTMYQYFEWYLPNDGNHWNRLRSDASNLKDKGITAVWIPPAWKGASQNDVGYGAYDLYDLGEFNQKGTVRTKYGTRNQLQAAVTALKSNGIQVYGDVVMNHKGGADATEWVRAVEVNPSNRNQEVSGDYTIEAWTKFDFPGRGNTHSNFKWRWYHFDGVDWDQSRQLQNRIYKFRGKGWDWEVDTENGNYDYLMYADIDMDHPEVVNELRNWGVWYTNTLGLDGFRIDAVKHIKYSFTRDWLTHVRNTTGKNMFAVAEFWKNDIGAIENYLSKTNWNHSVFDVPLHYNLYNASRSGGNYDMRQIFNGTVVQRHPTHAVTFVDNHDSQPEEALESFVEEWFKPLAYALTLTRDQGYPSVFYGDYYGIPTHGVPAMKSKIDPILEARQKYAYGTQRDYLDHPDVIGWTREGDGVHADSGLATLMSDGPGGSKWMEVGKNNAGEVWYDITGNQTNTVTINKDGWGQFHVSGGSVSIYVQQ

SEQ ID NO: 25734 - protein, 483 aa, Bacillus licheniformis
HHNGTNGTMMQYFEWYLPNDGNHWNRLRSDASRLKDKGITAVWIPPAWKGASQNDVGYGAYDLYDLGEFNQKGTVRTKYGTRNQLQAAVTALKSNGIQVYGDVVMNHKGGADATEWVRAVEVNPSNRNQEVSGDYTIEAWTKFDFPGRGNTHSNFKWRWYHFDGVDWDQSRQLQNRIYKFRGKGWDWEVDTENGNYDYLMYADIDMDHPEVVNELRNWGVWYTNTLGLDGFRIDAVKHIKYSFTRDWLTHVRNTTGKNMFAVAEFWKNDIGAIENYLSKTNWNHSVFDVPLHYNLYNASRSGGNYDMRQIFNGTVVQRHPTHAVTFVDNHDSQPEEALESFVEEWFKPLAYALTLTRDQGYPSVFYGDYYGIPTHGVPAMKSKIDPILEARQKYAYGTQRDYLDHPDVIGWTREGDGVHADSGLATLMSDGPGGSKWMEVGKNNAGEVWYDITGNQTNTVTINKDGWGQFHVSGGSVSIYVQQ

SEQ ID NO: 25735 - protein, 483 aa, Bacillus licheniformis
HHNGTNGTMMQYFEWYLPNDGNHWNRLRSDASNLKDKGITAVWIPPAWKGASQNDVGYGAYDLYDLGEFNQKGTVRTKYGTRNQLQAAVTALKSNGIQVYGDVVMNHKGGADATEWVRAVEVNPSNRNQEVSGDYTIEAWTKFDFPGRGNTHSNFKWRWYHFDGVDWDQSRQLQNRIYKFRGKGWDWEVDTENGNYDYLMYADIDMDHPEVVNELRNWGVWYTNTLGLDGFRIDAVKHIKYSFTRDWLTHVRNTTGKNMFAVAEFWKNDIGAIENYLSKTNWNHSVFDVPLHYNLYNASRSGGNYDMRQIFNGTVVQRHPTHAVTFVDNHDSQPEEALESFVEEWFKPLAYILTLTRDQGYPSVFYGDYYGIPTHGVPAMKSKIDPILEARQKYAYGTQRDYLDHPDVIGWTREGDGVHADSGLATLMSDGPGGSKWMEVGKNNAGEVWYDITGNQTNTVTINKDGWGQFHVSGGSVSIYVQQ

SEQ ID NO: 25736 - protein, 483 aa, Bacillus licheniformis
HHNGTNGTMMQYFEWYLPNDGNHWNRLRSDASNLKDKGITAVWIPPAWKGASQNDVGYGAYDLYDLGEFNQKGTVRTKYGTRNQLQAAVTALKSNGIQVYGDVVMNHKGGADATEWVRAVEVNPSNRNQEVSGDYTIEAWTKFDFPGRGNTHSNFKWRWYHFDGVDWDQSRQLQNRIYKFRGKGWDWEVDTENGNYDYLMYADIDMDHPEVVNELRNWGVWYTNTLGLDGFRIDAVKHIKYSFTRDWLTHVRNTTGKNMFAVAEFWKNDIGAIENYLSKTNWNHSVFDVPLHYNSYNASRSGGNYDMRQIFNGTVVQRHPTHAVTFVDNHDSQPEEALESFVEEWFKPLAYALTLTRDQGYPSVFYGDYYGIPTHGVPAMKSKIDPILEARQKYAYGTQRDYLDHPDVIGWTREGDGVHADSGLATLMSDGPGGSKWMEVGKNNAGEVWYDITGNQTNTVTINKDGWGQFHVSGGSVSIYVQQ

SEQ ID NO: 25737 - protein, 483 aa, Bacillus licheniformis
HHNGTNGCMMQYFEWYLPNDGNHWNRLRSDASNLKDKGITAVWIPPAWKGASQNDVGYGAYDLYDLGEFNQKGTVRTKYGTRNQLQAAVTALKSNGIQVYGDVVMNHKGGADATEWVRAVEVNPSNRNQEVSGDYTIEAWTKFDFPGRGNTHSNFKWRWYHFDGVDWDQSRQLQNRIYKFRGKGWDWEVDTENGNYDYLMYADIDMDHPEVVNELRNWGVWYTNTLGLDGFRIDAVKHIKYSFTRDWLTHVRNTTGKNMFAVAEFWKNDIGAIENYLSKTNWNHSVFDVPLHYNLYNASRSGGNYDMRQIFNGTVVQRHPTHAVTFVDNHDSQPEEALESFVEEWFKPLAYALTLTRDQGYPSVFYGDYYGIPTHGVPAMKSKIDPILEARQKYAYGTQRDYLDHPDVIGWTREGDGVHADSGLATLMSDGPGGSKWMEVGKNNAGEVWYDITGNQTNTVTINKDGWGQFHVSGGSVSIYVQQ

SEQ ID NO: 25738 - protein, 483 aa, Bacillus licheniformis
HHNGTNGTMMQYFEWYLPNDSNHWNRLRSDASNLKDKGITAVWIPPAWKGASQNDVGYGAYDLYDLGEFNQKGTVRTKYGTRNQLQAAVTALKSNGIQVYGDVVMNHKGGADATEWVRAVEVNPSNRNQEVSGDYTIEAWTKFDFPGRGNTHSNFKWRWYHFDGVDWDQSRQLQNRIYKFRGKGWDWEVDTENGNYDYLMYADIDMDHPEVVNELRNWGVWYTNTLGLDGFRIDAVKHIKYSFTRDWLTHVRNTTGKNMFAVAEFWKNDIGAIENYLSKTNWNHSVFDVPLHYNLYNASRSGGNYDMRQIFNGTVVQRHPTHAVTFVDNHDSQPEEALESFVEEWFKPLAYALTLTRDQGYPSVFYGDYYGIPTHGVPAMKSKIDPILEARQKYAYGTQRDYLDHPDVIGWTREGDGVHADSGLATLMSDGPGGSKWMEVGKNNAGEVWYDITGNQTNTVTINKDGWGQFHVSGGSVSIYVQQ

SEQ ID NO: 25739 - protein, 483 aa, Bacillus licheniformis
HHNGTNGTMMQYFEWYLPNDGNHWNRLRSDASNLKDKGITAVWIPPAWKGASQNDVGYGAYDLYDLGEFNQKGTVRTKYGTRNQLQAAVTALKSNGIQVYGDVVMNHKGGADATEWVRAVEVNPSNRNQEVSGDYTIEAWTKFDFPGRGNTHSNFKWRWYHFDGVDWDQSRQLQNRIYKFRGKGWDWEVDTENGNYDYLMYADIDMDHPEVVNELRNWGVWYTNTLGLDGFRIDAVKHIKYSFTRDWLTHVRNTTGKNMFAVAEFWKNDIGAIENYLSKTNWNHSVFDVPLHYNLYNASRSGGNYDMRQIFCGTVVQRHPTHAVTFVDNHDSQPEEALESFVEEWFKPLAYALTLTRDQGYPSVFYGDYYGIPTHGVPAMKSKIDPILEARQKYAYGTQRDYLDHPDVIGWTREGDGVHADSGLATLMSDGPGGSKWMEVGKNNAGEVWYDITGNQTNTVTINKDGWGQFHVSGGSVSIYVQQ

SEQ ID NO: 25740 - protein, 483 aa, Bacillus licheniformis
HHNGTNPTMMQYFEWYLPNDGNHWNRLRSDASNLKDKGITAVWIPPAWKGASQNDVGYGAYDLYDLGEFNQKGTVRTKYGTRNQLQAAVTALKSNGIQVYGDVVMNHKGGADATEWVRAVEVNPSNRNQEVSGDYTIEAWTKFDFPGRGNTHSNFKWRWYHFDGVDWDQSRQLQNRIYKFRGKGWDWEVDTENGNYDYLMYADIDMDHPEVVNELRNWGVWYTNTLGLDGFRIDAVKHIKYSFTRDWLTHVRNTTGKNMFAVAEFWKNDIGAIENYLSKTNWNHSVFDVPLHYNLYNASRSGGNYDMRQIFNGTVVQRHPTHAVTFVDNHDSQPEEALESFVEEWFKPLAYALTLTRDQGYPSVFYGDYYGIPTHGVPAMKSKIDPILEARQKYAYGTQRDYLDHPDVIGWTREGDGVHADSGLATLMSDGPGGSKWMEVGKNNAGEVWYDITGNQTNTVTINKDGWGQFHVSGGSVSIYVQQ

SEQ ID NO: 25741 - protein, 483 aa, Bacillus licheniformis
HHNGTNGTMMQYFEWYLPNDGNHWNRLRSDASNLKDKGITAVWIPPAWKGASQNDVGYGAYDLYDLGEFNQKGTVRTKYGTRNQLQAAVTALKSNGIQVYGDVVMNHKGGADATEWVRAVEVNPSNRNQEVSGDYTIEAWTKFDFPGRGNTHSNFKWRWYHFDGVDWDQSRQLQNRIYKFRGKGWDWEVDTENGNYDYLMYADIDMDHPEVVNELRNWGVWYTNTLGLDGFRIDAVKHIKYSFTRDWLTHVRNTTGKNMFAVAEFWKNDIGAIENYLSKTNWNHSVFDVPLHYNLYNASRSGGNYDMRQIFNGTVVQRHPTHAVTFVDNHDSQPEEALESFVEEWFKPLAYALTLTRDQGYPSVFYGDYYGIPTHGVPAMKSKIDPILEARQKYAYGTQRDYLDHPDVIGWTREGDGVHADSGLATLMSDGSGGSKWMEVGKNNAGEVWYDITGNQTNTVTINKDGWGQFHVSGGSVSIYVQQ

SEQ ID NO: 25742 - protein, 483 aa, Bacillus licheniformis
HHNGTNGTMMQYFEWYLPNDGNHWNRLRSDASNLKDKGITAVWIPPAWKGASQNDVGYGAYDLYDLGEFNQKGTVRTKYGTRNQLQAAVTALKSNGIQVYGDVVMNHKGGADATEWVRAVEVNPSNRNQEVSGDYTIEAWTKFDFPGRGNTHSNFKWRWYHFDGVDWDQSRQLQNRIYKFRGKGWDWEVDTENGNYDYLMYADIDMDHPEVVNELRNWGVWYTNTLGLDGFRIDAVKHIKYSFTRDWLTHVRNTTGKNMFAVAEFWKNDIGAIYNYLSKTNWNHSVFDVPLHYNLYNASRSGGNYDMRQIFNGTVVQRHPTHAVTFVDNHDSQPEEALESFVEEWFKPLAYALTLTRDQGYPSVFYGDYYGIPTHGVPAMKSKIDPILEARQKYAYGTQRDYLDHPDVIGWTREGDGVHADSGLATLMSDGPGGSKWMEVGKNNAGEVWYDITGNQTNTVTINKDGWGQFHVSGGSVSIYVQQ

SEQ ID NO: 25743 - protein, 483 aa, Bacillus licheniformis
HHNGTNGTMMQYFEWYLPNDGNHWNRLRSDASNLKDKGITAVWIPPAWKGASQNDVGYGAYDLYDLGEFNQKGTVRTKYGTRNQLQAAVTALKSNGIQVYGDVVMNHKGGADATEWVRAVEVNPSNRNQEVSGDYTIEAWTKFDFPGRGNTHSNFKWRWYHFDGVDWDQSRQLQNRIYKFRGKGWDWEVDTENGNYDYLMYADIDMDEPEVVNELRNWGVWYTNTLGLDGFRIDAVKHIKYSFTRDWLTHVRNTTGKNMFAVAEFWKNDIGAIENYLSKTNWNHSVFDVPLHYNLYNASRSGGNYDMRQIFNGTVVQRHPTHAVTFVDNHDSQPEEALESFVEEWFKPLAYALTLTRDQGYPSVFYGDYYGIPTHGVPAMKSKIDPILEARQKYAYGTQRDYLDHPDVIGWTREGDGVHADSGLATLMSDGPGGSKWMEVGKNNAGEVWYDITGNQTNTVTINKDGWGQFHVSGGSVSIYVQQ

SEQ ID NO: 25744 - protein, 483 aa, Bacillus licheniformis
HHNGTNGTMMQYFEWYLPNDGNHWNRLRSDASNLKDKGITAVWIPPAWKGASQNDVGYGAYDLYDLGEFNQKGTVRTKYGTRNQLQAAVTALKSNGIQVYGDVVMNHKGGADATEWVRAVEVNPSNRNQEVSGDYTIEAWTKFDFPGRGNTHSNFKWRWYHFDGVDWDQSRQLQNRIYKFRGKGWDWEVDTENGNYDYLMYADIDMDHPEVVNELRNWGVWYTNTLGLDGFRIDAVKHIKYSFTRDWLTHVRNTTGKNMFAVAEFWKNDIIAIENYLSKTNWNHSVFDVPLHYNLYNASRSGGNYDMRQIFNGTVVQRHPTHAVTFVDNHDSQPEEALESFVEEWFKPLAYALTLTRDQGYPSVFYGDYYGIPTHGVPAMKSKIDPILEARQKYAYGTQRDYLDHPDVIGWTREGDGVHADSGLATLMSDGPGGSKWMEVGKNNAGEVWYDITGNQTNTVTINKDGWGQFHVSGGSVSIYVQQ

SEQ ID NO: 25745 - protein, 483 aa, Bacillus licheniformis
HHNGTNGTMMQYFEWYLPNDGNHWNRLRSDASNLKDKGITAVWIPPAWKGASQNDVGYGAYDLYDLGEFNQKGTVRTKYGTRNQLQAAVTALKSNGIQVYGDVVMNHKGGADATEWVRAVEVNPSNRNQEVSGDYTIEAWTKFDFPGRGNTHSNFKWRWYHFDGVDWDQSRQLQNRIYKFRGKGWDWEVDTENGNYDYLMYADIDMDHPEVVNELRNWGVWYTNTLGLDGFRIDAVKHIKYSFTRDWLTHVRNTTGKNMFAVAEFWKNDIGAIENYLSKTNWNHSVFDVPLTYNLYNASRSGGNYDMRQIFNGTVVQRHPTHAVTFVDNHDSQPEEALESFVEEWFKPLAYALTLTRDQGYPSVFYGDYYGIPTHGVPAMKSKIDPILEARQKYAYGTQRDYLDHPDVIGWTREGDGVHADSGLATLMSDGPGGSKWMEVGKNNAGEVWYDITGNQTNTVTINKDGWGQFHVSGGSVSIYVQQ

SEQ ID NO: 25746 - protein, 483 aa, Bacillus licheniformis
HHNGTNGTMMQYFEWYLPNDGNHWNRLRSDASNLKDKGITAVWIPPAWKGASQNDVGYGAYDLYDLGEFNQKGTVRTKYGTRNQLQAAVTALKSNGIQVYGDVVMNHKGGADATEWVRAVEVNPSNRNQEVSGDYTIEAWTKFDFPGRGNTHSNFKWRWYHFDGVDWDQSRQLQNRIYKFRGKGWDWEVDTENGNYDYLMYADIDMDHPEVVNELRNWGVWYTNTLGLDGFRIDAVKHIKYSFTRDWLTHVRNTTGKNMFAVAEFWKNDIGAIENYLSKTNWNHSVFDVPLHYNLYNASRSGGHYDMRQIFNGTVVQRHPTHAVTFVDNHDSQPEEALESFVEEWFKPLAYALTLTRDQGYPSVFYGDYYGIPTHGVPAMKSKIDPILEARQKYAYGTQRDYLDHPDVIGWTREGDGVHADSGLATLMSDGPGGSKWMEVGKNNAGEVWYDITGNQTNTVTINKDGWGQFHVSGGSVSIYVQQ

SEQ ID NO: 25747 - protein, 483 aa, Bacillus licheniformis
HHNGTNGTMMQYFEWYLPNDGNHWNRLRSDASNLKDKGITAVWIPPAWKGASQNDVGYGAYDLYDLGEFNQKGTVRTKYGTRNQLQAAVTALKSNGIQVYGDVVMNHKGGADATEWVRAVEVNPSNRNQEVSGDYTIEAWTKFDFPGRGNTHSNFKWRWYHFDGVDWDQSRQLQNRIYKFRGKGWDWEVDTENGNYDYLMYADIDMDHPEVVNELRNWGVWYTNTLGLDGFRIDAVKHIKYSFTRDWLTHVRNTTGKNMFAVAEFWKNDIGAIENYLSKTNWNHSVFDVWLHYNLYNASRSGGNYDMRQIFNGTVVQRHPTHAVTFVDNHDSQPEEALESFVEEWFKPLAYALTLTRDQGYPSVFYGDYYGIPTHGVPAMKSKIDPILEARQKYAYGTQRDYLDHPDVIGWTREGDGVHADSGLATLMSDGPGGSKWMEVGKNNAGEVWYDITGNQTNTVTINKDGWGQFHVSGGSVSIYVQQ

SEQ ID NO: 25748 - protein, 483 aa, Bacillus licheniformis
HHNGTNGTMMQYFEWYLPNDGNHWNRLRSDASNLKDKGITAVWIPPAWKGASQNDVGYGAYDLYDLGEFNQKGTVRTKYGTRNQLQAAVTALKSNGIQVYGDVVMNHKGGADATEWVRAVEVNPSNRNQEVSGDYTIEAWTKFDFPGRGNTHSNFKWRWYHFDGVDWDQSRQLQNRIYKFRGKGWDWEVDTENGNYDYLMYADIDMDHPEVVNELRNWGVWYTNTLGLDGFRIDAVKHIKYSFTRDWLTHVRNTTGKNMFAVAEFWKNDIGAIENYLSKTNWNHSVFDVPLHYNLYNASRSGGNYDMRQIFNGTVVQRHPTHAVTFVDNHDSQPEEALESFVEEWFKPLAYALTLTRDQGYPSVFYGDYYGIPTHGVPAMKSKIDPILEARQKYAYGTQRDYLDHPDVIGWTREGDGVHADSGLATLMSDGPGGSKWMEVGKNNAGEVWYDITGNQTNAVTINKDGWGQFHVSGGSVSIYVQQ

SEQ ID NO: 25749 - protein, 483 aa, Bacillus licheniformis
HHNGTNGTMMQYFEWYLPNDGNHWNRLRSDASNLKDKGITAVWIPPAWKGASQNDVGYGAYDLYDLGEFNQKGTVRTKYGTRNQLQAAVTALKSNGIQVYGDVVMNHKGGADATEWVRAVEVNPSNRNQEVSGDYTIEAWTKFDFPGRGNTHSNFKWRWYHFDGVDWDQSRQLQNRIYKFRGKGWDWEVDTENGNYDYLMYADIDMDHPEVVNELRNWGVWYTNTLGLDGFRIDAVKHIKYSFTRDWLTHVRNTVGKNMFAVAEFWKNDIGAIENYLSKTNWNHSVFDVPLHYNLYNASRSGGNYDMRQIFNGTVVQRHPTHAVTFVDNHDSQPEEALESFVEEWFKPLAYALTLTRDQGYPSVFYGDYYGIPTHGVPAMKSKIDPILEARQKYAYGTQRDYLDHPDVIGWTREGDGVHADSGLATLMSDGPGGSKWMEVGKNNAGEVWYDITGNQTNTVTINKDGWGQFHVSGGSVSIYVQQ

SEQ ID NO: 25750 - protein, 483 aa, Bacillus licheniformis
HHNGTNGTMMQYFEWYLPNDGNHWNRLRSDASNLKDKGITAVWIPPAWKGASQNDVGYGAYDLYDLGEFNQKGTVRTKYGTRNQLQAAVTALKSNGIQVYGDVVMNHKGGADATEWVRAVEVNPSNRNQEVSGDYTIEAWTKFDFPGRGNTHSNFKWRWYHFDGVDWDQSRQLQNKIYKFRGKGWDWEVDTENGNYDYLMYADYDMDHPEVVNELRNWGVWYTNTLGLDGFRIDAVKHIKYSFTRDWLTHVRNTTGKNMFAVAEFWKNDIGAIRNYLSKTNWNHSVFDVPLHYNLYNASRSGGNYDMRQIFNGTVVQRHPTHAVTFVDNHDSQPEEALESFVEEWFKPLAYALTLTRDQGYPSVFYGDYYGIPTHGVPAMKSKIDPILEARQKYAYGTQRDYLDHPDVIGWTREGDGVHADSGLATLMSDGPGGSKWMEVGKNNAGEVWYDITGNQTGTVTINKDGWGQFHVSGGSVSIYVQQ

SEQ ID NO: 25751 - protein, 483 aa, Bacillus licheniformis
HHNGTNGTMMQYFEWYLPNDGNHWNRLRSDASNLKDKGITAVWIPPAWKGASQNDVGYGAYDLYDLGEFNQKGTVRTKYGTRNQLQAAVTALKSNGIQVYGDVVMNHKGGADATEWVRAVEVNPSNRNQEVSGDYTIEAWTKFDFPGRGNTHSNFKWRWYHFDGVDWDQSRQLQNRIYKFRGKGWDWEVDTENGNYDYLMYADIDMDHPEVVNELRNWGVWYTNTLGLDGFRIDAVKHIKYSFTRDWLTHVRNTTGKNMFAVAEFWKNDIGAIENYLSKTNWNHSVFDVPLHYNLYNASRSGGNYDMRQIFNGTVVQRHPTHAVTFVDNHDSQPEEALESFVEEWFKPLAYALTLTRDQGYPSVFYGDYYGIPTHGVPAMKSKINPILEARQKYAYGTQRDYLDHPDVIGWTREGDGVHADSGLATLMSDGPGGSKWMEVGKNNAGEVWYDITGNQTNTVTINKDGWGQFHVSGGSVSIYVQQ

SEQ ID NO: 25752 - protein, 483 aa, Bacillus licheniformis
HHNGTNGTMMQYFEWYLPNDGNHWNRLRSDASNLKDKGITAVWIPPAWKGASQNDVGYGAYDLYDLGEFNQKGTVRTKYGTRNQLQAAVTALKSNGIQVYGDVVMNHKGGADATEWVRAVEVNPSNRNQEVSGDYTIEAWTKFDFPGRGNTHSNFKWRWYHFDGVDWDQSRQLQNRIYKFRGKGWDWEVDTENGNYDYLMYADIDMDHPLVVNELRNWGVWYTNTLGLDGFRIDAVKHIKYSFTRDWLTHVRNTTGKNMFAVAEFWKNDIGAIENYLSKTNWNHSVFDVPLHYNLYNASRSGGNYDMRQIFNGTVVQRHPTHAVTFVDNHDSQPEEALESFVEEWFKPLAYALTLTRDQGYPSVFYGDYYGIPTHGVPAMKSKIDPILEARQKYAYGTQRDYLDHPDVIGWTREGDGVHADSGLATLMSDGPGGSKWMEVGKNNAGEVWYDITGNQTNTVTINKDGWGQFHVSGGSVSIYVQQ

SEQ ID NO: 25753 - protein, 483 aa, Bacillus licheniformis
HHNGTNGTMMQYFEWYLPNDGNHWNRLRSDASNLKDKGITAVWIPPAWKGASQNDVGYGAYDLYDLGEFNQKGTVRTKYGTRNQLQAAVTALKSNGIQVYGDVVMNHKGGADATEWVRAVEVNPSNRNQEVSGDYTIEAWTKFDFPGRGNTHSNFKWRWWHFDGVDWDQSRQLQNKIYKFRGKGWDWEVDTENGNYDYLMYADYDMDHPEVVNELRNWGVWYTNTLGLDGFRIDAVKHIKYSFTRDWLTHVRNTTGKNMFAVAEFWKNDIGAIENYLSKTNWNHSVFDVPLHYNLYNASRSGGNYDMRQIFNGTVVQRHPTHAVTFVDNHDSQPEEALESFVEEWFKPLAYALTLTRDQGYPSVFYGDYYGIPTHGVPAMKSKIDPILEARQKYAYGTQRDYMDHPDVIGWTREGDGVHADSGLATLMSDGPGGSKWMEVGKNNAGEVWYDITGNQTGTVTINKDGWGQFHVSGGSVSIYVQQ

SEQ ID NO: 25754 - protein, 483 aa, Bacillus licheniformis
HHNGTNGTMMQYFEWYLPNDGNHWNFLRSDASNLKDKGITAVWIPPAWKGASQNDVGYGAYDLYDLGEFNQKGTVRTKYGTRNQLQAAVTALKSNGIQVYGDVVMNHKGGADATEWVRAVEVNPSNRNQEVSGDYTIEAWTKFDFPGRGNTHSNFKWRWYHFDGVDWDQSRQLQNRIYKFRGKGWDWEVDTENGNYDYLMYADIDMDHPEVVNELRNWGVWYTNTLGLDGFRIDAVKHIKYSFTRDWLTHVRNTTGKNMFAVAEFWKNDIGAIENYLSKTNWNHSVFDVPLHYNLYNASRSGGNYDMRQIFNGTVVQRHPTHAVTFVDNHDSQPEEALESFVEEWFKPLAYALTLTRDQGYPSVFYGDYYGIPTHGVPAMKSKIDPILEARQKYAYGTQRDYLDHPDVIGWTREGDGVHADSGLATLMSDGPGGSKWMEVGKNNAGEVWYDITGNQTNTVTINKDGWGQFHVSGGSVSIYVQQ

SEQ ID NO: 25755 - protein, 483 aa, Bacillus licheniformis
HHNGTNGTMMQYFEWYLPNDGNHWNRLRSDASNLKDKGITAVWIPPAWKGASQNDVGYGAYDLYDLGEFNQKGTVRTKYGTRNQLQAAVTALKSNGIQVYGDVVMNHKGGADATEWVRAVEVNPSNRNQEVSGDYTIEAWTKFDFPGRGNTHSNFKWRWYHFDGVDWDQSRQLQNRIYKFRGKGWDWEVDTENGNYDYLMYADIDMDHPEVVNELRNWGVWYTNTLGLDGFRIDAVKHIKYSFTRDWLTHVRNTTGKNMFAVAEFWKNDIGAIENYLSKTNWNHSVFDVPLHYNLYNASRSGGNYDMRQIFNGTVVQRHPTHAVTFVDNHDSQPEEALESFVEEWFKPLAYALTLTRDQGYPSVFYGDYYGIPTHGVPAMKSKIDPILEARQKYAYGTQRDYLDHPDVIGWTREGDGVHADSGLCTLMSDGPGGSKWMEVGKNNAGEVWYDITGNQTNTVTINKDGWGQFHVSGGSVSIYVQQ

SEQ ID NO: 25756 - protein, 483 aa, Bacillus licheniformis
HHNGTNGTMMQYFEWYLPNDGNHWNRLRSDASNLKDKGITAVWIPPAWKGASQNDVGYGAYDLYDLGEFNQKGTVRTKYGTRNQLQAAVTALKSNGIQVYGDVVMNHKGGADATEWVRAVEVNPSNRNQEVSGDYTIEAWTKFDFPGRGNTHSNFKWRWYHFDGVDWDQSRQLQNRIYKFRGKGWDWEVDTENGNYDYLMYADIDMDHPEVVNELRNWGVWYTNTLGLDGFRIDAVKHIKYSFTRDWLTHVRNTTGKNMFAVAEFWKNDIGAIENYLSKTNWNHSVFDVPLHYNLYNASRSGGNYDMRQIFNGTVVQRHPTHAVTFVDNHDSQPEEALESFVEEWFKPLAYALTLTRDQGYPSVFYGDYYGIPTHGVPAMKSKIDPILEARQKYAYGTQRDYLDHPDVIGWTREGDGVHADSGLATLMSDGPGGSKWMEVGKNNLGEVWYDITGNQTNTVTINKDGWGQFHVSGGSVSIYVQQ

SEQ ID NO: 25757 - protein, 483 aa, Bacillus licheniformis
HHNGTNGTMMQYFEWYLPNGGNHWNRLRSDASNLKDKGITAVWIPPAWKGASQNDVGYGAYDLYDLGEFNQKGTVRTKYGTRNQLQAAVTALKSNGIQVYGDVVMNHKGGADATEWVRAVEVNPSNRNQEVSGDYTIEAWTKFDFPGRGNTHSNFKWRWYHFDGVDWDQSRQLQNRIYKFRGKGWDWEVDTENGNYDYLMYADIDMDHPEVVNELRNWGVWYTNTLGLDGFRIDAVKHIKYSFTRDWLTHVRNTTGKNMFAVAEFWKNDIGAIENYLSKTNWNHSVFDVPLHYNLYNASRSGGNYDMRQIFNGTVVQRHPTHAVTFVDNHDSQPEEALESFVEEWFKPLAYALTLTRDQGYPSVFYGDYYGIPTHGVPAMKSKIDPILEARQKYAYGTQRDYLDHPDVIGWTREGDGVHADSGLATLMSDGPGGSKWMEVGKNNAGEVWYDITGNQTNTVTINKDGWGQFHVSGGSVSIYVQQ

SEQ ID NO: 25758 - protein, 483 aa, Bacillus licheniformis
HHNGTNGTMMQYFEWYLPNDGNHWNRLRSDASNLKDKGITAVWIPPAWKGASQNDVGYGAYDLYDLGEFNQKGTVRTKYGTRNQLQAAVTALKSNGIQVYGDVVMNHKGGADATEWVRAVEVNPSNRNQEVSGDYTIEAWTKFDFPGRGNCHSNFKWRWYHFDGVDWDQSRQLQNRIYKFRGKGWDWEVDTENGNYDYLMYADIDMDHPEVVNELRNWGVWYTNTLGLDGFRIDAVKHIKYSFTRDWLTHVRNTTGKNMFAVAEFWKNDIGAIENYLSKTNWNHSVFDVPLHYNLYNASRSGGNYDMRQIFNGTVVQRHPTHAVTFVDNHDSQPEEALESFVEEWFKPLAYALTLTRDQGYPSVFYGDYYGIPTHGVPAMKSKIDPILEARQKYAYGTQRDYLDHPDVIGWTREGDGVHADSGLATLMSDGPGGSKWMEVGKNNAGEVWYDITGNQTNTVTINKDGWGQFHVSGGSVSIYVQQ

SEQ ID NO: 25759 - protein, 483 aa, Bacillus licheniformis
HHNGTNGTMMQYFEWYLPNDGNHWNRLRSDASNLKDKGITAVWIPPAWKGASQNDVGYGAYDCYDLGEFNQKGTVRTKYGTRNQLQAAVTALKSNGIQVYGDVVMNHKGGADATEWVRAVEVNPSNRNQEVSGDYTIEAWTKFDFPGRGNTHSNFKWRWYHFDGVDWDQSRQLQNRIYKFRGKGWDWEVDTENGNYDYLMYADIDMDHPEVVNELRNWGVWYTNTLGLDGFRIDAVKHIKYSFTRDWLTHVRNTTGKNMFAVAEFWKNDIGAIENYLSKTNWNHSVFDVPLHYNLYNASRSGGNYDMRQIFNGTVVQRHPTHAVTFVDNHDSQPEEALESFVEEWFKPLAYALTLTRDQGYPSVFYGDYYGIPTHGVPAMKSKIDPILEARQKYAYGTQRDYLDHPDVIGWTREGDGVHADSGLATLMSDGPGGSKWMEVGKNNAGEVWYDITGNQTNTVTINKDGWGQFHVSGGSVSIYVQQ

SEQ ID NO: 25760 - protein, 483 aa, Bacillus licheniformis
HHNGTNGTMMQYFEWYLPNDGNHWNRLRSDASNLKDKGITAVWIPPAWKGASQNDVGYGAYDLYDLGEFNQKGTVRTKYGTRNQLQAAVTALKSNGIQVYGDVVMNHKGGADATEWVRAVEVNPSNRNQEVSGDYTIEAWTKFDFPGRGNTHSNFKWRWYHFDGVDWDQSRQLQNRIYKFRGKGWDWEVDTENGNYDYLMYADIDMDHPEVVNELFNWGVWYTNTLGLDGFRIDAVKHIKYSFTRDWLTHVRNTTGKNMFAVAEFWKNDIGAIENYLSKTNWNHSVFDVPLHYNLYNASRSGGNYDMRQIFNGTVVQRHPTHAVTFVDNHDSQPEEALESFVEEWFKPLAYALTLTRDQGYPSVFYGDYYGIPTHGVPAMKSKIDPILEARQKYAYGTQRDYLDHPDVIGWTREGDGVHADSGLATLMSDGPGGSKWMEVGKNNAGEVWYDITGNQTNTVTINKDGWGQFHVSGGSVSIYVQQ

SEQ ID NO: 25761 - protein, 483 aa, Bacillus licheniformis
HHNGTNGTMMQYFEWYLPNDGNHWNRLRSDASNLKDKGITAVWIPPAFKGASQNDVGYGAYDLYDLGEFNQKGTVRTKYGTRNQLQAAVTALKSNGIQVYGDVVMNHKGGADATEWVRAVEVNPSNRNQEVSGDYTIEAWTKFDFPGRGNTHSNFKWRWYHFDGVDWDQSRQLQNRIYKFRGKGWDWEVDTENGNYDYLMYADIDMDHPEVVNELRNWGVWYTNTLGLDGFRIDAVKHIKYSFTRDWLTHVRNTTGKNMFAVAEFWKNDIGAIENYLSKTNWNHSVFDVPLHYNLYNASRSGGNYDMRQIFNGTVVQRHPTHAVTFVDNHDSQPEEALESFVEEWFKPLAYALTLTRDQGYPSVFYGDYYGIPTHGVPAMKSKIDPILEARQKYAYGTQRDYLDHPDVIGWTREGDGVHADSGLATLMSDGPGGSKWMEVGKNNAGEVWYDITGNQTNTVTINKDGWGQFHVSGGSVSIYVQQ

SEQ ID NO: 25762 - protein, 483 aa, Bacillus licheniformis
HHNGTNGTMMQYFEWYLPNDGNHWNRLRSDASNLKDKGITAVWIPPAWKGASQNDVGYGAYDLYDLGEFNQKGTVRTKYGTRNQLQAAVTALKSNGIQVYGDVVMNHKGGADATEWVRAVEVNPSNRNQEVSGDYTIEAWTKFDFPGRGNTHSNFKWRWYHFDGVDWDQSRQLQNRIYKFRGKGWDWEVDTENGNYDYLMYADIDMDHPEVVNELRNWGVWYTNTLGLDGCRIDAVKHIKYSFTRDWLTHVRNTTGKNMFAVAEFWKNDIGAIENYLSKTNWNHSVFDVPLHYNLYNASRSGGNYDMRQIFNGTVVQRHPTHAVTFVDNHDSQPEEALESFVEEWFKPLAYALTLTRDQGYPSVFYGDYYGIPTHGVPAMKSKIDPILEARQKYAYGTQRDYLDHPDVIGWTREGDGVHADSGLATLMSDGPGGSKWMEVGKNNAGEVWYDITGNQTNTVTINKDGWGQFHVSGGSVSIYVQQ

SEQ ID NO: 25763 - protein, 483 aa, Bacillus licheniformis
HHNGTNGTMMQYFEWYLPNDGNHWNRLRSDASNLKDKGITAVWIPPAWKGASQNDVGYGAYDLYDLGEFNQKGTVRTKYGTRNQLQAAVTGLKSNGIQVYGDVVMNHKGGADATEWVRAVEVNPSNRNQEVSGDYTIEAWTKFDFPGRGNTHSNFKWRWYHFDGVDWDQSRQLQNRIYKFRGKGWDWEVDTENGNYDYLMYADIDMDHPEVVNELRNWGVWYTNTLGLDGFRIDAVKHIKYSFTRDWLTHVRNTTGKNMFAVAEFWKNDIGAIENYLSKTNWNHSVFDVPLHYNLYNASRSGGNYDMRQIFNGTVVQRHPTHAVTFVDNHDSQPEEALESFVEEWFKPLAYALTLTRDQGYPSVFYGDYYGIPTHGVPAMKSKIDPILEARQKYAYGTQRDYLDHPDVIGWTREGDGVHADSGLATLMSDGPGGSKWMEVGKNNAGEVWYDITGNQTNTVTINKDGWGQFHVSGGSVSIYVQQ

SEQ ID NO: 25764 - protein, 483 aa, Bacillus licheniformis
HHNGTNGTMMQYFEWYLPNDGNHWNRLRSDASNLKDKGITAVWIPPAWKGASQNDVGYGAYDLYDLGEFNQKGTVRTKYGTRNQLQAAVTALKSNGIQVYGDVVMNHKGGADATEWVRAVEVNPSNRNQEVSGDYTIEAWTKFDFPGRGNTHSNFKWRWYHFDGVDWDDSRQLQNRIYKFRGKGWDWEVDTENGNYDYLMYADIDMDHPEVVNELRNWGVWYTNTLGLDGFRIDAVKHIKYSFTRDWLTHVRNTTGKNMFAVAEFWKNDIGAIENYLSKTNWNHSVFDVPLHYNLYNASRSGGNYDMRQIFNGTVVQRHPTHAVTFVDNHDSQPEEALESFVEEWFKPLAYALTLTRDQGYPSVFYGDYYGIPTHGVPAMKSKIDPILEARQKYAYGTQRDYLDHPDVIGWTREGDGVHADSGLATLMSDGPGGSKWMEVGKNNAGEVWYDITGNQTNTVTINKDGWGQFHVSGGSVSIYVQQ

SEQ ID NO: 25765 - protein, 483 aa, Bacillus licheniformis
HHNGTNGTMMQYFEWYLPNDGNHWNRLRSDASNLKDKGITAVWIPPAWKGASQNDVGYGAYDLYDLGEFNQKGTVRTKYGTRNQLQAAVTALKSNGIQVYGDVVMNHKGGADAMEWVRAVEVNPSNRNQEVSGDYTIEAWTKFDFPGRGNTHSNFKWRWYHFDGVDWDQSRQLQNRIYKFRGKGWDWEVDTENGNYDYLMYADIDMDHPEVVNELRNWGVWYTNTLGLDGFRIDAVKHIKYSFTRDWLTHVRNTTGKNMFAVAEFWKNDIGAIENYLSKTNWNHSVFDVPLHYNLYNASRSGGNYDMRQIFNGTVVQRHPTHAVTFVDNHDSQPEEALESFVEEWFKPLAYALTLTRDQGYPSVFYGDYYGIPTHGVPAMKSKIDPILEARQKYAYGTQRDYLDHPDVIGWTREGDGVHADSGLATLMSDGPGGSKWMEVGKNNAGEVWYDITGNQTNTVTINKDGWGQFHVSGGSVSIYVQQ

SEQ ID NO: 25766 - protein, 483 aa, Bacillus licheniformis
HHNGTNGTMMQYFEWYLPNDGNHWNRLRSDASNLKDKGITAVWIPPAWKGASQNDVGYGAYDLYDLGEFNQKGTVRTKYGTRNQLQAAVTALKSNGIQVYGDVVMNHKGGADATEWVRAVEVNPSNRNQEVSGDYTIEAWTKFDFPGRGNTHSNFKWRWYHFDGVDWDQSRQLQNRIYKFRGKGWDWEVDTENGNYDYLMYADIDMDHVEVVNELRNWGVWYTNTLGLDGFRIDAVKHIKYSFTRDWLTHVRNTTGKNMFAVAEFWKNDIGAIENYLSKTNWNHSVFDVPLHYNLYNASRSGGNYDMRQIFNGTVVQRHPTHAVTFVDNHDSQPEEALESFVEEWFKPLAYALTLTRDQGYPSVFYGDYYGIPTHGVPAMKSKIDPILEARQKYAYGTQRDYLDHPDVIGWTREGDGVHADSGLATLMSDGPGGSKWMEVGKNNAGEVWYDITGNQTNTVTINKDGWGQFHVSGGSVSIYVQQ

SEQ ID NO: 25767 - protein, 483 aa, Bacillus licheniformis
HHNGTNGTMMQYFEWYLPNDGNHWNRLRSDASNLKDKGITAVWIPPAWKGASQNDVGYGAYDLYDLGEFNQKGTVRTKYGTRNQLQAAVTALKSNGIQVYGDVVMNHKGGADATEWVRAVEVNPSNRNQEVSGDYTIEAWTKFDFPGRGNTHSNFKWRWYHFDGVDWDQSRQLQNRIYKFRGKGWDWEVDTENGNYDYLMYADIDMDHPEVVNELRNWGVWYTNTLGLDGFRIDAVKHIKYSFTRDWLTHVRNTTGKNMPAVAEFWKNDIGAIENYLSKTNWNHSVFDVPLHYNLYNASRSGGNYDMRQIFNGTVVQRHPTHAVTFVDNHDSQPEEALESFVEEWFKPLAYALTLTRDQGYPSVFYGDYYGIPTHGVPAMKSKIDPILEARQKYAYGTQRDYLDHPDVIGWTREGDGVHADSGLATLMSDGPGGSKWMEVGKNNAGEVWYDITGNQTNTVTINKDGWGQFHVSGGSVSIYVQQ

SEQ ID NO: 25768 - protein, 483 aa, Bacillus licheniformis
HHNGTNGTMMQYFEWYLPNDGNHWNRLRSDASNLKDKGITAVWIPPAWKGASQNDVGYGAYDLYDLGEFNQKGTVRTKYGTRNQLQAAVTALKSNGIQVYGDVVMNHKGGADATEWVRAVEVNPSNRNQEVSGDYTIEAWTKFDFPGRGNTHSNFKWRWYHFDGVDWDQSRQLQNRIYKFRGKGWDWEVDTENGNYDYLMYADIDMDHPEVVNELRNWGVWYTNTLGLDGFRIDAVKHIKYSFTRDWLTHVRNTTGKNMFAVAEFWKNDIGAIENYLSKTNMNHSVFDVPLHYNLYNASRSGGNYDMRQIFNGTVVQRHPTHAVTFVDNHDSQPEEALESFVEEWFKPLAYALTLTRDQGYPSVFYGDYYGIPTHGVPAMKSKIDPILEARQKYAYGTQRDYLDHPDVIGWTREGDGVHADSGLATLMSDGPGGSKWMEVGKNNAGEVWYDITGNQTNTVTINKDGWGQFHVSGGSVSIYVQQ

SEQ ID NO: 25769 - protein, 483 aa, Bacillus licheniformis
HHNGTNGTMMQYFEWYLPNDGNHWNRLRSDASNLKDKGITAVWIPPAWKGASQNDVGYGAYDLYDLGEFNQKGTVRTKYGTRNQLQAAVTALKSNGIQVYGDVVMNHKGGADATEWVRAVEVNPSNRNQEVSGDYTIEAWTKFDFPGRGNTHSNFKWRWYHFDGVDWDQSRQLQNRIYKFRGKGWDWEVDTENGNYDYLMYADIDMDHPEVVNELRNWGVWYTNTLGLDGFRIDAVKHIKYSFTRDWLTHVRNTTGKNMFAVAEFWKNDIGAIENYLSKTNWNHSVFDVPLHYNLYNASRSGGNYDMRQIFNGTVVQRHPTHAVTFVDNHDSQPEEALESFVEEWFKPLAYALTLTFDQGYPSVFYGDYYGIPTHGVPAMKSKIDPILEARQKYAYGTQRDYLDHPDVIGWTREGDGVHADSGLATLMSDGPGGSKWMEVGKNNAGEVWYDITGNQTNTVTINKDGWGQFHVSGGSVSIYVQQ

SEQ ID NO: 25770 - protein, 483 aa, Bacillus licheniformis
HHNGTSGTMMQYFEWYLPNDGNHWNRLRSDASNLKDKGITAVWIPPAWKGASQNDVGYGAYDLYDLGEFNQKGTVRTKYGTRNQLQAAVTALKSNGIQVYGDVVMNHKGGADATEWVRAVEVNPSNRNQEVSGDYTIEAWTKFDFPGRGNTHSNFKWRWYHFDGVDWDQSRQLQNRIYKFRGKGWDWEVDTENGNYDYLMYADIDMDHPEVVNELRNWGVWYTNTLGLDGFRIDAVKHIKYSFTRDWLTHVRNTTGKNMFAVAEFWKNDIGAIENYLSKTNWNHSVFDVPLHYNLYNASRSGGNYDMRQIFNGTVVQRHPTHAVTFVDNHDSQPEEALESFVEEWFKPLAYALTLTRDQGYPSVFYGDYYGIPTHGVPAMKSKIDPILEARQKYAYGTQRDYLDHPDVIGWTREGDGVHADSGLATLMSDGPGGSKWMEVGKNNAGEVWYDITGNQTNTVTINKDGWGQFHVSGGSVSIYVQQ

SEQ ID NO: 25771 - protein, 483 aa, Bacillus licheniformis
HHNGTNGTMMQYFEWYLPNDGNHWNRLRSDASNLKDKGITAVWIPPAWKGASQNDVGYGAYDLYDLGEFNQKGTVRTKYGTRNQLQRAVTALKSNGIQVYGDVVMNHKGGADATEWVRAVEVNPSNRNQEVSGDYTIEAWTKFDFPGRGNTHSNFKWRWYHFDGVDWDQSRQLQNRIYKFRGKEWDWEVDTENGNYDYLMYADIDMDHPEVVNELRNWGVWYTDTLGLDGFRIDAVKHIKYSFTRDWLTHVRNTTGKNMFAVAEFWKNDIGAIENYLSKTNWNHSVFDVPLHYNLYNASRSGGNYDMRQIFNGTVVQRHPTHAVTFVDNHDSQPEEALESFVEEWFKPLAYALTLTRDQGYPSVFYGDYYGIPTHGVPAMKSKIDPILEARQKYAYGTQRDYLDHPDVIGWTREGDGVHADSGLATLMSDGPGGSKWMEVGKNNAGEVWYDITGNQTNTVTINKDGWGEFHVSGGSVSIYVQQ

SEQ ID NO: 25772 - protein, 483 aa, Bacillus licheniformis
HHNGTNGTMMQYFEWYLPNDGEHWNRLRSDASNLKDKGITAVWIPPAWKGASQNDVGYGAYDLYDLGEFNQKGTVRTKYGTRNQLQAAVTALKSNGIQVYGDVVMNHKGGADATEWVRAVEVNPSNRNQEVSGDYTIEAWTKFDFPGRGNTHSNFKWRWYHFDGVDWDQSRQLQNRIYKFRGKGWDWEVDTENGNYDYLMYADIDMDHPEVVNELRNWGVWYTNTLGLDGFRIDAVKHIKYSFTRDWLTHVRNTTGKNMFAVAEFWKNDIGAIENYLSKTNWNHSVFDVPLHYNLYNASRSGGNYDMRQIFNGTVVQRHPTHAVTFVDNHDSQPEEALESFVEEWFKPLAYALTLTRDQGYPSVFYGDYYGIPTHGVPAMKSKIDPILEARQKYAYGTQRDYLDHPDVIGWTREGDGVHADSGLATLMSDGPGGSKWMEVGKNNAGEVWYDITGNQTNTVTINKDGWGQFHVSGGSVSIYVQQ

SEQ ID NO: 25773 - protein, 483 aa, Bacillus licheniformis
HHNGTNGTMMQYFEWYLPNDGNHWNRLRSDASNLKDKGITAVWIPPAWKGASQNDVGYGAYDLYDLGEFNQKGTVRTKYGTRNQLQAAVTALKSNGIQVYGDVVMNHKGGADATEWVRAVEVNPSNRNQEVSGDYTIESWTKFDFPGRGNTHSNFKWRWYHFDGVDWDQSRQLQNRIYKFRGKGWDWEVDTENGNYDYLMYADIDMDHPEVVNELRNWGVWYTNTLGLDGFRIDAVKHIKYSFTRDWLTHVRNTTGKNMFAVAEFWKNDIGAIENYLSKTNWNHSVFDVPLHYNLYNASRSGGNYDMRQIFNGTVVQRHPTHAVTFVDNHDSQPEEALESFVEEWFKPLAYALTLTRDQGYPSVFYGDYYGIPTHGVPAMKSKIDPILEARQKYAYGTQRDYLDHPDVIGWTREGDGVHADSGLATLMSDGPGGSKWMEVGKNNAGEVWYDITGNQTNTVTINKDGWGQFHVSGGSVSIYVQQ

SEQ ID NO: 25774 - protein, 483 aa, Bacillus licheniformis
HHNGTNGTMMQYFEWYLPNDGNHWNRLRSDASNLKDKGITAVWIPPAWKGASQNDVGYGAYDLYDLGEFNQKGTVRTKYGTRNQLQAAVTALKSNGIQVYGDVVMNHKGGADATEWVRAVEVNPSNRNQEVSGDYTIEAWTKFDFPGRGNTHSNFKWRWYHFDGVDWDQSRQLQNRIYKFRGKGWDWEVDTENGNYDYLMYADIDMDHPEVVNELRNWGVWYTNTLGLDGFRIDAVKHIKYSFTRDWLTHVRNTTGKNMFAVAEFWKNDIGAIENYLSKTNWNHSVFDVPLHYNLYNASRSGGNYDMRQIFNGTVVQRHPTHAVTFVDNHDSQPEEALESFVEEWFKPLAYALTLTRDQGYPSVFYGDYYGIPTHGVPAMKSKIDPILEARQKYAYGTQRDYLDHPDVIGWTREGDGVHADSGLATLMSDGPGESKWMEVGKNNAGEVWYDITGNQTNTVTINKDGWGQFHVSGGSVSIYVQQ

SEQ ID NO: 25775 - protein, 483 aa, Bacillus licheniformis
HHNGTNGTMMQYFEWYLPNDGNHWNRLRSDASNLKDKGITAVWIPPAWKGASQNDVGYGAYDLYDLGEFNQKGTVRTKYGTRNQLQAAVTALKSNGIQVYGDVVMNHKGGADATEWVRAVEVNPSNRNQEVSGDYTIEAWTKFDFPGRGNTHSNFKWRWYHFDGVDWDQSRQLQNRIYKFRGKGWDWEVDTENGNYDYLMYADIDMDHPEVVNELRNWGVWYTNTLGLDGFRIDAVKHIKYSFTRDWLTHVRNTTGKNMFAVAEFWKNDIGAIENYLSKTNWNHSVFDVPLHYNLYNASRSGGNYDMRQIFNGTVVQRHPTHAVTFVDNHDSQPEEALESFVEEWFKPLAYALTLTRDQGYPSVFYGDYYGIPTHGVPAMKSKIDPILEARQKYAYGTQRDYLDHPDVIGWTREGDGVHADSGLATLMSDGPGGSKWMEVGKNNAGEVWYYITGNQTNTVTINKDGWGQFHVSGGSVSIYVQQ

SEQ ID NO: 25776 - protein, 483 aa, Bacillus licheniformis
HHNGDNGTMMQYFEWYLPNDGNHWNRLRSDASNLKDKGITAVWIPPAWKGASQNDVGYGAYDLYDLGEFNQKGTVRTKYGTRNQLQAAVTALKSNGIQVYGDVVMNHKGGADATEWVRAVEVNPSNRNQEVSGDYTIEAWTKFDFPGRGNTHSNFKWRWYHFDGVDWDQSRQLQNRIYKFRGKGWDWEVDTENGNYDYLMYADIDMDHPEVVNELRNWGVWYTNTLGLDGFRIDAVKHIKYSFTRDWLTHVRNTTGKNMFAVAEFWKNDIGAIENYLSKTNWNHSVFDVPLHYNLYNASRSGGNYDMRQIFNGTVVQRHPTHAVTFVDNHDSQPEEALESFVEEWFKPLAYALTLTRDQGYPSVFYGDYYGIPTHGVPAMKSKIDPILEARQKYAYGTQRDYLDHPDVIGWTREGDGVHADSGLATLMSDGPGGSKWMEVGKNNAGEVWYDITGNQTNTVTINKDGWGQFHVSGGSVSIYVQQ

SEQ ID NO: 25777 - protein, 483 aa, Bacillus licheniformis
HHNGTNGTMMQYFEWYLPNDGNHWNRLRSMASNLKDKGITAVWIPPAWKGASQNDVGYGAYDLYDLGEFNQKGTVRTKYGTRNQLQAAVTALKSNGIQVYGDVVMNHKGGADATEWVRAVEVNPSNRNQEVSGDYTIEAWTKFDFPGRGNTHSNFKWRWYHFDGVDWDQSRQLQNRIYKFRGKGWDWEVDTENGNYDYLMYADIDMDHPEVVNELRNWGVWYTNTLGLDGFRIDAVKHIKYSFTRDWLTHVRNTTGKNMFAVAEFWKNDIGAIENYLSKTNWNHSVFDVPLHYNLYNASRSGGNYDMRQIFNGTVVQRHPTHAVTFVDNHDSQPEEALESFVEEWFKPLAYALTLTRDQGYPSVFYGDYYGIPTHGVPAMKSKIDPILEARQKYAYGTQRDYLDHPDVIGWTREGDGVHADSGLATLMSDGPGGSKWMEVGKNNAGEVWYDITGNQTNTVTINKDGWGQFHVSGGSVSIYVQQ

SEQ ID NO: 25778 - protein, 483 aa, Bacillus licheniformis
HHNGTNGTMMQYFEWYLPNDGNHWNRLRSDASNLKDKVITAVWIPPAWKGASQNDVGYGAYDLYDLGEFNQKGTVRTKYGTRNQLQAAVTALKSNGIQVYGDVVMNHKGGADATEWVRAVEVNPSNRNQEVSGDYTIEAWTKFDFPGRGNTHSNFKWRWYHFDGVDWDQSRQLQNRIYKFRGKGWDWEVDTENGNYDYLMYADIDMDHPEVVNELRNWGVWYTNTLGLDGFRIDAVKHIKYSFTRDWLTHVRNTTGKNMFAVAEFWKNDIGAIENYLSKTNWNHSVFDVPLHYNLYNASRSGGNYDMRQIFNGTVVQRHPTHAVTFVDNHDSQPEEALESFVEEWFKPLAYALTLTRDQGYPSVFYGDYYGIPTHGVPAMKSKIDPILEARQKYAYGTQRDYLDHPDVIGWTREGDGVHADSGLATLMSDGPGGSKWMEVGKNNAGEVWYDITGNQTNTVTINKDGWGQFHVSGGSVSIYVQQ

SEQ ID NO: 25779 - protein, 483 aa, Bacillus licheniformis
HHNGTNGTMMQYFEWYLPNDGNHWNRLRSDASNLKDKGITAVWIPPAWKGASQNDVGYGAYDLYDLGEFNQKGTVRTKYGTRNQLQAAVTALKSNGIQVWGDVVMNHKGGADATEWVRAVEVNPSNRNQEVSGDYTIEAWTKFDFPGRGNTHSNFKWRWYHFDGVDWDQSRQLQNRIYKFRGKGWDWEVDTENGNYDYLMYADIDMDHPEVVNELRNWGVWYTNTLGLDGFRIDAVKHIKYSFTRDWLTHVRNTTGKNMFAVAEFWKNDIGAIENYLSKTNWNHSVFDVPLHYNLYNASRSGGNYDMRQIFNGTVVQRHPTHAVTFVDNHDSQPEEALESFVEEWFKPLAYALTLTRDQGYPSVFYGDYYGIPTHGVPAMKSKIDPILEARQKYAYGTQRDYLDHPDVIGWTREGDGVHADSGLATLMSDGPGGSKWMEVGKNNAGEVWYDITGNQTNTVTINKDGWGQFHVSGGSVSIYVQQ

SEQ ID NO: 25780 - protein, 483 aa, Bacillus licheniformis
HHNGTKGTMMQYFEWYLPNDGNHWNRLRSDASNLKDKGITAVWIPPAWKGASQNDVGYGAYDLYDLGEFNQKGTVRTKYGTRNQLQAAVTALKSNGIQVYGDVVMNHKGGADATEWVRAVEVNPSNRNQEVSGDYTIEAWTKFDFPGRGNTHSNFKWRWYHFDGVDWDQSRQLQNRIYKFRGKGWDWEVDTENGNYDYLMYADIDMDHPEVVNELRNWGVWYTNTLGLDGFRIDAVKHIKYSFTRDWLTHVRNTTGKNMFAVAEFWKNDIGAIENYLSKTNWNHSVFDVPLHYNLYNASRSGGNYDMRQIFNGTVVQRHPTHAVTFVDNHDSQPEEALESFVEEWFKPLAYALTLTRDQGYPSVFYGDYYGIPTHGVPAMKSKIDPILEARQKYAYGTQRDYLDHPDVIGWTREGDGVHADSGLATLMSDGPGGSKWMEVGKNNAGEVWYDITGNQTNTVTINKDGWGQFHVSGGSVSIYVQQ

SEQ ID NO: 25781 - protein, 483 aa, Bacillus licheniformis
HHNGTNGTMMQYFEWYLPNDGNHWNRLRSDASNLKDKGITAVWIPPAWKGASQNDVGYGAYDLYDLGEFNQKGTVRTKYGTRNQLQAAVTALKSNGIQVYGDVVMNHKGGADATEWVRAVEVNPSNRNQEVSGDYTIEAWTFFDFPGRGNTHSNFKWRWYHFDGVDWDQSRQLQNRIYKFRGKGWDWEVDTENGNYDYLMYADIDMDHPEVVNELRNWGVWYTNTLGLDGFRIDAVKHIKYSFTRDWLTHVRNTTGKNMFAVAEFWKNDIGAIENYLSKTNWNHSVFDVPLHYNLYNASRSGGNYDMRQIFNGTVVQRHPTHAVTFVDNHDSQPEEALESFVEEWFKPLAYALTLTRDQGYPSVFYGDYYGIPTHGVPAMKSKIDPILEARQKYAYGTQRDYLDHPDVIGWTREGDGVHADSGLATLMSDGPGGSKWMEVGKNNAGEVWYDITGNQTNTVTINKDGWGQFHVSGGSVSIYVQQ

SEQ ID NO: 25782 - protein, 483 aa, Bacillus licheniformis
HHNGTNGTMMQYFEWYLPCDGNHWNRLRSDASNLKDKGITAVWIPPAWKGASQNDVGYGAYDLYDLGEFNQKGTVRTKYGTRNQLQAAVTALKSNGIQVYGDVVMNHKGGADATEWVRAVEVNPSNRNQEVSGDYTIEAWTKFDFPGRGNTHSNFKWRWYHFDGVDWDQSRQLQNRIYKFRGKGWDWEVDTENGNYDYLMYADIDMDHPEVVNELRNWGVWYTNTLGLDGFRIDAVKHIKYSFTRDWLTHVRNTTGKNMFAVAEFWKNDIGAIENYLSKTNWNHSVFDVPLHYNLYNASRSGGNYDMRQIFNGTVVQRHPTHAVTFVDNHDSQPEEALESFVEEWFKPLAYALTLTRDQGYPSVFYGDYYGIPTHGVPAMKSKIDPILEARQKYAYGTQRDYLDHPDVIGWTREGDGVHADSGLATLMSDGPGGSKWMEVGKNNAGEVWYDITGNQTNTVTINKDGWGQFHVSGGSVSIYVQQ

SEQ ID NO: 25783 - protein, 483 aa, Bacillus licheniformis
HHNGTNGTMMQYFEWYLPNDGNHWNRLRSDASNLKDKGITAVWIPPAWKGASQNDVGYGAYDLYDLGEFNQKGTVRTKYGTRNQLQAAVTALKSNGIQVYGDVVMNHKGGADATEWVRAVEVNPSNRNQEVSPDYTIEAWTKFDFPGRGNTHSNFKWRWYHFDGVDWDQSRQLQNRIYKFRGKGWDWEVDTENGNYDYLMYADIDMDHPEVVNELRNWGVWYTNTLGLDGFRIDAVKHIKYSFTRDWLTHVRNTTGKNMFAVAEFWKNDIGAIENYLSKTNWNHSVFDVPLHYNLYNASRSGGNYDMRQIFNGTVVQRHPTHAVTFVDNHDSQPEEALESFVEEWFKPLAYALTLTRDQGYPSVFYGDYYGIPTHGVPAMKSKIDPILEARQKYAYGTQRDYLDHPDVIGWTREGDGVHADSGLATLMSDGPGGSKWMEVGKNNAGEVWYDITGNQTNTVTINKDGWGQFHVSGGSVSIYVQQ

SEQ ID NO: 25784 - protein, 483 aa, Bacillus licheniformis
HHNGTNGTMMQYFEWYLPNDGNHWNRLRSDASNLKDKGITAVWIPPAWKGASQNDVGYGAYDLYDLGEFNQKGTVRTKYGTRNQLQAAVTALKSNGIQVYGDVVMNHKGGADATEWVRAVEVNPSNRNQEVSGDYTIEAWTKFDFPGRGNTHSNFKWRWYHFDGVDWDQSRQLQNRIYKFRGKGWDWEVDTENGNYDYLMYADIDMDHPEVVNELRNWGVWYTNTLGLDGFRIDAVKHIKYSFTRDWLTHVRNTTGKNMFAVAEFWKNDIGAIENYLSKTNWNHSVFDVPLHYNLYNASRSGGNYDMRQIFNGTVVQRHPTHAVTFVDNHDSQPEEALESFVEEWFKPLAYALTLTRDQGEPSVFYGDYYGIPTHGVPAMKSKIDPILEARQKYAYGTQRDYLDHPDVIGWTREGDGVHADSGLATLMSDGPGGSKWMEVGKNNAGEVWYDITGNQTNTVTINKDGWGQFHVSGGSVSIYVQQ

SEQ ID NO: 25785 - protein, 483 aa, Bacillus licheniformis
HHNGTNGTMMQYFEWYLPNDGNHWNRLRSDASNLKDKGITAVWIPPAWKGASQNDVGYGAYDLYDLGEFNQKGTVRTKYGTRNQLQAAVTALKSNGIQVYGDVVMNHKGGADATEWVRAVEVNPSNRNQEVSGDYTIEAWTKFDFPGRGNTHSNFKWRWYHFDGVDWDQSRQLQNRIYKFRGKGWDWEVDTENGNYDYLMYADIDMDHPEVVNELRNWGVWYTNTLGLDGFRIDAVKHIKYSFTRDWLTHVRNTTGKNMFAVAEFWKNDIGAIENYLSKTNWNHSVFDVPLHYNLYNASRIGGNYDMRQIFNGTVVQRHPTHAVTFVDNHDSQPEEALESFVEEWFKPLAYALTLTRDQGYPSVFYGDYYGIPTHGVPAMKSKIDPILEARQKYAYGTQRDYLDHPDVIGWTREGDGVHADSGLATLMSDGPGGSKWMEVGKNNAGEVWYDITGNQTNTVTINKDGWGQFHVSGGSVSIYVQQ

SEQ ID NO: 25786 - protein, 483 aa, Bacillus licheniformis
HHNGTNGTMMQYFEWYLPNDGNHWNRLRSDASNLKDKGITAVWIPPAWKGASQNDVGYGAYDLYDLGEFNQKGTVRTKYGTRNQLQAAVTALKSNGIQVYGDVVMNHKGGADATEWVRAVEVNPSNRNQEVSGDYTIEAWTKFDFPGRGNTHSNFKWRWYHFDGVDWDQSRQLQNRIYKFRGKGWDWEVDTENGNYDYLMYADIDMDHPEVVNELRNWGVWYTNTLGLDGFRIDAVKHIKYSFTRDWLTHVRNTTGKNMFAVAEFWKNDIGAIENYLSKTNWNHSVFDVPLHYNLYNASRSGGNYDMRQIFNGTVVQRHPTHAVTFVDNHDSQPEEALESFVEEWFKPLAYALTLTRDQGYPSVFYGDYYGIPTHGVPAMKSKIDPILEARQKYAYGTQRDYLDHPDVIGWTREGDGVHADSGLATLMSDGPGGSKWMEVGKNNAGEVWYDITGNQTNTVTINKHGWGQFHVSGGSVSIYVQQ

SEQ ID NO: 25787 - protein, 483 aa, Bacillus licheniformis
HHNGTNGTMMQYFEWYLPNDGNHWNRLRSDASNLKDKGITAVWIPPAWKGASQNDVGYGAYDLYDLGEFNQKGTVRTKYGTRNQLQAAVTALKSNGIQVYGDVVMNHKGGADATEWVRAVEVNPSNRNQEVSGDYTIEAWTKFDFPGRGNTHSNFKWRWYHFDGVDWDQSRQLQNRIYKMRGKGWDWEVDTENGNYDYLMYADIDMDHPEVVNELRNWGVWYTNTLGLDGFRIDAVKHIKYSFTRDWLTHVRNTTGKNMFAVAEFWKNDIGAIENYLSKTNWNHSVFDVPLHYNLYNASRSGGNYDMRQIFNGTVVQRHPTHAVTFVDNHDSQPEEALESFVEEWFKPLAYALTLTRDQGYPSVFYGDYYGIPTHGVPAMKSKIDPILEARQKYAYGTQRDYLDHPDVIGWTREGDGVHADSGLATLMSDGPGGSKWMEVGKNNAGEVWYDITGNQTNTVTINKDGWGQFHVSGGSVSIYVQQ

SEQ ID NO: 25788 - protein, 483 aa, Bacillus licheniformis
HHNGTNGMMMQYFEWYLPNDGNHWNRLRSDASNLKDKGITAVWIPPAWKGASQNDVGYGAYDLYDLGEFNQKGTVRTKYGTRNQLQAAVTALKSNGIQVYGDVVMNHKGGADATEWVRAVEVNPSNRNQEVSGDYTIEAWTKFDFPGRGNTHSNFKWRWYHFDGVDWDQSRQLQNRIYKFRGKGWDWEVDTENGNYDYLMYADIDMDHPEVVNELRNWGVWYTNTLGLDGFRIDAVKHIKYSFTRDWLTHVRNTTGKNMFAVAEFWKNDIGAIENYLSKTNWNHSVFDVPLHYNLYNASRSGGNYDMRQIFNGTVVQRHPTHAVTFVDNHDSQPEEALESFVEEWFKPLAYALTLTRDQGYPSVFYGDYYGIPTHGVPAMKSKIDPILEARQKYAYGTQRDYLDHPDVIGWTREGDGVHADSGLATLMSDGPGGSKWMEVGKNNAGEVWYDITGNQTNTVTINKDGWGQFHVSGGSVSIYVQQ

SEQ ID NO: 25789 - protein, 483 aa, Bacillus licheniformis
HHNGTNGTMMQYFEWYLPNDGNHWNRLRSDASNLKDKGITAVWIPPAWKGASQNDVGYGAYDLYDLGEFNQKGTVRTKYGTRNQLQAAVTALKSNGIQVYGDVVMNHKGGADATEWVRAVEVNPSNRNQEVSGDYTIEAWTKFDFPGRGNTHSNFKWRWYHFDGVDWDQSRQLQNRIYKFRGKGWDWEVDTENGNYDYLMYADIDMDHPEVVNELRNWGVWYTNTLGLDGFRIDAVKHIKYSFTRDWLTHVRNTTGKNMFAVAEFWKNDIGAIENYLSKTNWNHSVFDVPLHYNLYNASRPGGNYDMRQIFNGTVVQRHPTHAVTFVDNHDSQPEEALESFVEEWFKPLAYALTLTRDQGYPSVFYGDYYGIPTHGVPAMKSKIDPILEARQKYAYGTQRDYLDHPDVIGWTREGDGVHADSGLATLMSDGPGGSKWMEVGKNNAGEVWYDITGNQTNTVTINKDGWGQFHVSGGSVSIYVQQ

SEQ ID NO: 25790 - protein, 483 aa, Bacillus licheniformis
HHNGTNGTMMQYFEWYLPNDGFHWNRLRSDASNLKDKGITAVWIPPAWKGASQNDVGYGAYDLYDLGEFNQKGTVRTKYGTRNQLQAAVTALKSNGIQVYGDVVMNHKGGADATEWVRAVEVNPSNRNQEVSGDYTIEAWTKFDFPGRGNTHSNFKWRWYHFDGVDWDQSRQLQNRIYKFRGKGWDWEVDTENGNYDYLMYADIDMDHPEVVNELRNWGVWYTNTLGLDGFRIDAVKHIKYSFTRDWLTHVRNTTGKNMFAVAEFWKNDIGAIENYLSKTNWNHSVFDVPLHYNLYNASRSGGNYDMRQIFNGTVVQRHPTHAVTFVDNHDSQPEEALESFVEEWFKPLAYALTLTRDQGYPSVFYGDYYGIPTHGVPAMKSKIDPILEARQKYAYGTQRDYLDHPDVIGWTREGDGVHADSGLATLMSDGPGGSKWMEVGKNNAGEVWYDITGNQTNTVTINKDGWGQFHVSGGSVSIYVQQ

SEQ ID NO: 25791 - protein, 483 aa, Bacillus licheniformis
HHNGTNGTMMQYFEWYLPNDGNHWNRLRSDASNLKDKGITAVWIPPAWKGASQNDVGYGAYDLYDLGEFNQKGTVRTKYGTRNQLQAAVTALKSNGIQVYGDVVMNHKGGADATDWVRAVEVNPSNRNQEVSGDYTIEAWTKFDFPGRGNTHSNFKWRWYHFDGVDWDQSRQLQNRIYKFRGKGWDWEVDTENGNYDYLMYADIDMDHPEVVNELRNWGVWYTNTLGLDGFRIDAVKHIKYSFTRDWLTHVRNTTGKNMFAVAEFWKNDIGAIENYLSKTNWNHSVFDVPLHYNLYNASRSGGNYDMRQIFNGTVVQRHPTHAVTFVDNHDSQPEEALESFVEEWFKPLAYALTLTRDQGYPSVFYGDYYGIPTHGVPAMKSKIDPILEARQKYAYGTQRDYLDHPDVIGWTREGDGVHADSGLATLMSDGPGGSKWMEVGKNNAGEVWYDITGNQTNTVTINKDGWGQFHVSGGSVSIYVQQ

SEQ ID NO: 25792 - protein, 483 aa, Bacillus licheniformis
HHNGTNGTMMQYFEWYLPNDGNHWNRLRSDASNLKDKGITAVWIPPAWKGASQNDVGYGAYDLYDLGEFNQKGTVRTKYGTRNQLQAAVTALKSNGIQVYGDVVMNHKGGADATEWVRAVEVNPSNRNQEVSGDYTIEAWTKFDFPGRGNTHSNFKWRWYHFDGVDWDQSRQLQNRIYKFRGKGWDWEVDTENGNYDYLMYADIDMDHPEVVNELRNWGVWYTNTLGLDGFRIDAVKHIKYSFTRDWLTHVRNTTGKNMFAVAEFWKNDIGAIENYLSKTNWNHSVFDVPLHYNLYNASRSGGNYDMRQIFNGTVVQRHPTHAVTFVDNHDSQPEEALESFVEEWFKPLAYALTLTRDQGYPSVFYGDYYGIPTHGVPAMKSKIDPILEARQKYAYGTQRDYLDHPDVIGWTREGDGVHADSGLATLMSDGPGGSKWMEVGKNNAGEVWYDITGLQTNTVTINKDGWGQFHVSGGSVSIYVQQ

SEQ ID NO: 25793 - protein, 483 aa, Bacillus licheniformis
HHNGTNGTMMQYFEWYLPNDGNHWNRLRSDASNLKDKGITAVWIPPAWKGASQNDVGYGAYDLYDLGEFNQKGTVRTKYGTRNQLQAAVTALKSNGIQVYGDVVMNHKGGADATEWVRAVEVNPSNRNQEVSGDYTIEAWTKFDFPGRGNTHSNFKWRWYHFDGVDWDQSRQLQNRIYKFRGKGWDWEVDTENGNYDYLMYADIDMDHPEVVNELRNWGVWYTNTLGLDGFRIDAVKHIKYSFTRDWLTHVRNTTGKNMFAVAEFWKNDIGAIENYLSKTNWNHSVFDVPLHYNLYNASRSGGNYDMRQIFNGTVVQRYPTHAVTFVDNHDSQPEEALESFVEEWFKPLAYALTLTRDQGYPSVFYGDYYGIPTHGVPAMKSKIDPILEARQKYAYGTQRDYLDHPDVIGWTREGDGVHADSGLATLMSDGPGGSKWMEVGKNNAGEVWYDITGNQTNTVTINKDGWGQFHVSGGSVSIYVQQ

SEQ ID NO: 25794 - protein, 483 aa, Bacillus licheniformis
HHNGTNGTMMQYFEWYLPNDGNHWNRLRSDASNLKDKGITAVWIPPAWKGASQNDVGYGAYDLYDLGEFNQKGTVRTKYGTRNQLQAAVTALKSNGIQVYGDVVMNHKGGADATEWVRAVEVNPSNRNQEVSGDYTIEAWTKFDFPGRGNTHSNFKWRWYHFDGVDWDQSRQLQNRIYKFRGKGWDWEVDTENGNYDYLMYADIDMDHPEVVNELRNWGVWYTNTLGLDGFRIDAVKHIKYSFTRDWLTHVRNTTGKNMFAVAEFWKNDIGAIENYLSKTNWNHSVFDVPLHYNLYNASRSGGNYDMRQIFNGTVVQRHPTHAVTFVDNHDSQPEEALESFVEEWFKPLAYALTLTRDQGYPSVFYGDYYGIPTHGVPAMKSKIDPILEARQKYAYGTQRDYLDHPDVIGWTREGDGVHADSGLATLMSDGPGGSKWMEVGKRNAGEVWYDITGNQTNTVTINKDGWGQFHVSGGSVSIYVQQ

SEQ ID NO: 25795 - protein, 483 aa, Bacillus licheniformis
HHNGTNGTMMQYFEWYLPNDGNHWNRLRSLASNLKDKGITAVWIPPAWKGASQNDVGYGAYDLYDLGEFNQKGTVRTKYGTRNQLQAAVTALKSNGIQVYGDVVMNHKGGADATEWVRAVEVNPSNRNQEVSGDYTIEAWTKFDFPGRGNTHSNFKWRWYHFDGVDWDQSRQLQNRIYKFRGKGWDWEVDTENGNYDYLMYADIDMDHPEVVNELRNWGVWYTNTLGLDGFRIDAVKHIKYSFTRDWLTHVRNTTGKNMFAVAEFWKNDIGAIENYLSKTNWNHSVFDVPLHYNLYNASRSGGNYDMRQIFNGTVVQRHPTHAVTFVDNHDSQPEEALESFVEEWFKPLAYALTLTRDQGYPSVFYGDYYGIPTHGVPAMKSKIDPILEARQKYAYGTQRDYLDHPDVIGWTREGDGVHADSGLATLMSDGPGGSKWMEVGKNNAGEVWYDITGNQTNTVTINKDGWGQFHVSGGSVSIYVQQ

SEQ ID NO: 25796 - protein, 483 aa, Bacillus licheniformis
HHNGTNGTMMQYFEWYLPNDGNHWNRLRSDASNLKDKGITAVWIPPAWKGASQNDVGYGAYDLYDLGEFNQKGTVRTKYGTRNQLQAAVTALKSNGIQVYGDVVMNHKGGADATEWIRAVEVNPSNRNQEVSGDYTIEAWTKFDFPGRGNTHSNFKWRWYHFDGVDWDQSRQLQNRIYKFRGKGWDWEVDTENGNYDYLMYADIDMDHPEVVNELRNWGVWYTNTLGLDGFRIDAVKHIKYSFTRDWLTHVRNTTGKNMFAVAEFWKNDIGAIENYLSKTNWNHSVFDVPLHYNLYNASRSGGNYDMRQIFNGTVVQRHPTHAVTFVDNHDSQPEEALESFVEEWFKPLAYALTLTRDQGYPSVFYGDYYGIPTHGVPAMKSKIDPILEARQKYAYGTQRDYLDHPDVIGWTREGDGVHADSGLATLMSDGPGGSKWMEVGKNNAGEVWYDITGNQTNTVTINKDGWGQFHVSGGSVSIYVQQ

SEQ ID NO: 25797 - protein, 483 aa, Bacillus licheniformis
HHNGTNGTMMQYFEWYLPNDGNHWNRLRSDASNLKDKGITAVWIPPAWKGASQNDVGYGAYDLYDLGEFNQKGTVRTKYGTRNQLQAAVTYLKSNGIQVYGDVVMNHKGGADATEWVRAVEVNPSNRNQEVSGDYTIEAWTKFDFPGRGNTHSNFKWRWYHFDGVDWDQSRQLQNRIYKFRGKGWDWEVDTENGNYDYLMYADIDMDHPEVVNELRNWGVWYTNTLGLDGFRIDAVKHIKYSFTRDWLTHVRNTTGKNMFAVAEFWKNDIGAIENYLSKTNWNHSVFDVPLHYNLYNASRSGGNYDMRQIFNGTVVQRHPTHAVTFVDNHDSQPEEALESFVEEWFKPLAYALTLTRDQGYPSVFYGDYYGIPTHGVPAMKSKIDPILEARQKYAYGTQRDYLDHPDVIGWTREGDGVHADSGLATLMSDGPGGSKWMEVGKNNAGEVWYDITGNQTNTVTINKDGWGQFHVSGGSVSIYVQQ

SEQ ID NO: 25798 - protein, 483 aa, Bacillus licheniformis
HHNGTNGTMCQYFEWYLPNDGNHWNRLRSDASNLKDKGITAVWIPPAWKGASQNDVGYGAYDLYDLGEFNQKGTVRTKYGTRNQLQAAVTALKSNGIQVYGDVVMNHKGGADATEWVRAVEVNPSNRNQEVSGDYTIEAWTKFDFPGRGNTHSNFKWRWYHFDGVDWDQSRQLQNRIYKFRGKGWDWEVDTENGNYDYLMYADIDMDHPEVVNELRNWGVWYTNTLGLDGFRIDAVKHIKYSFTRDWLTHVRNTTGKNMFAVAEFWKNDIGAIENYLSKTNWNHSVFDVPLHYNLYNASRSGGNYDMRQIFNGTVVQRHPTHAVTFVDNHDSQPEEALESFVEEWFKPLAYALTLTRDQGYPSVFYGDYYGIPTHGVPAMKSKIDPILEARQKYAYGTQRDYLDHPDVIGWTREGDGVHADSGLATLMSDGPGGSKWMEVGKNNAGEVWYDITGNQTNTVTINKDGWGQFHVSGGSVSIYVQQ

SEQ ID NO: 25799 - protein, 483 aa, Bacillus licheniformis
HHNGTNGTMMQYFEWYLPNDGNHWNRLRSDASNLKDKGITAVWIPPAWKGASQNDVGYGAYDLYDLGEFNQKGTVLTKYGTRNQLQAAVTALKSNGIQVYGDVVMNHKGGADATEWVRAVEVNPSNRNQEVSGDYTIEAWTKFDFPGRGNTHSNFKWRWYHFDGVDWDQSRQLQNRIYKFRGKGWDWEVDTENGNYDYLMYADIDMDHPEVVNELRNWGVWYTNTLGLDGFRIDAVKHIKYSFTRDWLTHVRNTTGKNMFAVAEFWKNDIGAIENYLSKTNWNHSVFDVPLHYNLYNASRSGGNYDMRQIFNGTVVQRHPTHAVTFVDNHDSQPEEALESFVEEWFKPLAYALTLTRDQGYPSVFYGDYYGIPTHGVPAMKSKIDPILEARQKYAYGTQRDYLDHPDVIGWTREGDGVHADSGLATLMSDGPGGSKWMEVGKNNAGEVWYDITGNQTNTVTINKDGWGQFHVSGGSVSIYVQQ

SEQ ID NO: 25800 - protein, 483 aa, Bacillus licheniformis
HHNGTNGTMMQYFEWYLPNDGNHWNRLRSDASNLKDKGITAVWIPPAWKGASQNDVGYGAYDLYDLGEFNQKGTVRTKYGTRNQLQAAVTHLKSNGIQVYGDVVMNHKGGADATEWVRAVEVNPSNRNQEVSGDYTIEAWTKFDFPGRGNTHSNFKWRWYHFDGVDWDQSRQLQNRIYKFRGKGWDWEVDTENGNYDYLMYADIDMDHPEVVNELRNWGVWYTNTLGLDGFRIDAVKHIKYSFTRDWLTHVRNTTGKNMFAVAEFWKNDIGAIENYLSKTNWNHSVFDVPLHYNLYNASRSGGNYDMRQIFNGTVVQRHPTHAVTFVDNHDSQPEEALESFVEEWFKPLAYALTLTRDQGYPSVFYGDYYGIPTHGVPAMKSKIDPILEARQKYAYGTQRDYLDHPDVIGWTREGDGVHADSGLATLMSDGPGGSKWMEVGKNNAGEVWYDITGNQTNTVTINKDGWGQFHVSGGSVSIYVQQ

SEQ ID NO: 25801 - protein, 483 aa, Bacillus licheniformis
HHNGTNGTMMQYFEWYLPNDGNHWNRLRSDASNLKDKGITAVWIPPAWKGASQNDVGYGAYDLYDLGEFNQKGTVRTKYGTRNQLQAAVTALKSNGIQVYGDVVMNHKGGADATEWVRAVEVNPSNRNQEVSGDYTIEAWTKFDFPGRGNTHSNFKWRWWHFDGVDWDQSRQLQNRIYKFRGKEWDWEVDEENGNYDYLMYADYDMDHPEVVNELRNWGVWYTNTLGLDGFRIDAVKHIKYSFTRDWLTHVRNTTGKNMFAVAEFWKNDIGAIENYLSKTNWNHSVFDVPLHYNLYNASRSGGNYDMRQIFNGTVVQRHPTHAVTFVDNHDSQPEEALESFVEEWFKPLAYALTLTRDQGYPSVFYGDYYGIPTHGVPAMKSKIDPILEARQKYAYGTQRDYMDHPDVIGWTREGDGVHADSGLATLMSDGPGGSKWMEVGKNNAGEVWYDITGNQTNTVTINKDGWGQFHVSGGSVSIYVQQ

SEQ ID NO: 25802 - protein, 483 aa, Bacillus licheniformis
HHNGTNGTMMQYFEWYLPNDGNHWNRLRSDASNLKDKGITAVWIPPAWKGASQNDVGYGAYDLYDLGEFNQKGTVRTKYGTRNQLQAAVTALKSNGIQVYGDVVMNHKGGADATEWVRAVEVNPSNRNQEVSGDYDIEAWTKFDFPGRGNTHSNFKWRWYHFDGVDWDQSRQLQNRIYKFRGKGWDWEVDTENGNYDYLMYADIDMDHPEVVNELRNWGVWYTNTLGLDGFRIDAVKHIKYSFTRDWLTHVRNTTGKNMFAVAEFWKNDIGAIENYLSKTNWNHSVFDVPLHYNLYNASRSGGNYDMRQIFNGTVVQRHPTHAVTFVDNHDSQPEEALESFVEEWFKPLAYALTLTRDQGYPSVFYGDYYGIPTHGVPAMKSKIDPILEARQKYAYGTQRDYLDHPDVIGWTREGDGVHADSGLATLMSDGPGGSKWMEVGKNNAGEVWYDITGNQTNTVTINKDGWGQFHVSGGSVSIYVQQ

SEQ ID NO: 25803 - protein, 483 aa, Bacillus licheniformis
HHNGTNGTMMQYFEWYLPNDGNHWNRLRSDASNLKDKGITAVWIPPAWKGASQNDVGYGAYDLYDLGEFNQKGTVRTKYGTRNQLQAAVTALKSNGIQVYGDVVMNHKGGADATEWVRAVEVNPSNRNQEVSGDYTIEAWTKFDFPGRGNTHSNFKWRWYHFDGVDWDQSRQLQNRIYKFRGKGWDWEVDTENGNYDYLMYADIDMDHPEVVNELRNWGVWYTNTLGLDGFRIDAVKHIKYSFTRDWLTHVRNTTGKNMFAVAEFWKNDIGAIENYLSKTNWNHSVFDVPLHYNLYNASRRGGNYDMRQIFNGTVVQRHPTHAVTFVDNHDSQPEEALESFVEEWFKPLAYALTLTRDQGYPSVFYGDYYGIPTHGVPAMKSKIDPILEARQKYAYGTQRDYLDHPDVIGWTREGDGVHADSGLATLMSDGPGGSKWMEVGKNNAGEVWYDITGNQTNTVTINKDGWGQFHVSGGSVSIYVQQ

SEQ ID NO: 25804 - protein, 483 aa, Bacillus licheniformis
HHNGTNGTMMQYFEWYLPNDGNNWNRLRSDASNLKDKGITAVWIPPAWKGASQNDVGYGAYDLYDLGEFNQKGTVRTKYGTRNQLQAAVTALKSNGIQVYGDVVMNHKGGADATEWVRAVEVNPSNRNQEVSGDYTIEAWTKFDFPGRGNTHSNFKWRWYHFDGVDWDQSRQLQNRIYKFRGKGWDWEVDTENGNYDYLMYADIDMDHPEVVNELRNWGVWYTNTLGLDGFRIDAVKHIKYSFTRDWLTHVRNTTGKNMFAVAEFWKNDIGAIENYLSKTNWNHSVFDVPLHYNLYNASRSGGNYDMRQIFNGTVVQRHPTHAVTFVDNHDSQPEEALESFVEEWFKPLAYALTLTRDQGYPSVFYGDYYGIPTHGVPAMKSKIDPILEARQKYAYGTQRDYLDHPDVIGWTREGDGVHADSGLATLMSDGPGGSKWMEVGKNNAGEVWYDITGNQTNTVTINKDGWGQFHVSGGSVSIYVQQ

SEQ ID NO: 25805 - protein, 483 aa, Bacillus licheniformis
HHNGTNGTMMQYFEWYLPNDGNHWNRLRSDASNLKDKGITAVWIPPAWKGASQNDVGYGAYDLYDLGEFNQKGTVRTKYGTRNQLQAAVTALKSNGIQVYGDVVMNHKGGADATEWVRAVEVNPSNRNQEVSGDYTIEAWTKFDFPGRGNTHSNFKWRWYHFDGVDWDQSRQLQNRIYKFRGKGWDWEVDTENGNYDYLMYADIDMDHPEVVNELRNWGVWYTNTLGLDGFRIDAVKHIKYSFTRDWLTHVRNTTGKNMFAVAEFWKNDIGAIENYLSKTNWNHSVFDVPLHYNEYNASRSGGNYDMRQIFNGTVVQRHPTHAVTFVDNHDSQPEEALESFVEEWFKPLAYALTLTRDQGYPSVFYGDYYGIPTHGVPAMKSKIDPILEARQKYAYGTQRDYLDHPDVIGWTREGDGVHADSGLATLMSDGPGGSKWMEVGKNNAGEVWYDITGNQTNTVTINKDGWGQFHVSGGSVSIYVQQ

SEQ ID NO: 25806 - protein, 483 aa, Bacillus licheniformis
HHNGTNGTMMQYFEWYLPNDGNHWNRLRSDASNLKDKGITAVWIPPAWKGASQNDVGYGAYDLYDLGEFNQKGTVRTKYGTRNQLQAAVTALKSNGIQVYGDVVMNHKGGADATEWVRAVEVNPSNRNQEVSGDYTIEAWTKFDFPGRGNTHSNFKWRWYHFDGVDWDQSRQLQNRIYKFRGKGWDWEVDTENGNYDYLMYADIDMDHPEVVNELRNWGVWYTNTLGLDGFRIDAVKHIKYSFTRDWLTHVRNTTGKNMFAVAEFWKNDIGAIENYLSKTNWNHSVFDVPLHYNLYNASRSGGNYDMRQIFNGTVVQRHPTHAVTFVDNHDSQPEEALESFVEEWFKPLAYALTLTRDQGYPSVFYGDYYGIPTHGVPAMKSKIDPILEARQKYAYGTQRDYLDHPDVIGWTREGDGVHADSGLATLMSDGPGGSKWMEVGKNNAGEVWYDITGNQTNTVTINKDGWGQFHHSGGSVSIYVQQ

SEQ ID NO: 25807 - protein, 483 aa, Bacillus licheniformis
HHNGTNGTMMQYFEWYLPNDGNHWNRLRSDASNLKDKGITEVWIPPAWKGASQNDVGYGAYDLYDLGEFNQKGTVRTKYGTRNQLQAAVTALKSNGIQVYGDVVMNHKGGADATEWVRAVEVNPSNRNQEVSGDYTIEAWTKFDFPGRGNTHSNFKWRWYHFDGVDWDQSRQLQNRIYKFRGKGWDWEVDTENGNYDYLMYADIDMDHPEVVNELRNWGVWYTNTLGLDGFRIDAVKHIKYSFTRDWLTHVRNTTGKNMFAVAEFWKNDIGAIENYLSKTNWNHSVFDVPLHYNLYNASRSGGNYDMRQIFNGTVVQRHPTHAVTFVDNHDSQPEEALESFVEEWFKPLAYALTLTRDQGYPSVFYGDYYGIPTHGVPAMKSKIDPILEARQKYAYGTQRDYLDHPDVIGWTREGDGVHADSGLATLMSDGPGGSKWMEVGKNNAGEVWYDITGNQTNTVTINKDGWGQFHVSGGSVSIYVQQ

SEQ ID NO: 25808 - protein, 483 aa, Bacillus licheniformis
HHNGTNGTMMQYFEWYLPNDGNHWNRLRSDASNLKDKGITAVWIPPAWKGASQNDVGYGAYDLYDLGEFNQKGTVRTKYGTRNQLQAAVTALKSNGIQVYGDVVMNHKGGADATEWVRAVEVNPSNRNQEVSGDYTIEAWTKFDFPGRGNTHSNFKWRWYHFDGVDWDQSRQLQNRIYKFRGKGWDWEVDTENGNYDYLMYADIDMDHPEVVNELRNWGVWYTNTLGLDGFRIDAVKHIKYSFTRDWLTHVRNTTGKNMFAVAEFWKNDIGAIENYLSKTNWNHSVFDVPLHYNLYNASRSGGNYDMRQIFNGTVVQRHPTHAVTFVDNHDSQPEEALESFVEEWFKPLAYAMTLTRDQGYPSVFYGDYYGIPTHGVPAMKSKIDPILEARQKYAYGTQRDYLDHPDVIGWTREGDGVHADSGLATLMSDGPGGSKWMEVGKNNAGEVWYDITGNQTNTVTINKDGWGQFHVSGGSVSIYVQQ

SEQ ID NO: 25809 - protein, 483 aa, Bacillus licheniformis
HHNGTNGTMMQYFEWYLPNDGNHWNRLRSDASNLKDKGITAVWIPPAWKGASQNDVGYGAYDLYDLGEFNQKGTVRTKYGTRNQLQAAVTALKSNGIQVYGDVVMNHKGGADATEWVRAVEVNPSNRNQEVSGDYTIEAWTKFDFPGRGNTHSNFKWRWYHFDGVDWDQSRQLQNRIYKFRGKGWDWEVDTENGNYDYLMYADIDMDHPEVVNELRNWGVWYTNTLGLDGFRIDAVKHIKYSHTRDWLTHVRNTTGKNMFAVAEFWKNDIGAIENYLSKTNWNHSVFDVPLHYNLYNASRSGGNYDMRQIFNGTVVQRHPTHAVTFVDNHDSQPEEALESFVEEWFKPLAYALTLTRDQGYPSVFYGDYYGIPTHGVPAMKSKIDPILEARQKYAYGTQRDYLDHPDVIGWTREGDGVHADSGLATLMSDGPGGSKWMEVGKNNAGEVWYDITGNQTNTVTINKDGWGQFHVSGGSVSIYVQQ

SEQ ID NO: 25810 - protein, 483 aa, Bacillus licheniformis
HHNGTNWTMMQYFEWYLPNDGNHWNRLRSDASNLKDKGITAVWIPPAWKGASQNDVGYGAYDLYDLGEFNQKGTVRTKYGTRNQLQAAVTALKSNGIQVYGDVVMNHKGGADATEWVRAVEVNPSNRNQEVSGDYTIEAWTKFDFPGRGNTHSNFKWRWYHFDGVDWDQSRQLQNRIYKFRGKGWDWEVDTENGNYDYLMYADIDMDHPEVVNELRNWGVWYTNTLGLDGFRIDAVKHIKYSFTRDWLTHVRNTTGKNMFAVAEFWKNDIGAIENYLSKTNWNHSVFDVPLHYNLYNASRSGGNYDMRQIFNGTVVQRHPTHAVTFVDNHDSQPEEALESFVEEWFKPLAYALTLTRDQGYPSVFYGDYYGIPTHGVPAMKSKIDPILEARQKYAYGTQRDYLDHPDVIGWTREGDGVHADSGLATLMSDGPGGSKWMEVGKNNAGEVWYDITGNQTNTVTINKDGWGQFHVSGGSVSIYVQQ

SEQ ID NO: 25811 - protein, 483 aa, Bacillus licheniformis
HHNGTNGYMMQYFEWYLPNDGNHWNRLRSDASNLKDKGITAVWIPPAWKGASQNDVGYGAYDLYDLGEFNQKGTVRTKYGTRNQLQAAVTALKSNGIQVYGDVVMNHKGGADATEWVRAVEVNPSNRNQEVSGDYTIEAWTKFDFPGRGNTHSNFKWRWYHFDGVDWDQSRQLQNRIYKFRGKGWDWEVDTENGNYDYLMYADIDMDHPEVVNELRNWGVWYTNTLGLDGFRIDAVKHIKYSFTRDWLTHVRNTTGKNMFAVAEFWKNDIGAIENYLSKTNWNHSVFDVPLHYNLYNASRSGGNYDMRQIFNGTVVQRHPTHAVTFVDNHDSQPEEALESFVEEWFKPLAYALTLTRDQGYPSVFYGDYYGIPTHGVPAMKSKIDPILEARQKYAYGTQRDYLDHPDVIGWTREGDGVHADSGLATLMSDGPGGSKWMEVGKNNAGEVWYDITGNQTNTVTINKDGWGQFHVSGGSVSIYVQQ

SEQ ID NO: 25812 - protein, 483 aa, Bacillus licheniformis
HHNGTNGTMMQYFEWYLPNDGNHWNRLRSDASNLKDKGITAVWIPPAWKGASQNDVGYGAYDLYDLGEFNQKGTVRTKYGTRNQLQAAVTALKSNGIQVYGDVVMNHKGGADATEWVRAVEVNPSNRNQEVSGDYTIEAWTKFDFPGRGNTHSNFKWRWYHFDGVDWDQSRQLQNRIYKFRGKGWDWEVDTENGNYDYLMYADIDMDHPEVVWELRNWGVWYTNTLGLDGFRIDAVKHIKYSFTRDWLTHVRNTTGKNMFAVAEFWKNDIGAIENYLSKTNWNHSVFDVPLHYNLYNASRSGGNYDMRQIFNGTVVQRHPTHAVTFVDNHDSQPEEALESFVEEWFKPLAYALTLTRDQGYPSVFYGDYYGIPTHGVPAMKSKIDPILEARQKYAYGTQRDYLDHPDVIGWTREGDGVHADSGLATLMSDGPGGSKWMEVGKNNAGEVWYDITGNQTNTVTINKDGWGQFHVSGGSVSIYVQQ

SEQ ID NO: 25813 - protein, 483 aa, Bacillus licheniformis
HHNGTNGTMMQYFEWYLPNDGNHWNRLRSDASNLKDKGITAVWIPPAWKGASQNDVGYGAYDLYDLGEFNQKGTVRTKYGTRNQLQAAVTALKSNGIQVYGDVVMNHKGGADATEWVRAVEVNPSNRNQEVSGDYTIEAWTKFDFPGRGNTHSNFKWRWYHFDGVDWDQSRQLQNRIYKFRGKGWDWEVDTENGNYDYLMYADIDMDHPEVVNELRNWGVWYTNTLGLDGFRIDAVKHIKYSFTRDWLTHVRNTTGKNMFAVAEFWKNDILAIENYLSKTNWNHSVFDVPLHYNLYNASRSGGNYDMRQIFNGTVVQRHPTHAVTFVDNHDSQPEEALESFVEEWFKPLAYALTLTRDQGYPSVFYGDYYGIPTHGVPAMKSKIDPILEARQKYAYGTQRDYLDHPDVIGWTREGDGVHADSGLATLMSDGPGGSKWMEVGKNNAGEVWYDITGNQTNTVTINKDGWGQFHVSGGSVSIYVQQ

SEQ ID NO: 25814 - protein, 483 aa, Bacillus licheniformis
HHNGTNGTMMQYFEWYLPNDGNHWNRLRSDASNLKDKGITAVWIPPAWKGASQNDVGYGAYDLYDLGEFNQKGTVRTKYGTRNQLQAAVTALKSNGIQVYGDVVMNHKGGADATEWVRAVEVNPSNRNQEVSGDYTIEAWTKFDFPGRGNTHSNFKWRWYHFDGVDWDQSRQLQNRIYKFRGKGWDWEVDTENGNYDYLMYADIDMDHPEVVNELRNWGVWYTNTLGLDGFRIDAVKHIKYSFTRDWLTHVRNTTGKNMFAVAEFFKNDIGAIENYLSKTNWNHSVFDVPLHYNLYNASRSGGNYDMRQIFNGTVVQRHPTHAVTFVDNHDSQPEEALESFVEEWFKPLAYALTLTRDQGYPSVFYGDYYGIPTHGVPAMKSKIDPILEARQKYAYGTQRDYLDHPDVIGWTREGDGVHADSGLATLMSDGPGGSKWMEVGKNNAGEVWYDITGNQTNTVTINKDGWGQFHVSGGSVSIYVQQ

SEQ ID NO: 25815 - protein, 483 aa, Bacillus licheniformis
HHNGTNGTMMQYFEWYLPNDGNHWNRLRSDASNLKDKGITAVWIPPAWKGASQNDVGYGAYDLYDLGEFNQKGTVRTKYGTRNQLQAAVTALKSNGIQVYGDVVMNHKGGADATEWVRPVEVNPSNRNQEVSGDYTIEAWTKFDFPGRGNTHSNFKWRWYHFDGVDWDQSRQLQNRIYKFRGKGWDWEVDTENGNYDYLMYADIDMDHPEVVNELRNWGVWYTNTLGLDGFRIDAVKHIKYSFTRDWLTHVRNTTGKNMFAVAEFWKNDIGAIENYLSKTNWNHSVFDVPLHYNLYNASRSGGNYDMRQIFNGTVVQRHPTHAVTFVDNHDSQPEEALESFVEEWFKPLAYALTLTRDQGYPSVFYGDYYGIPTHGVPAMKSKIDPILEARQKYAYGTQRDYLDHPDVIGWTREGDGVHADSGLATLMSDGPGGSKWMEVGKNNAGEVWYDITGNQTNTVTINKDGWGQFHVSGGSVSIYVQQ

SEQ ID NO: 25816 - protein, 483 aa, Bacillus licheniformis
HHNGTNGTMMQYFEWYLPNDGNHWNRLRSDAENLKDKGITAVWIPPAWKGASQNDVGYGAYDLYDLGEFNQKGTVRTKYGTRNQLQAAVTALKSNGIQVYGDVVMNHKGGADATEWVRAVEVNPSNRNQEVSGDYTIEAWTKFDFPGRGNTHSNFKWRWYHFDGVDWDQSRQLQNRIYKFRGKGWDWEVDTENGNYDYLMYADIDMDHPEVVNELRNWGVWYTNTLGLDGFRIDAVKHIKYSFTRDWLTHVRNTTGKNMFAVAEFWKNDIGAIENYLSKTNWNHSVFDVPLHYNLYNASRSGGNYDMRQIFNGTVVQRHPTHAVTFVDNHDSQPEEALESFVEEWFKPLAYALTLTRDQGYPSVFYGDYYGIPTHGVPAMKSKIDPILEARQKYAYGTQRDYLDHPDVIGWTREGDGVHADSGLATLMSDGPGGSKWMEVGKNNAGEVWYDITGNQTNTVTINKDGWGQFHVSGGSVSIYVQQ

SEQ ID NO: 25817 - protein, 483 aa, Bacillus licheniformis
HHNGTNGTMMQYFEWYLPNDGNHWNRLRSDASNLKDKGITAVWIPPAWKGASQNDVGYGAYDLYDLGEFNQKGTVRTKYGTRNQLQAAVTALKSNGIQVYGDVVMNHKGGADATEWVRAVEVNPSNRNQEVSGDYTIEAWTKFDFPGRGNTHSNFKWRWYHFDGVDWDQSRQLQNRIYKFRGKGWDWEVDTENGNYDYLMYADIDMDHPEVVNELRNWGVWYTNTLGLDGFRIDAVKHIKYSFTRDWLTHVRNTTGKNMFAVAEFWKNDIGAIENYLSKTNWNHSVFDVPLHYNLYNASRSGGNYDMRQIFNGTVVHRHPTHAVTFVDNHDSQPEEALESFVEEWFKPLAYALTLTRDQGYPSVFYGDYYGIPTHGVPAMKSKIDPILEARQKYAYGTQRDYLDHPDVIGWTREGDGVHADSGLATLMSDGPGGSKWMEVGKNNAGEVWYDITGNQTNTVTINKDGWGQFHVSGGSVSIYVQQ

SEQ ID NO: 25818 - protein, 483 aa, Bacillus licheniformis
HHNGVNGTMMQYFEWYLPNDGNHWNRLRSDASNLKDKGITAVWIPPAWKGASQNDVGYGAYDLYDLGEFNQKGTVRTKYGTRNQLQAAVTALKSNGIQVYGDVVMNHKGGADATEWVRAVEVNPSNRNQEVSGDYTIEAWTKFDFPGRGNTHSNFKWRWYHFDGVDWDQSRQLQNRIYKFRGKGWDWEVDTENGNYDYLMYADIDMDHPEVVNELRNWGVWYTNTLGLDGFRIDAVKHIKYSFTRDWLTHVRNTTGKNMFAVAEFWKNDIGAIENYLSKTNWNHSVFDVPLHYNLYNASRSGGNYDMRQIFNGTVVQRHPTHAVTFVDNHDSQPEEALESFVEEWFKPLAYALTLTRDQGYPSVFYGDYYGIPTHGVPAMKSKIDPILEARQKYAYGTQRDYLDHPDVIGWTREGDGVHADSGLATLMSDGPGGSKWMEVGKNNAGEVWYDITGNQTNTVTINKDGWGQFHVSGGSVSIYVQQ

SEQ ID NO: 25819 - protein, 483 aa, Bacillus licheniformis
HHNGTNGTMMQYFEWYLPNDGNHWNRLRSDASNLKDKGITAVWIPPAWKGASQNDVGYGAYDLYDLGEFNQKGTVRTKYGTRNQLQAAVTALKSNGIQVYGDVVMNHKGGADATEWVRAVEVNPSNRNQEVSGDYTIEAWTKFDFPGRGNTHSNFKWRWYHFDGVDWDQSRQLQNRIYKFRGKGWDWEVDTENGNYDYLMYADIDMDHPEVVNELRNWGVWYTNTLGLDGTRIDAVKHIKYSFTRDWLTHVRNTTGKNMFAVAEFWKNDIGAIENYLSKTNWNHSVFDVPLHYNLYNASRSGGNYDMRQIFNGTVVQRHPTHAVTFVDNHDSQPEEALESFVEEWFKPLAYALTLTRDQGYPSVFYGDYYGIPTHGVPAMKSKIDPILEARQKYAYGTQRDYLDHPDVIGWTREGDGVHADSGLATLMSDGPGGSKWMEVGKNNAGEVWYDITGNQTNTVTINKDGWGQFHVSGGSVSIYVQQ

SEQ ID NO: 25820 - protein, 483 aa, Bacillus licheniformis
HHNGTNGTMMQYFEWYLPNDGNHWNRLRSDASNLKDKGITAVWIPPAWKGASQNDVGYGAYDLYDLGEFNQKGTVRTKYGTRNQLQAAVTALKSNGIQVYGDVVMNHKGGADATEWVRAVEVNPSNRNQEVSGDYTIEAWTKFDFPGRGNTHSNFKWRWYHFDGVDWDQSRQLQNRIYKFRGKGWDWEVDTENGNYDYLMYADIDMDHPEVVNELRNWGVWYTNTLGLDGFRIDAVKHIKYSFTRDWLTHVRNTTGKNMFAVAEFWKNDIGAIENYLSKTNWNHSVFDVPLHYNLYNASRSGGNYDMRQIFNGTVVQRHPTHAVTFVDNHDSQPEEALESFVEEWFKPLAYALTLTRDQGYPSVFYGDYYGIPTHGVPAMKSKIDPILEARQKYAGGTQRDYLDHPDVIGWTREGDGVHADSGLATLMSDGPGGSKWMEVGKNNAGEVWYDITGNQTNTVTINKDGWGQFHVSGGSVSIYVQQ

SEQ ID NO: 25821 - protein, 483 aa, Bacillus licheniformis
HHNGTNGTMMQYFEWYLPNDGNHWNRLRSDASNLKDKGITAVWIPPAWKGASQNDVGYGAYDLYDLGEFNQKGTVRTKYGTRNQLQAAVTALKSNGIQVYGDVVMNHKGGADATEWVRAVEVNPSNRNQEVSGDYTIEAWTKFDFPGRGNTHSNFKWRWYHFDGVDWDQSRQLQNRIYKFRGKGWDWEVDTENGNYDYLMYADIDMDHPEVVNELRNWGVWYTNTLGLDGFRIDAVKHIKYSFTRDWLTHVRNTTGKNMFAVAEFWKNDIGAIENYLSKTNWNHSVFDVPDHYNLYNASRSGGNYDMRQIFNGTVVQRHPTHAVTFVDNHDSQPEEALESFVEEWFKPLAYALTLTRDQGYPSVFYGDYYGIPTHGVPAMKSKIDPILEARQKYAYGTQRDYLDHPDVIGWTREGDGVHADSGLATLMSDGPGGSKWMEVGKNNAGEVWYDITGNQTNTVTINKDGWGQFHVSGGSVSIYVQQ

SEQ ID NO: 25822 - protein, 483 aa, Bacillus licheniformis
HHNGTNGTMMQYFEWYLPNDGNHWNRLRSDASNLKDKGITAVWIPPAWKGASQNDVGYGAYDLYDLGEFNQKGTVRTKYGTRNQLQAAVTALKSNGIQVYGDVVMNHKGGADATEWVRAVEVNPSNRNQEVSGDYTIEAWTKFDFTGRGNTHSNFKWRWYHFDGVDWDQSRQLQNRIYKFRGKGWDWEVDTENGNYDYLMYADIDMDHPEVVNELRNWGVWYTNTLGLDGFRIDAVKHIKYSFTRDWLTHVRNTTGKNMFAVAEFWKNDIGAIENYLSKTNWNHSVFDVPLHYNLYNASRSGGNYDMRQIFNGTVVQRHPTHAVTFVDNHDSQPEEALESFVEEWFKPLAYALTLTRDQGYPSVFYGDYYGIPTHGVPAMKSKIDPILEARQKYAYGTQRDYLDHPDVIGWTREGDGVHADSGLATLMSDGPGGSKWMEVGKNNAGEVWYDITGNQTNTVTINKDGWGQFHVSGGSVSIYVQQ

SEQ ID NO: 25823 - protein, 483 aa, Bacillus licheniformis
HHNGTNGTMMQYFEWYLPNDGNHWNRLRSDASNLKDKGITAVWIPPAWKGASQNDVGYGAYDLYDLGEFLQKGTVRTKYGTRNQLQAAVTALKSNGIQVYGDVVMNHKGGADATEWVRAVEVNPSNRNQEVSGDYTIEAWTKFDFPGRGNTHSNFKWRWYHFDGVDWDQSRQLQNRIYKFRGKGWDWEVDTENGNYDYLMYADIDMDHPEVVNELRNWGVWYTNTLGLDGFRIDAVKHIKYSFTRDWLTHVRNTTGKNMFAVAEFWKNDIGAIENYLSKTNWNHSVFDVPLHYNLYNASRSGGNYDMRQIFNGTVVQRHPTHAVTFVDNHDSQPEEALESFVEEWFKPLAYALTLTRDQGYPSVFYGDYYGIPTHGVPAMKSKIDPILEARQKYAYGTQRDYLDHPDVIGWTREGDGVHADSGLATLMSDGPGGSKWMEVGKNNAGEVWYDITGNQTNTVTINKDGWGQFHVSGGSVSIYVQQ

SEQ ID NO: 25824 - protein, 483 aa, Bacillus licheniformis
HHNGTNGTMMQYFEWYLPNDGNHWNRLRSDASNLKDKGITAVWIPPAWKGASQNDVGYGAYDLYDLGEFNQKGTVRTKYGTRNQLQAAVTALKSNGIQVYGDVVMNHKGGADATEWVRAVEVNPSNRNQEVSGDYTIEAWTKFDFPGRGNTHSNFKWRWYHFDGVDWDQSRQLQNRIYKFRGKGWDWEVDTENGNYDYLMYADIDMDHPEVVNELRNWGVWYTNTLGLDGFRIDAVKHIKYSFTRDWLTHVRNTTGKNMFAHAEFWKNDIGAIENYLSKTNWNHSVFDVPLHYNLYNASRSGGNYDMRQIFNGTVVQRHPTHAVTFVDNHDSQPEEALESFVEEWFKPLAYALTLTRDQGYPSVFYGDYYGIPTHGVPAMKSKIDPILEARQKYAYGTQRDYLDHPDVIGWTREGDGVHADSGLATLMSDGPGGSKWMEVGKNNAGEVWYDITGNQTNTVTINKDGWGQFHVSGGSVSIYVQQ

SEQ ID NO: 25825 - protein, 483 aa, Bacillus licheniformis
HHNGTNGTMMQYFEWYLPNDGNHWNRLRSDASNLKDKGITAVWIPPAWKGASQNDVGYGAYDLYDLGEFNQKGTVRTKYGTRNQLQAAVTALKSNGINVYGDVVMNHKGGADATEWVRAVEVNPSNRNQEVSGDYTIEAWTKFDFPGRGNTHSNFKWRWYHFDGVDWDQSRQLQNRIYKFRGKGWDWEVDTENGNYDYLMYADIDMDHPEVVNELRNWGVWYTNTLGLDGFRIDAVKHIKYSFTRDWLTHVRNTTGKNMFAVAEFWKNDIGAIENYLSKTNWNHSVFDVPLHYNLYNASRSGGNYDMRQIFNGTVVQRHPTHAVTFVDNHDSQPEEALESFVEEWFKPLAYALTLTRDQGYPSVFYGDYYGIPTHGVPAMKSKIDPILEARQKYAYGTQRDYLDHPDVIGWTREGDGVHADSGLATLMSDGPGGSKWMEVGKNNAGEVWYDITGNQTNTVTINKDGWGQFHVSGGSVSIYVQQ

SEQ ID NO: 25826 - protein, 483 aa, Bacillus licheniformis
HHNGTNGTMMQYFEWYLPNDGNHWNRLRSDASNLKDKGITAVWIPPAWKGASQNDVGYGAYDLYDLGEFNQKGTVRTKYGTRNQLQAAVTALKSNGIQVYGDVVMNHKGGADAGEWVRAVEVNPSNRNQEVSGDYTIEAWTKFDFPGRGNTHSNFKWRWYHFDGVDWDQSRQLQNRIYKFRGKGWDWEVDTENGNYDYLMYADIDMDHPEVVNELRNWGVWYTNTLGLDGFRIDAVKHIKYSFTRDWLTHVRNTTGKNMFAVAEFWKNDIGAIENYLSKTNWNHSVFDVPLHYNLYNASRSGGNYDMRQIFNGTVVQRHPTHAVTFVDNHDSQPEEALESFVEEWFKPLAYALTLTRDQGYPSVFYGDYYGIPTHGVPAMKSKIDPILEARQKYAYGTQRDYLDHPDVIGWTREGDGVHADSGLATLMSDGPGGSKWMEVGKNNAGEVWYDITGNQTNTVTINKDGWGQFHVSGGSVSIYVQQ

SEQ ID NO: 25827 - protein, 483 aa, Bacillus licheniformis
HHNGTNGTMMQYFEWYVPNDGNHWNRLRSDASNLKDKGITAVWIPPAWKGASQNDVGYGAYDLYDLGEFNQKGTVRTKYGTRNQLQAAVTALKSNGIQVYGDVVMNHKGGADATEWVRAVEVNPSNRNQEVSGDYTIEAWTKFDFPGRGNTHSNFKWRWYHFDGVDWDQSRQLQNRIYKFRGKGWDWEVDTENGNYDYLMYADIDMDHPEVVNELRNWGVWYTNTLGLDGFRIDAVKHIKYSFTRDWLTHVRNTTGKNMFAVAEFWKNDIGAIENYLSKTNWNHSVFDVPLHYNLYNASRSGGNYDMRQIFNGTVVQRHPTHAVTFVDNHDSQPEEALESFVEEWFKPLAYALTLTRDQGYPSVFYGDYYGIPTHGVPAMKSKIDPILEARQKYAYGTQRDYLDHPDVIGWTREGDGVHADSGLATLMSDGPGGSKWMEVGKNNAGEVWYDITGNQTNTVTINKDGWGQFHVSGGSVSIYVQQ

SEQ ID NO: 25828 - protein, 483 aa, Bacillus licheniformis
HHNGTNGTMMQYFEWYLPNDGNHWNRLRSDASNLKDKGITAVWIPPAWKGASQNDVGYGAYDLYDLGEFNQKGTVRTKYGTRNQLQAAVTALKSNGIQVYGDVVMNHKGGADATEWVRAVEVNPSNRNEEVSGDYTIEAWTKFDFPGRGNTHSNFKWRWYHFDGVDWDQSRQLQNRIYKFRGKGWDWEVDTENGNYDYLMYADIDMDHPEVVNELRNWGVWYTNTLGLDGFRIDAVKHIKYSFTRDWLTHVRNTTGKNMFAVAEFWKNDIGAIENYLSKTNWNHSVFDVPLHYNLYNASRSGGNYDMRQIFNGTVVQRHPTHAVTFVDNHDSQPEEALESFVEEWFKPLAYALTLTRDQGYPSVFYGDYYGIPTHGVPAMKSKIDPILEARQKYAYGTQRDYLDHPDVIGWTREGDGVHADSGLATLMSDGPGGSKWMEVGKNNAGEVWYDITGNQTNTVTINKDGWGQFHVSGGSVSIYVQQ

SEQ ID NO: 25829 - protein, 483 aa, Bacillus licheniformis
HHNGTNGTMMQYFEWYLPNDGNHWNRLRSDASNLKDKGITAVWIPPAWKGASQNDVGYGAYDLYDLGEFNQKGTVRTKYGTRNQLQAAVTALKSNGIQVYGDVVMNHKGGADATEWVRAVEVNPSNRNQEVSGDYTIEAWTKFDFPGRGNTHSNFKWRWYHFDGVDWDQSRQLQNRIYKFRGKGWDWEVDTENGNYDYLMYADIDMDHPEVVNELRNWGVWYTNTLGLDGFRIDAVKHIKYSFTRDWLTHVRNTTGKNMFAVAEFWKNDIGAIENYLSKTNWNHSVFDVPLHYNLYNASRSGGNYDMRQIFNGTVVQRHPTHAVTFVDNHDSQPEEALESFVEEWFKPLAYAITLTRDQGYPSVFYGDYYGIPTHGVPAMKSKIDPILEARQKYAYGTQRDYLDHPDVIGWTREGDGVHADSGLATLMSDGPGGSKWMEVGKNNAGEVWYDITGNQTNTVTINKDGWGQFHVSGGSVSIYVQQ

SEQ ID NO: 25830 - protein, 483 aa, Bacillus licheniformis
HHNQTNGTMMQYFEWYLPNDGNHWNRLRSDASNLKDKGITAVWIPPAWKGASQNDVGYGAYDLYDLGEFNQKGTVRTKYGTRNQLQAAVTALKSNGIQVYGDVVMNHKGGADATEWVRAVEVNPSNRNQEVSGDYTIEAWTKFDFPGRGNTHSNFKWRWYHFDGVDWDQSRQLQNKIYKFRGKGWDWEVDTENGNYDYLMYADYDMDHPEVVNELRNWGVWYTNTLGLDGFRIDAVKHIKYSFTRDWLTHVRNTTGKNMFAVAEFWKNDIGAIENYLSKTNWNHSVFDVPLHYNLYNASRSGGNYDMRQIFNGTVVQRHPTHAVTFVDNHDSQPEEALESFVEEWFKPLAYALTLTRDQGYPSVFYGDYYGIPTHGVPAMKSKIDPILEARQKYAYGTQRDYMDHPDVIGWTREGDGVHADSGLATLMSDGPGGSKWMEVGKNNAGEVWYDITGNQTGTVTINKDGWGQFHVSGGSVSIYVQQ

SEQ ID NO: 25831 - protein, 483 aa, Bacillus licheniformis
HHNGTNGTMMQYFEWYLPNDGNHWNRLRSDASNLKDKGITAVWIPPAWKGASQNDVGYGAYDLYDLGEFNQKGTVRTKYGTRNQLQAAVTALKSNGIQVYGDVVMNHKGGADATEWVRAVEVNPSNRNQEVSGCYTIEAWTKFDFPGRGNTHSNFKWRWYHFDGVDWDQSRQLQNRIYKFRGKGWDWEVDTENGNYDYLMYADIDMDHPEVVNELRNWGVWYTNTLGLDGFRIDAVKHIKYSFTRDWLTHVRNTTGKNMFAVAEFWKNDIGAIENYLSKTNWNHSVFDVPLHYNLYNASRSGGNYDMRQIFNGTVVQRHPTHAVTFVDNHDSQPEEALESFVEEWFKPLAYALTLTRDQGYPSVFYGDYYGIPTHGVPAMKSKIDPILEARQKYAYGTQRDYLDHPDVIGWTREGDGVHADSGLATLMSDGPGGSKWMEVGKNNAGEVWYDITGNQTNTVTINKDGWGQFHVSGGSVSIYVQQ

SEQ ID NO: 25832 - protein, 483 aa, Bacillus licheniformis
HHNGTNGTMMQYFEWYLPNDGNHWNRLRSDASNLKDKGITAVWIPPAWKGASQNDVGYGAYDLYDLGEFNQKGTVRTKYGTRNQLQAAVTALKSNGIQVYGDVVMNHKGGADATEWVRAVEVNPSNRNQEVSGDYTIEAWTKFDFPGRGNTHSNFKWRWYHFDGVDWDQSRQLQNRIYKFRGKGWDWEVDTENGNYDYLMYADIDMDHPEVVNELINWGVWYTNTLGLDGFRIDAVKHIKYSFTRDWLTHVRNTTGKNMFAVAEFWKNDIGAIENYLSKTNWNHSVFDVPLHYNLYNASRSGGNYDMRQIFNGTVVQRHPTHAVTFVDNHDSQPEEALESFVEEWFKPLAYALTLTRDQGYPSVFYGDYYGIPTHGVPAMKSKIDPILEARQKYAYGTQRDYLDHPDVIGWTREGDGVHADSGLATLMSDGPGGSKWMEVGKNNAGEVWYDITGNQTNTVTINKDGWGQFHVSGGSVSIYVQQ

SEQ ID NO: 25833 - protein, 483 aa, Bacillus licheniformis
HHNGTNGTMMQYFEWYLPNDGNHWNRLRSDASNLKDKGITAVWIPPAWKGASQNDVGYGAYDLYDLGEFNQKGTVRTKYGTRNQLQAAVTALKSNGIQVYGDVVMNHKGGADATEWVRAVEVNPSNRNQEVSGDYTIEAWTKFDFSGRGNTHSNFKWRWYHFDGVDWDQSRQLQNRIYKFRGKGWDWEVDTENGNYDYLMYADIDMDHPEVVNELRNWGVWYTNTLGLDGFRIDAVKHIKYSFTRDWLTHVRNTTGKNMFAVAEFWKNDIGAIENYLSKTNWNHSVFDVPLHYNLYNASRSGGNYDMRQIFNGTVVQRHPTHAVTFVDNHDSQPEEALESFVEEWFKPLAYALTLTRDQGYPSVFYGDYYGIPTHGVPAMKSKIDPILEARQKYAYGTQRDYLDHPDVIGWTREGDGVHADSGLATLMSDGPGGSKWMEVGKNNAGEVWYDITGNQTNTVTINKDGWGQFHVSGGSVSIYVQQ

SEQ ID NO: 25834 - protein, 483 aa, Bacillus licheniformis
HHNGTNGTMMQYFEWYLPGDGNHWNRLRSDASNLKDKGITAVWIPPAWKGASQNDVGYGAYDLYDLGEFNQKGTVRTKYGTRNQLQAAVTALKSNGIQVYGDVVMNHKGGADATEWVRAVEVNPSNRNQEVSGDYTIEAWTKFDFPGRGNTHSNFKWRWYHFDGVDWDQSRQLQNRIYKFRGKGWDWEVDTENGNYDYLMYADIDMDHPEVVNELRNWGVWYTNTLGLDGFRIDAVKHIKYSFTRDWLTHVRNTTGKNMFAVAEFWKNDIGAIENYLSKTNWNHSVFDVPLHYNLYNASRSGGNYDMRQIFNGTVVQRHPTHAVTFVDNHDSQPEEALESFVEEWFKPLAYALTLTRDQGYPSVFYGDYYGIPTHGVPAMKSKIDPILEARQKYAYGTQRDYLDHPDVIGWTREGDGVHADSGLATLMSDGPGGSKWMEVGKNNAGEVWYDITGNQTNTVTINKDGWGQFHVSGGSVSIYVQQ

SEQ ID NO: 25835 - protein, 483 aa, Bacillus licheniformis
HHNGTNGTMMQYFEWYLPNDGNHWNRLRSDASNLKDKGITAVWIPPAWKGASQNDVGYGAYDLYDLGEFNQKGTVRTKYGTRNQLQAAVTALKSNGIQVYGDVVMNHKGGADATEWVRAVEVNPSNRNQEVSGDYTIEAWTKFDFPGRGNTHSNFKWRWYHFDGVDWDQSRQLQNRIYKFRGKGWDWEVDTENGNYDYLMYADIDMDHPEVVNELRNWGVWYTNTLGLDGFRIDAVKHIKYSFTRDWLTHVRNTTGKNMFAVAEFWKNDIGAIENYLSKTNWNHSVFDVPLHYNLYNASRSGGEYDMRQIFNGTVVQRHPTHAVTFVDNHDSQPEEALESFVEEWFKPLAYALTLTRDQGYPSVFYGDYYGIPTHGVPAMKSKIDPILEARQKYAYGTQRDYLDHPDVIGWTREGDGVHADSGLATLMSDGPGGSKWMEVGKNNAGEVWYDITGNQTNTVTINKDGWGQFHVSGGSVSIYVQQ

SEQ ID NO: 25836 - protein, 483 aa, Bacillus licheniformis
HHNGTNGTMMQYFEWYLPNDGNHWNRLRSDASNLKDKGETAVWIPPAWKGASQNDVGYGAYDLYDLGEFNQKGTVRTKYGTRNQLQAAVTALKSNGIQVYGDVVMNHKGGADATEWVRAVEVNPSNRNQEVSGDYTIEAWTKFDFPGRGNTHSNFKWRWYHFDGVDWDQSRQLQNRIYKFRGKGWDWEVDTENGNYDYLMYADIDMDHPEVVNELRNWGVWYTNTLGLDGFRIDAVKHIKYSFTRDWLTHVRNTTGKNMFAVAEFWKNDIGAIENYLSKTNWNHSVFDVPLHYNLYNASRSGGNYDMRQIFNGTVVQRHPTHAVTFVDNHDSQPEEALESFVEEWFKPLAYALTLTRDQGYPSVFYGDYYGIPTHGVPAMKSKIDPILEARQKYAYGTQRDYLDHPDVIGWTREGDGVHADSGLATLMSDGPGGSKWMEVGKNNAGEVWYDITGNQTNTVTINKDGWGQFHVSGGSVSIYVQQ

SEQ ID NO: 25837 - protein, 483 aa, Bacillus licheniformis
HHNGTNGTMMQYFEWYLPNDGNHWNRLRSDASNLKDKGITAVWIPPAWKGASQNDVGYGAYDLYDLGEFNQKGTVRTKYGTRNQLQAAVTALKSNGIQVYGDVVMNHKGGADATEWVRAVEVNPSNRNQEVSGDYTIEAWTKFDFPGRGNTHSNFKWRWYHFDGVDWDQSRQLQNRIYKFRGKGWDWEVDTENGNYDYLMYADIDMDHPEVVNELRNWGVWYTNTLGLDGFRIDAVKHIKYSFTRDWLTHVRNTTGKNMFAVAEFWKNDIGAIENYLSKTNWNHSVFDVPLHYNLYNASRSGGNYDMRQIFNGTVVQRHPTHAVTFVDNHDSQPEEALESFVEEWFKPLAYALTLTRDQGYPSVFYGDYYGIPTHGVPAMKSKIDPILEARQKYAYGTQRDYLDHPDVIGWTREGDGVHADSGLATLMSDGPGGSKCMEVGKNNAGEVWYDITGNQTNTVTINKDGWGQFHVSGGSVSIYVQQ

SEQ ID NO: 25838 - protein, 483 aa, Bacillus licheniformis
HHNGTNGTMMQYFEWYLPNDGNHWNRLRSDASNLKDKGITAVWIPPAWKGASQNDVGYGAYDLYDLGEFNQKGTVRTKYGTRNQLQAAVTALKSNGIQVYGDVVMNHKGGADATEWVRAVEVNPSNRNQEVSGDYTIEAWTKFDFPGRGNTHSNFKWRWYHFDGVDWDQSRQLQNRIYKFRGKGWDWEVDTENGNYDYLMYADIDMDHPEVVNELRNWGVWYTNTLGLDGFRIDAVKHIKYSFTRDWLTHVRNTTGKNMFAVAEFWKNDIGAIENYLSKTNWNHSVFDVPLHYNLYNASRSGGNYDMRQIFNGTVVQRHPTHAVTFVDNHDSQPEEALESFVEEWFKPLAYALTLTRDQGYPSVFYGDYYGIPTHGVPAMKSKIDPILEARQKYAYGTQRDYLDHPDVIGWTREGDGVHADSGLATLMSDGPGGSKWMEVGKNNAGEVWYDITMNQTNTVTINKDGWGQFHVSGGSVSIYVQQ

SEQ ID NO: 25839 - protein, 483 aa, Bacillus licheniformis
HHNGTNGTMMQYFEWYLPNDGNHWNRLRSDASNLKDKGITAVWIPPAWKGASQNDVGYGAYDLYDLGEFNQKGTVRTKYGTRNQLQAAVTALKSNGIQVYGDVVMDHKGGADATEWVRAVEVNPSNRNQEVSGDYTIEAWTKFDFPGRGNTHSNFKWRWYHFDGVDWDQSRQLQNRIYKFRGKGWDWEVDTENGNYDYLMYADIDMDHPEVVNELRNWGVWYTNTLGLDGFRIDAVKHIKYSFTRDWLTHVRNTTGKNMFAVAEFWKNDIGAIENYLSKTNWNHSVFDVPLHYNLYNASRSGGNYDMRQIFNGTVVQRHPTHAVTFVDNHDSQPEEALESFVEEWFKPLAYALTLTRDQGYPSVFYGDYYGIPTHGVPAMKSKIDPILEARQKYAYGTQRDYLDHPDVIGWTREGDGVHADSGLATLMSDGPGGSKWMEVGKNNAGEVWYDITGNQTNTVTINKDGWGQFHVSGGSVSIYVQQ

SEQ ID NO: 25840 - protein, 483 aa, Bacillus licheniformis
HHNGTNGTMMQYFEWYLPNDGNHWNRLRSDASNLKDKGITAVWIPPAWKGASQNDVGYGAYDLYDLGEFNQKGTVRTKYGTRNQLQAAVTALKSNGIQVYGDVVMNHKGGADATEWVRAVEVNPSNRNQEVSGDYTIEAWTKFDFPGRGNTHSNFKWRWYHFDGVDWDQSRQLPNRIYKFRGKGWDWEVDTENGNYDYLMYADIDMDHPEVVNELRNWGVWYTNTLGLDGFRIDAVKHIKYSFTRDWLTHVRNTTGKNMFAVAEFWKNDIGAIENYLSKTNWNHSVFDVPLHYNLYNASRSGGNYDMRQIFNGTVVQRHPTHAVTFVDNHDSQPEEALESFVEEWFKPLAYALTLTRDQGYPSVFYGDYYGIPTHGVPAMKSKIDPILEARQKYAYGTQRDYLDHPDVIGWTREGDGVHADSGLATLMSDGPGGSKWMEVGKNNAGEVWYDITGNQTNTVTINKDGWGQFHVSGGSVSIYVQQ

SEQ ID NO: 25841 - protein, 483 aa, Bacillus licheniformis
HHNGTNGTMMQYFEWYLPNDGNHWNRLRSDASNLKDKGITAVWIPPAWKGASQNDVGYGAYDLYDLGEFNQKGTVRTKYGTRNQLQAAVTALKSNGIQVYGDVVMNHKGGADATEWVRAVEVNPSNRNQEVSGDYTIEAWTKFDFPGRGNTHSNFKWRWYHFDGVDWDQSRQLGNRIYKFRGKGWDWEVDTENGNYDYLMYADIDMDHPEVVNELRNWGVWYTNTLGLDGFRIDAVKHIKYSFTRDWLTHVRNTTGKNMFAVAEFWKNDIGAIENYLSKTNWNHSVFDVPLHYNLYNASRSGGNYDMRQIFNGTVVQRHPTHAVTFVDNHDSQPEEALESFVEEWFKPLAYALTLTRDQGYPSVFYGDYYGIPTHGVPAMKSKIDPILEARQKYAYGTQRDYLDHPDVIGWTREGDGVHADSGLATLMSDGPGGSKWMEVGKNNAGEVWYDITGNQTNTVTINKDGWGQFHVSGGSVSIYVQQ

SEQ ID NO: 25842 - protein, 483 aa, Bacillus licheniformis
HHNGTNGTMMQYFEWYLPNDGNHWNRLRSDASNLKDKGITAVWIPPAWKGASQNDVGYGAYDLYDLGEFNQKGTVRTKYGTRNQLQAAVTALKSNGIQVYGDVVMNHKGGADATEWVRAVEVNPSNRNQEVSGDYTIEAWTKFDFPGRGNTHSNFKWRWYHFDGVDWDQSRQLQNRIYKFRGKGWDWEVDTENGNYDYLMYADIDMDHPEVVNELRNWGVWYTNTLGLDGFRIDAVKHIKYSFTRDWLTHVRNTTGKNMFAVAEFWKNDIGAIENYLSHTNWNHSVFDVPLHYNLYNASRSGGNYDMRQIFNGTVVQRHPTHAVTFVDNHDSQPEEALESFVEEWFKPLAYALTLTRDQGYPSVFYGDYYGIPTHGVPAMKSKIDPILEARQKYAYGTQRDYLDHPDVIGWTREGDGVHADSGLATLMSDGPGGSKWMEVGKNNAGEVWYDITGNQTNTVTINKDGWGQFHVSGGSVSIYVQQ

SEQ ID NO: 25843 - protein, 483 aa, Bacillus licheniformis
HHNGTNGTMMQYFEWYLPNDGNHWNRLRSDASNLKDKGITAVWIPPAWKGASQNDVGYGAYDLYDLGEFNQKGTVRTKYGTRNQLQAAVTALKSNGIQVYGDVVMNHKGGADATEWVRAVEVNPSNRNQEVSGDYTIEAWTKFDFPGRGNTHSNFKWRWYHFDGVDWDQSRQLQNKIYKFRGKEWDWEVDEENGNYDYLMYADIDMDHPEVVNELRNWGVWYTNTLGLDGFRIDAVKHIKYSFTRDWLTHVRNTTGKNMFAVAEFWKNDIGAIENYLSKTNWNHSVFDVPLHYNLYNASRSGGNYDMRQIFNGTVVQRHPTHAVTFVDNHDSQPEEALESFVEEWFKPLAYALTLTRDQGYPSVFYGDYYGIPTHGVPAMKSKIDPILEARQKYAYGTQRDYMDHPDVIGWTREGDGVHADSGLATLMSDGPGGSKWMEVGKNNAGEVWYDITGNQTNTVTINKDGWGQFHVSGGSVSIYVQQ

SEQ ID NO: 25844 - protein, 483 aa, Bacillus licheniformis
HHNGTNGTMMQYFEWYLPNDGNHWNRLRSDASNLKDKGITAVWIPPAWKGASQNDVGYGAYDLYDLGEFNQKGTVRTKYGTRNQLQAAVTALKSNGIQVYGDVVMNHKGGADATNWVRAVEVNPSNRNQEVSGDYTIEAWTKFDFPGRGNTHSNFKWRWYHFDGVDWDQSRQLQNRIYKFRGKGWDWEVDTENGNYDYLMYADIDMDHPEVVNELRNWGVWYTNTLGLDGFRIDAVKHIKYSFTRDWLTHVRNTTGKNMFAVAEFWKNDIGAIENYLSKTNWNHSVFDVPLHYNLYNASRSGGNYDMRQIFNGTVVQRHPTHAVTFVDNHDSQPEEALESFVEEWFKPLAYALTLTRDQGYPSVFYGDYYGIPTHGVPAMKSKIDPILEARQKYAYGTQRDYLDHPDVIGWTREGDGVHADSGLATLMSDGPGGSKWMEVGKNNAGEVWYDITGNQTNTVTINKDGWGQFHVSGGSVSIYVQQ

SEQ ID NO: 25845 - protein, 483 aa, Bacillus licheniformis
HHNGTNGTMMQYFEWYLPNDGNHWNRLRSDASNLKDKGITAVWIPPAWKGASQNDVGYGAYDLYDLGEFNQKGTVRTKYGTRNQLQAAVTALKSNGIQVYGDVVMNHKGGADATEWVRAVEVNPSNRNQEVSGDYTIEAWTKFDFPGRGNTHSNFKWRWYHFDGVDWDQSRQLQNRIYKFRGKGWDWEVDTENGNYDYLMYADIDMDHPEVVNELRNWGVWYTNTLGLDGFRIDAVKHIKYSFTRDWLTHVRNTTGKNMFAVAEFWKNDIGAIENYLSKTNWNHSVFDVPLHYNLYNASRSGGNYDMRQIFNGTVVQRHPTHAVTFVDNHDSQPEEALESFVEEWFKPLAYALTLTRDQGYPSVFYGDYYGIPTHGVPAQKSKIDPILEARQKYAYGTQRDYLDHPDVIGWTREGDGVHADSGLATLMSDGPGGSKWMEVGKNNAGEVWYDITGNQTNTVTINKDGWGQFHVSGGSVSIYVQQ

SEQ ID NO: 25846 - protein, 483 aa, Bacillus licheniformis
HHNGTNGTMMQYFEWYLPNDGNHWNRLRSDASNLKDKGITAVWIPPAWKGASQNDVGYGAYDLYDLGEFNQKGTVRTKYGTRNQLQAAVTALKSNGIQVYGDVVMNHKGGADATEWVRAVEVNPSNRNQEVSGDYTIEAWTKFDFPGRGNTHSNFKWRWYHFDGVDWDQSRQLQNRIYKFRGKGWDWEVDTENGNYDYLMYADIDMDHPEVVNELRNWGVWYCNTLGLDGFRIDAVKHIKYSFTRDWLTHVRNTTGKNMFAVAEFWKNDIGAIENYLSKTNWNHSVFDVPLHYNLYNASRSGGNYDMRQIFNGTVVQRHPTHAVTFVDNHDSQPEEALESFVEEWFKPLAYALTLTRDQGYPSVFYGDYYGIPTHGVPAMKSKIDPILEARQKYAYGTQRDYLDHPDVIGWTREGDGVHADSGLATLMSDGPGGSKWMEVGKNNAGEVWYDITGNQTNTVTINKDGWGQFHVSGGSVSIYVQQ

SEQ ID NO: 25847 - protein, 483 aa, Bacillus licheniformis
HHNGTNGTMMQYFEWYLPNDGNHWNRLRSDASNLKDKGITAVWIPPAWKGASQNDVGYGAYDLYDLGEFNQKGTVRTKYGTRNQLQAAVTALKSNGIQVYGDVVMNHKGGADATEWVRAVEVNPSNRNQEVSGDYTIEAWTKFDFPGRGNTHSNFKWRWYHFDGVDWDQSRQLQNRIYKFRGKGWDWEVDTENGNYDYLMYADIDMDHPEVVNELRNWGVWYTNTLGLDGFRIDAVKHIKYSFTRDWLTHVRNTTGKNMFAVAEFWKNDIEAIENYLSKTNWNHSVFDVPLHYNLYNASRSGGNYDMRQIFNGTVVQRHPTHAVTFVDNHDSQPEEALESFVEEWFKPLAYALTLTRDQGYPSVFYGDYYGIPTHGVPAMKSKIDPILEARQKYAYGTQRDYLDHPDVIGWTREGDGVHADSGLATLMSDGPGGSKWMEVGKNNAGEVWYDITGNQTNTVTINKDGWGQFHVSGGSVSIYVQQ

SEQ ID NO: 25848 - protein, 483 aa, Bacillus licheniformis
HHNGTNGTMMQYFEWYLPNDGNHWNRLRSDASNLKDKGITAVWIPPAWKGASQNDVGYGAYDLYDLGEFNQKGTVRTKYGTRNQLQAAVTALKSNGIQVYGDVVMNHKGGADATEWVRAVEVNPSNRNQEVSGDYTIEAWTKFDFPGRGNTHSNFKWRWYHFDGVDWDQSRQLQNRIYKFRGKGWDWEVDTENGNYDYLMYADIDMDHPEVVNELRNWGVWYTNTLGLDGFRIDAVKHIKYSFTRDWLTHVRNTTGKNMFAVAEFWKNDIGAIENYLSKTNWNHSVFDVPLHYNLYNASRSAGNYDMRQIFNGTVVQRHPTHAVTFVDNHDSQPEEALESFVEEWFKPLAYALTLTRDQGYPSVFYGDYYGIPTHGVPAMKSKIDPILEARQKYAYGTQRDYLDHPDVIGWTREGDGVHADSGLATLMSDGPGGSKWMEVGKNNAGEVWYDITGNQTNTVTINKDGWGQFHVSGGSVSIYVQQ

SEQ ID NO: 25849 - protein, 483 aa, Bacillus licheniformis
HHNGRNGTMMQYFEWYLPNDGNHWNRLRSDASNLKDKGITAVWIPPAWKGASQNDVGYGAYDLYDLGEFNQKGTVRTKYGTRNQLQAAVTALKSNGIQVYGDVVMNHKGGADATEWVRAVEVNPSNRNQEVSGDYTIEAWTKFDFPGRGNTHSNFKWRWYHFDGVDWDQSRQLQNRIYKFRGKGWDWEVDTENGNYDYLMYADIDMDHPEVVNELRNWGVWYTNTLGLDGFRIDAVKHIKYSFTRDWLTHVRNTTGKNMFAVAEFWKNDIGAIENYLSKTNWNHSVFDVPLHYNLYNASRSGGNYDMRQIFNGTVVQRHPTHAVTFVDNHDSQPEEALESFVEEWFKPLAYALTLTRDQGYPSVFYGDYYGIPTHGVPAMKSKIDPILEARQKYAYGTQRDYLDHPDVIGWTREGDGVHADSGLATLMSDGPGGSKWMEVGKNNAGEVWYDITGNQTNTVTINKDGWGQFHVSGGSVSIYVQQ

SEQ ID NO: 25850 - protein, 483 aa, Bacillus licheniformis
HHNGTNGTMMQYFEWYLPNDGNHWNRLRSDASNLKDKGITAVWIPPAWKGASQNDVGYGAYDLYDLGEFNQKGTVRTKYGTRNQLQAAVTALKSNGIQVYGDVVMNHKGGADATEWVRAVEVNPSNRNQEVSGDYTIEAWTKFDFPGRGNTHSNFKWRWYHFDGVDWDQSRQLQNRIYKFRGKGWDWEVDTENGNYDYLMYADIDMDHPEVVNELRNWGVWYTNTLGLDGFRIDAVKHIKYSFTRDWLTHVRNTTGKNMFAVAEFWKNDIGAIENYLSKTNWNHSVFDVPLHYNVYNASRSGGNYDMRQIFNGTVVQRHPTHAVTFVDNHDSQPEEALESFVEEWFKPLAYALTLTRDQGYPSVFYGDYYGIPTHGVPAMKSKIDPILEARQKYAYGTQRDYLDHPDVIGWTREGDGVHADSGLATLMSDGPGGSKWMEVGKNNAGEVWYDITGNQTNTVTINKDGWGQFHVSGGSVSIYVQQ

SEQ ID NO: 25851 - protein, 483 aa, Bacillus licheniformis
HHNGTNGTMMQYFEWYLPNDGNHWNRLRSDASNLKDKGITAVWIPPAWKGASQNDVGYGAYDLYDLGEFNQKGTVTTKYGTRNQLQAAVTALKSNGIQVYGDVVMNHKGGADATEWVRAVEVNPSNRNQEVSGDYTIEAWTKFDFPGRGNTHSNFKWRWYHFDGVDWDQSRQLQNRIYKFRGKGWDWEVDTENGNYDYLMYADIDMDHPEVVNELRNWGVWYTNTLGLDGFRIDAVKHIKYSFTRDWLTHVRNTTGKNMFAVAEFWKNDIGAIENYLSKTNWNHSVFDVPLHYNLYNASRSGGNYDMRQIFNGTVVQRHPTHAVTFVDNHDSQPEEALESFVEEWFKPLAYALTLTRDQGYPSVFYGDYYGIPTHGVPAMKSKIDPILEARQKYAYGTQRDYLDHPDVIGWTREGDGVHADSGLATLMSDGPGGSKWMEVGKNNAGEVWYDITGNQTNTVTINKDGWGQFHVSGGSVSIYVQQ

SEQ ID NO: 25852 - protein, 483 aa, Bacillus licheniformis
HHNGTNGTMMQYFEWYLPNDGNHWNRLRSDASNLKDKGITAVWIPPAWKGASQNDVGYGAYDLYDLGEFNQKGTVRTKYGTRNQLQAAVTALKSNGIQVYGDVVMNHKGGADATEWVRAVEVNPSNRNQEVSGDYTIEAWTKFDFPGRGNTHSNFKWRWYHFDGVDWDQSRQLQNRIYKFRGKGWDWEVDTENGNYDYLMYADIDMDHPEVVNELRNWGVWYTNTLGLDGFRIDAVKHIKYSFTRDWLTHVRNTTGKNMFAVAEFWKNDIGAIENYLSKTNWNHSVFDVPLHYNLYNASRSGGNYDMRQIFNGTVVQRHPTHAVTFVDNHDSQPEEALESFQEEWFKPLAYALTLTRDQGYPSVFYGDYYGIPTHGVPAMKSKIDPILEARQKYAYGTQRDYLDHPDVIGWTREGDGVHADSGLATLMSDGPGGSKWMEVGKNNAGEVWYDITGNQTNTVTINKDGWGQFHVSGGSVSIYVQQ

SEQ ID NO: 25853 - protein, 483 aa, Bacillus licheniformis
HHNGTNGTMMQYFEWYLPNDGRHWNRLRSDASNLKDKGITAVWIPPAWKGASQNDVGYGAYDLYDLGEFNQKGTVRTKYGTRNQLQAAVTALKSNGIQVYGDVVMNHKGGADATEWVRAVEVNPSNRNQEVSGDYTIEAWTKFDFPGRGNTHSNFKWRWYHFDGVDWDQSRQLQNRIYKFRGKGWDWEVDTENGNYDYLMYADIDMDHPEVVNELRNWGVWYTNTLGLDGFRIDAVKHIKYSFTRDWLTHVRNTTGKNMFAVAEFWKNDIGAIENYLSKTNWNHSVFDVPLHYNLYNASRSGGNYDMRQIFNGTVVQRHPTHAVTFVDNHDSQPEEALESFVEEWFKPLAYALTLTRDQGYPSVFYGDYYGIPTHGVPAMKSKIDPILEARQKYAYGTQRDYLDHPDVIGWTREGDGVHADSGLATLMSDGPGGSKWMEVGKNNAGEVWYDITGNQTNTVTINKDGWGQFHVSGGSVSIYVQQ

SEQ ID NO: 25854 - protein, 483 aa, Bacillus licheniformis
HHNGTNGTMMQYFEWYLPNDGNHWNRLRSDASNLKDKGITAVWIPPAWKGASQNDVGYGAYDLYDLGEFNQKGTVRTKYGTRNQLQAAVTALKSNGIQVYGDVVMNHKGGADATEWVRAVEVNPSNRNQEVSGDYTIEAWTKFDFPGRGNTHSNFKWRWYHFDGVDWDQSRQLQNRIYKFRGKGWDWEVDTENGNYDYLMYADIDMDHPEVVNELRNWGVWYTNTLGLDGFRIDAVKHIKYSFTRDWLTHVRNTTGKNMFAVAEFWKNDIGAIENYLSKTNWNHSVFDVPLHYNLYNASRSGGNYDMRQIFNGTVVQRHPTHAVTFVDNHDSQPEEALESFVEEWFKPLAYALTLTRDQTYPSVFYGDYYGIPTHGVPAMKSKIDPILEARQKYAYGTQRDYLDHPDVIGWTREGDGVHADSGLATLMSDGPGGSKWMEVGKNNAGEVWYDITGNQTNTVTINKDGWGQFHVSGGSVSIYVQQ

SEQ ID NO: 25855 - protein, 483 aa, Bacillus licheniformis
HHFGTNGTMMQYFEWYLPNDGNHWNRLRSDASNLKDKGITAVWIPPAWKGASQNDVGYGAYDLYDLGEFNQKGTVRTKYGTRNQLQAAVTALKSNGIQVYGDVVMNHKGGADATEWVRAVEVNPSNRNQEVSGDYTIEAWTKFDFPGRGNTHSNFKWRWYHFDGVDWDQSRQLQNRIYKFRGKGWDWEVDTENGNYDYLMYADIDMDHPEVVNELRNWGVWYTNTLGLDGFRIDAVKHIKYSFTRDWLTHVRNTTGKNMFAVAEFWKNDIGAIENYLSKTNWNHSVFDVPLHYNLYNASRSGGNYDMRQIFNGTVVQRHPTHAVTFVDNHDSQPEEALESFVEEWFKPLAYALTLTRDQGYPSVFYGDYYGIPTHGVPAMKSKIDPILEARQKYAYGTQRDYLDHPDVIGWTREGDGVHADSGLATLMSDGPGGSKWMEVGKNNAGEVWYDITGNQTNTVTINKDGWGQFHVSGGSVSIYVQQ

SEQ ID NO: 25856 - protein, 483 aa, Bacillus licheniformis
HHNGTNGTMMQYFEWYLPNDGNHWNRLRSDASNLKDKGITAVWIPPAWKGASQNDVGYGAYDLYDLGEFNQKGTVRTKYGTRNQLQAAVTALKSNGIQVYGDVVMNHKGGADATEWVRAVEVNPSNRNQEVSGDYTIEAWTKFDFPGRGNTHSNFKWRWYHFDGVDWDQSRQLQNRIYKFRGKGWDWEVDTENGNYDYLMYADIDMDHPEVVNELRNWGVWYTNTLGLDGFRIDAVKHIKYSFTRDWLTHVRNTTGKNMFAVAEFWKNDIGAIENYLSKTNWNHSVFDVPKHYNLYNASRSGGNYDMRQIFNGTVVQRHPTHAVTFVDNHDSQPEEALESFVEEWFKPLAYALTLTRDQGYPSVFYGDYYGIPTHGVPAMKSKIDPILEARQKYAYGTQRDYLDHPDVIGWTREGDGVHADSGLATLMSDGPGGSKWMEVGKNNAGEVWYDITGNQTNTVTINKDGWGQFHVSGGSVSIYVQQ

SEQ ID NO: 25857 - protein, 483 aa, Bacillus licheniformis
HHNGTNGTMMQYFEWYLPNNGNHWNRLRSDASNLKDKGITAVWIPPAWKGASQNDVGYGAYDLYDLGEFNQKGTVRTKYGTRNQLQAAVTALKSNGIQVYGDVVMNHKGGADATEWVRAVEVNPSNRNQEVSGDYTIEAWTKFDFPGRGNTHSNFKWRWYHFDGVDWDQSRQLQNRIYKFRGKGWDWEVDTENGNYDYLMYADIDMDHPEVVNELRNWGVWYTNTLGLDGFRIDAVKHIKYSFTRDWLTHVRNTTGKNMFAVAEFWKNDIGAIENYLSKTNWNHSVFDVPLHYNLYNASRSGGNYDMRQIFNGTVVQRHPTHAVTFVDNHDSQPEEALESFVEEWFKPLAYALTLTRDQGYPSVFYGDYYGIPTHGVPAMKSKIDPILEARQKYAYGTQRDYLDHPDVIGWTREGDGVHADSGLATLMSDGPGGSKWMEVGKNNAGEVWYDITGNQTNTVTINKDGWGQFHVSGGSVSIYVQQ

SEQ ID NO: 25858 - protein, 483 aa, Bacillus subtilis
HHNGTNGTMMQYFEWYLPNDGNHWNRLRSDASNLKDKGITAVWIPPAWKGASQNDVGYGAYDLYDLGEFNQKGTVRTKYGTRNQLQAAVTALKSNGIQVYGDVVMNHKGGADATEWVRAVEVNPSNRNQEVSGDYTIEAWTKFDFPGRGNTHSNFKWRWYHFDGVDWDQSRQLQNRIYKFRGKGWDWEVDTEFGNYDYLMYADIDMDHPEVVNELRNWGVWYTNTLGLDGFRIDAVKHIKYSFTRDWLTHVRNTTGKNMFAVAEFWKNDIGAIENYLSKTNWNHSVFDVPLHYNLYNASRSGGNYDMRQIFNGTVVQRHPTHAVTFVDNHDSQPEEALESFVEEWFKPLAYALTLTRDQGYPSVFYGDYYGIPTHGVPAMKSKIDPILEARQKYAYGTQRDYLDHPDVIGWTREGDGVHADSGLATLMSDGPGGSKWMEVGKNNAGEVWYDITGNQTNTVTINKDGWGQFHVSGGSVSIYVQQ

SEQ ID NO: 25859 - protein, 483 aa, Bacillus licheniformis
HHNGTNGTMMQYFEWYLPNDGNHWNRLRSDASNLKDKGITAVWIPPAWKGASQNDVGYGAYDLYDLGEFNQKGTVRTKYGTRNQLQAAVTALKSNGIQVYGDVVMNHKGGADATEWVRAVEVNPSNRNQEVSGDYTIEAWTKFDFPGRGNTHSNFKWRWYHFDGVDWDQSRQLQNRIYKFRGKGWDWEVDTENGNYDYLMYADIDMDHPEVVNELRNWGVWYTNTLGLDGFRIDAVKHIKYSFTRDWLTHVRNTTGKNMFAVAEFWKNDIGAIENYLSKTNWNHSVFDVPLHYNLYNASRSGGNYDMRQIFNGTVVQRHPTHAVTFVDNHDSQPEEALESFVEEWFKPLAYALTLTRDQGAPSVFYGDYYGIPTHGVPAMKSKIDPILEARQKYAYGTQRDYLDHPDVIGWTREGDGVHADSGLATLMSDGPGGSKWMEVGKNNAGEVWYDITGNQTNTVTINKDGWGQFHVSGGSVSIYVQQ

SEQ ID NO: 25860 - protein, 483 aa, Bacillus licheniformis
HHNGTNGTMMQYFEWYLPNDGNHWNRLRSDSSNLKDKGITAVWIPPAWKGASQNDVGYGAYDLYDLGEFNQKGTVRTKYGTRNQLQAAVTALKSNGIQVYGDVVMNHKGGADATEWVRAVEVNPSNRNQEVSGDYTIEAWTKFDFPGRGNTHSNFKWRWYHFDGVDWDQSRQLQNRIYKFRGKGWDWEVDTENGNYDYLMYADIDMDHPEVVNELRNWGVWYTNTLGLDGFRIDAVKHIKYSFTRDWLTHVRNTTGKNMFAVAEFWKNDIGAIENYLSKTNWNHSVFDVPLHYNLYNASRSGGNYDMRQIFNGTVVQRHPTHAVTFVDNHDSQPEEALESFVEEWFKPLAYALTLTRDQGYPSVFYGDYYGIPTHGVPAMKSKIDPILEARQKYAYGTQRDYLDHPDVIGWTREGDGVHADSGLATLMSDGPGGSKWMEVGKNNAGEVWYDITGNQTNTVTINKDGWGQFHVSGGSVSIYVQQ

SEQ ID NO: 25861 - protein, 483 aa, Bacillus licheniformis
HHNGTNGTMMQYFEWYLPNDGQHWNRLRSDASNLKDKGITAVWIPPAWKGASQNDVGYGAYDLYDLGEFNQKGTVRTKYGTRNQLQAAVTALKSNGIQVYGDVVMNHKGGADATEWVRAVEVNPSNRNQEVSGDYTIEAWTKFDFPGRGNTHSNFKWRWYHFDGVDWDQSRQLQNRIYKFRGKGWDWEVDTENGNYDYLMYADIDMDHPEVVNELRNWGVWYTNTLGLDGFRIDAVKHIKYSFTRDWLTHVRNTTGKNMFAVAEFWKNDIGAIENYLSKTNWNHSVFDVPLHYNLYNASRSGGNYDMRQIFNGTVVQRHPTHAVTFVDNHDSQPEEALESFVEEWFKPLAYALTLTRDQGYPSVFYGDYYGIPTHGVPAMKSKIDPILEARQKYAYGTQRDYLDHPDVIGWTREGDGVHADSGLATLMSDGPGGSKWMEVGKNNAGEVWYDITGNQTNTVTINKDGWGQFHVSGGSVSIYVQQ

SEQ ID NO: 25862 - protein, 483 aa, Bacillus licheniformis
HHNGTNGTMMQYFEWYLPNDGNHWNRLRSDASNLKDKGITAVWIPPAWKGASQNDVGYGAYDLYDLGEFNQKGTVRTKYGTRNQLQAAVTALKSNGIQVYGDVVMNHKGGADATEWVRAVEVNPSNRNQEVSGDYTIEAWTKFDFPGRGNTHSNFKWRWEHFDGVDWDQSRQLQNRIYKFRGKGWDWEVDTENGNYDYLMYADIDMDHPEVVNELRNWGVWYTNTLGLDGFRIDAVKHIKYSFTRDWLTHVRNTTGKNMFAVAEFWKNDIGAIENYLSKTNWNHSVFDVPLHYNLYNASRSGGNYDMRQIFNGTVVQRHPTHAVTFVDNHDSQPEEALESFVEEWFKPLAYALTLTRDQGYPSVFYGDYYGIPTHGVPAMKSKIDPILEARQKYAYGTQRDYLDHPDVIGWTREGDGVHADSGLATLMSDGPGGSKWMEVGKNNAGEVWYDITGNQTNTVTINKDGWGQFHVSGGSVSIYVQQ

SEQ ID NO: 25863 - protein, 483 aa, Bacillus licheniformis
HHNGTNGTMMQYFEWYLPNDGNHWNRLRSDASNLKDKGITAVWIPPAWKGASQNDVGYGAYDLYDLGEFNQKGTVRTKYGTRNQLQAAVTALKSNGIQVYGDVVMNHKGGADATVWVRAVEVNPSNRNQEVSGDYTIEAWTKFDFPGRGNTHSNFKWRWYHFDGVDWDQSRQLQNRIYKFRGKGWDWEVDTENGNYDYLMYADIDMDHPEVVNELRNWGVWYTNTLGLDGFRIDAVKHIKYSFTRDWLTHVRNTTGKNMFAVAEFWKNDIGAIENYLSKTNWNHSVFDVPLHYNLYNASRSGGNYDMRQIFNGTVVQRHPTHAVTFVDNHDSQPEEALESFVEEWFKPLAYALTLTRDQGYPSVFYGDYYGIPTHGVPAMKSKIDPILEARQKYAYGTQRDYLDHPDVIGWTREGDGVHADSGLATLMSDGPGGSKWMEVGKNNAGEVWYDITGNQTNTVTINKDGWGQFHVSGGSVSIYVQQ

SEQ ID NO: 25864 - protein, 483 aa, Bacillus licheniformis
HHNGTNGTMMQYFEWYLPNDGNHWNRLRSDASNLKDKGITAVWIPPAWKGASQNDVGYGAYDLYDLGEFNQKGTVRTKYGTRNQLQAAVTALKSNGIQVYGDVVMNHKGGADATEWVRAVEVNPSNRNQEVSGDYTIEAWTKFDFPGRGNTHSNFKWRWYHFDGVDWDQSRQLQNRIYKFRGKGWDWEVDTENGNYDYLMYADIDMDHPEVVNELRNWGVWYTNTLGLDGFRIDAVKHIKYSFTRDWLTHVRNTTGKNMDAVAEFWKNDIGAIENYLSKTNWNHSVFDVPLHYNLYNASRSGGNYDMRQIFNGTVVQRHPTHAVTFVDNHDSQPEEALESFVEEWFKPLAYALTLTRDQGYPSVFYGDYYGIPTHGVPAMKSKIDPILEARQKYAYGTQRDYLDHPDVIGWTREGDGVHADSGLATLMSDGPGGSKWMEVGKNNAGEVWYDITGNQTNTVTINKDGWGQFHVSGGSVSIYVQQ

SEQ ID NO: 25865 - protein, 483 aa, Bacillus licheniformis
HHNGTNGTMMQYFEWYLPNDGNHWNRLRSDASNLKDKGITAVWIPPAWKGASQNDVGYGAYDLYDLGEFNQKGTVRTKYGTRNQLQAAVTALKSNGIQVYGDVVMNHKGGADATEWVRAVEVNPSNRNQEVSGDYTIEAWTKFDFPGRGNTHSNFKWRWYHFDGVDWDQSRQLQNRIYKFRGKGWDWEVDTENGNYDYLMYADIDMDHPEVVNELRNWGVWYTNTLGLDGFRIDAVKHIKYSFTRDWLTHVRNTTGKNMFAVAEFWKNDIGAIENYLSKTNWNHSVFDVPLHYNLYNASRSGGGYDMRQIFNGTVVQRHPTHAVTFVDNHDSQPEEALESFVEEWFKPLAYALTLTRDQGYPSVFYGDYYGIPTHGVPAMKSKIDPILEARQKYAYGTQRDYLDHPDVIGWTREGDGVHADSGLATLMSDGPGGSKWMEVGKNNAGEVWYDITGNQTNTVTINKDGWGQFHVSGGSVSIYVQQ

SEQ ID NO: 25866 - protein, 483 aa, Bacillus licheniformis
HHNGTNGTMMQYFEWYLPNDGNHWNRLRSDASNLKDKGITAVWIPPAWKGASQNDVGYGAYDLYDLGEFNQKGTVRTKYGTRNQLQAAVTALKSNGIQVYGDVVMNHKGGADATEWVRAVEVNPSNRNQEVSGDYTIEAWTKFDFPGRGNTHSNFKWRWYHFDGVDWDQSRQLQNRIYKFRGKGWDWEVDTENGNYDYLMYADIDMDHPEVVNELRNWGVWYTTTLGLDGFRIDAVKHIKYSFTRDWLTHVRNTTGKNMFAVAEFWKNDIGAIENYLSKTNWNHSVFDVPLHYNLYNASRSGGNYDMRQIFNGTVVQRHPTHAVTFVDNHDSQPEEALESFVEEWFKPLAYALTLTRDQGYPSVFYGDYYGIPTHGVPAMKSKIDPILEARQKYAYGTQRDYLDHPDVIGWTREGDGVHADSGLATLMSDGPGGSKWMEVGKNNAGEVWYDITGNQTNTVTINKDGWGQFHVSGGSVSIYVQQ

SEQ ID NO: 25867 - protein, 483 aa, Bacillus licheniformis
HHNGTNGTMMQYFEWYLPNDGNHWNRLRSDASNLKDKGITAVWIPPAWKGASQNDVGYGAYDLYDLGEFNQKGTVRTKYGTRNQLQAAVTALKSNGIQVYGDVVMNHKGGADATEWVRAVEVNPSNRNQEVSGDYTIEAWTKFDFPGRGNTHSNFKWRWYHFDGVDWDQSRQLQNRIYKFRGKGWDWEVDTENGNYDYLMYADIDMDHPEVVNELRNWGVWYTNTLGLDGFRIDAVKHIKYSFTRDWLTHVRNTTGKNMFAVAEFWKNDIGAIENYLSKTNWNHSVFDVPLHYNLYNASRSGGQYDMRQIFNGTVVQRHPTHAVTFVDNHDSQPEEALESFVEEWFKPLAYALTLTRDQGYPSVFYGDYYGIPTHGVPAMKSKIDPILEARQKYAYGTQRDYLDHPDVIGWTREGDGVHADSGLATLMSDGPGGSKWMEVGKNNAGEVWYDITGNQTNTVTINKDGWGQFHVSGGSVSIYVQQ

SEQ ID NO: 25868 - protein, 483 aa, Bacillus licheniformis
HHNGTNGTMMQYFEWYLPNDGNHWNRLRSDASNLKDKGITAVWIPPAWKGASQNDVGYGAYDLYDLGEFNQKGTVRTKYGTRNQLQAAVTALKSNGIQVYGDVVMNHKGGADATEWVRAVEVNPSNRNQEVSGDYTIEAWTKFDFPGRGNTHSNFKWRWYHFDGVDWDQSRQLQNRIYKFRGKGWDWEVDTENGNYDYLMYADIDMDHPEVVNELRNWGVWYTNTLGLDGFRIDAVKHIKYSFTRDWLTHVRNTTGKNMFAVAEFWKNDIGAIENYLSKTNWNHEVFDVPLHYNLYNASRSGGNYDMRQIFNGTVVQRHPTHAVTFVDNHDSQPEEALESFVEEWFKPLAYALTLTRDQGYPSVFYGDYYGIPTHGVPAMKSKIDPILEARQKYAYGTQRDYLDHPDVIGWTREGDGVHADSGLATLMSDGPGGSKWMEVGKNNAGEVWYDITGNQTNTVTINKDGWGQFHVSGGSVSIYVQQ

SEQ ID NO: 25869 - protein, 483 aa, Bacillus licheniformis
HHNGTNGTMMQYFEWYLPNDGNHWNRLRSDASNLKDKGITAVWIPPAWKGASQNDVGYGAYDLYDLGEFNQKGTVRTKYGTRNQLQAAVTALKSNGIQVYGDVVMNHKGGADATEWVRAVEVNPSNRNQEVSGDYTIEAWTKFRFPGRGNTHSNFKWRWYHFDGVDWDQSRQLQNRIYKFRGKGWDWEVDTENGNYDYLMYADIDMDHPEVVNELRNWGVWYTNTLGLDGFRIDAVKHIKYSFTRDWLTHVRNTTGKNMFAVAEFWKNDIGAIENYLSKTNWNHSVFDVPLHYNLYNASRSGGNYDMRQIFNGTVVQRHPTHAVTFVDNHDSQPEEALESFVEEWFKPLAYALTLTRDQGYPSVFYGDYYGIPTHGVPAMKSKIDPILEARQKYAYGTQRDYLDHPDVIGWTREGDGVHADSGLATLMSDGPGGSKWMEVGKNNAGEVWYDITGNQTNTVTINKDGWGQFHVSGGSVSIYVQQ

SEQ ID NO: 25870 - protein, 483 aa, Bacillus licheniformis
HHNGTNGTMMQYFEWYLPNDGNHWNRLRSDASNLKDKGITAVWIPPAWKGASQNDVGYGAYDLYDLGEFNQKGTVRTKYGTRNQLQAAVTALKSNGIQVYGDVVMNHKGGADATEWVRAVEVNPSNRNQEVSGDYTIEAWTKFDFPGRGNTHSNFKWRWYHFDGVDWDQSRQLQNRIYKFRGKGWDWEVDTENGNYDYLMYADIDMDHPEVVNELRNWGVWYTNTLGLDGFRIDAVKHIKYSFTRDWLTHVRNTTGKNMFAVAEFWKNDIGAIENYLSKTNWNHSVFDVPLHYNLYNASRSGGNYSMRQIFNGTVVQRHPTHAVTFVDNHDSQPEEALESFVEEWFKPLAYALTLTRDQGYPSVFYGDYYGIPTHGVPAMKSKIDPILEARQKYAYGTQRDYLDHPDVIGWTREGDGVHADSGLATLMSDGPGGSKWMEVGKNNAGEVWYDITGNQTNTVTINKDGWGQFHVSGGSVSIYVQQ

SEQ ID NO: 25871 - protein, 483 aa, Bacillus licheniformis
HHNGTNGTMMQYFEWYLPNDGNHWGRLRSDASNLKDKGITAVWIPPAWKGASQNDVGYGAYDLYDLGEFNQKGTVRTKYGTRNQLQAAVTALKSNGIQVYGDVVMNHKGGADATEWVRAVEVNPSNRNQEVSGDYTIEAWTKFDFPGRGNTHSNFKWRWYHFDGVDWDQSRQLQNRIYKFRGKGWDWEVDTENGNYDYLMYADIDMDHPEVVNELRNWGVWYTNTLGLDGFRIDAVKHIKYSFTRDWLTHVRNTTGKNMFAVAEFWKNDIGAIENYLSKTNWNHSVFDVPLHYNLYNASRSGGNYDMRQIFNGTVVQRHPTHAVTFVDNHDSQPEEALESFVEEWFKPLAYALTLTRDQGYPSVFYGDYYGIPTHGVPAMKSKIDPILEARQKYAYGTQRDYLDHPDVIGWTREGDGVHADSGLATLMSDGPGGSKWMEVGKNNAGEVWYDITGNQTNTVTINKDGWGQFHVSGGSVSIYVQQ

SEQ ID NO: 25872 - protein, 483 aa, Bacillus licheniformis
HHNGTNGTMMQYFEWYLPNDGNHWNRLRSDASNLKDKGITAVWIPPAWKGASQNDVGYGAYDLYDLGEFNQKGTVRTKYGTRNQLQAAVTALKSNGIQVYGDVVMNHKGGADATEWVRAVEVNPSNRNQEVSGDYTIEAWTKFDFPGRGNTHSNFKWRWYHFDGVDWDQSRQLQNRIYKFRGKGWDWEVDTENGNYDYLMYADIDMDHPEVVNELRNWGVWYTNTLGLDGFRIDAVKHIKYSFTRDWLTHVRNTTGKNMFAVAEFWKNDIGAIENYLSKTNWNHSVFDVPLHYNLYNASRSGGNYDMRQIFNGTVVQRHPTHAVTFVDNHDSQPEEALESFVEEWFKPLAYALTLTRDQGYPSVFYGDYYGIPTHGVPAMKSKIDPILEARQKYAYGTQRDYLDHPDVIGWTREGDGVHADSGLATLMSDGPGGSKWMEVGKNNAGEVWYDITGNQTNKVTINKDGWGQFHVSGGSVSIYVQQ

SEQ ID NO: 25873 - protein, 483 aa, Bacillus licheniformis
HHNGTNGTMMQYFEWYLPNDGNHWNRLRSDASNLKDKGITAVWIPPAWKGASQNDVGYGAYDLYDLGEFNQKGTVRTKYGTRNQLQAAVTALKSNGIQVYGDVVMNHKGGADATEWVRAVEVNPSNRNQEVSGDYTIEAWTKFDFPGRGNTHSNFKWRWYHFDGVDWDQSRQLQNRIYKFRGKGWDWEVDTENGNYDYLMYADIDMDHPEVVNELRNWGVWYTNTLGLDGFRIDAVKHIKYSFTRDWLTHVRNTTGKNMFAVAEFWKNDIGAIENYLSKTNWNHSVFDVPLHYNLYNASRSGGNYDMRQIFNGTVVQRAPTHAVTFVDNHDSQPEEALESFVEEWFKPLAYALTLTRDQGYPSVFYGDYYGIPTHGVPAMKSKIDPILEARQKYAYGTQRDYLDHPDVIGWTREGDGVHADSGLATLMSDGPGGSKWMEVGKNNAGEVWYDITGNQTNTVTINKDGWGQFHVSGGSVSIYVQQ

SEQ ID NO: 25874 - protein, 483 aa, Bacillus licheniformis
HHNGTLGTMMQYFEWYLPNDGNHWNRLRSDASNLKDKGITAVWIPPAWKGASQNDVGYGAYDLYDLGEFNQKGTVRTKYGTRNQLQAAVTALKSNGIQVYGDVVMNHKGGADATEWVRAVEVNPSNRNQEVSGDYTIEAWTKFDFPGRGNTHSNFKWRWYHFDGVDWDQSRQLQNRIYKFRGKGWDWEVDTENGNYDYLMYADIDMDHPEVVNELRNWGVWYTNTLGLDGFRIDAVKHIKYSFTRDWLTHVRNTTGKNMFAVAEFWKNDIGAIENYLSKTNWNHSVFDVPLHYNLYNASRSGGNYDMRQIFNGTVVQRHPTHAVTFVDNHDSQPEEALESFVEEWFKPLAYALTLTRDQGYPSVFYGDYYGIPTHGVPAMKSKIDPILEARQKYAYGTQRDYLDHPDVIGWTREGDGVHADSGLATLMSDGPGGSKWMEVGKNNAGEVWYDITGNQTNTVTINKDGWGQFHVSGGSVSIYVQQ

SEQ ID NO: 25875 - protein, 483 aa, Bacillus licheniformis
HHNGTNGTMMQYFEWYLPNDGNHWNRLRSDAMNLKDKGITAVWIPPAWKGASQNDVGYGAYDLYDLGEFNQKGTVRTKYGTRNQLQAAVTALKSNGIQVYGDVVMNHKGGADATEWVRAVEVNPSNRNQEVSGDYTIEAWTKFDFPGRGNTHSNFKWRWYHFDGVDWDQSRQLQNRIYKFRGKGWDWEVDTENGNYDYLMYADIDMDHPEVVNELRNWGVWYTNTLGLDGFRIDAVKHIKYSFTRDWLTHVRNTTGKNMFAVAEFWKNDIGAIENYLSKTNWNHSVFDVPLHYNLYNASRSGGNYDMRQIFNGTVVQRHPTHAVTFVDNHDSQPEEALESFVEEWFKPLAYALTLTRDQGYPSVFYGDYYGIPTHGVPAMKSKIDPILEARQKYAYGTQRDYLDHPDVIGWTREGDGVHADSGLATLMSDGPGGSKWMEVGKNNAGEVWYDITGNQTNTVTINKDGWGQFHVSGGSVSIYVQQ

SEQ ID NO: 25876 - protein, 483 aa, Bacillus licheniformis
HHNGTNGTMMQYFEWYLPNDGNHWNRLRSDASNLKDKGITAVWIPPAWKGASQNDVGYGAYDLYDLGEFNQKGTVRTKYGTRNQLQAAVTALKSNGIQVYGDVVMNHKGGADATEWVRAVEVNPSNRNQEVSGDYTIEAWTKFDFPGRGNTHSNFKWRWYHFDGVDWDQSRQLQNRIYKFRGKGWDWEVDTENGNYDYLMYADIDMDHPEVVNELRNWGVWYTNTLGLDGFRIDAVKHIKYSFTRDWLTHVRNTTGKNMFAVAEFWKNDIGAIETYLSKTNWNHSVFDVPLHYNLYNASRSGGNYDMRQIFNGTVVQRHPTHAVTFVDNHDSQPEEALESFVEEWFKPLAYALTLTRDQGYPSVFYGDYYGIPTHGVPAMKSKIDPILEARQKYAYGTQRDYLDHPDVIGWTREGDGVHADSGLATLMSDGPGGSKWMEVGKNNAGEVWYDITGNQTNTVTINKDGWGQFHVSGGSVSIYVQQ

SEQ ID NO: 25877 - protein, 483 aa, Bacillus licheniformis
HHNGTNGTMMQYFEWYLPNDGNHWNRLRSDASNLKDKGITAVWIPPAWKGASQNDVGYGAYDLYDLGEFNQKGTVRTKYGTRNQLQDAVTALKSNGIQVYGDVVMNHKGGADATEWVRAVEVNPSNRNQEVSGDYTIEAWTKFDFPGRGNTHSNFKWRWYHFDGVDWDQSRQLQNRIYKFRGKEWDWEVDTENGNYDYLMYADIDMDHPEVVNELRNWGVWYTDTLGLDGFRIDAVKHIKYSFTRDWLTHVRNTTGKNMFAVAEFWKNDIGAIENYLSKTNWNHSVFDVPLHYNLYNASRSGGNYDMRQIFNGTVVQRHPTHAVTFVDNHDSQPEEALESFVEEWFKPLAYALTLTRDQGYPSVFYGDYYGIPTHGVPAMKSKIDPILEARQKYAYGTQRDYLDHPDVIGWTREGDGEHADSGLATLMSDGPGGSKWMEVGKNNAGEVWYDITGNQTNTVTINKDGWGQFHVSGGSVSIYVQQ

SEQ ID NO: 25878 - protein, 483 aa, Bacillus licheniformis
HHNGTNGTMMQYFEWYLPNDGNHWNRLRSDASNLKDKGITAVWIPPAWKGASQNDVGYGAYDLYDLGEFNQKGTVRTKYGTRNQLQAAVTALKSNGIQVYGDVVMNHKGGADATEWVRAVEVNPSNRNQEVSGDYTIEAWTKFDFPGRGNTHSNFKWRWYHFDGVDWDQSRQLQNRIYKFRGKGWDWEVDTENGNYDYLMYADIDMDHPEVVNELRNWGVWYHNTLGLDGFRIDAVKHIKYSFTRDWLTHVRNTTGKNMFAVAEFWKNDIGAIENYLSKTNWNHSVFDVPLHYNLYNASRSGGNYDMRQIFNGTVVQRHPTHAVTFVDNHDSQPEEALESFVEEWFKPLAYALTLTRDQGYPSVFYGDYYGIPTHGVPAMKSKIDPILEARQKYAYGTQRDYLDHPDVIGWTREGDGVHADSGLATLMSDGPGGSKWMEVGKNNAGEVWYDITGNQTNTVTINKDGWGQFHVSGGSVSIYVQQ

SEQ ID NO: 25879 - protein, 483 aa, Bacillus licheniformis
HHNGTNGTMMQYFEWYLPNDGNHWNRLRSDASNLKDKGITAVWIPPAWKGASQNDVGYGAYDLYDLGEFNQKGTVRTKYGTRNQLQAAVTALKSNGIQVYGDVVMNHKGGADATEWVRAVEVNPSNRNQEVSGDYTIEAWTKFDFPGRGNTHSNFKWRWYHFDGVDWDQSRQLQNRIYKFRGKGWDWEVDTENGNYDYLMYADIDMDHPEVVNELRNWGVWYTNTLGLDGFRIDAVKHIKYSFTRDWLTHVRNTTGKNMFAVAEFWKNDIGAIENYLSKTNWNHSVFDVPLHYNLYNASRSGGNYDMRQIFNGTVVQRHPTHAVTFVDNHDSQPEEALVSFVEEWFKPLAYALTLTRDQGYPSVFYGDYYGIPTHGVPAMKSKIDPILEARQKYAYGTQRDYLDHPDVIGWTREGDGVHADSGLATLMSDGPGGSKWMEVGKNNAGEVWYDITGNQTNTVTINKDGWGQFHVSGGSVSIYVQQ

SEQ ID NO: 25880 - protein, 483 aa, Bacillus licheniformis
HHNGTNGTMMQYFEWYLPNDGNHWNRLGSDASNLKDKGITAVWIPPAWKGASQNDVGYGAYDLYDLGEFNQKGTVRTKYGTRNQLQAAVTALKSNGIQVYGDVVMNHKGGADATEWVRAVEVNPSNRNQEVSGDYTIEAWTKFDFPGRGNTHSNFKWRWYHFDGVDWDQSRQLQNRIYKFRGKGWDWEVDTENGNYDYLMYADIDMDHPEVVNELRNWGVWYTNTLGLDGFRIDAVKHIKYSFTRDWLTHVRNTTGKNMFAVAEFWKNDIGAIENYLSKTNWNHSVFDVPLHYNLYNASRSGGNYDMRQIFNGTVVQRHPTHAVTFVDNHDSQPEEALESFVEEWFKPLAYALTLTRDQGYPSVFYGDYYGIPTHGVPAMKSKIDPILEARQKYAYGTQRDYLDHPDVIGWTREGDGVHADSGLATLMSDGPGGSKWMEVGKNNAGEVWYDITGNQTNTVTINKDGWGQFHVSGGSVSIYVQQ

SEQ ID NO: 25881 - protein, 483 aa, Bacillus licheniformis
HHNGTNGTMMQYFEWYLPNDGNHWNRLRSDASNLKDKGITAVWIPPAWKGASQNDVGYGAYDLYDLGEFNQKGTVRTKYGTRNQLQAAVTALKSVGIQVYGDVVMNHKGGADATEWVRAVEVNPSNRNQEVSGDYTIEAWTKFDFPGRGNTHSNFKWRWYHFDGVDWDQSRQLQNRIYKFRGKGWDWEVDTENGNYDYLMYADIDMDHPEVVNELRNWGVWYTNTLGLDGFRIDAVKHIKYSFTRDWLTHVRNTTGKNMFAVAEFWKNDIGAIENYLSKTNWNHSVFDVPLHYNLYNASRSGGNYDMRQIFNGTVVQRHPTHAVTFVDNHDSQPEEALESFVEEWFKPLAYALTLTRDQGYPSVFYGDYYGIPTHGVPAMKSKIDPILEARQKYAYGTQRDYLDHPDVIGWTREGDGVHADSGLATLMSDGPGGSKWMEVGKNNAGEVWYDITGNQTNTVTINKDGWGQFHVSGGSVSIYVQQ

SEQ ID NO: 25882 - protein, 483 aa, Bacillus licheniformis
HHNGTNGTMMQYFEWYLPNDGNHWNRLRSDASNLKDKGITAVWIPPAWKGASQNDVGYGAYDLYDLGEFNQKGTVRTKYGTRNQLQAAVTALKSNGIQVYGDVVMNHKGGADATEWVRAVEVNPSNRNQEVSGDYTIEAWTKFDFPGRGNTHSNFKWRWYHFDGVDWDQSRQLQNRIYKFRGKGWDWEVDTENGNYDYLMYADIDMDHPEVVNELRNWGVWYTNTLGLDGFRIDAVKHIKYSFTRDWLTHVRNTTGKNMFAVAEFWKNDIGAIENYLSKTNWNHSVFDVPLHYNLYNASRSGGNYDMRQIFNGTVVQRHPTHAVTFVDNHDSQPEEALESFVEEWFKPLAYALTLTRDQGYVSVFYGDYYGIPTHGVPAMKSKIDPILEARQKYAYGTQRDYLDHPDVIGWTREGDGVHADSGLATLMSDGPGGSKWMEVGKNNAGEVWYDITGNQTNTVTINKDGWGQFHVSGGSVSIYVQQ

SEQ ID NO: 25883 - protein, 483 aa, Bacillus licheniformis
HHNGTNGTMMQYFEWYLPNDGNHWNRLRSDASNLKDKGITAVWIPPAWKGASQNDVGYGAYDLYDLGEFNQKGTVRTKYGTRNQLQAAVTALKSNGIQVYGDVVMNHKGGADATEWVRAVEVNPSNRNQEVSGDYTIEAWTKFDFPGRGNTHSNFKWRWYHFDGVDWDQSRQLQARIYKFRGKGWDWEVDTENGNYDYLMYADIDMDHPEVVNELRNWGVWYTNTLGLDGFRIDAVKHIKYSFTRDWLTHVRNTTGKNMFAVAEFWKNDIGAIENYLSKTNWNHSVFDVPLHYNLYNASRSGGNYDMRQIFNGTVVQRHPTHAVTFVDNHDSQPEEALESFVEEWFKPLAYALTLTRDQGYPSVFYGDYYGIPTHGVPAMKSKIDPILEARQKYAYGTQRDYLDHPDVIGWTREGDGVHADSGLATLMSDGPGGSKWMEVGKNNAGEVWYDITGNQTNTVTINKDGWGQFHVSGGSVSIYVQQ

SEQ ID NO: 25884 - protein, 483 aa, Bacillus licheniformis
HHNGTNGTMMQYFEWYLPNDGNHWNRLRSDASNLKDKGITAVWIPPAWKGASQNDVGYGAYDLYDLGEFNQKGTVRTKYGTRNQLQAAVTALKSNGIQVYGDVVMNHKGGADATEWVRAVEVNPSNRNQEVSGDYTIEAWTKFDFPGRGNTHSNFKWRWYHFDGVDWDQSRQLQNRIYKFRGKGWDWEVDTENGNYDYLMYADIDMDHPEVVNELRNWGVWYTNTLGLDGFRIDAVKHIKYSFTRDWLTHVRNTTGKNMFAVAEFWKNDIGAIENYLSKTNWNHSVFDVPLHYNLYNASRSGGNYDMRQIFNGTVVQRHPTHAVTFVDNHDSQPEEALESFVEEWFKPLAYALTLTRDQGWPSVFYGDYYGIPTHGVPAMKSKIDPILEARQKYAYGTQRDYLDHPDVIGWTREGDGVHADSGLATLMSDGPGGSKWMEVGKNNAGEVWYDITGNQTNTVTINKDGWGQFHVSGGSVSIYVQQ

SEQ ID NO: 25885 - protein, 483 aa, Bacillus licheniformis
HHNGTNGTMMQYFEWYLPNDGNHWNRLRSDASNLKDKGITAVWIPPAWKGASQNDVGYGAYDLYDLGEFNQKGTVRTKYGTRNQLQAAVTALKSNGIQVYGDVVMNHKGGADATEWVRAVEVNPSNRNQEVSGDYTIEAWTKFDFPGRGNTHSNFKWRWYHFDGVDWDQSRQLQGRIYKFRGKGWDWEVDTENGNYDYLMYADIDMDHPEVVNELRNWGVWYTNTLGLDGFRIDAVKHIKYSFTRDWLTHVRNTTGKNMFAVAEFWKNDIGAIENYLSKTNWNHSVFDVPLHYNLYNASRSGGNYDMRQIFNGTVVQRHPTHAVTFVDNHDSQPEEALESFVEEWFKPLAYALTLTRDQGYPSVFYGDYYGIPTHGVPAMKSKIDPILEARQKYAYGTQRDYLDHPDVIGWTREGDGVHADSGLATLMSDGPGGSKWMEVGKNNAGEVWYDITGNQTNTVTINKDGWGQFHVSGGSVSIYVQQ

SEQ ID NO: 25886 - protein, 483 aa, Bacillus licheniformis
HHNGTNGTMMQYFEWYLPNDGNHWNRLRSDASNLKDKGITAVWIPPAWKGASQNDVGYGAYDLYDLGEFNQKGTVRTKYGTRNQLQAAVTALKSNGIQVYGDVVMNHKGGADATEWVRAVEVNPSNRNQEVSGDYTIEAWTKFDFPGRGNTHSNFKWRWYHFDGVDWDQSRQLSNRIYKFRGKGWDWEVDTENGNYDYLMYADIDMDHPEVVNELRNWGVWYTNTLGLDGFRIDAVKHIKYSFTRDWLTHVRNTTGKNMFAVAEFWKNDIGAIENYLSKTNWNHSVFDVPLHYNLYNASRSGGNYDMRQIFNGTVVQRHPTHAVTFVDNHDSQPEEALESFVEEWFKPLAYALTLTRDQGYPSVFYGDYYGIPTHGVPAMKSKIDPILEARQKYAYGTQRDYLDHPDVIGWTREGDGVHADSGLATLMSDGPGGSKWMEVGKNNAGEVWYDITGNQTNTVTINKDGWGQFHVSGGSVSIYVQQ

SEQ ID NO: 25887 - protein, 483 aa, Bacillus licheniformis
HHNGTNGTMMQYFEWYLPNDGNHWNRLRSDASNLKDKGITAVWIPPAWKGASQNDVGYGAYDLYDLGEFNQKGTVRTKYGTRNQLQAAVTALKSNGIQVYGDVVMNHKGGADATEWVRAVEVNPSNRNQEVSGDYTIEAWTKFDFPGRGNTHSNFKWRWYHFDGVDWDQSRQLQNRIYKFRGKGWDWEVDTENGNYDYLMYADIDMDHPEVVNELRNWGVWYTNTLGLDGFRIDAVKHIKYSFTRDWLTHVRNTTGKNRFAVAEFWKNDIGAIENYLSKTNWNHSVFDVPLHYNLYNASRSGGNYDMRQIFNGTVVQRHPTHAVTFVDNHDSQPEEALESFVEEWFKPLAYALTLTRDQGYPSVFYGDYYGIPTHGVPAMKSKIDPILEARQKYAYGTQRDYLDHPDVIGWTREGDGVHADSGLATLMSDGPGGSKWMEVGKNNAGEVWYDITGNQTNTVTINKDGWGQFHVSGGSVSIYVQQ

SEQ ID NO: 25888 - protein, 483 aa, Bacillus licheniformis
HHNGTNGTMMQYFEWYLPNDGNHGNRLRSDASNLKDKGITAVWIPPAWKGASQNDVGYGAYDLYDLGEFNQKGTVRTKYGTRNQLQAAVTALKSNGIQVYGDVVMNHKGGADATEWVRAVEVNPSNRNQEVSGDYTIEAWTKFDFPGRGNTHSNFKWRWYHFDGVDWDQSRQLQNRIYKFRGKGWDWEVDTENGNYDYLMYADIDMDHPEVVNELRNWGVWYTNTLGLDGFRIDAVKHIKYSFTRDWLTHVRNTTGKNMFAVAEFWKNDIGAIENYLSKTNWNHSVFDVPLHYNLYNASRSGGNYDMRQIFNGTVVQRHPTHAVTFVDNHDSQPEEALESFVEEWFKPLAYALTLTRDQGYPSVFYGDYYGIPTHGVPAMKSKIDPILEARQKYAYGTQRDYLDHPDVIGWTREGDGVHADSGLATLMSDGPGGSKWMEVGKNNAGEVWYDITGNQTNTVTINKDGWGQFHVSGGSVSIYVQQ

SEQ ID NO: 25889 - protein, 483 aa, Bacillus licheniformis
HHNGTNGTMMQYFEWYLPNDGNHWNRLRSDASNLKDKGITAVWIPPAWKGASQNDVGYGAYDLYDLGEFNQKGTVRTKYGTRNQLQAAVTALKSNGIQVYGDVVMNHKGGADATEWVRAVEVNPSNRNQEVSGDYTIEAWTKFDFPGRGNTHSNFKWRWYHFDGVDWDQSRQLQNRIYKFRGKGWDWEVDTENGNYDYLMYADIDMDHPEVVNELRNWGVWYTNTLGLDGFRIDAVKHIKYSFTRDWLTHVRNTTGKNMFAVAEFWKNDIGAIENYLSKTNWNHSVFDVPLHYNLYNASRSWGNYDMRQIFNGTVVQRHPTHAVTFVDNHDSQPEEALESFVEEWFKPLAYALTLTRDQGYPSVFYGDYYGIPTHGVPAMKSKIDPILEARQKYAYGTQRDYLDHPDVIGWTREGDGVHADSGLATLMSDGPGGSKWMEVGKNNAGEVWYDITGNQTNTVTINKDGWGQFHVSGGSVSIYVQQ

SEQ ID NO: 25890 - protein, 483 aa, Bacillus licheniformis
HHNGTNGTMMQYFEWYLPNDGNHWNRLRSDASNLKDKGITAVWIPPAWKGASQNDVGYGAYDLYDLGEFNQKGTVRTKYGTRNQLQAAVTALKSNGIQVYGDVVMNHKGGADATEWVRAVEVNPSNRNQEVSGDYTIEAWTKFDFPGRGNTHSNFKWRWYHFDGVDWDQSRQLQNRIYKFRGKGWDWEVDTENGNYDYLMYADIDMDHPEVVAELRNWGVWYTNTLGLDGFRIDAVKHIKYSFTRDWLTHVRNTTGKNMFAVAEFWKNDIGAIENYLSKTNWNHSVFDVPLHYNLYNASRSGGNYDMRQIFNGTVVQRHPTHAVTFVDNHDSQPEEALESFVEEWFKPLAYALTLTRDQGYPSVFYGDYYGIPTHGVPAMKSKIDPILEARQKYAYGTQRDYLDHPDVIGWTREGDGVHADSGLATLMSDGPGGSKWMEVGKNNAGEVWYDITGNQTNTVTINKDGWGQFHVSGGSVSIYVQQ

SEQ ID NO: 25891 - protein, 483 aa, Bacillus licheniformis
HHNGTNGTMMQYFEWYLPNDGNHWNRLRSDASNLKDKGITAVWIPPAWKGASQNDVGYGAYDLYDLGEFNQKGTVRTKYGTRNQLQAAVTALKSNGIQVYGDVVMNHKGGADATEWVRAVEVNPSNRNQEVSGDYTIEAWTKFDFPGRGNTHSNFKWRWYHFDGVDWDQSRQLQNRIYKFRGKGWDWEVDTENGNYDYLMYADIDMDHPEVVNELRNWGVWYTNTLGLDGFRIDAVKHIKYSFTRDWLTHVRNTTGKNMFAVAEFWKNDIGAIENYLSKTNWNHSVFDVPLHYNLYNASRSKGNYDMRQIFNGTVVQRHPTHAVTFVDNHDSQPEEALESFVEEWFKPLAYALTLTRDQGYPSVFYGDYYGIPTHGVPAMKSKIDPILEARQKYAYGTQRDYLDHPDVIGWTREGDGVHADSGLATLMSDGPGGSKWMEVGKNNAGEVWYDITGNQTNTVTINKDGWGQFHVSGGSVSIYVQQ

SEQ ID NO: 25892 - protein, 483 aa, Bacillus licheniformis
HHNGTNGTMMQYFEWYLPQDGNHWNRLRSDASNLKDKGITAVWIPPAWKGASQNDVGYGAYDLYDLGEFNQKGTVRTKYGTRNQLQAAVTALKSNGIQVYGDVVMNHKGGADATEWVRAVEVNPSNRNQEVSGDYTIEAWTKFDFPGRGNTHSNFKWRWYHFDGVDWDQSRQLQNRIYKFRGKGWDWEVDTENGNYDYLMYADIDMDHPEVVNELRNWGVWYTNTLGLDGFRIDAVKHIKYSFTRDWLTHVRNTTGKNMFAVAEFWKNDIGAIENYLSKTNWNHSVFDVPLHYNLYNASRSGGNYDMRQIFNGTVVQRHPTHAVTFVDNHDSQPEEALESFVEEWFKPLAYALTLTRDQGYPSVFYGDYYGIPTHGVPAMKSKIDPILEARQKYAYGTQRDYLDHPDVIGWTREGDGVHADSGLATLMSDGPGGSKWMEVGKNNAGEVWYDITGNQTNTVTINKDGWGQFHVSGGSVSIYVQQ

SEQ ID NO: 25893 - protein, 483 aa, Bacillus licheniformis
HHNGTNGTMMQYFEWYLPNDGNHWNRLRSDASNLKDKGITAVWIPPAWKGASQNDVGYGAYDLYDLGEFNQKGTVRTKYGTRNQLQAAVTALKSNGIQVYGDVVMNHKGGADATEWVRAVEVNPSNRNQEVSGDYTIEAWTKFDFPGRGNTHSNFKWRWYHFDGVDWDQSRQLQNRIYKFRGKGWDWEVDTENGNYDYLMYADIDMDHPEVVNELRNWGVWYTNTLGLDGFRIDAVKHIKYSFTRDWLTHVRNTTGKNMFAVAEFWKNDIGAIENYLSKTNWNHSVFDVPLHYNLYNASRSGGNYDMRQIFNGTVVQRHPTHAVTFVDNHDSQPEEALESFVEEWFKPLAYALTLTRDQGYPSVFYGDYMGIPTHGVPAMKSKIDPILEARQKYAYGTQRDYLDHPDVIGWTREGDGVHADSGLATLMSDGPGGSKWMEVGKNNAGEVWYDITGNQTNTVTINKDGWGQFHVSGGSVSIYVQQ

SEQ ID NO: 25894 - protein, 483 aa, Bacillus licheniformis
HHNGTNGTMMQYFEWYLPNDGNHWNRLRSDASNLKDKGITAVWIPPAWKGASQNDVGYGAYDLYDLGEFNQKGTVRTKYGTRNQLQAAVTALKSNGIQVYGDVVMNHKGGADATEWVRAVEVNPSNRNQEVSGMYTIEAWTKFDFPGRGNTHSNFKWRWYHFDGVDWDQSRQLQNRIYKFRGKGWDWEVDTENGNYDYLMYADIDMDHPEVVNELRNWGVWYTNTLGLDGFRIDAVKHIKYSFTRDWLTHVRNTTGKNMFAVAEFWKNDIGAIENYLSKTNWNHSVFDVPLHYNLYNASRSGGNYDMRQIFNGTVVQRHPTHAVTFVDNHDSQPEEALESFVEEWFKPLAYALTLTRDQGYPSVFYGDYYGIPTHGVPAMKSKIDPILEARQKYAYGTQRDYLDHPDVIGWTREGDGVHADSGLATLMSDGPGGSKWMEVGKNNAGEVWYDITGNQTNTVTINKDGWGQFHVSGGSVSIYVQQ

SEQ ID NO: 25895 - protein, 483 aa, Bacillus licheniformis
HHNGTNGTMMQYFEWYLPNDGNHWNRLRSDASNLKDKGITAVWIPPAWKGASQNDVGYGAYDLYDLGEFNQKGTVRTKYGTRNQLQAAVTALKSNGIQVYGDVVMNHKGGADATEWVRAVEVNPSNRNQEVSGDYTIEAWTKFDFPGRGNTHSNFKWRWYHFDGVDWDQSRKLQNRIYKFRGKGWDWEVDTENGNYDYLMYADIDMDHPEVVNELRNWGVWYTNTLGLDGFRIDAVKHIKYSFTRDWLTHVRNTTGKNMFAVAEFWKNDIGAIENYLSKTNWNHSVFDVPLHYNLYNASRSGGNYDMRQIFNGTVVQRHPTHAVTFVDNHDSQPEEALESFVEEWFKPLAYALTLTRDQGYPSVFYGDYYGIPTHGVPAMKSKIDPILEARQKYAYGTQRDYLDHPDVIGWTREGDGVHADSGLATLMSDGPGGSKWMEVGKNNAGEVWYDITGNQTNTVTINKDGWGQFHVSGGSVSIYVQQ

SEQ ID NO: 25896 - protein, 483 aa, Bacillus licheniformis
HHNGTNGTMMQYFEWYLPNDGNHWNRLRSDASNLKDKGITAVWIPPAWKGASQNDVGYGAYDLYDLGEFYQKGTVRTKYGTRNQLQAAVTALKSNGIQVYGDVVMNHKGGADATEWVRAVEVNPSNRNQEVSGDYTIEAWTKFDFPGRGNTHSNFKWRWYHFDGVDWDQSRQLQNRIYKFRGKGWDWEVDTENGNYDYLMYADIDMDHPEVVNELRNWGVWYTNTLGLDGFRIDAVKHIKYSFTRDWLTHVRNTTGKNMFAVAEFWKNDIGAIENYLSKTNWNHSVFDVPLHYNLYNASRSGGNYDMRQIFNGTVVQRHPTHAVTFVDNHDSQPEEALESFVEEWFKPLAYALTLTRDQGYPSVFYGDYYGIPTHGVPAMKSKIDPILEARQKYAYGTQRDYLDHPDVIGWTREGDGVHADSGLATLMSDGPGGSKWMEVGKNNAGEVWYDITGNQTNTVTINKDGWGQFHVSGGSVSIYVQQ

SEQ ID NO: 25897 - protein, 483 aa, Bacillus licheniformis
HHNGTNGTMMQYFEWYLPNDGNHWNRLRSDASNLKDKGITAVWIPPAWKGASQNDVGYGAYDLYDLGEFNQKGTVRTKYGTRNQLQAAVTALKSNGIQVYGDVVMNHKGGADATEWVRAVEVNPSNRNQEVSGDYTIEAWTKFDFKGRGNTHSNFKWRWYHFDGVDWDQSRQLQNRIYKFRGKGWDWEVDTENGNYDYLMYADIDMDHPEVVNELRNWGVWYTNTLGLDGFRIDAVKHIKYSFTRDWLTHVRNTTGKNMFAVAEFWKNDIGAIENYLSKTNWNHSVFDVPLHYNLYNASRSGGNYDMRQIFNGTVVQRHPTHAVTFVDNHDSQPEEALESFVEEWFKPLAYALTLTRDQGYPSVFYGDYYGIPTHGVPAMKSKIDPILEARQKYAYGTQRDYLDHPDVIGWTREGDGVHADSGLATLMSDGPGGSKWMEVGKNNAGEVWYDITGNQTNTVTINKDGWGQFHVSGGSVSIYVQQ

SEQ ID NO: 25898 - protein, 483 aa, Bacillus licheniformis
HHNGTNGTMMQYFEWYLPNDGNHWNRLRSDASNLKDKGITAVWIPPAWKGASQNDVGYGAYDLYDLGEFNQKGTVRTKYGTRNQLQAAVTALKSNGIQVYGDVVMNHKGGADATEWVRAVEVNPSNRNQEVSGDYTIEAWTKFDFPGRGNTHSNFKWRWDHFDGVDWDQSRQLQNRIYKFRGKGWDWEVDTENGNYDYLMYADIDMDHPEVVNELRNWGVWYTNTLGLDGFRIDAVKHIKYSFTRDWLTHVRNTTGKNMFAVAEFWKNDIGAIENYLSKTNWNHSVFDVPLHYNLYNASRSGGNYDMRQIFNGTVVQRHPTHAVTFVDNHDSQPEEALESFVEEWFKPLAYALTLTRDQGYPSVFYGDYYGIPTHGVPAMKSKIDPILEARQKYAYGTQRDYLDHPDVIGWTREGDGVHADSGLATLMSDGPGGSKWMEVGKNNAGEVWYDITGNQTNTVTINKDGWGQFHVSGGSVSIYVQQ

SEQ ID NO: 25899 - protein, 483 aa, Bacillus licheniformis
HHNGTNGTMMQYFEWYLPNDGNHWNRLRSDASNLKDKGITAVWIPPAWKGASQNDVGYGAYDLYDLGEFNQKGTVRTKYGTRNQLQAAVTALKSNGIQVYGDVVMNHKGGADATEWVRAVEVNPSNRNQEVSGDYTIEAWTKFDFPGRGNTHSNFKWRWYHFDGVDWDQSRQLQNRIYKFRGKGWDWEVDTENGNYDYLMYADIDMDHPEVVNHLRNWGVWYTNTLGLDGFRIDAVKHIKYSFTRDWLTHVRNTTGKNMFAVAEFWKNDIGAIENYLSKTNWNHSVFDVPLHYNLYNASRSGGNYDMRQIFNGTVVQRHPTHAVTFVDNHDSQPEEALESFVEEWFKPLAYALTLTRDQGYPSVFYGDYYGIPTHGVPAMKSKIDPILEARQKYAYGTQRDYLDHPDVIGWTREGDGVHADSGLATLMSDGPGGSKWMEVGKNNAGEVWYDITGNQTNTVTINKDGWGQFHVSGGSVSIYVQQ

SEQ ID NO: 25900 - protein, 483 aa, Bacillus licheniformis
HHNGTNGTMMQYFEWYLPNDGNHWNRLRSDASNLKDKGITAVWIPPAWKGASQNDVGYGAYDLYDLGEFNQKGTVRTKYGTRNQLQAAVTALKSNGIQVYGDVVMNHKGGADATEWVRSVEVNPSNRNQEVSGDYTIEAWTKFDFPGRGNTHSNFKWRWYHFDGVDWDQSRQLQNRIYKFRGKGWDWEVDTENGNYDYLMYADIDMDHPEVVNELRNWGVWYTNTLGLDGFRIDAVKHIKYSFTRDWLTHVRNTTGKNMFAVAEFWKNDIGAIENYLSKTNWNHSVFDVPLHYNLYNASRSGGNYDMRQIFNGTVVQRHPTHAVTFVDNHDSQPEEALESFVEEWFKPLAYALTLTRDQGYPSVFYGDYYGIPTHGVPAMKSKIDPILEARQKYAYGTQRDYLDHPDVIGWTREGDGVHADSGLATLMSDGPGGSKWMEVGKNNAGEVWYDITGNQTNTVTINKDGWGQFHVSGGSVSIYVQQ

SEQ ID NO: 25901 - protein, 483 aa, Bacillus licheniformis
HHNGTNGTMMQYFEWYLPNDGNHWNRLRSDASNLKDKGITAVWIPPAWKGASQNDVGYGAYDLYDLGEFNQKGTVRTKYGTRNQLQAAVTALKSNGIEVYGDVVMNHKGGADATEWVRAVEVNPSNRNQEVSGDYTIEAWTKFDFPGRGNTHSNFKWRWYHFDGVDWDQSRQLQNRIYKFRGKGWDWEVDTENGNYDYLMYADIDMDHPEVVNELRNWGVWYTNTLGLDGFRIDAVKHIKYSFTRDWLTHVRNTTGKNMFAVAEFWKNDIGAIENYLSKTNWNHSVFDVPLHYNLYNASRSGGNYDMRQIFNGTVVQRHPTHAVTFVDNHDSQPEEALESFVEEWFKPLAYALTLTRDQGYPSVFYGDYYGIPTHGVPAMKSKIDPILEARQKYAYGTQRDYLDHPDVIGWTREGDGVHADSGLATLMSDGPGGSKWMEVGKNNAGEVWYDITGNQTNTVTINKDGWGQFHVSGGSVSIYVQQ

SEQ ID NO: 25902 - protein, 483 aa, Bacillus licheniformis
HHNGTNGTMMQYFEWYLPNDGNHWNRLRSDASNLKDKGITAVWIPPAWKGASQNDVGYGAYDLYDLGEFNQKGTVRTKYGTRNQLQAAVTALKSNGIQVYGDVVMNHKGGADATEWVRAVEVNPSNRNQEVSGDYTIEAWTKFDFPGRGNTHSNFKWRWYHFDGVDWDQSRQLQNRIYKFRSKGWDWEVDTENGNYDYLMYADIDMDHPEVVNELRNWGVWYTNTLGLDGFRIDAVKHIKYSFTRDWLTHVRNTTGKNMFAVAEFWKNDIGAIENYLSKTNWNHSVFDVPLHYNLYNASRSGGNYDMRQIFNGTVVQRHPTHAVTFVDNHDSQPEEALESFVEEWFKPLAYALTLTRDQGYPSVFYGDYYGIPTHGVPAMKSKIDPILEARQKYAYGTQRDYLDHPDVIGWTREGDGVHADSGLATLMSDGPGGSKWMEVGKNNAGEVWYDITGNQTNTVTINKDGWGQFHVSGGSVSIYVQQ

SEQ ID NO: 25903 - protein, 483 aa, Bacillus licheniformis
HHNGTNGTMMQYFEWYLPNDGNHWNRLRSDASNLKDKGITAVWIPPAWKGASQNDVGYGAYDLYDLGEFNQKGTVRTKYGTRNQLQAAVTALKSNGIQVYGDVVMNHAGGADATEWVRAVEVNPSNRNQEVSGDYTIEAWTKFDFPGRGNTHSNFKWRWYHFDGVDWDQSRQLQNRIYKFRGKGWDWEVDTENGNYDYLMYADIDMDHPEVVNELRNWGVWYTNTLGLDGFRIDAVKHIKYSFTRDWLTHVRNTTGKNMFAVAEFWKNDIGAIENYLSKTNWNHSVFDVPLHYNLYNASRSGGNYDMRQIFNGTVVQRHPTHAVTFVDNHDSQPEEALESFVEEWFKPLAYALTLTRDQGYPSVFYGDYYGIPTHGVPAMKSKIDPILEARQKYAYGTQRDYLDHPDVIGWTREGDGVHADSGLATLMSDGPGGSKWMEVGKNNAGEVWYDITGNQTNTVTINKDGWGQFHVSGGSVSIYVQQ

SEQ ID NO: 25904 - protein, 483 aa, Bacillus licheniformis
HHNGTNGTMMQYFEWYLPNDGNHWNRLRSDASNLKDKGITAVWIPPAWKGASQNDVGYGAYDLYDLGEFNQKGTVRTKYGTRNQLQAAVTALKSNGIQVYGDVVMNHKGGADATEWVRAVEVNPSNRNQEVSGDYTIEAWTKFDFPGRGNTHSNFKWRWYHFDGVDWDQSRQLQNRIYKFRGKGWDWEVDTENGNYDYLMYADIDMDHPEVVNELRNWGVWYTNTLGLDGFRIDAVKHIKYSFTRDWLTHVRNTTGKNMFAVAEFWKNDIGAIENYLSKTNWNHSVFDVPLHYNLYNASRSGGNYDMRQIFNGTVVQRHPTHAVTFVDNHDSQPEEALESFVEEWFKPLAYALTLTRDQGYPSVFYGDYYGIPTHGVPAMKSKIDPILEARQKYAYGTQRDYLDHPDVIGWTREGDGVHADSGLATLMSDGPGGSKWMEVGKNNAGEVWYPITGNQTNTVTINKDGWGQFHVSGGSVSIYVQQ

SEQ ID NO: 25905 - protein, 483 aa, Bacillus licheniformis
HHNGTNGTMMQYFEWYLPNDGNHWNRLRSDASNLKDKGITAVWIPPAWKGASQNDVGYGAYDLYDLGEFNQKGTVRTKYGTRNQLQAAVTALKSNGIQVYGDVVMNHKGGADATEWVRAVEVNPSNRNQEVSGDYTIEAWTYFDFPGRGNTHSNFKWRWYHFDGVDWDQSRQLQNRIYKFRGKGWDWEVDTENGNYDYLMYADIDMDHPEVVNELRNWGVWYTNTLGLDGFRIDAVKHIKYSFTRDWLTHVRNTTGKNMFAVAEFWKNDIGAIENYLSKTNWNHSVFDVPLHYNLYNASRSGGNYDMRQIFNGTVVQRHPTHAVTFVDNHDSQPEEALESFVEEWFKPLAYALTLTRDQGYPSVFYGDYYGIPTHGVPAMKSKIDPILEARQKYAYGTQRDYLDHPDVIGWTREGDGVHADSGLATLMSDGPGGSKWMEVGKNNAGEVWYDITGNQTNTVTINKDGWGQFHVSGGSVSIYVQQ

SEQ ID NO: 25906 - protein, 483 aa, Bacillus licheniformis
HHNGTNGTMMQYFEWYLFNDGNHWNRLRSDASNLKDKGITAVWIPPAWKGASQNDVGYGAYDLYDLGEFNQKGTVRTKYGTRNQLQAAVTALKSNGIQVYGDVVMNHKGGADATEWVRAVEVNPSNRNQEVSGDYTIEAWTKFDFPGRGNTHSNFKWRWYHFDGVDWDQSRQLQNRIYKFRGKGWDWEVDTENGNYDYLMYADIDMDHPEVVNELRNWGVWYTNTLGLDGFRIDAVKHIKYSFTRDWLTHVRNTTGKNMFAVAEFWKNDIGAIENYLSKTNWNHSVFDVPLHYNLYNASRSGGNYDMRQIFNGTVVQRHPTHAVTFVDNHDSQPEEALESFVEEWFKPLAYALTLTRDQGYPSVFYGDYYGIPTHGVPAMKSKIDPILEARQKYAYGTQRDYLDHPDVIGWTREGDGVHADSGLATLMSDGPGGSKWMEVGKNNAGEVWYDITGNQTNTVTINKDGWGQFHVSGGSVSIYVQQ

SEQ ID NO: 25907 - protein, 483 aa, Bacillus licheniformis
HHNGTNGTMMQYFEWYLPNDGNHWNRLRSDASNLKDKGITAVWIPPAWKGASQNDVGYGAYDLYDLGEFNQKGTVRTKYGTRNQLQAAVTALKSNGIQVYGDVVMNHKGGADATEWVRAVEVNPSNRNQEVSGDYTIEAWTKFDFPGRGNTHSNFKWRWYHFDGVDWDQSRQLQNRIYKFRGKGWDWEVDTENGNYDYLMYADIDMDHPEVVNELRNWGVWYTNTLGLDGFRIDAVKHIKYSFTRDWLTHVRNTTGKNMFAVAEFWKNDIGAIENYLSKTNWPHSVFDVPLHYNLYNASRSGGNYDMRQIFNGTVVQRHPTHAVTFVDNHDSQPEEALESFVEEWFKPLAYALTLTRDQGYPSVFYGDYYGIPTHGVPAMKSKIDPILEARQKYAYGTQRDYLDHPDVIGWTREGDGVHADSGLATLMSDGPGGSKWMEVGKNNAGEVWYDITGNQTNTVTINKDGWGQFHVSGGSVSIYVQQ

SEQ ID NO: 25908 - protein, 483 aa, Bacillus licheniformis
HHNGTNGTMMQYFEWYLPNDGNHWHRLRSDASNLKDKGITAVWIPPAWKGASQNDVGYGAYDLYDLGEFNQKGTVRTKYGTRNQLQAAVTALKSNGIQVYGDVVMNHKGGADATEWVRAVEVNPSNRNQEVSGDYTIEAWTKFDFPGRGNTHSNFKWRWYHFDGVDWDQSRQLQNRIYKFRGKEWDWEVDTENGNYDYLMYADYDMDHPEVVNELRNWGVWYTNTLGLDGFRIDAVKHIKYSFTRDWLTHVRNTTGKNMFAVAEFWKNDIGAIENYLSKTNWNHSVFDVPLHYNLYNASRSGGNYDMRQIFNGTVVQRHPTHAVTFVDNHDSQPEEALESFVEEWFKPLAYALTLTRDQGYPSVFYGDYYGIPTHGVPAMKSKIDPILEARQKYAYGTQRDYLDHPDVIGWTREGDGVHADSGLATLMSDGPGGSKWMEVGKNNAGEVWYDITGNQTNTVTINKDGWGQFHVSGGSVSIYVQQ

SEQ ID NO: 25909 - protein, 483 aa, Bacillus licheniformis
HHNGTNGTMMQYFEWYLPNDGNHWNRLRSDASNLKDKGITAVWIPPAWKGASQNDVGYGAYDLYDLGEFNQKGTVRTKYGTRNQLQAAVTALKSNGIQVYGDVVMNHKGGADATEWVRAVEVNPSNRNQEVSGDYTIEAWTKFDFPGRGNTHSNFKWRWYHFDGVDWDQSRQLQNRIYKFRGKGWDWEVDTENGNYDYLMYADIDMDHPEVVNELRNWGVWYTNTLGLDGFRIDAVKHIKYSFTRDWLTHVRNTTGKNMFAVAEFWKNDIGAIENYLSKTNWNHSVFDVPLHYNLYNASRSGGNYDMRQIFNGTVVQRHPTHAVTFVDNHDSQPEEALESFVEEWFKPLAYALTLTRDQGYPSVFYGDYYGIPTHGVPAMKSKIDPILEARQKYAYGTQRDYLDHPDVIGWTREGDGVHADSGLATLMSDGPGGSKWMEVGKNNAGEVWYDITGNQTNTVTIVKDGWGQFHVSGGSVSIYVQQ

SEQ ID NO: 25910 - protein, 483 aa, Bacillus licheniformis
HHNGTNGTMMQYFEWYLPNDGNHWNRLRSDASNLKDKGITAVWIPPAWKGASQNDVGYGAYDLYDLGEFNQKGTVRTKYGTRNQLQAAVTALKSNGIQVYGDVVMNHKGGADATEWVRAVEVNPSNRNQEVSGDYTIEAWTKFDFPGRENTHSNFKWRWYHFDGVDWDQSRQLQNRIYKFRGKGWDWEVDTENGNYDYLMYADIDMDHPEVVNELRNWGVWYTNTLGLDGFRIDAVKHIKYSFTRDWLTHVRNTTGKNMFAVAEFWKNDIGAIENYLSKTNWNHSVFDVPLHYNLYNASRSGGNYDMRQIFNGTVVQRHPTHAVTFVDNHDSQPEEALESFVEEWFKPLAYALTLTRDQGYPSVFYGDYYGIPTHGVPAMKSKIDPILEARQKYAYGTQRDYLDHPDVIGWTREGDGVHADSGLATLMSDGPGGSKWMEVGKNNAGEVWYDITGNQTNTVTINKDGWGQFHVSGGSVSIYVQQ

SEQ ID NO: 25911 - protein, 483 aa, Bacillus licheniformis
HHNRTNGTMMQYFEWYLPNDGNHWNRLRSDASNLKDKGITAVWIPPAWKGASQNDVGYGAYDLYDLGEFNQKGTVRTKYGTRNQLQAAVTALKSNGIQVYGDVVMNHKGGADATEWVRAVEVNPSNRNQEVSGDYTIEAWTKFDFPGRGNTHSNFKWRWYHFDGVDWDQSRQLQNRIYKFRGKGWDWEVDTENGNYDYLMYADIDMDHPEVVNELRNWGVWYTNTLGLDGFRIDAVKHIKYSFTRDWLTHVRNTTGKNMFAVAEFWKNDIGAIENYLSKTNWNHSVFDVPLHYNLYNASRSGGNYDMRQIFNGTVVQRHPTHAVTFVDNHDSQPEEALESFVEEWFKPLAYALTLTRDQGYPSVFYGDYYGIPTHGVPAMKSKIDPILEARQKYAYGTQRDYLDHPDVIGWTREGDGVHADSGLATLMSDGPGGSKWMEVGKNNAGEVWYDITGNQTNTVTINKDGWGQFHVSGGSVSIYVQQ

SEQ ID NO: 25912 - protein, 483 aa, Bacillus licheniformis
HHNGTNGTMMQYFEWYLPMDGNHWNRLRSDASNLKDKGITAVWIPPAWKGASQNDVGYGAYDLYDLGEFNQKGTVRTKYGTRNQLQAAVTALKSNGIQVYGDVVMNHKGGADATEWVRAVEVNPSNRNQEVSGDYTIEAWTKFDFPGRGNTHSNFKWRWYHFDGVDWDQSRQLQNRIYKFRGKGWDWEVDTENGNYDYLMYADIDMDHPEVVNELRNWGVWYTNTLGLDGFRIDAVKHIKYSFTRDWLTHVRNTTGKNMFAVAEFWKNDIGAIENYLSKTNWNHSVFDVPLHYNLYNASRSGGNYDMRQIFNGTVVQRHPTHAVTFVDNHDSQPEEALESFVEEWFKPLAYALTLTRDQGYPSVFYGDYYGIPTHGVPAMKSKIDPILEARQKYAYGTQRDYLDHPDVIGWTREGDGVHADSGLATLMSDGPGGSKWMEVGKNNAGEVWYDITGNQTNTVTINKDGWGQFHVSGGSVSIYVQQ

SEQ ID NO: 25913 - protein, 516 aa, Bacillus sp. TS-23
ANTAPINETMMQYFEWDLPNDGTLWTKVKNEAANLSSLGITALWLPPAYKGTSQSDVGYGVYDLYDLGEFNQKGTIRTKYGTKTQYIQAIQAAKAAGMQVYADVVFNHKAGADGTEFVDAVEVDPSNRNQETSGTYQIQAWTKFDFPGRGNTYSSFKWRWYHFDGTDWDESRKLNRIYKFRSTGKAWDWEVDTENGNYDYLMFADLDMDHPEVVTELKNWGTWYVNTTNIDGFRLDAVKHIKYSFFPDWLTYVRNQTGKNLFAVGEFWSYDVNKLHNYITKTNGSMSLFDAPLHNNFYTASKSSGYFDMRYLLNNTLMKDQPSLAVTLVDNHDTQPGQSLQSWVEPWFKPLAYAFILTRQEGYPCVFYGDYYGIPKYNIPGLKSKIDPLLIARRDYAYGTQRDYIDHQDIIGWTREGIDTKPNSGLAALITDGPGGSKWMYVGKKHAGKVFYDLTGNRSDTVTINADGWGEFKVNGGSVSIWVAKTSNVTFTVNNATTTSGQNVYVVANIPELGNW

SEQ ID NO: 25914 - protein, 479 aa, Archaea
GVIMQAFYWDVPSGGIWWDTIRQKIPEWYDAGISAIWIPPASKGMGGAYSMGYDPYDFFDLGEYDQKGTVETRFGSKQELVNMINTAHAYGMKVIADIVINHRAGADGTEWVDAVEVNPSDRNQEISGTYQIQAWTKFDFPGRGNTYSSFKWRWYHFDGVDWDESRKLSRIYKFRGIGKAWDWEVDTENGNYDYLMYADLDMDHPEVVTELKNWGKWYVNTTNIDGFRLDAVKHIKFSFFPDWLSYVRSQTGKPLFTVGEYWSYDINKLHNYITKTNGTMSLFDAPLHNKFYTASKSGGAFDMRTLMTNTLMKDQPTLAVTFVDNHDTEPGQALQSWVDPWFKPLAYAFILTRQEGYPCVFYGDYYGIPQYNIPSLKSKIDPLLIARRDYAYGTQHDYLDHSDIIGWTREGVTEKPGSGLAALITDGPGGSKWMYVGKQHAGKVFYDLTGNRSDTVTINSDGWGEFKVNGGSVSVWVPR

SEQ ID NO: 25915 - protein, 482 aa, Synthetic construct
HHNGTNGTMMQYFEWYLPNDGNHWNRLNSDASNLKSKGITAVWIPPAWKGASQNDVGYGAYDLYDLGEFNQKGTVRTKYGTRSQLQAAVTSLKNNGIQVYGDVVMNHKGGADATEDVTAVEVDPADRNRVISGEHLIKAWTHFHFPGRGSTYSDFKWHWYHFDGTDWDESRKLNRIYKFQGKAWDWEVSNEFGNYDYLMYADIDMDHPEVVNELRNWGVWYTNTLGLDGFRIDAVKHIKYSFTRDWINHVRSATGKNMFAVAEFWKNDLGAIENYLQKTNWNHSVFDVPLHYNLYNASKSGGNYDMRNIFNGTVVQRHPSHAVTFVDNHDSQPEEALESFVEEWFKPLAYALTLTREQGYPSVFYGDYYGIPTHGVPAMRSKIDPILEARQKYAYGKQNDYLDHHNIIGWTREGNTAHPNSGLATIMSDGAGGSKWMFVGRNKAGQVWSDITGNRTGTVTINADGWGNFSVNGGSVSIWVNK

SEQ ID NO: 25916 - protein, 490 aa, Bacillus sp. TS-23
ANTAPINETMMQYFEWDLPNDGTLWTKVKNEAANLSSLGITALWLPPAYKGTSQSDVGYGVYDLYDLGEFNQKGTIRTKYGTKTQYIQAIQAAKAAGMQVYADVVFNHKAGADGTEFVDAVEVDPSNRNQETSGTYQIQAWTKFDFPGRGNTYSSFKWRWYHFDGTDWDESRKLNRIYKFRSTGKAWDWEVDTENGNYDYLMFADLDMDHPEVVTELKNWGTWYVNTTNIDGFRLDAVKHIKYSFFPDWLTYVRNQTGKNLFAVGEFWSYDVNKLHNYITKTNGSMSLFDAPLHNNFYTASKSSGYFDMRYLLNNTLMKDQPSLAVTLVDNHDTQPGQSLQSWVEPWFKPLAYAFILTRQEGYPCYFYGDYYGIPKYNIPGLKSKIDPLLIARRDYAYGTQRDYIDHQDIIGWTREGIDTKPNSGLAALITDGPGGSKWMYVGKKHAGKVFYDLTGNRSDTVTINADGWGEFKVNGGSVSIWVAKTSNVT

SEQ ID NO: 25917 - protein, 480 aa, Bacillus sp.
APINETMMQYFEWDLPNDGTLWTKVKNEAANLSSLGITALWLPPAYKGTSQSDVGYGVYDLYDLGEFNQKGTIRTKYGTKTQYIQAIQAAKAAGMQVYADVVFNHKAGADQTEFVDAVEVDPSNRNQEVSGTYQIEAWTKFDFPGRGNTYSSFKWRWYHFDGTDWDESRKLNRIYKFRGKAWDWEVDTENGNYDYLMFADLDMDHPEVVTELKNWGTWYVNTTNIDGFRLDAVKHIKFSFMRDWLTYVRNQTGKNLFAVGEFWSYDVNKLHNYITKTNGSMSLFDAPLHNNFYTASKSSGYFDMRYLLNNTLMKDQPSLAVTLVDNHDTQPGQSLQSWVEPWFKPLAYAFILTRQEGYPCVFYGDYYGIPSDGVPGLKSKIDPLLIARRDYAYGTQRDYIDHQDIIGWTREGIDTKPNSGLAALITDGPGGSKWMYVGKKHAGKVFYDLTGNRSDTVTINADGWGEFKVNGGSVSIWVAK

SEQ ID NO: 25918 - protein, 483 aa, Synthetic construct
APVNGTMMQYFEWDLPNDGTLWTKVKNEATNLFSLGITALWLPPAYKGTSQSDVGYGVYDLYDLGEFNQKGTIRTKYGTKTQYIQAIQAAKAAGMQVYADVVFNHKGGADATEMVRAVEVNPNNRNQEVSGEYTIEAWTKFDFPGRGNTHSNFKWRWYHFDGVDWDQSRKLNNRIYKFRGDGKGWDWEVDTENGNYDYLMYADIDMDHPEVVTELKNWGTWYVNTTNIDGFRLDAVKHIKYSFFPDWLTYVRNQTGKNLFAVGEFWSYDVNKLHNYITKTNGSMSLFDAPLHNNFYTASKSSGYFDMRYLLNNTLMKDQPSLAVTLVDNHDTQPGQSLQSWVEPWFKPLAYAFILTRQEGYPCVFYGDYYGIPKYNIPGLKSKIDPLLIARRDYAYGTQRDYIDHQDIIGWTREGIDTKPNSGLAALITDGPGGSKWMYVGKKHAGKVFYDLTGNRSDTVTINADGWGEFKVNGGSVSIWVAK

SEQ ID NO: 25919 - protein, 483 aa, Synthetic construct
APINETMMQYFEWDLPNDGTLWTKVKNEAANLSSLGITALWLPPAYKGTSQSDVGYGVYDLYDLGEFNQKGTIRTKYGTKTQYIQAIQAAKAAGMQVYADVVFNHKGGADATEMVRAVEVNPNNRNQEVSGEYTIEAWTKFDFPGRGNTHSNFKWRWYHFDGVDWDQSRKLNNRIYKFRGDGKGWDWEVDTENGNYDYLMYADIDMDHPEVVTELKNWGTWYVNTTNIDGFRLDAVKHIKYSFFPDWLTYVRNQTGKNLFAVGEFWSYDVNKLHNYITKTNGSMSLFDAPLHNNFYTASKSSGYFDMRYLLNNTLMKDQPSLAVTLVDNHDTQPGQSLQSWVEPWFKPLAYAFILTRQEGYPCVFYGDYYGIPKYNIPGLKSKIDPLLIARRDYAYGTQRDYIDHQDIIGWTREGIDTKPNSGLAALITDGPGGSKWMYVGKKHAGKVFYDLTGNRSDTVTINADGWGEFKVNGGSVSIWVAK

SEQ ID NO: 25920 - protein, 483 aa, Synthetic construct
APVNGTMMQYFEWDLPNDGTLWTKVKNEATNLFSLGITALWLPPAYKGTSQSDVGYGVYDLYDLGEFNQKGTIRTKYGTKTQYIQAIQAAKAAGMQVYADVVFNHKGGADATENVLAVEVNPNNRNQEISGDYTIEAWTKFDFPGRGNTYSDFKWRWYHFDGVDWDQSRQFQNRIYKFRGDGKAWDWEVDSENGNYDYLMYADVDMDHPEVVTELKNWGTWYVNTTNIDGFRLDAVKHIKYSFFPDWLTYVRNQTGKNLFAVGEFWSYDVNKLHNYITKTNGSMSLFDAPLHNNFYTASKSSGYFDMRYLLNNTLMKDQPSLAVTLVDNHDTQPGQSLQSWVEPWFKPLAYAFILTRQEGYPCVFYGDYYGIPKYNIPGLKSKIDPLLIARRDYAYGTQRDYIDHQDIIGWTREGIDTKPNSGLAALITDGPGGSKWMYVGKKHAGKVFYDLTGNRSDTVTINADGWGEFKVNGGSVSIWVAK

SEQ ID NO: 25921 - protein, 483 aa, Synthetic construct
APINETMMQYFEWDLPNDGTLWTKVKNEAANLSSLGITALWLPPAYKGTSQSDVGYGVYDLYDLGEFNQKGTIRTKYGTKTQYIQAIQAAKAAGMQVYADVVFNHKGGADATENVLAVEVNPNNRNQEISGDYTIEAWTKFDFPGRGNTYSDFKWRWYHFDGVDWDQSRQFQNRIYKFRGDGKAWDWEVDSENGNYDYLMYADVDMDHPEVVTELKNWGTWYVNTTNIDGFRLDAVKHIKYSFFPDWLTYVRNQTGKNLFAVGEFWSYDVNKLHNYITKTNGSMSLFDAPLHNNFYTASKSSGYFDMRYLLNNTLMKDQPSLAVTLVDNHDTQPGQSLQSWVEPWFKPLAYAFILTRQEGYPCVFYGDYYGIPKYNIPGLKSKIDPLLIARRDYAYGTQRDYIDHQDIIGWTREGIDTKPNSGLAALITDGPGGSKWMYVGKKHAGKVFYDLTGNRSDTVTINADGWGEFKVNGGSVSIWVAK

SEQ ID NO: 25922 - protein, 513 aa, Bacillus sp. TS-23
APINETMMQYFEWDLPNDGTLWTKVKNEAANLSSLGITALWLPPAYKGTSQSDVGYGVYDLYDLGEFNQKGTIRTKYGTKTQYIQAIQAAKAAGMQVYADVVFNHKAGADGTEFVDAVEVDPSNRNQETSGTYQIQAWTKFDFPGRGNTYSSFKWRWYHFDGTDWDESRKLNRIYKFRSTGKAWDWEVDTENGNYDYLMFADLDMDHPEVVTELKNWGTWYVRTTNIDGFRLDAVKHIKYSFFPDWLTYVRNQTGKNLFAVGEFWSYDVRKLHNYITKTRGSMSLFDAPLHNNFYTASKSSGYFDMRYLLNNTLMKDQPSLAVTLVDNHDTQPGQSLQSWVEPWFKPLAYAFILTRQEGYPCVFYGDYYGIPKYNIPGLKSKIDPLLIARRDYAYGTQRDYIDHQDIIGWTREGIDTKPNSGLAALITDGPGGSKWMYVGKKHAGKVFYDLTGNRSDTVTINADGWGEFKVNGGSVSIWVAKTSNVTFTVNNATTTSGQNVYVVANIPELGNW

SEQ ID NO: 25923 - protein, 513 aa, Bacillus sp. TS-23
APINETMMQYFEWDLPNDGTLWTKVKNEAANLSSLGITALWLPPAYKGTSQSDVGYGVYDLYDLGEFNQKGTIRTKYGTKTQYIEAIQAAKAAGMQVYADVVFNHKAGADGTEFVDAVEVDPSNRNQETSGTYQIQAWTKFDFPGRGNTYSSFKWRWYHFDGTDWDESRKLNRIYKFRSTGKAWDWEVDTENGNYDYLMFADLDMDHPEVVTELKNWGTWYVETTNIDGFRLDAVKHIKYSFFPDWLTYVRNQTGKNLFAVGEFWSYDVNKLHNYITKTNGSMSLFDAPLHNNFYTASKSSGYFDMRYLLNNTLMKDQPSLAVTLVDNHDTQPGQSLQSWVEPWFKPLAYAFILTRQEGYPCVFYGDYYGIPKYNIPGLKSKIDPLLIARRDYAYGTQRDYIDHQDIIGWTREGIDTKPNSGLAALITDGPGGSKWMYVGKKHAGKVFYDLTGNRSDTVTINADGWGEFKVNGGSVSIWVAKTSNVTFTVNNATTTSGQNVYVVANIPELGNW

SEQ ID NO: 25924 - protein, 513 aa, Bacillus sp. TS-23
APINETMMQYFEWDLPNDGTLWTKVKNEAANLSSLGITALWLPPAYKGTSQSDVGYGVYDLYDLGEFNQKGTIRTKYGTKTQYIQAIQAAKAAGMQVYADVVFNHKAGADGTEFVDAVEVDPSNRNQETSGTYQIQAWTKFDFPGRGNTYSSFKWRWYHFDGTDWDESRKLNRIYKFRSTGKAWDWEVDTENGNYDYLMFADLDMDHPEVVTELKNWGTWYVRTTNIDGFRLDAVKHIKYSFFPDWLTYVRNQTGKNLFAVGEFWSYDVEKLHNYITKTEGSMSLFDAPLHNNFYTASKSSGYFDMRYLLNNTLMKDQPSLAVTLVDNHDTQPGQSLQSWVEPWFKPLAYAFILTRQEGYPCVFYGDYYGIPKYNIPGLKSKIDPLLIARRDYAYGTQRDYIDHQDIIGWTREGIDTKPNSGLAALITDGPGGSKWMYVGKKHAGKVFYDLTGNRSDTVTINADGWGEFKVNGGSVSIWVAKTSNVTFTVNNATTTSGQNVYVVANIPELGNW

SEQ ID NO: 25925 - protein, 513 aa, Bacillus sp. TS-23
APINETMMQYFEWDLPNDGTLWTKVKNEAANLSSLGITALWLPPAYKGTSQSDVGYGVYDLYDLGEFNQKGTIRTKYGTKTQYIQAIQAAKAAGMQVYADVVFNHKAGADGTEFVDAVEVDPSNRNQETSGTYQIQAWTKFDFPGRGNTYSSFKWRWYHFDGTDWDESRKLNRIYKFRSTGKAWDWEVDTENGNYDYLMFADLDMDHPEVVTELKNWGTWYVETTNIDGFRLDAVKHIKYSFFPDWLTYVRNQTGKNLFAVGEFWSYDVRKLHNYITKTEGSMSLFDAPLHNNFYTASKSSGYFDMRYLLNNTLMKDQPSLAVTLVDNHDTQPGQSLQSWVEPWFKPLAYAFILTRQEGYPCVFYGDYYGIPKYNIPGLKSKIDPLLIARRDYAYGTQRDYIDHQDIIGWTREGIDTKPNSGLAALITDGPGGSKWMYVGKKHAGKVFYDLTGNRSDTVTINADGWGEFKVNGGSVSIWVAKTSNVTFTVNNATTTSGQNVYVVANIPELGNW

SEQ ID NO: 25926 - protein, 513 aa, Bacillus sp. TS-23
APINETMMQYFEWDLPNDGTLWTKVKNEAANLSSLGITALWLPPAYKGTSQSDVGYGVYDLYDLGEFNQKGTIRTKYGTKTQYIEAIQAAKAAGMQVYADVVFNHKAGADGTEFVDAVEVDPSNRNQETSGTYQIQAWTKFDFPGRGNTYSSFKWRWYHFDGTDWDESRKLNRIYKFRSTGKAWDWEVDTENGNYDYLMFADLDMDHPEVVTELKNWGTWYVNTTNIDGFRLDAVKHIKYSFFPDWLTYVRNQTGKNLFAVGEFWSYDVEKLHNYITKTNGSMSLFDAPLHNNFYTASKSSGYFDMRYLLNNTLMKDQPSLAVTLVDNHDTQPGQSLQSWVEPWFKPLAYAFILTRQEGYPCVFYGDYYGIPKYNIPGLKSKIDPLLIARRDYAYGTQRDYIDHQDIIGWTREGIDTKPNSGLAALITDGPGGSKWMYVGKKHAGKVFYDLTGNRSDTVTINADGWGEFKVNGGSVSIWVAKTSNVTFTVNNATTTSGQNVYVVANIPELGNW

SEQ ID NO: 25927 - protein, 513 aa, Bacillus sp. TS-23
APINETMMQYFEWDLPNDGTLWTKVKNEAANLSSLGITALWLPPAYKGTSQSDVGYGVYDLYDLGEFNQKGTIRTKYGTKTQYIRAIQAAKAAGMQVYADVVFNHKAGADGTEFVDAVEVDPSNRNQETSGTYQIQAWTKFDFPGRGNTYSSFKWRWYHFDGTDWDESRKLNRIYKFRSTGKAWDWEVDTENGNYDYLMFADLDMDHPEVVTELKNWGTWYVRTTNIDGFRLDAVKHIKYSFFPDWLTYVRNQTGKNLFAVGEFWSYDVNKLHNYITKTNGSMSLFDAPLHNNFYTASKSSGYFDMRYLLNNTLMKDQPSLAVTLVDNHDTQPGQSLQSWVEPWFKPLAYAFILTRQEGYPCVFYGDYYGIPKYNIPGLKSKIDPLLIARRDYAYGTQRDYIDHQDIIGWTREGIDTKPNSGLAALITDGPGGSKWMYVGKKHAGKVFYDLTGNRSDTVTINADGWGEFKVNGGSVSIWVAKTSNVTFTVNNATTTSGQNVYVVANIPELGNW

SEQ ID NO: 25928 - protein, 513 aa, Bacillus sp. TS-23
APINETMMQYFEWDLPNDGTLWTKVKNEAANLSSLGITALWLPPAYKGTSQSDVGYGVYDLYDLGEFNQKGTIRTKYGTKTQYIRAIQAAKAAGMQVYADVVFNHKAGADGTEFVDAVEVDPSNRNQETSGTYQIQAWTKFDFPGRGNTYSSFKWRWYHFDGTDWDESRKLNRIYKFRSTGKAWDWEVDTENGNYDYLMFADLDMDHPEVVTELKNWGTWYVNTTNIDGFRLDAVKHIKYSFFPDWLTYVRNQTGKNLFAVGEFWSYDVRKLHNYITKTNGSMSLFDAPLHNNFYTASKSSGYFDMRYLLNNTLMKDQPSLAVTLVDNHDTQPGQSLQSWVEPWFKPLAYAFILTRQEGYPCVFYGDYYGIPKYNIPGLKSKIDPLLIARRDYAYGTQRDYIDHQDIIGWTREGIDTKPNSGLAALITDGPGGSKWMYVGKKHAGKVFYDLTGNRSDTVTINADGWGEFKVNGGSVSIWVAKTSNVTFTVNNATTTSGQNVYVVANIPELGNW

SEQ ID NO: 25929 - protein, 512 aa, Bacillus sp. TS-23
APINETMMQYFEWDLPNDGTLWTKVKNEAANLSSLGITALWLPPAYKGTSQSDVGYGVYDLYDLGEFNQKGTIRTKYGTKTQYIQAIQAAKAAGMQVYADVVFNHKAGADGTEFVDAVEVDPSNRNQETSGTYQIQAWTKFDFPGRGNTYSSFKWRWYHFDGTDWDEQSRKLNRIYKFSTKAWDWEVDTENGNYDYLMFADLDMDHPEVVTELKNWGTWYVNTTNIDGFRLDAVKHIKYSFFPDWLTYVRNQTGKNLFAVGEFWSYDVNKLHNYITKTNGSMSLFDAPLHNNFYTASKSSGYFDMRYLLNNTLMKDQPSLAVTLVDNHDTQPGQSLQSWVEPWFKPLAYAFILTRQEGYPCVFYGDYYGIPKYNIPGLKSKIDPLLIARRDYAYGTQRDYIDHQDIIGWTREGIDTKPNSGLAALITDGPGGSKWMYVGKKHAGKVFYDLTGNRSDTVTINADGWGEFKVNGGSVSIWVAKTSNVTFTVNNATTTSGQNVYVVANIPELGNW

SEQ ID NO: 25930 - protein, 511 aa, Bacillus sp. TS-23
APINETMMQYFEWDLPNDGTLWTKVKNEAANLSSLGITALWLPPAWKGTSQSDVGYGVYDLYDLGEFNQKGTIRTKYGTKTQYIQAIQAAKAAGMQVYADVVFNHKAGADGTEFVDAVEVDPSNRNQETSGTYQIQAWTKFDFPGRGNTYSSFKWRWYHFDGTDWDESRKLNRIYKFRGKAWDWEVDTENGNYDYLMFADYDMDHPEVVTELKNWGTWYVNTTNIDGFRLDAVKHIKYSFFPDWLTYVRNQTGKNLFAVGEFWSYDVNKLHNYITKTNGSMSLFDAPLHNNFYTASKSSGYFDMRYLLNNTLMKDQPSLAVTLVDNHDTQPGQSLQSWVEPWFKPLAYAFILTRQEGYPCVFYGDYYGIPKYNIPGLKSKIDPLLIARRDYAYGTQRDYIDHQDIIGWTREGIDTKPNSGLAALITDGPGGSKWMYVGKKHAGKVFYDLTGNRSDTVTINADGWGEFKVNGGSVSIWVAKTSNVTFTVNNATTTSGQNVYVVANIPELGNW

SEQ ID NO: 25931 - protein, 513 aa, Bacillus sp. TS-23
APINETMMQYFEWDLPNDGTLWTKVKNEAANLSSLGITALWLPPAYKGTSQSDVGYGVYDLYDLGEFNQKGTIRTKYGTKTQYIQAIQAAKAAGMQVYADVVFNHKAGADGTEFVDAVEVDPSNRNQETSGTYQIQAWTKFDFPGRGNTYSSFKWRWYHFDGTDWDESRKLNRIYKFRSTGKAWDWEVDTENGNYDYLMFADLDMDHPEVVTELKNWGTWYVETTNIDGFRLDAVKHIKYSFFPDWLTYVRNQTGKNLFAVGEFWSYDVEKLHNYITKTEGSMSLFDAPLHNNFYTASKSSGYFDMRYLLNNTLMKDQPSLAVTLVDNHDTQPGQSLQSWVEPWFKPLAYAFILTRQEGYPCVFYGDYYGIPKYNIPGLKSKIDPLLIARRDYAYGTQRDYIDHQDIIGWTREGIDTKPNSGLAALITDGPGGSKWMYVGKKHAGKVFYDLTGNRSDTVTINADGWGEFKVNGGSVSIWVAKTSNVTFTVNNATTTSGQNVYVVANIPELGNW

SEQ ID NO: 25932 - protein, 513 aa, Bacillus sp. TS-23
APINETMMQYFEWDLPNDGTLWTKVKNEAANLSSLGITALWLPPAYKGTSQSDVGYGVYDLYDLGEFNQKGTIRTKYGTKTQYIEAIQAAKAAGMQVYADVVFNHKAGADGTEFVDAVEVDPSNRNQETSGTYQIQAWTKFDFPGRGNTYSSFKWRWYHFDGTDWDESRKLNRIYKFRSTGKAWDWEVDTENGNYDYLMFADLDMDHPEVVTELKNWGTWYVNTTNIDGFRLDAVKHIKYSFFPDWLTYVRNQTGKNLFAVGEFWSYDVRKLHNYITKTRGSMSLFDAPLHNNFYTASKSSGYFDMRYLLNNTLMKDQPSLAVTLVDNHDTQPGQSLQSWVEPWFKPLAYAFILTRQEGYPCVFYGDYYGIPKYNIPGLKSKIDPLLIARRDYAYGTQRDYIDHQDIIGWTREGIDTKPNSGLAALITDGPGGSKWMYVGKKHAGKVFYDLTGNRSDTVTINADGWGEFKVNGGSVSIWVAKTSNVTFTVNNATTTSGQNVYVVANIPELGNW

SEQ ID NO: 25933 - protein, 512 aa, Bacillus sp. TS-23
APINETMMQYFEWDLPNDGTLWTKVKNEAANLSSLGITALWLPPAYKGTSQSDVGYGVYDLYDLGEFNQKGTIRTKYGTKTQYIQAIQAAKAAGMQVYADVVFNHKAGADGTEFVDAVEVDPSNRNQETSGTYQIQAWTKFDFPGRGNTYSSFKWRWYHFDGTDWDESRKLNQRIYKFSTKAWDWEVDTENGNYDYLMFADLDMDHPEVVTELKNWGTWYVNTTNIDGFRLDAVKHIKYSFFPDWLTYVRNQTGKNLFAVGEFWSYDVNKLHNYITKTNGSMSLFDAPLHNNFYTASKSSGYFDMRYLLNNTLMKDQPSLAVTLVDNHDTQPGQSLQSWVEPWFKPLAYAFILTRQEGYPCVFYGDYYGIPKYNIPGLKSKIDPLLIARRDYAYGTQRDYIDHQDIIGWTREGIDTKPNSGLAALITDGPGGSKWMYVGKKHAGKVFYDLTGNRSDTVTINADGWGEFKVNGGSVSIWVAKTSNVTFTVNNATTTSGQNVYVVANIPELGNW

SEQ ID NO: 25934 - protein, 513 aa, Bacillus sp. TS-23
APINETMMQYFEWDLPNDGTLWTKVKNEAANLSSLGITALWLPPAYKGTSQSDVGYGVYDLYDLGEFNQKGTIRTKYGTKTQYIEAIQAAKAAGMQVYADVVFNHKAGADGTEFVDAVEVDPSNRNQETSGTYQIQAWTKFDFPGRGNTYSSFKWRWYHFDGTDWDESRKLNRIYKFRSTGKAWDWEVDTENGNYDYLMFADLDMDHPEVVTELKNWGTWYVRTTNIDGFRLDAVKHIKYSFFPDWLTYVRNQTGKNLFAVGEFWSYDVNKLHNYITKTNGSMSLFDAPLHNNFYTASKSSGYFDMRYLLNNTLMKDQPSLAVTLVDNHDTQPGQSLQSWVEPWFKPLAYAFILTRQEGYPCVFYGDYYGIPKYNIPGLKSKIDPLLIARRDYAYGTQRDYIDHQDIIGWTREGIDTKPNSGLAALITDGPGGSKWMYVGKKHAGKVFYDLTGNRSDTVTINADGWGEFKVNGGSVSIWVAKTSNVTFTVNNATTTSGQNVYVVANIPELGNW

SEQ ID NO: 25935 - protein, 513 aa, Bacillus sp. TS-23
APINETMMQYFEWDLPNDGTLWTKVKNEAANLSSLGITALWLPPAYKGTSQSDVGYGVYDLYDLGEFNQKGTIRTKYGTKTQYIRAIQAAKAAGMQVYADVVFNHKAGADGTEFVDAVEVDPSNRNQETSGTYQIQAWTKFDFPGRGNTYSSFKWRWYHFDGTDWDESRKLNRIYKFRSTGKAWDWEVDTENGNYDYLMFADLDMDHPEVVTELKNWGTWYVNTTNIDGFRLDAVKHIKYSFFPDWLTYVRNQTGKNLFAVGEFWSYDVEKLHNYITKTRGSMSLFDAPLHNNFYTASKSSGYFDMRYLLNNTLMKDQPSLAVTLVDNHDTQPGQSLQSWVEPWFKPLAYAFILTRQEGYPCVFYGDYYGIPKYNIPGLKSKIDPLLIARRDYAYGTQRDYIDHQDIIGWTREGIDTKPNSGLAALITDGPGGSKWMYVGKKHAGKVFYDLTGNRSDTVTINADGWGEFKVNGGSVSIWVAKTSNVTFTVNNATTTSGQNVYVVANIPELGNW

SEQ ID NO: 25936 - protein, 513 aa, Bacillus sp. TS-23
APINETMMQYFEWDLPNDGTLWTKVKNEAANLSSLGITALWLPPAYKGTSQSDVGYGVYDLYDLGEFNQKGTIRTKYGTKTQYIQAIQAAKAAGMQVYADVVFNHKAGADGTEFVDAVEVDPSNRNQETSGTYQIQAWTKFDFPGRGNTYSSFKWRWYHFDGTDWDESRKLNRIYKFRSTGKAWDWEVDTENGNYDYLMFADLDMDHPEVVTELKNWGTWYVETTNIDGFRLDAVKHIKYSFFPDWLTYVRNQTGKNLFAVGEFWSYDVRKLHNYITKTRGSMSLFDAPLHNNFYTASKSSGYFDMRYLLNNTLMKDQPSLAVTLVDNHDTQPGQSLQSWVEPWFKPLAYAFILTRQEGYPCVFYGDYYGIPKYNIPGLKSKIDPLLIARRDYAYGTQRDYIDHQDIIGWTREGIDTKPNSGLAALITDGPGGSKWMYVGKKHAGKVFYDLTGNRSDTVTINADGWGEFKVNGGSVSIWVAKTSNVTFTVNNATTTSGQNVYVVANIPELGNW

SEQ ID NO: 25937 - protein, 513 aa, Bacillus sp. TS-23
APINETMMQYFEWDLPNDGTLWTKVKNEAANLSSLGITALWLPPAYKGTSQSDVGYGVYDLYDLGEFNQKGTIRTKYGTKTQYIRAIQAAKAAGMQVYADVVFNHKAGADGTEFVDAVEVDPSNRNQETSGTYQIQAWTKFDFPGRGNTYSSFKWRWYHFDGTDWDESRKLNRIYKFRSTGKAWDWEVDTENGNYDYLMFADLDMDHPEVVTELKNWGTWYVNTTNIDGFRLDAVKHIKYSFFPDWLTYVRNQTGKNLFAVGEFWSYDVRKLHNYITKTRGSMSLFDAPLHNNFYTASKSSGYFDMRYLLNNTLMKDQPSLAVTLVDNHDTQPGQSLQSWVEPWFKPLAYAFILTRQEGYPCVFYGDYYGIPKYNIPGLKSKIDPLLIARRDYAYGTQRDYIDHQDIIGWTREGIDTKPNSGLAALITDGPGGSKWMYVGKKHAGKVFYDLTGNRSDTVTINADGWGEFKVNGGSVSIWVAKTSNVTFTVNNATTTSGQNVYVVANIPELGNW

SEQ ID NO: 25938 - protein, 513 aa, Bacillus sp. TS-23
APINETMMQYFEWDLPNDGTLWTKVKNEAANLSSLGITALWLPPAYKGTSQSDVGYGVYDLYDLGEFNQKGTIRTKYGTKTQYIRAIQAAKAAGMQVYADVVFNHKAGADGTEFVDAVEVDPSNRNQETSGTYQIQAWTKFDFPGRGNTYSSFKWRWYHFDGTDWDESRKLNRIYKFRSTGKAWDWEVDTENGNYDYLMFADLDMDHPEVVTELKNWGTWYVRTTNIDGFRLDAVKHIKYSFFPDWLTYVRNQTGKNLFAVGEFWSYDVNKLHNYITKTRGSMSLFDAPLHNNFYTASKSSGYFDMRYLLNNTLMKDQPSLAVTLVDNHDTQPGQSLQSWVEPWFKPLAYAFILTRQEGYPCVFYGDYYGIPKYNIPGLKSKIDPLLIARRDYAYGTQRDYIDHQDIIGWTREGIDTKPNSGLAALITDGPGGSKWMYVGKKHAGKVFYDLTGNRSDTVTINADGWGEFKVNGGSVSIWVAKTSNVTFTVNNATTTSGQNVYVVANIPELGNW

SEQ ID NO: 25939 - protein, 512 aa, Bacillus sp. TS-23
APINETMMQYFEWDLPNDGTLWTKVKNEAANLSSLGITALWLPPAYKGTSQSDVGYGVYDLYDLGEFNQKGTIRTKYGTKTQYIQAIQAAKAAGMQVYADVVFNHKAGADGTEFVDAVEVDPSNRNQETSGTYQIQAWTKFDFPGRGNTYSSFKWRWYHFDGTDWDESRKLNNRIYKFSTKAWDWEVDTENGNYDYLMFADLDMDHPEVVTELKNWGTWYVNTTNIDGFRLDAVKHIKYSFFPDWLTYVRNQTGKNLFAVGEFWSYDVNKLHNYITKTNGSMSLFDAPLHNNFYTASKSSGYFDMRYLLNNTLMKDQPSLAVTLVDNHDTQPGQSLQSWVEPWFKPLAYAFILTRQEGYPCVFYGDYYGIPKYNIPGLKSKIDPLLIARRDYAYGTQRDYIDHQDIIGWTREGIDTKPNSGLAALITDGPGGSKWMYVGKKHAGKVFYDLTGNRSDTVTINADGWGEFKVNGGSVSIWVAKTSNVTFTVNNATTTSGQNVYVVANIPELGNW

SEQ ID NO: 25940 - protein, 513 aa, Bacillus sp. TS-23
APINETMMQYFEWDLPNDGTLWTKVKNEAANLSSLGITALWLPPAYKGTSQSDVGYGVYDLYDLGEFNQKGTIRTKYGTKTQYIQAIQAAKAAGMQVYADVVFNHKAGADGTEFVDAVEVDPSNRNQETSGTYQIQAWTKFDFPGRGNTYSSFKWRWYHFDGTDWDESRKLNRIYKFRSTGKAWDWEVDTENGNYDYLMFADLDMDHPEVVTELKNWGTWYVETTNIDGFRLDAVKHIKYSFFPDWLTYVRNQTGKNLFAVGEFWSYDVRKLHNYITKTNGSMSLFDAPLHNNFYTASKSSGYFDMRYLLNNTLMKDQPSLAVTLVDNHDTQPGQSLQSWVEPWFKPLAYAFILTRQEGYPCVFYGDYYGIPKYNIPGLKSKIDPLLIARRDYAYGTQRDYIDHQDIIGWTREGIDTKPNSGLAALITDGPGGSKWMYVGKKHAGKVFYDLTGNRSDTVTINADGWGEFKVNGGSVSIWVAKTSNVTFTVNNATTTSGQNVYVVANIPELGNW

SEQ ID NO: 25941 - protein, 513 aa, Bacillus sp. TS-23
APINETMMQYFEWDLPNDGTLWTKVKNEAANLSSLGITALWLPPAYKGTSQSDVGYGVYDLYDLGEFNQKGTIRTKYGTKTQYIEAIQAAKAAGMQVYADVVFNHKAGADGTEFVDAVEVDPSNRNQETSGTYQIQAWTKFDFPGRGNTYSSFKWRWYHFDGTDWDESRKLNRIYKFRSTGKAWDWEVDTENGNYDYLMFADLDMDHPEVVTELKNWGTWYVETTNIDGFRLDAVKHIKYSFFPDWLTYVRNQTGKNLFAVGEFWSYDVNKLHNYITKTRGSMSLFDAPLHNNFYTASKSSGYFDMRYLLNNTLMKDQPSLAVTLVDNHDTQPGQSLQSWVEPWFKPLAYAFILTRQEGYPCVFYGDYYGIPKYNIPGLKSKIDPLLIARRDYAYGTQRDYIDHQDIIGWTREGIDTKPNSGLAALITDGPGGSKWMYVGKKHAGKVFYDLTGNRSDTVTINADGWGEFKVNGGSVSIWVAKTSNVTFTVNNATTTSGQNVYVVANIPELGNW

SEQ ID NO: 25942 - protein, 511 aa, Bacillus sp. TS-23
APINETMMQYFEWDLPNDGTLWTKVKNEAANLSSLGITALWLPPAYKGTSQSDVGYGAYDLYDLGEFNQKGTIRTKYGTKTQYIQAIQAAKAAGMQVYADVVFNHKAGADGTEFVDAVEVDPSNRNQETSGTYQIQAWTKFDFPGRGNTYSSFKWRWYHFDGTDWDESRKLNRIYKFRGKAWDWEVDTENGNYDYLMFADYDMDHPEVVTELKNWGTWYVNTTNIDGFRLDAVKHIKYSFFPDWLTYVRNQTGKNLFAVGEFWSYDVNKLHNYITKTNGSMSLFDAPLHNNFYTASKSSGYFDMRYLLNNTLMKDQPSLAVTLVDNHDTQPGQSLQSWVEPWFKPLAYAFILTRQEGYPCVFYGDYYGIPKYNIPGLKSKIDPLLIARRDYAYGTQRDYIDHQDIIGWTREGIDTKPNSGLAALITDGPGGSKWMYVGKKHAGKVFYDLTGNRSDTVTINADGWGEFKVNGGSVSIWVAKTSNVTFTVNNATTTSGQNVYVVANIPELGNW

SEQ ID NO: 25943 - protein, 511 aa, Bacillus sp. TS-23
APINETMMQYFEWDLPNDGTLWTKVKNEAANLSSLGITALWLPPAYKGTSQSDVGYGVYDLYDLGEFNQKGTIRTKYGTKTQYIQAIQAAKAAGMQVYADVVFNHKAGADGTEFVDAVEVDPSNRNQETSGTYQIQAWTKFDFPGRGNTYSSFKWRWYHFDGTDWDESRKLNRIYKFRSKAWDWEVDTENGNYDYLMFADFDMDHPEVVTELKNWGTWYVNTTNIDGFRLDAVKHIKYSFFPDWLTYVRNQTGKNLFAVGEFWSYDVNKLHNYITKTNGSMSLFDAPLHNNFYTASKSSGYFDMRYLLNNTLMKDQPSLAVTLVDNHDTQPGQSLQSWVEPWFKPLAYAFILTRQEGYPCVFYGDYYGIPKYNIPGLKSKIDPLLIARRDYAYGTQRDYIDHQDIIGWTREGIDTKPNSGLAALITDGPGGSKWMYVGKKHAGKVFYDLTGNRSDTVTINADGWGEFKVNGGSVSIWVAKTSNVTFTVNNATTTSGQNVYVVANIPELGNW

SEQ ID NO: 25944 - protein, 511 aa, Bacillus sp. TS-23
APINETMMQYFEWDLPNDGTLWTKVKNEAANLSSLGITALWLPPAYKGTSQSDVGYGVYDLYDLGEFNQKGTIRTKYGTKTQYIQAIQAAKAAGMQVYADVVFNHKAGADGTEFVDAVEVDPSNRNQETSGTYQIQAWTKFDFPGRGNTYSSFKWRWYHFDGTDWDESRKLNRIYKFRSKAWDWEVDTENGNYDYLMFADYDMDHPEVVTELKNWGTWYVNTTNIDGFRLDAVKHIKYSFFPDWLTYVRNQTGKNLFAVGEFWSYDVNKLHNYITKTNGSMSLFDAPLHNNFYTASKSSGYFDMRYLLNNTLMKDQPSLAVTLVDNHDTQPGQSLQSWVEPWFKPLAYAFILTRQEGYPCVFYGDYYGIPKYNIPGLKSKIDPLLIARRDYAYGTQRDYIDHQDIIGWTREGIDTKPNSGLAALITDGPGGSKWMYVGKKHAGKVFYDLTGNRSDTVTINADGWGEFKVNGGSVSIWVAKTSNVTFTVNNATTTSGQNVYVVANIPELGNW

SEQ ID NO: 25945 - protein, 513 aa, Bacillus sp. TS-23
APINETMMQYFEWDLPNDGTLWTKVKNEAANLSSLGITALWLPPAYKGTSQSDVGYGVYDLYDLGEFNQKGTIRTKYGTKTQYIQAIQAAKAAGMQVYADVVFNHKAGADGTEFVDAVEVDPSNRNQETSGTYQIQAWTKFDFPGRGNTYSSFKWRWYHFDGTDWDESRKLNRIYKFRSTGKAWDWEVDTENGNYDYLMFADLDMDHPEVVTELKNWGTWYVETTNIDGFRLDAVKHIKYSFFPDWLTYVRNQTGKNLFAVGEFWSYDVEKLHNYITKTNGSMSLFDAPLHNNFYTASKSSGYFDMRYLLNNTLMKDQPSLAVTLVDNHDTQPGQSLQSWVEPWFKPLAYAFILTRQEGYPCVFYGDYYGIPKYNIPGLKSKIDPLLIARRDYAYGTQRDYIDHQDIIGWTREGIDTKPNSGLAALITDGPGGSKWMYVGKKHAGKVFYDLTGNRSDTVTINADGWGEFKVNGGSVSIWVAKTSNVTFTVNNATTTSGQNVYVVANIPELGNW

SEQ ID NO: 25946 - protein, 511 aa, Bacillus sp. TS-23
APINETMMQYFEWDLPNDGTLWTKVKNEAANLSSLGITALWLPPAWKGTSQSDVGYGVYDLYDLGEFNQKGTIRTKYGTKTQYIQAIQAAKAAGMQVYADVVFNHKAGADGTEFVDAVEVDPSNRNQETSGTYQIQAWTKFDFPGRGNTYSSFKWRWYHFDGTDWDESRKLNRIYKFSGKAWDWEVDTENGNYDYLMFADLDMDHPEVVTELKNWGTWYVNTTNIDGFRLDAVKHIKYSFFPDWLTYVRNQTGKNLFAVGEFWSYDVNKLHNYITKTNGSMSLFDAPLHNNFYTASKSSGYFDMRYLLNNTLMKDQPSLAVTLVDNHDTQPGQSLQSWVEPWFKPLAYAFILTRQEGYPCVFYGDYYGIPKYNIPGLKSKIDPLLIARRDYAYGTQRDYIDHQDIIGWTREGIDTKPNSGLAALITDGPGGSKWMYVGKKHAGKVFYDLTGNRSDTVTINADGWGEFKVNGGSVSIWVAKTSNVTFTVNNATTTSGQNVYVVANIPELGNW

SEQ ID NO: 25947 - protein, 511 aa, Bacillus sp. TS-23
APINETMMQYFEWDLPNDGTLWTKVKNEAANLSSLGITALWLPPAYKGTSQSDVGYGVYDLYDLGEFNQKGTIRTKYGTKTQYIQAIQAAKAAGMQVYADVVFNHKAGADGTEFVDAVEVDPSNRNQETSGTYQIQAWTKFDFPGRGNTYSSFKWRWYHFDGTDWDESRKLNRIYKFTGKAWDWEVDTENGNYDYLMFADYDMDHPEVVTELKNWGTWYVNTTNIDGFRLDAVKHIKYSFFPDWLTYVRNQTGKNLFAVGEFWSYDVNKLHNYITKTNGSMSLFDAPLHNNFYTASKSSGYFDMRYLLNNTLMKDQPSLAVTLVDNHDTQPGQSLQSWVEPWFKPLAYAFILTRQEGYPCVFYGDYYGIPKYNIPGLKSKIDPLLIARRDYAYGTQRDYIDHQDIIGWTREGIDTKPNSGLAALITDGPGGSKWMYVGKKHAGKVFYDLTGNRSDTVTINADGWGEFKVNGGSVSIWVAKTSNVTFTVNNATTTSGQNVYVVANIPELGNW

SEQ ID NO: 25948 - protein, 512 aa, Bacillus sp. TS-23
APINETMMQYFEWDLPNDGTLWTKVKNEAANLSSLGITALWLPPAYKGTSQSDVGYGVYDLYDLGEFNQKGTIRTKYGTKTQYIQAIQAAKAAGMQVYADVVFNHKAGADGTEFVDAVEVDPSNRNQETSGTYQIQAWTKFDFPGRGNTYSSFKWRWYHFDGTDWDESRKLNARIYKFSTKAWDWEVDTENGNYDYLMFADLDMDHPEVVTELKNWGTWYVNTTNIDGFRLDAVKHIKYSFFPDWLTYVRNQTGKNLFAVGEFWSYDVNKLHNYITKTNGSMSLFDAPLHNNFYTASKSSGYFDMRYLLNNTLMKDQPSLAVTLVDNHDTQPGQSLQSWVEPWFKPLAYAFILTRQEGYPCVFYGDYYGIPKYNIPGLKSKIDPLLIARRDYAYGTQRDYIDHQDIIGWTREGIDTKPNSGLAALITDGPGGSKWMYVGKKHAGKVFYDLTGNRSDTVTINADGWGEFKVNGGSVSIWVAKTSNVTFTVNNATTTSGQNVYVVANIPELGNW

SEQ ID NO: 25949 - protein, 513 aa, Bacillus sp. TS-23
APINETMMQYFEWDLPNDGTLWTKVKNEAANLSSLGITALWLPPAYKGTSQSDVGYGVYDLYDLGEFNQKGTIRTKYGTKTQYIRAIQAAKAAGMQVYADVVFNHKAGADGTEFVDAVEVDPSNRNQETSGTYQIQAWTKFDFPGRGNTYSSFKWRWYHFDGTDWDESRKLNRIYKFRSTGKAWDWEVDTENGNYDYLMFADLDMDHPEVVTELKNWGTWYVETTNIDGFRLDAVKHIKYSFFPDWLTYVRNQTGKNLFAVGEFWSYDVNKLHNYITKTNGSMSLFDAPLHNNFYTASKSSGYFDMRYLLNNTLMKDQPSLAVTLVDNHDTQPGQSLQSWVEPWFKPLAYAFILTRQEGYPCVFYGDYYGIPKYNIPGLKSKIDPLLIARRDYAYGTQRDYIDHQDIIGWTREGIDTKPNSGLAALITDGPGGSKWMYVGKKHAGKVFYDLTGNRSDTVTINADGWGEFKVNGGSVSIWVAKTSNVTFTVNNATTTSGQNVYVVANIPELGNW

SEQ ID NO: 25950 - protein, 511 aa, Bacillus sp. TS-23
APINETMMQYFEWDLPNDGTLWTKVKNEAANLSSLGITALWLPPAWKGTSQSDVGYGVYDLYDLGEFNQKGTIRTKYGTKTQYIQAIQAAKAAGMQVYADVVFNHKAGADGTEFVDAVEVDPSNRNQETSGTYQIQAWTKFDFPGRGNTYSSFKWRWYHFDGTDWDESRKLNRIYKFTGKAWDWEVDTENGNYDYLMFADLDMDHPEVVTELKNWGTWYVNTTNIDGFRLDAVKHIKYSFFPDWLTYVRNQTGKNLFAVGEFWSYDVNKLHNYITKTNGSMSLFDAPLHNNFYTASKSSGYFDMRYLLNNTLMKDQPSLAVTLVDNHDTQPGQSLQSWVEPWFKPLAYAFILTRQEGYPCVFYGDYYGIPKYNIPGLKSKIDPLLIARRDYAYGTQRDYIDHQDIIGWTREGIDTKPNSGLAALITDGPGGSKWMYVGKKHAGKVFYDLTGNRSDTVTINADGWGEFKVNGGSVSIWVAKTSNVTFTVNNATTTSGQNVYVVANIPELGNW

SEQ ID NO: 25951 - protein, 511 aa, Bacillus sp. TS-23
APINETMMQYFEWDLPNDGTLWTKVKNEAANLSSLGITALWLPPAYKGTSQSDVGYGVYDLYDLGEFNQKGTIRTKYGTKTQYIQAIQAAKAAGMQVYADVVFNHKAGADGTEFVDAVEVDPSNRNQETSGTYQIQAWTKFDFPGRGNTYSSFKWRWYHFDGTDWDESRKLNRIYKFSTKAWDWEVDTENGNYDYLMFADLDMDHPEVVTELKNWGTWYVNTTNIDGFRLDAVKHIKYSFFPDWLTYVRNQTGKNLFAVGEFWSYDVNKLHNYITKTNGSMSLFDAPLHNNFYTASKSSGYFDMRYLLNNTLMKDQPSLAVTLVDNHDTQPGQSLQSWVEPWFKPLAYAFILTRQEGYPCVFYGDYYGIPKYNIPGLKSKIDPLLIARRDYAYGTQRDYIDHQDIIGWTREGIDTKPNSGLAALITDGPGGSKWMYVGKKHAGKVFYDLTGNRSDTVTINADGWGEFKVNGGSVSIWVAKTSNVTFTVNNATTTSGQNVYVVANIPELGNW

SEQ ID NO: 25952 - protein, 511 aa, Bacillus sp. TS-23
APINETMMQYFEWDLPNDGTLWTKVKNEAANLSSLGITALWLPPAYKGTSQSDVGYGVYDLYDLGEFNQKGTIRTKYGTKTQYIQAIQAAKAAGMQVYADVVFNHKAGADGTEFVDAVEVDPSNRNQETSGTYQIQAWTKFDFPGRGNTYSSFKWRWYHFDGTDWDESRKLNRIYKFSGKAWDWEVDTENGNYDYLMFADLDMDHPEVVTELKNWGTWYVNTTNIDGFRLDAVKHIKYSFFPDWLTYVRNQTGKNLFAVGEFWSYDVNKLHNYITKTNGSMSLFDAPLHNNFYTASKSSGYFDMRYLLNNTLLKDQPSLAVTLVDNHDTQPGQSLQSWVEPWFKPLAYAFILTRQEGYPCVFYGDYYGIPKYNIPGLKSKIDPLLIARRDYAYGTQRDYIDHQDIIGWTREGIDTKPNSGLAALITDGPGGSKWMYVGKKHAGKVFYDLTGNRSDTVTINADGWGEFKVNGGSVSIWVAKTSNVTFTVNNATTTSGQNVYVVANIPELGNW

SEQ ID NO: 25953 - protein, 511 aa, Bacillus sp. TS-23
APINETMMQYFEWDLPNDGTLWTKVKNEAANLSSLGITALWLPPAWKGTSQSDVGYGVYDLYDLGEFNQKGTIRTKYGTKTQYIQAIQAAKAAGMQVYADVVFNHKAGADGTEFVDAVEVDPSNRNQETSGTYQIQAWTKFDFPGRGNTYSSFKWRWYHFDGTDWDESRKLNRIYKFRSKAWDWEVDTENGNYDYLMFADLDMDHPEVVTELKNWGTWYVNTTNIDGFRLDAVKHIKYSFFPDWLTYVRNQTGKNLFAVGEFWSYDVNKLHNYITKTNGSMSLFDAPLHNNFYTASKSSGYFDMRYLLNNTLMKDQPSLAVTLVDNHDTQPGQSLQSWVEPWFKPLAYAFILTRQEGYPCVFYGDYYGIPKYNIPGLKSKIDPLLIARRDYAYGTQRDYIDHQDIIGWTREGIDTKPNSGLAALITDGPGGSKWMYVGKKHAGKVFYDLTGNRSDTVTINADGWGEFKVNGGSVSIWVAKTSNVTFTVNNATTTSGQNVYVVANIPELGNW

SEQ ID NO: 25954 - protein, 511 aa, Bacillus sp. TS-23
APINETMMQYFEWDLPNDGTLWTKVKNEAANLSSLGITALWLPPAYKGTSQSDVGYGVYDLYDLGEFNQKGTIRTKYGTKTQYIQAIQAAKAAGMQVYADVVFNHKAGADGTEFVDAVEVDPSNRNQETSGTYQIQAWTKFDFPGRGNTYSSFKWRWYHFDGTDWDESRKLNRIYKFSGKAWDWEVDTENGNYDYLMFADYDMDHPEVVTELKNWGTWYVNTTNIDGFRLDAVKHIKYSFFPDWLTYVRNQTGKNLFAVGEFWSYDVNKLHNYITKTNGSMSLFDAPLHNNFYTASKSSGYFDMRYLLNNTLMKDQPSLAVTLVDNHDTQPGQSLQSWVEPWFKPLAYAFILTRQEGYPCVFYGDYYGIPKYNIPGLKSKIDPLLIARRDYAYGTQRDYIDHQDIIGWTREGIDTKPNSGLAALITDGPGGSKWMYVGKKHAGKVFYDLTGNRSDTVTINADGWGEFKVNGGSVSIWVAKTSNVTFTVNNATTTSGQNVYVVANIPELGNW

SEQ ID NO: 25955 - protein, 511 aa, Bacillus sp. TS-23
APINETMMQYFEWDLPNDGTLWTKVKNEAANLSSLGITALWLPPAYKGTSQSDVGYGVYDLYDLGEFNQKGTIRTKYGTKTQYIQAIQAAKAAGMQVYADVVFNHKAGADGTEFVDAVEVDPSNRNQETSGTYQIQAWTKFDFPGRGNTYSSFKWRWYHFDGTDWDESRKLNRIYKFTGKAWDWEVDTENGNYDYLMFADLDMDHPEVVTELKNWGTWYVNTTNIDGFRLDAVKHIKYSFFPDWLTYVRNQTGKNLFAVGEFWSYDVNKLHNYITKTNGSMSLFDAPLHNNFYTASKSSGYFDMRYLLNNTLLKDQPSLAVTLVDNHDTQPGQSLQSWVEPWFKPLAYAFILTRQEGYPCVFYGDYYGIPKYNIPGLKSKIDPLLIARRDYAYGTQRDYIDHQDIIGWTREGIDTKPNSGLAALITDGPGGSKWMYVGKKHAGKVFYDLTGNRSDTVTINADGWGEFKVNGGSVSIWVAKTSNVTFTVNNATTTSGQNVYVVANIPELGNW

SEQ ID NO: 25956 - protein, 513 aa, Bacillus sp. TS-23
APINETMMQYFEWDLPNDGTLWTKVKNEAANLSSLGITALWLPPAYKGTSQSDVGYGVYDLYDLGEFNQKGTIRTKYGTKTQYIRAIQAAKAAGMQVYADVVFNHKAGADGTEFVDAVEVDPSNRNQETSGTYQIQAWTKFDFPGRGNTYSSFKWRWYHFDGTDWDESRKLNRIYKFRSTGKAWDWEVDTENGNYDYLMFADLDMDHPEVVTELKNWGTWYVNTTNIDGFRLDAVKHIKYSFFPDWLTYVRNQTGKNLFAVGEFWSYDVEKLHNYITKTNGSMSLFDAPLHNNFYTASKSSGYFDMRYLLNNTLMKDQPSLAVTLVDNHDTQPGQSLQSWVEPWFKPLAYAFILTRQEGYPCVFYGDYYGIPKYNIPGLKSKIDPLLIARRDYAYGTQRDYIDHQDIIGWTREGIDTKPNSGLAALITDGPGGSKWMYVGKKHAGKVFYDLTGNRSDTVTINADGWGEFKVNGGSVSIWVAKTSNVTFTVNNATTTSGQNVYVVANIPELGNW

SEQ ID NO: 25957 - protein, 513 aa, Bacillus sp. TS-23
APINETMMQYFEWDLPNDGTLWTKVKNEAANLSSLGITALWLPPAYKGTSQSDVGYGVYDLYDLGEFNQKGTIRTKYGTKTQYIQAIQAAKAAGMQVYADVVFNHKAGADGTEFVDAVEVDPSNRNQETSGTYQIQAWTKFDFPGRGNTYSSFKWRWYHFDGTDWDESRKLNRIYKFRSTGKAWDWEVDTENGNYDYLMFADLDMDHPEVVTELKNWGTWYVRTTNIDGFRLDAVKHIKYSFFPDWLTYVRNQTGKNLFAVGEFWSYDVEKLHNYITKTRGSMSLFDAPLHNNFYTASKSSGYFDMRYLLNNTLMKDQPSLAVTLVDNHDTQPGQSLQSWVEPWFKPLAYAFILTRQEGYPCVFYGDYYGIPKYNIPGLKSKIDPLLIARRDYAYGTQRDYIDHQDIIGWTREGIDTKPNSGLAALITDGPGGSKWMYVGKKHAGKVFYDLTGNRSDTVTINADGWGEFKVNGGSVSIWVAKTSNVTFTVNNATTTSGQNVYVVANIPELGNW

SEQ ID NO: 25958 - protein, 513 aa, Bacillus sp. TS-23
APINETMMQYFEWDLPNDGTLWTKVKNEAANLSSLGITALWLPPAYKGTSQSDVGYGVYDLYDLGEFNQKGTIRTKYGTKTQYIQAIQAAKAAGMQVYADVVFNHKAGADGTEFVDAVEVDPSNRNQETSGTYQIQAWTKFDFPGRGNTYSSFKWRWYHFDGTDWDESRKLNRIYKFRSTGKAWDWEVDTENGNYDYLMFADLDMDHPEVVTELKNWGTWYVRTTNIDGFRLDAVKHIKYSFFPDWLTYVRNQTGKNLFAVGEFWSYDVRKLHNYITKTEGSMSLFDAPLHNNFYTASKSSGYFDMRYLLNNTLMKDQPSLAVTLVDNHDTQPGQSLQSWVEPWFKPLAYAFILTRQEGYPCVFYGDYYGIPKYNIPGLKSKIDPLLIARRDYAYGTQRDYIDHQDIIGWTREGIDTKPNSGLAALITDGPGGSKWMYVGKKHAGKVFYDLTGNRSDTVTINADGWGEFKVNGGSVSIWVAKTSNVTFTVNNATTTSGQNVYVVANIPELGNW

SEQ ID NO: 25959 - protein, 511 aa, Bacillus sp. TS-23
APINETMMQYFEWDLPNDGTLWTKVKNEAANLSSLGITALWLPPAYKGTSQSDVGYGVYDLYDLGEFNQKGTIRTKYGTKTQYIQAIQAAKAAGMQVYADVVFNHKAGADGTEFVDAVEVDPSNRNQETSGTYQIQAWTKFDFPGRGNTYSSFKWRWYHFDGTDWDESRKLNRIYKFRSKAWDWEVDTENGNYDYLMFADLDMDHPEVVTELKNWGTWYVNTTNIDGFRLDAVKHIKYSFFPDWLTYVRNQTGKNLFAVGEFWSYDVNKLHNYITKTNGSMSLFDAPLHNNFYTASKSSGYFDMQYLLNNTLMKDQPSLAVTLVDNHDTQPGQSLQSWVEPWFKPLAYAFILTRQEGYPCVFYGDYYGIPKYNIPGLKSKIDPLLIARRDYAYGTQRDYIDHQDIIGWTREGIDTKPNSGLAALITDGPGGSKWMYVGKKHAGKVFYDLTGNRSDTVTINADGWGEFKVNGGSVSIWVAKTSNVTFTVNNATTTSGQNVYVVANIPELGNW

SEQ ID NO: 25960 - protein, 513 aa, Bacillus sp. TS-23
APINETMMQYFEWDLPNDGTLWTKVKNEAANLSSLGITALWLPPAYKGTSQSDVGYGVYDLYDLGEFNQKGTIRTKYGTKTQYIQAIQAAKAAGMQVYADVVFNHKAGADGTEFVDAVEVDPSNRNQETSGTYQIQAWTKFDFPGRGNTYSSFKWRWYHFDGTDWDESRKLNRIYKFRSTGKAWDWEVDTENGNYDYLMFADLDMDHPEVVTELKNWGTWYVRTTNIDGFRLDAVKHIKYSFFPDWLTYVRNQTGKNLFAVGEFWSYDVEKLHNYITKTNGSMSLFDAPLHNNFYTASKSSGYFDMRYLLNNTLMKDQPSLAVTLVDNHDTQPGQSLQSWVEPWFKPLAYAFILTRQEGYPCVFYGDYYGIPKYNIPGLKSKIDPLLIARRDYAYGTQRDYIDHQDIIGWTREGIDTKPNSGLAALITDGPGGSKWMYVGKKHAGKVFYDLTGNRSDTVTINADGWGEFKVNGGSVSIWVAKTSNVTFTVNNATTTSGQNVYVVANIPELGNW

SEQ ID NO: 25961 - protein, 511 aa, Bacillus sp. TS-23
APINETMMQYFEWDLPNDGTLWTKVKNEAANLSSLGITALWLPPAYKGTSQSDVGYGVYDLYDLGEFNQKGTIRTKYGTKTQYIQAIQAAKAAGMQVYADVVFNHKAGADGTEFVDAVEVDPSNRNQETSGTYQIQAWTKFDFPGRGNTYSSFKWRWYHFDGTDWDESRKLNRIYKFTGKAWDWEVDTENGNYDYLMFADFDMDHPEVVTELKNWGTWYVNTTNIDGFRLDAVKHIKYSFFPDWLTYVRNQTGKNLFAVGEFWSYDVNKLHNYITKTNGSMSLFDAPLHNNFYTASKSSGYFDMRYLLNNTLMKDQPSLAVTLVDNHDTQPGQSLQSWVEPWFKPLAYAFILTRQEGYPCVFYGDYYGIPKYNIPGLKSKIDPLLIARRDYAYGTQRDYIDHQDIIGWTREGIDTKPNSGLAALITDGPGGSKWMYVGKKHAGKVFYDLTGNRSDTVTINADGWGEFKVNGGSVSIWVAKTSNVTFTVNNATTTSGQNVYVVANIPELGNW

SEQ ID NO: 25962 - protein, 511 aa, Bacillus sp. TS-23
APINETMMQYFEWDLPNDGTLWTKVKNEAANLSSLGITALWLPPAYKGTSQSDVGYGVYDLYDLGEFNQKGTIRTKYGTKTQYIQAIQAAKAAGMQVYADVVFNHKAGADGTEFVDAVEVDPSNRNQETSGTYQIQAWTKFDFPGRGNTYSSFKWRWYHFDGTDWDESRKLNRIYKFSGKAWDWEVDTENGNYDYLMFADFDMDHPEVVTELKNWGTWYVNTTNIDGFRLDAVKHIKYSFFPDWLTYVRNQTGKNLFAVGEFWSYDVNKLHNYITKTNGSMSLFDAPLHNNFYTASKSSGYFDMRYLLNNTLMKDQPSLAVTLVDNHDTQPGQSLQSWVEPWFKPLAYAFILTRQEGYPCVFYGDYYGIPKYNIPGLKSKIDPLLIARRDYAYGTQRDYIDHQDIIGWTREGIDTKPNSGLAALITDGPGGSKWMYVGKKHAGKVFYDLTGNRSDTVTINADGWGEFKVNGGSVSIWVAKTSNVTFTVNNATTTSGQNVYVVANIPELGNW

SEQ ID NO: 25963 - protein, 513 aa, Bacillus sp. TS-23
APINETMMQYFEWDLPNDGTLWTKVKNEAANLSSLGITALWLPPAYKGTSQSDVGYGVYDLYDLGEFNQKGTIRTKYGTKTQYIQAIQAAKAAGMQVYADVVFNHKAGADGTEFVDAVEVDPSNRNQETSGTYQIQAWTKFDFPGRGNTYSSFKWRWYHFDGTDWDESRKLNRIYKFRSTGKAWDWEVDTENGNYDYLMFADLDMDHPEVVTELKNWGTWYVETTNIDGFRLDAVKHIKYSFFPDWLTYVRNQTGKNLFAVGEFWSYDVEKLHNYITKTRGSMSLFDAPLHNNFYTASKSSGYFDMRYLLNNTLMKDQPSLAVTLVDNHDTQPGQSLQSWVEPWFKPLAYAFILTRQEGYPCVFYGDYYGIPKYNIPGLKSKIDPLLIARRDYAYGTQRDYIDHQDIIGWTREGIDTKPNSGLAALITDGPGGSKWMYVGKKHAGKVFYDLTGNRSDTVTINADGWGEFKVNGGSVSIWVAKTSNVTFTVNNATTTSGQNVYVVANIPELGNW

SEQ ID NO: 25964 - protein, 511 aa, Bacillus sp. TS-23
APINETMMQYFEWDLPNDGTLWTKVKNEAANLSSLGITALWLPPAYKGTSQSDVGYGVYDLYDLGEFNQKGTIRTKYGTKTQYIQAIQAAKAAGMQVYADVVFNHKAGADGTEFVDAVEVDPSNRNQETSGTYQIQAWTKFDFPGRGNTYSSFKWRWYHFDGTDWDESRKLNRIYKFTGKAWDWEVDTENGNYDYLMFADLDMDHPEVVTELKNWGTWYVNTTNIDGFRLDAVKHIKYSFFPDWLTYVRNQTGKNLFAVGEFWSYDVNKLHNYITKTNGSMSLFDAPLHNNFYTASKSSGYFDMQYLLNNTLMKDQPSLAVTLVDNHDTQPGQSLQSWVEPWFKPLAYAFILTRQEGYPCVFYGDYYGIPKYNIPGLKSKIDPLLIARRDYAYGTQRDYIDHQDIIGWTREGIDTKPNSGLAALITDGPGGSKWMYVGKKHAGKVFYDLTGNRSDTVTINADGWGEFKVNGGSVSIWVAKTSNVTFTVNNATTTSGQNVYVVANIPELGNW

SEQ ID NO: 25965 - protein, 513 aa, Bacillus sp. TS-23
APINETMMQYFEWDLPNDGTLWTKVKNEAANLSSLGITALWLPPAYKGTSQSDVGYGVYDLYDLGEFNQKGTIRTKYGTKTQYIRAIQAAKAAGMQVYADVVFNHKAGADGTEFVDAVEVDPSNRNQETSGTYQIQAWTKFDFPGRGNTYSSFKWRWYHFDGTDWDESRKLNRIYKFRSTGKAWDWEVDTENGNYDYLMFADLDMDHPEVVTELKNWGTWYVETTNIDGFRLDAVKHIKYSFFPDWLTYVRNQTGKNLFAVGEFWSYDVNKLHNYITKTEGSMSLFDAPLHNNFYTASKSSGYFDMRYLLNNTLMKDQPSLAVTLVDNHDTQPGQSLQSWVEPWFKPLAYAFILTRQEGYPCVFYGDYYGIPKYNIPGLKSKIDPLLIARRDYAYGTQRDYIDHQDIIGWTREGIDTKPNSGLAALITDGPGGSKWMYVGKKHAGKVFYDLTGNRSDTVTINADGWGEFKVNGGSVSIWVAKTSNVTFTVNNATTTSGQNVYVVANIPELGNW

SEQ ID NO: 25966 - protein, 513 aa, Bacillus sp. TS-23
APINETMMQYFEWDLPNDGTLWTKVKNEAANLSSLGITALWLPPAYKGTSQSDVGYGVYDLYDLGEFNQKGTIRTKYGTKTQYIQAIQAAKAAGMQVYADVVFNHKAGADGTEFVDAVEVDPSNRNQETSGTYQIQAWTKFDFPGRGNTYSSFKWRWYHFDGTDWDESRKLNRIYKFRSTGKAWDWEVDTENGNYDYLMFADLDMDHPEVVTELKNWGTWYVRTTNIDGFRLDAVKHIKYSFFPDWLTYVRNQTGKNLFAVGEFWSYDVRKLHNYITKTNGSMSLFDAPLHNNFYTASKSSGYFDMRYLLNNTLMKDQPSLAVTLVDNHDTQPGQSLQSWVEPWFKPLAYAFILTRQEGYPCVFYGDYYGIPKYNIPGLKSKIDPLLIARRDYAYGTQRDYIDHQDIIGWTREGIDTKPNSGLAALITDGPGGSKWMYVGKKHAGKVFYDLTGNRSDTVTINADGWGEFKVNGGSVSIWVAKTSNVTFTVNNATTTSGQNVYVVANIPELGNW

SEQ ID NO: 25967 - protein, 513 aa, Bacillus sp. TS-23
APINETMMQYFEWDLPNDGTLWTKVKNEAANLSSLGITALWLPPAYKGTSQSDVGYGVYDLYDLGEFNQKGTIRTKYGTKTQYIRAIQAAKAAGMQVYADVVFNHKAGADGTEFVDAVEVDPSNRNQETSGTYQIQAWTKFDFPGRGNTYSSFKWRWYHFDGTDWDESRKLNRIYKFRSTGKAWDWEVDTENGNYDYLMFADLDMDHPEVVTELKNWGTWYVNTTNIDGFRLDAVKHIKYSFFPDWLTYVRNQTGKNLFAVGEFWSYDVEKLHNYITKTEGSMSLFDAPLHNNFYTASKSSGYFDMRYLLNNTLMKDQPSLAVTLVDNHDTQPGQSLQSWVEPWFKPLAYAFILTRQEGYPCVFYGDYYGIPKYNIPGLKSKIDPLLIARRDYAYGTQRDYIDHQDIIGWTREGIDTKPNSGLAALITDGPGGSKWMYVGKKHAGKVFYDLTGNRSDTVTINADGWGEFKVNGGSVSIWVAKTSNVTFTVNNATTTSGQNVYVVANIPELGNW

SEQ ID NO: 25968 - protein, 511 aa, Bacillus sp. TS-23
APINETMMQYFEWDLPNDGTLWTKVKNEAANLSSLGITALWLPPAYKGTSQSDVGYGVYDLYDLGEFNQKGTIRTKYGTKTQYIQAIQAAKAAGMQVYADVVFNHKAGADGTEFVDAVEVDPSNRNQETSGTYQIQAWTKFDFPGRGNTYSSFKWRWYHFDGTDWDESRKLNRIYKFRSKAWDWEVDTENGNYDYLMFADLDMDHPEVVTELKNWGTWYVNTTNIDGFRLDAVKHIKYSFFPDWLTYVRNQTGKNLFAVGEFWSYDVNKLHNYITKTNGSMSLFDAPLHNNFYTASKSSGYFDMRYLLNNTLLKDQPSLAVTLVDNHDTQPGQSLQSWVEPWFKPLAYAFILTRQEGYPCVFYGDYYGIPKYNIPGLKSKIDPLLIARRDYAYGTQRDYIDHQDIIGWTREGIDTKPNSGLAALITDGPGGSKWMYVGKKHAGKVFYDLTGNRSDTVTINADGWGEFKVNGGSVSIWVAKTSNVTFTVNNATTTSGQNVYVVANIPELGNW

SEQ ID NO: 25969 - protein, 512 aa, Bacillus sp. TS-23
APINETMMQYFEWDLPNDGTLWTKVKNEAANLSSLGITALWLPPAYKGTSQSDVGYGVYDLYDLGEFNQKGTIRTKYGTKTQYIQAIQAAKAAGMQVYADVVFNHKAGADGTEFVDAVEVDPSNRNQETSGTYQIQAWTKFDFPGRGNTYSSFKWRWYHFDGTDWDESRKLNLRIYKFSTKAWDWEVDTENGNYDYLMFADLDMDHPEVVTELKNWGTWYVNTTNIDGFRLDAVKHIKYSFFPDWLTYVRNQTGKNLFAVGEFWSYDVNKLHNYITKTNGSMSLFDAPLHNNFYTASKSSGYFDMRYLLNNTLMKDQPSLAVTLVDNHDTQPGQSLQSWVEPWFKPLAYAFILTRQEGYPCVFYGDYYGIPKYNIPGLKSKIDPLLIARRDYAYGTQRDYIDHQDIIGWTREGIDTKPNSGLAALITDGPGGSKWMYVGKKHAGKVFYDLTGNRSDTVTINADGWGEFKVNGGSVSIWVAKTSNVTFTVNNATTTSGQNVYVVANIPELGNW

SEQ ID NO: 25970 - protein, 513 aa, Bacillus sp. TS-23
APINETMMQYFEWDLPNDGTLWTKVKNEAANLSSLGITALWLPPAYKGTSQSDVGYGVYDLYDLGEFNQKGTIRTKYGTKTQYIEAIQAAKAAGMQVYADVVFNHKAGADGTEFVDAVEVDPSNRNQETSGTYQIQAWTKFDFPGRGNTYSSFKWRWYHFDGTDWDESRKLNRIYKFRSTGKAWDWEVDTENGNYDYLMFADLDMDHPEVVTELKNWGTWYVNTTNIDGFRLDAVKHIKYSFFPDWLTYVRNQTGKNLFAVGEFWSYDVEKLHNYITKTEGSMSLFDAPLHNNFYTASKSSGYFDMRYLLNNTLMKDQPSLAVTLVDNHDTQPGQSLQSWVEPWFKPLAYAFILTRQEGYPCVFYGDYYGIPKYNIPGLKSKIDPLLIARRDYAYGTQRDYIDHQDIIGWTREGIDTKPNSGLAALITDGPGGSKWMYVGKKHAGKVFYDLTGNRSDTVTINADGWGEFKVNGGSVSIWVAKTSNVTFTVNNATTTSGQNVYVVANIPELGNW

SEQ ID NO: 25971 - protein, 513 aa, Bacillus sp. TS-23
APINETMMQYFEWDLPNDGTLWTKVKNEAANLSSLGITALWLPPAYKGTSQSDVGYGVYDLYDLGEFNQKGTIRTKYGTKTQYIEAIQAAKAAGMQVYADVVFNHKAGADGTEFVDAVEVDPSNRNQETSGTYQIQAWTKFDFPGRGNTYSSFKWRWYHFDGTDWDESRKLNRIYKFRSTGKAWDWEVDTENGNYDYLMFADLDMDHPEVVTELKNWGTWYVRTTNIDGFRLDAVKHIKYSFFPDWLTYVRNQTGKNLFAVGEFWSYDVNKLHNYITKTEGSMSLFDAPLHNNFYTASKSSGYFDMRYLLNNTLMKDQPSLAVTLVDNHDTQPGQSLQSWVEPWFKPLAYAFILTRQEGYPCVFYGDYYGIPKYNIPGLKSKIDPLLIARRDYAYGTQRDYIDHQDIIGWTREGIDTKPNSGLAALITDGPGGSKWMYVGKKHAGKVFYDLTGNRSDTVTINADGWGEFKVNGGSVSIWVAKTSNVTFTVNNATTTSGQNVYVVANIPELGNW

SEQ ID NO: 25972 - protein, 513 aa, Bacillus sp. TS-23
APINETMMQYFEWDLPNDGTLWTKVKNEAANLSSLGITALWLPPAYKGTSQSDVGYGVYDLYDLGEFNQKGTIRTKYGTKTQYIEAIQAAKAAGMQVYADVVFNHKAGADGTEFVDAVEVDPSNRNQETSGTYQIQAWTKFDFPGRGNTYSSFKWRWYHFDGTDWDESRKLNRIYKFRSTGKAWDWEVDTENGNYDYLMFADLDMDHPEVVTELKNWGTWYVNTTNIDGFRLDAVKHIKYSFFPDWLTYVRNQTGKNLFAVGEFWSYDVEKLHNYITKTRGSMSLFDAPLHNNFYTASKSSGYFDMRYLLNNTLMKDQPSLAVTLVDNHDTQPGQSLQSWVEPWFKPLAYAFILTRQEGYPCVFYGDYYGIPKYNIPGLKSKIDPLLIARRDYAYGTQRDYIDHQDIIGWTREGIDTKPNSGLAALITDGPGGSKWMYVGKKHAGKVFYDLTGNRSDTVTINADGWGEFKVNGGSVSIWVAKTSNVTFTVNNATTTSGQNVYVVANIPELGNW

SEQ ID NO: 25973 - protein, 513 aa, Bacillus sp. TS-23
APINETMMQYFEWDLPNDGTLWTKVKNEAANLSSLGITALWLPPAYKGTSQSDVGYGVYDLYDLGEFNQKGTIRTKYGTKTQYIEAIQAAKAAGMQVYADVVFNHKAGADGTEFVDAVEVDPSNRNQETSGTYQIQAWTKFDFPGRGNTYSSFKWRWYHFDGTDWDESRKLNRIYKFRSTGKAWDWEVDTENGNYDYLMFADLDMDHPEVVTELKNWGTWYVETTNIDGFRLDAVKHIKYSFFPDWLTYVRNQTGKNLFAVGEFWSYDVNKLHNYITKTEGSMSLFDAPLHNNFYTASKSSGYFDMRYLLNNTLMKDQPSLAVTLVDNHDTQPGQSLQSWVEPWFKPLAYAFILTRQEGYPCVFYGDYYGIPKYNIPGLKSKIDPLLIARRDYAYGTQRDYIDHQDIIGWTREGIDTKPNSGLAALITDGPGGSKWMYVGKKHAGKVFYDLTGNRSDTVTINADGWGEFKVNGGSVSIWVAKTSNVTFTVNNATTTSGQNVYVVANIPELGNW

SEQ ID NO: 25974 - protein, 513 aa, Bacillus sp. TS-23
APINETMMQYFEWDLPNDGTLWTKVKNEAANLSSLGITALWLPPAYKGTSQSDVGYGVYDLYDLGEFNQKGTIRTKYGTKTQYIEAIQAAKAAGMQVYADVVFNHKAGADGTEFVDAVEVDPSNRNQETSGTYQIQAWTKFDFPGRGNTYSSFKWRWYHFDGTDWDESRKLNRIYKFRSTGKAWDWEVDTENGNYDYLMFADLDMDHPEVVTELKNWGTWYVNTTNIDGFRLDAVKHIKYSFFPDWLTYVRNQTGKNLFAVGEFWSYDVRKLHNYITKTNGSMSLFDAPLHNNFYTASKSSGYFDMRYLLNNTLMKDQPSLAVTLVDNHDTQPGQSLQSWVEPWFKPLAYAFILTRQEGYPCVFYGDYYGIPKYNIPGLKSKIDPLLIARRDYAYGTQRDYIDHQDIIGWTREGIDTKPNSGLAALITDGPGGSKWMYVGKKHAGKVFYDLTGNRSDTVTINADGWGEFKVNGGSVSIWVAKTSNVTFTVNNATTTSGQNVYVVANIPELGNW

SEQ ID NO: 25975 - protein, 513 aa, Bacillus sp. TS-23
APINETMMQYFEWDLPNDGTLWTKVKNEAANLSSLGITALWLPPAYKGTSQSDVGYGVYDLYDLGEFNQKGTIRTKYGTKTQYIRAIQAAKAAGMQVYADVVFNHKAGADGTEFVDAVEVDPSNRNQETSGTYQIQAWTKFDFPGRGNTYSSFKWRWYHFDGTDWDESRKLNRIYKFRSTGKAWDWEVDTENGNYDYLMFADLDMDHPEVVTELKNWGTWYVNTTNIDGFRLDAVKHIKYSFFPDWLTYVRNQTGKNLFAVGEFWSYDVRKLHNYITKTEGSMSLFDAPLHNNFYTASKSSGYFDMRYLLNNTLMKDQPSLAVTLVDNHDTQPGQSLQSWVEPWFKPLAYAFILTRQEGYPCVFYGDYYGIPKYNIPGLKSKIDPLLIARRDYAYGTQRDYIDHQDIIGWTREGIDTKPNSGLAALITDGPGGSKWMYVGKKHAGKVFYDLTGNRSDTVTINADGWGEFKVNGGSVSIWVAKTSNVTFTVNNATTTSGQNVYVVANIPELGNW

SEQ ID NO: 25976 - protein, 513 aa, Bacillus sp. TS-23
APINETMMQYFEWDLPNDGTLWTKVKNEAANLSSLGITALWLPPAYKGTSQSDVGYGVYDLYDLGEFNQKGTIRTKYGTKTQYIEAIQAAKAAGMQVYADVVFNHKAGADGTEFVDAVEVDPSNRNQETSGTYQIQAWTKFDFPGRGNTYSSFKWRWYHFDGTDWDESRKLNRIYKFRSTGKAWDWEVDTENGNYDYLMFADLDMDHPEVVTELKNWGTWYVRTTNIDGFRLDAVKHIKYSFFPDWLTYVRNQTGKNLFAVGEFWSYDVNKLHNYITKTRGSMSLFDAPLHNNFYTASKSSGYFDMRYLLNNTLMKDQPSLAVTLVDNHDTQPGQSLQSWVEPWFKPLAYAFILTRQEGYPCVFYGDYYGIPKYNIPGLKSKIDPLLIARRDYAYGTQRDYIDHQDIIGWTREGIDTKPNSGLAALITDGPGGSKWMYVGKKHAGKVFYDLTGNRSDTVTINADGWGEFKVNGGSVSIWVAKTSNVTFTVNNATTTSGQNVYVVANIPELGNW

SEQ ID NO: 25977 - protein, 513 aa, Bacillus sp. TS-23
APINETMMQYFEWDLPNDGTLWTKVKNEAANLSSLGITALWLPPAYKGTSQSDVGYGVYDLYDLGEFNQKGTIRTKYGTKTQYIEAIQAAKAAGMQVYADVVFNHKAGADGTEFVDAVEVDPSNRNQETSGTYQIQAWTKFDFPGRGNTYSSFKWRWYHFDGTDWDESRKLNRIYKFRSTGKAWDWEVDTENGNYDYLMFADLDMDHPEVVTELKNWGTWYVNTTNIDGFRLDAVKHIKYSFFPDWLTYVRNQTGKNLFAVGEFWSYDVRKLHNYITKTEGSMSLFDAPLHNNFYTASKSSGYFDMRYLLNNTLMKDQPSLAVTLVDNHDTQPGQSLQSWVEPWFKPLAYAFILTRQEGYPCVFYGDYYGIPKYNIPGLKSKIDPLLIARRDYAYGTQRDYIDHQDIIGWTREGIDTKPNSGLAALITDGPGGSKWMYVGKKHAGKVFYDLTGNRSDTVTINADGWGEFKVNGGSVSIWVAKTSNVTFTVNNATTTSGQNVYVVANIPELGNW

SEQ ID NO: 25978 - protein, 513 aa, Bacillus sp. TS-23
APINETMMQYFEWDLPNDGTLWTKVKNEAANLSSLGITALWLPPAYKGTSQSDVGYGVYDLYDLGEFNQKGTIRTKYGTKTQYIRAIQAAKAAGMQVYADVVFNHKAGADGTEFVDAVEVDPSNRNQETSGTYQIQAWTKFDFPGRGNTYSSFKWRWYHFDGTDWDESRKLNRIYKFRSTGKAWDWEVDTENGNYDYLMFADLDMDHPEVVTELKNWGTWYVETTNIDGFRLDAVKHIKYSFFPDWLTYVRNQTGKNLFAVGEFWSYDVNKLHNYITKTRGSMSLFDAPLHNNFYTASKSSGYFDMRYLLNNTLMKDQPSLAVTLVDNHDTQPGQSLQSWVEPWFKPLAYAFILTRQEGYPCVFYGDYYGIPKYNIPGLKSKIDPLLIARRDYAYGTQRDYIDHQDIIGWTREGIDTKPNSGLAALITDGPGGSKWMYVGKKHAGKVFYDLTGNRSDTVTINADGWGEFKVNGGSVSIWVAKTSNVTFTVNNATTTSGQNVYVVANIPELGNW

SEQ ID NO: 25979 - protein, 511 aa, Bacillus sp. TS-23
APINETMMQYFEWDLPNDGTLWTKVKNEAANLSSLGITALWLPPAYKGTSQSDVGYGVYDLYDLGEFNQKGTIRTKYGTKTQYIQAIQAAKAAGMQVYADVVFNHKAGADGTEFVDAVEVDPSNRNQETSGTYQIQAWTKFDFPGRGNTYSSFKWRWYHFDGTDWDESRKLNRIYKFSGKAWDWEVDTENGNYDYLMFADLDMDHPEVVTELKNWGTWYVNTTNIDGFRLDAVKHIKYSFFPDWLTYVRNQTGKNLFAVGEFWSYDVNKLHNYITKTNGSMSLFDAPLHNNFYTASKSSGYFDMWYLLNNTLMKDQPSLAVTLVDNHDTQPGQSLQSWVEPWFKPLAYAFILTRQEGYPCVFYGDYYGIPKYNIPGLKSKIDPLLIARRDYAYGTQRDYIDHQDIIGWTREGIDTKPNSGLAALITDGPGGSKWMYVGKKHAGKVFYDLTGNRSDTVTINADGWGEFKVNGGSVSIWVAKTSNVTFTVNNATTTSGQNVYVVANIPELGNW

SEQ ID NO: 25980 - protein, 513 aa, Bacillus sp. TS-23
APINETMMQYFEWDLPNDGTLWTKVKNEAANLSSLGITALWLPPAYKGTSQSDVGYGVYDLYDLGEFNQKGTIRTKYGTKTQYIRAIQAAKAAGMQVYADVVFNHKAGADGTEFVDAVEVDPSNRNQETSGTYQIQAWTKFDFPGRGNTYSSFKWRWYHFDGTDWDESRKLNRIYKFRSTGKAWDWEVDTENGNYDYLMFADLDMDHPEVVTELKNWGTWYVRTTNIDGFRLDAVKHIKYSFFPDWLTYVRNQTGKNLFAVGEFWSYDVNKLHNYITKTEGSMSLFDAPLHNNFYTASKSSGYFDMRYLLNNTLMKDQPSLAVTLVDNHDTQPGQSLQSWVEPWFKPLAYAFILTRQEGYPCVFYGDYYGIPKYNIPGLKSKIDPLLIARRDYAYGTQRDYIDHQDIIGWTREGIDTKPNSGLAALITDGPGGSKWMYVGKKHAGKVFYDLTGNRSDTVTINADGWGEFKVNGGSVSIWVAKTSNVTFTVNNATTTSGQNVYVVANIPELGNW

SEQ ID NO: 25981 - protein, 487 aa, Bacillus sp. TS-23
APINETMMQYFEWDLPNDGTLWTKVKNEAANLSSLGITALWLPPAYKGTSQSDVGYGVYDLYDLGEFNQKGTIRTKYGTKTQYIEAIQAAKAAGMQVYADVVFNHKAGADGTEFVDAVEVDPSNRNQETSGTYQIQAWTKFDFPGRGNTYSSFKWRWYHFDGTDWDESRKLNRIYKFRSTGKAWDWEVDTENGNYDYLMFADLDMDHPEVVTELKNWGTWYVETTNIDGFRLDAVKHIKYSFFPDWLTYVRNQTGKNLFAVGEFWSYDVRKLHNYITKTEGSMSLFDAPLHNNFYTASKSSGYFDMRYLLNNTLMKDQPSLAVTLVDNHDTQPGQSLQSWVEPWFKPLAYAFILTRQEGYPCVFYGDYYGIPKYNIPGLKSKIDPLLIARRDYAYGTQRDYIDHQDIIGWTREGIDTKPNSGLAALITDGPGGSKWMYVGKKHAGKVFYDLTGNRSDTVTINADGWGEFKVNGGSVSIWVAKTSNVT

SEQ ID NO: 25982 - protein, 487 aa, Bacillus sp. TS-23
APINETMMQYFEWDLPNDGTLWTKVKNEAANLSSLGITALWLPPAYKGTSQSDVGYGVYDLYDLGEFNQKGTIRTKYGTKTQYIRAIQAAKAAGMQVYADVVFNHKAGADGTEFVDAVEVDPSNRNQETSGTYQIQAWTKFDFPGRGNTYSSFKWRWYHFDGTDWDESRKLNRIYKFRSTGKAWDWEVDTENGNYDYLMFADLDMDHPEVVTELKNWGTWYVRTTNIDGFRLDAVKHIKYSFFPDWLTYVRNQTGKNLFAVGEFWSYDVRKLHNYITKTEGSMSLFDAPLHNNFYTASKSSGYFDMRYLLNNTLMKDQPSLAVTLVDNHDTQPGQSLQSWVEPWFKPLAYAFILTRQEGYPCVFYGDYYGIPKYNIPGLKSKIDPLLIARRDYAYGTQRDYIDHQDIIGWTREGIDTKPNSGLAALITDGPGGSKWMYVGKKHAGKVFYDLTGNRSDTVTINADGWGEFKVNGGSVSIWVAKTSNVT

SEQ ID NO: 25983 - protein, 487 aa, Bacillus sp. TS-23
APINETMMQYFEWDLPNDGTLWTKVKNEAANLSSLGITALWLPPAYKGTSQSDVGYGVYDLYDLGEFNQKGTIRTKYGTKTQYIRAIQAAKAAGMQVYADVVFNHKAGADGTEFVDAVEVDPSNRNQETSGTYQIQAWTKFDFPGRGNTYSSFKWRWYHFDGTDWDESRKLNRIYKFRSTGKAWDWEVDTENGNYDYLMFADLDMDHPEVVTELKNWGTWYVETTNIDGFRLDAVKHIKYSFFPDWLTYVRNQTGKNLFAVGEFWSYDVRKLHNYITKTEGSMSLFDAPLHNNFYTASKSSGYFDMRYLLNNTLMKDQPSLAVTLVDNHDTQPGQSLQSWVEPWFKPLAYAFILTRQEGYPCVFYGDYYGIPKYNIPGLKSKIDPLLIARRDYAYGTQRDYIDHQDIIGWTREGIDTKPNSGLAALITDGPGGSKWMYVGKKHAGKVFYDLTGNRSDTVTINADGWGEFKVNGGSVSIWVAKTSNVT

SEQ ID NO: 25984 - protein, 487 aa, Bacillus sp. TS-23
APINETMMQYFEWDLPNDGTLWTKVKNEAANLSSLGITALWLPPAYKGTSQSDVGYGVYDLYDLGEFNQKGTIRTKYGTKTQYIEAIQAAKAAGMQVYADVVFNHKAGADGTEFVDAVEVDPSNRNQETSGTYQIQAWTKFDFPGRGNTYSSFKWRWYHFDGTDWDESRKLNRIYKFRSTGKAWDWEVDTENGNYDYLMFADLDMDHPEVVTELKNWGTWYVRTTNIDGFRLDAVKHIKYSFFPDWLTYVRNQTGKNLFAVGEFWSYDVRKLHNYITKTRGSMSLFDAPLHNNFYTASKSSGYFDMRYLLNNTLMKDQPSLAVTLVDNHDTQPGQSLQSWVEPWFKPLAYAFILTRQEGYPCVFYGDYYGIPKYNIPGLKSKIDPLLIARRDYAYGTQRDYIDHQDIIGWTREGIDTKPNSGLAALITDGPGGSKWMYVGKKHAGKVFYDLTGNRSDTVTINADGWGEFKVNGGSVSIWVAKTSNVT

SEQ ID NO: 25985 - protein, 487 aa, Bacillus sp. TS-23
APINETMMQYFEWDLPNDGTLWTKVKNEAANLSSLGITALWLPPAYKGTSQSDVGYGVYDLYDLGEFNQKGTIRTKYGTKTQYIRAIQAAKAAGMQVYADVVFNHKAGADGTEFVDAVEVDPSNRNQETSGTYQIQAWTKFDFPGRGNTYSSFKWRWYHFDGTDWDESRKLNRIYKFRSTGKAWDWEVDTENGNYDYLMFADLDMDHPEVVTELKNWGTWYVRTTNIDGFRLDAVKHIKYSFFPDWLTYVRNQTGKNLFAVGEFWSYDVRKLHNYITKTNGSMSLFDAPLHNNFYTASKSSGYFDMRYLLNNTLMKDQPSLAVTLVDNHDTQPGQSLQSWVEPWFKPLAYAFILTRQEGYPCVFYGDYYGIPKYNIPGLKSKIDPLLIARRDYAYGTQRDYIDHQDIIGWTREGIDTKPNSGLAALITDGPGGSKWMYVGKKHAGKVFYDLTGNRSDTVTINADGWGEFKVNGGSVSIWVAKTSNVT

SEQ ID NO: 25986 - protein, 487 aa, Bacillus sp. TS-23
APINETMMQYFEWDLPNDGTLWTKVKNEAANLSSLGITALWLPPAYKGTSQSDVGYGVYDLYDLGEFNQKGTIRTKYGTKTQYIRAIQAAKAAGMQVYADVVFNHKAGADGTEFVDAVEVDPSNRNQETSGTYQIQAWTKFDFPGRGNTYSSFKWRWYHFDGTDWDESRKLNRIYKFRSTGKAWDWEVDTENGNYDYLMFADLDMDHPEVVTELKNWGTWYVRTTNIDGFRLDAVKHIKYSFFPDWLTYVRNQTGKNLFAVGEFWSYDVEKLHNYITKTNGSMSLFDAPLHNNFYTASKSSGYFDMRYLLNNTLMKDQPSLAVTLVDNHDTQPGQSLQSWVEPWFKPLAYAFILTRQEGYPCVFYGDYYGIPKYNIPGLKSKIDPLLIARRDYAYGTQRDYIDHQDIIGWTREGIDTKPNSGLAALITDGPGGSKWMYVGKKHAGKVFYDLTGNRSDTVTINADGWGEFKVNGGSVSIWVAKTSNVT

SEQ ID NO: 25987 - protein, 487 aa, Bacillus sp. TS-23
APINETMMQYFEWDLPNDGTLWTKVKNEAANLSSLGITALWLPPAYKGTSQSDVGYGVYDLYDLGEFNQKGTIRTKYGTKTQYIRAIQAAKAAGMQVYADVVFNHKAGADGTEFVDAVEVDPSNRNQETSGTYQIQAWTKFDFPGRGNTYSSFKWRWYHFDGTDWDESRKLNRIYKFRSTGKAWDWEVDTENGNYDYLMFADLDMDHPEVVTELKNWGTWYVETTNIDGFRLDAVKHIKYSFFPDWLTYVRNQTGKNLFAVGEFWSYDVEKLHNYITKTNGSMSLFDAPLHNNFYTASKSSGYFDMRYLLNNTLMKDQPSLAVTLVDNHDTQPGQSLQSWVEPWFKPLAYAFILTRQEGYPCVFYGDYYGIPKYNIPGLKSKIDPLLIARRDYAYGTQRDYIDHQDIIGWTREGIDTKPNSGLAALITDGPGGSKWMYVGKKHAGKVFYDLTGNRSDTVTINADGWGEFKVNGGSVSIWVAKTSNVT

SEQ ID NO: 25988 - protein, 487 aa, 282
APINETMMQYFEWDLPNDGTLWTKVKNEAANLSSLGITALWLPPAYKGTSQSDVGYGVYDLYDLGEFNQKGTIRTKYGTKTQYIRAIQAAKAAGMQVYADVVFNHKAGADGTEFVDAVEVDPSNRNQETSGTYQIQAWTKFDFPGRGNTYSSFKWRWYHFDGTDWDESRKLNRIYKFRSTGKAWDWEVDTENGNYDYLMFADLDMDHPEVVTELKNWGTWYVETTNIDGFRLDAVKHIKYSFFPDWLTYVRNQTGKNLFAVGEFWSYDVRKLHNYITKTNGSMSLFDAPLHNNFYTASKSSGYFDMRYLLNNTLMKDQPSLAVTLVDNHDTQPGQSLQSWVEPWFKPLAYAFILTRQEGYPCVFYGDYYGIPKYNIPGLKSKIDPLLIARRDYAYGTQRDYIDHQDIIGWTREGIDTKPNSGLAALITDGPGGSKWMYVGKKHAGKVFYDLTGNRSDTVTINADGWGEFKVNGGSVSIWVAKTSNVT

SEQ ID NO: 25989 - protein, 487 aa, Bacillus sp. TS-23
APINETMMQYFEWDLPNDGTLWTKVKNEAANLSSLGITALWLPPAYKGTSQSDVGYGVYDLYDLGEFNQKGTIRTKYGTKTQYIRAIQAAKAAGMQVYADVVFNHKAGADGTEFVDAVEVDPSNRNQETSGTYQIQAWTKFDFPGRGNTYSSFKWRWYHFDGTDWDESRKLNRIYKFRSTGKAWDWEVDTENGNYDYLMFADLDMDHPEVVTELKNWGTWYVETTNIDGFRLDAVKHIKYSFFPDWLTYVRNQTGKNLFAVGEFWSYDVEKLHNYITKTEGSMSLFDAPLHNNFYTASKSSGYFDMRYLLNNTLMKDQPSLAVTLVDNHDTQPGQSLQSWVEPWFKPLAYAFILTRQEGYPCVFYGDYYGIPKYNIPGLKSKIDPLLIARRDYAYGTQRDYIDHQDIIGWTREGIDTKPNSGLAALITDGPGGSKWMYVGKKHAGKVFYDLTGNRSDTVTINADGWGEFKVNGGSVSIWVAKTSNVT

SEQ ID NO: 25990 - protein, 487 aa, Bacillus sp. TS-23
APINETMMQYFEWDLPNDGTLWTKVKNEAANLSSLGITALWLPPAYKGTSQSDVGYGVYDLYDLGEFNQKGTIRTKYGTKTQYIRAIQAAKAAGMQVYADVVFNHKAGADGTEFVDAVEVDPSNRNQETSGTYQIQAWTKFDFPGRGNTYSSFKWRWYHFDGTDWDESRKLNRIYKFRSTGKAWDWEVDTENGNYDYLMFADLDMDHPEVVTELKNWGTWYVETTNIDGFRLDAVKHIKYSFFPDWLTYVRNQTGKNLFAVGEFWSYDVRKLHNYITKTRGSMSLFDAPLHNNFYTASKSSGYFDMRYLLNNTLMKDQPSLAVTLVDNHDTQPGQSLQSWVEPWFKPLAYAFILTRQEGYPCVFYGDYYGIPKYNIPGLKSKIDPLLIARRDYAYGTQRDYIDHQDIIGWTREGIDTKPNSGLAALITDGPGGSKWMYVGKKHAGKVFYDLTGNRSDTVTINADGWGEFKVNGGSVSIWVAKTSNVT

SEQ ID NO: 25991 - protein, 485 aa, Bacillus sp. TS-23
APINETMMQYFEWDLPNDGTLWTKVKNEAANLSSLGITALWLPPAWKGTSQSDVGYGAYDLYDLGEFNQKGTIRTKYGTKTQYIQAIQAAKAAGMQVYADVVFNHKAGADGTEFVDAVEVDPSNRNQETSGTYQIQAWTKFDFPGRGNTYSSFKWRWYHFDGTDWDESRKLNRIYKFRSKAWDWEVDTENGNYDYLMFADYDMDHPEVVTELKNWGTWYVNTTNIDGFRLDAVKHIKYSFFPDWLTYVRNQTGKNLFAVGEFWSYDVNKLHNYITKTNGSMSLFDAPLHNNFYTASKSSGYFDMRYLLNNTLMKDQPSLAVTLVDNHDTQPGQSLQSWVEPWFKPLAYAFILTRQEGYPCVFYGDYYGIPKYNIPGLKSKIDPLLEARRDYAYGTQRDYIDHQDIIGWTREGIDTKPNSGLAALITDGPGGSKWMYVGKKHAGKVFYDLTGNRSDTVTINADGWGEFKVNGGSVSIWVAKTSNVT

SEQ ID NO: 25992 - protein, 487 aa, Bacillus sp. TS-23
APINETMMQYFEWDLPNDGTLWTKVKNEAANLSSLGITALWLPPAYKGTSQSDVGYGVYDLYDLGEFNQKGTIRTKYGTKTQYIEAIQAAKAAGMQVYADVVFNHKAGADGTEFVDAVEVDPSNRNQETSGTYQIQAWTKFDFPGRGNTYSSFKWRWYHFDGTDWDESRKLNRIYKFRSTGKAWDWEVDTENGNYDYLMFADLDMDHPEVVTELKNWGTWYVETTNIDGFRLDAVKHIKYSFFPDWLTYVRNQTGKNLFAVGEFWSYDVEKLHNYITKTRGSMSLFDAPLHNNFYTASKSSGYFDMRYLLNNTLMKDQPSLAVTLVDNHDTQPGQSLQSWVEPWFKPLAYAFILTRQEGYPCVFYGDYYGIPKYNIPGLKSKIDPLLIARRDYAYGTQRDYIDHQDIIGWTREGIDTKPNSGLAALITDGPGGSKWMYVGKKHAGKVFYDLTGNRSDTVTINADGWGEFKVNGGSVSIWVAKTSNVT

SEQ ID NO: 25993 - protein, 487 aa, Bacillus sp. TS-23
APINETMMQYFEWDLPNDGTLWTKVKNEAANLSSLGITALWLPPAYKGTSQSDVGYGVYDLYDLGEFNQKGTIRTKYGTKTQYIEAIQAAKAAGMQVYADVVFNHKAGADGTEFVDAVEVDPSNRNQETSGTYQIQAWTKFDFPGRGNTYSSFKWRWYHFDGTDWDESRKLNRIYKFRSTGKAWDWEVDTENGNYDYLMFADLDMDHPEVVTELKNWGTWYVRTTNIDGFRLDAVKHIKYSFFPDWLTYVRNQTGKNLFAVGEFWSYDVEKLHNYITKTRGSMSLFDAPLHNNFYTASKSSGYFDMRYLLNNTLMKDQPSLAVTLVDNHDTQPGQSLQSWVEPWFKPLAYAFILTRQEGYPCVFYGDYYGIPKYNIPGLKSKIDPLLIARRDYAYGTQRDYIDHQDIIGWTREGIDTKPNSGLAALITDGPGGSKWMYVGKKHAGKVFYDLTGNRSDTVTINADGWGEFKVNGGSVSIWVAKTSNVT

SEQ ID NO: 25994 - protein, 487 aa, Bacillus sp. TS-23
APINETMMQYFEWDLPNDGTLWTKVKNEAANLSSLGITALWLPPAYKGTSQSDVGYGVYDLYDLGEFNQKGTIRTKYGTKTQYIEAIQAAKAAGMQVYADVVFNHKAGADGTEFVDAVEVDPSNRNQETSGTYQIQAWTKFDFPGRGNTYSSFKWRWYHFDGTDWDESRKLNRIYKFRSTGKAWDWEVDTENGNYDYLMFADLDMDHPEVVTELKNWGTWYVRTTNIDGFRLDAVKHIKYSFFPDWLTYVRNQTGKNLFAVGEFWSYDVEKLHNYITKTEGSMSLFDAPLHNNFYTASKSSGYFDMRYLLNNTLMKDQPSLAVTLVDNHDTQPGQSLQSWVEPWFKPLAYAFILTRQEGYPCVFYGDYYGIPKYNIPGLKSKIDPLLIARRDYAYGTQRDYIDHQDIIGWTREGIDTKPNSGLAALITDGPGGSKWMYVGKKHAGKVFYDLTGNRSDTVTINADGWGEFKVNGGSVSIWVAKTSNVT

SEQ ID NO: 25995 - protein, 487 aa, Bacillus sp. TS-23
APINETMMQYFEWDLPNDGTLWTKVKNEAANLSSLGITALWLPPAYKGTSQSDVGYGVYDLYDLGEFNQKGTIRTKYGTKTQYIEAIQAAKAAGMQVYADVVFNHKAGADGTEFVDAVEVDPSNRNQETSGTYQIQAWTKFDFPGRGNTYSSFKWRWYHFDGTDWDESRKLNRIYKFRSTGKAWDWEVDTENGNYDYLMFADLDMDHPEVVTELKNWGTWYVETTNIDGFRLDAVKHIKYSFFPDWLTYVRNQTGKNLFAVGEFWSYDVEKLHNYITKTNGSMSLFDAPLHNNFYTASKSSGYFDMRYLLNNTLMKDQPSLAVTLVDNHDTQPGQSLQSWVEPWFKPLAYAFILTRQEGYPCVFYGDYYGIPKYNIPGLKSKIDPLLIARRDYAYGTQRDYIDHQDIIGWTREGIDTKPNSGLAALITDGPGGSKWMYVGKKHAGKVFYDLTGNRSDTVTINADGWGEFKVNGGSVSIWVAKTSNVT

SEQ ID NO: 25996 - protein, 487 aa, Bacillus sp. TS-23
APINETMMQYFEWDLPNDGTLWTKVKNEAANLSSLGITALWLPPAYKGTSQSDVGYGVYDLYDLGEFNQKGTIRTKYGTKTQYIEAIQAAKAAGMQVYADVVFNHKAGADGTEFVDAVEVDPSNRNQETSGTYQIQAWTKFDFPGRGNTYSSFKWRWYHFDGTDWDESRKLNRIYKFRSTGKAWDWEVDTENGNYDYLMFADLDMDHPEVVTELKNWGTWYVETTNIDGFRLDAVKHIKYSFFPDWLTYVRNQTGKNLFAVGEFWSYDVEKLHNYITKTEGSMSLFDAPLHNNFYTASKSSGYFDMRYLLNNTLMKDQPSLAVTLVDNHDTQPGQSLQSWVEPWFKPLAYAFILTRQEGYPCVFYGDYYGIPKYNIPGLKSKIDPLLIARRDYAYGTQRDYIDHQDIIGWTREGIDTKPNSGLAALITDGPGGSKWMYVGKKHAGKVFYDLTGNRSDTVTINADGWGEFKVNGGSVSIWVAKTSNVT

SEQ ID NO: 25997 - protein, 487 aa, Bacillus sp. TS-23
APINETMMQYFEWDLPNDGTLWTKVKNEAANLSSLGITALWLPPAYKGTSQSDVGYGVYDLYDLGEFNQKGTIRTKYGTKTQYIEAIQAAKAAGMQVYADVVFNHKAGADGTEFVDAVEVDPSNRNQETSGTYQIQAWTKFDFPGRGNTYSSFKWRWYHFDGTDWDESRKLNRIYKFRSTGKAWDWEVDTENGNYDYLMFADLDMDHPEVVTELKNWGTWYVRTTNIDGFRLDAVKHIKYSFFPDWLTYVRNQTGKNLFAVGEFWSYDVRKLHNYITKTEGSMSLFDAPLHNNFYTASKSSGYFDMRYLLNNTLMKDQPSLAVTLVDNHDTQPGQSLQSWVEPWFKPLAYAFILTRQEGYPCVFYGDYYGIPKYNIPGLKSKIDPLLIARRDYAYGTQRDYIDHQDIIGWTREGIDTKPNSGLAALITDGPGGSKWMYVGKKHAGKVFYDLTGNRSDTVTINADGWGEFKVNGGSVSIWVAKTSNVT

SEQ ID NO: 25998 - protein, 487 aa, Bacillus sp. TS-23
APINETMMQYFEWDLPNDGTLWTKVKNEAANLSSLGITALWLPPAYKGTSQSDVGYGVYDLYDLGEFNQKGTIRTKYGTKTQYIEAIQAAKAAGMQVYADVVFNHKAGADGTEFVDAVEVDPSNRNQETSGTYQIQAWTKFDFPGRGNTYSSFKWRWYHFDGTDWDESRKLNRIYKFRSTGKAWDWEVDTENGNYDYLMFADLDMDHPEVVTELKNWGTWYVETTNIDGFRLDAVKHIKYSFFPDWLTYVRNQTGKNLFAVGEFWSYDVRKLHNYITKTNGSMSLFDAPLHNNFYTASKSSGYFDMRYLLNNTLMKDQPSLAVTLVDNHDTQPGQSLQSWVEPWFKPLAYAFILTRQEGYPCVFYGDYYGIPKYNIPGLKSKIDPLLIARRDYAYGTQRDYIDHQDIIGWTREGIDTKPNSGLAALITDGPGGSKWMYVGKKHAGKVFYDLTGNRSDTVTINADGWGEFKVNGGSVSIWVAKTSNVT

SEQ ID NO: 25999 - protein, 487 aa, Bacillus sp. TS-23
APINETMMQYFEWDLPNDGTLWTKVKNEAANLSSLGITALWLPPAYKGTSQSDVGYGVYDLYDLGEFNQKGTIRTKYGTKTQYIEAIQAAKAAGMQVYADVVFNHKAGADGTEFVDAVEVDPSNRNQETSGTYQIQAWTKFDFPGRGNTYSSFKWRWYHFDGTDWDESRKLNRIYKFRSTGKAWDWEVDTENGNYDYLMFADLDMDHPEVVTELKNWGTWYVRTTNIDGFRLDAVKHIKYSFFPDWLTYVRNQTGKNLFAVGEFWSYDVRKLHNYITKTNGSMSLFDAPLHNNFYTASKSSGYFDMRYLLNNTLMKDQPSLAVTLVDNHDTQPGQSLQSWVEPWFKPLAYAFILTRQEGYPCVFYGDYYGIPKYNIPGLKSKIDPLLIARRDYAYGTQRDYIDHQDIIGWTREGIDTKPNSGLAALITDGPGGSKWMYVGKKHAGKVFYDLTGNRSDTVTINADGWGEFKVNGGSVSIWVAKTSNVT

SEQ ID NO: 26000 - protein, 487 aa, Bacillus sp. TS-23
APINETMMQYFEWDLPNDGTLWTKVKNEAANLSSLGITALWLPPAYKGTSQSDVGYGVYDLYDLGEFNQKGTIRTKYGTKTQYIEAIQAAKAAGMQVYADVVFNHKAGADGTEFVDAVEVDPSNRNQETSGTYQIQAWTKFDFPGRGNTYSSFKWRWYHFDGTDWDESRKLNRIYKFRSTGKAWDWEVDTENGNYDYLMFADLDMDHPEVVTELKNWGTWYVETTNIDGFRLDAVKHIKYSFFPDWLTYVRNQTGKNLFAVGEFWSYDVRKLHNYITKTRGSMSLFDAPLHNNFYTASKSSGYFDMRYLLNNTLMKDQPSLAVTLVDNHDTQPGQSLQSWVEPWFKPLAYAFILTRQEGYPCVFYGDYYGIPKYNIPGLKSKIDPLLIARRDYAYGTQRDYIDHQDIIGWTREGIDTKPNSGLAALITDGPGGSKWMYVGKKHAGKVFYDLTGNRSDTVTINADGWGEFKVNGGSVSIWVAKTSNVT

SEQ ID NO: 26001 - protein, 487 aa, Bacillus sp. TS-23
APINETMMQYFEWDLPNDGTLWTKVKNEAANLSSLGITALWLPPAYKGTSQSDVGYGVYDLYDLGEFNQKGTIRTKYGTKTQYIRAIQAAKAAGMQVYADVVFNHKAGADGTEFVDAVEVDPSNRNQETSGTYQIQAWTKFDFPGRGNTYSSFKWRWYHFDGTDWDESRKLNRIYKFRSTGKAWDWEVDTENGNYDYLMFADLDMDHPEVVTELKNWGTWYVRTTNIDGFRLDAVKHIKYSFFPDWLTYVRNQTGKNLFAVGEFWSYDVRKLHNYITKTRGSMSLFDAPLHNNFYTASKSSGYFDMRYLLNNTLMKDQPSLAVTLVDNHDTQPGQSLQSWVEPWFKPLAYAFILTRQEGYPCVFYGDYYGIPKYNIPGLKSKIDPLLIARRDYAYGTQRDYIDHQDIIGWTREGIDTKPNSGLAALITDGPGGSKWMYVGKKHAGKVFYDLTGNRSDTVTINADGWGEFKVNGGSVSIWVAKTSNVT

SEQ ID NO: 26002 - protein, 487 aa, Bacillus sp. TS-23
APINETMMQYFEWDLPNDGTLWTKVKNEAANLSSLGITALWLPPAYKGTSQSDVGYGVYDLYDLGEFNQKGTIRTKYGTKTQYIRAIQAAKAAGMQVYADVVFNHKAGADGTEFVDAVEVDPSNRNQETSGTYQIQAWTKFDFPGRGNTYSSFKWRWYHFDGTDWDESRKLNRIYKFRSTGKAWDWEVDTENGNYDYLMFADLDMDHPEVVTELKNWGTWYVRTTNIDGFRLDAVKHIKYSFFPDWLTYVRNQTGKNLFAVGEFWSYDVEKLHNYITKTEGSMSLFDAPLHNNFYTASKSSGYFDMRYLLNNTLMKDQPSLAVTLVDNHDTQPGQSLQSWVEPWFKPLAYAFILTRQEGYPCVFYGDYYGIPKYNIPGLKSKIDPLLIARRDYAYGTQRDYIDHQDIIGWTREGIDTKPNSGLAALITDGPGGSKWMYVGKKHAGKVFYDLTGNRSDTVTINADGWGEFKVNGGSVSIWVAKTSNVT

SEQ ID NO: 26003 - protein, 487 aa, Bacillus sp. TS-23
APINETMMQYFEWDLPNDGTLWTKVKNEAANLSSLGITALWLPPAYKGTSQSDVGYGVYDLYDLGEFNQKGTIRTKYGTKTQYIRAIQAAKAAGMQVYADVVFNHKAGADGTEFVDAVEVDPSNRNQETSGTYQIQAWTKFDFPGRGNTYSSFKWRWYHFDGTDWDESRKLNRIYKFRSTGKAWDWEVDTENGNYDYLMFADLDMDHPEVVTELKNWGTWYVETTNIDGFRLDAVKHIKYSFFPDWLTYVRNQTGKNLFAVGEFWSYDVEKLHNYITKTRGSMSLFDAPLHNNFYTASKSSGYFDMRYLLNNTLMKDQPSLAVTLVDNHDTQPGQSLQSWVEPWFKPLAYAFILTRQEGYPCVFYGDYYGIPKYNIPGLKSKIDPLLIARRDYAYGTQRDYIDHQDIIGWTREGIDTKPNSGLAALITDGPGGSKWMYVGKKHAGKVFYDLTGNRSDTVTINADGWGEFKVNGGSVSIWVAKTSNVT

SEQ ID NO: 26004 - protein, 485 aa, Bacillus sp. TS-23
APINETMMQYFEWDLPNDGTLWTKVKNEAANLSSLGITALWLPPAWKGTSQSDVGYGVYDLYDLGEFNQKGTIRTKYGTKTQYIQAIQAAKAAGMQVYADVVFNHKAGADGTEFVDAVEVDPSNRNQETSGTYQIQAWTKFDFPGRGNTYSSFKWRWYHFDGTDWDESRKLNRIYKFRSKAWDWEVDTENGNYDYLMFADYDMDHPEVVTELKNWGTWYVNTTNIDGFRLDAVKHIKYSFFPDWLTYVRNQTGKNLFAVGEFWSYDVNKLHNYITKTNGSMSLFDAPLHNNFYTASKSSGYFDMRYLLNNTLMKDQPSLAVTLVDNHDTQPGQSLQSWVEPWFKPLAYAFILTRQEGYPCVFYGDYYGIPKYNIPGLKSKIDPLLIARRDYAYGTQRDYIDHQDIIGWTREGIDTKPNSGLAALITDGPGGSKWMYVGKKHAGKVFYDLTGNRSDTVTINADGWGEFKVNGGSVSIWVAKTSNVT

SEQ ID NO: 26005 - protein, 487 aa, Bacillus sp. TS-23
APINETMMQYFEWDLPNDGTLWTKVKNEAANLSSLGITALWLPPAYKGTSQSDVGYGVYDLYDLGEFNQKGTIRTKYGTKTQYIRAIQAAKAAGMQVYADVVFNHKAGADGTEFVDAVEVDPSNRNQETSGTYQIQAWTKFDFPGRGNTYSSFKWRWYHFDGTDWDESRKLNRIYKFRSTGKAWDWEVDTENGNYDYLMFADLDMDHPEVVTELKNWGTWYVRTTNIDGFRLDAVKHIKYSFFPDWLTYVRNQTGKNLFAVGEFWSYDVEKLHNYITKTRGSMSLFDAPLHNNFYTASKSSGYFDMRYLLNNTLMKDQPSLAVTLVDNHDTQPGQSLQSWVEPWFKPLAYAFILTRQEGYPCVFYGDYYGIPKYNIPGLKSKIDPLLIARRDYAYGTQRDYIDHQDIIGWTREGIDTKPNSGLAALITDGPGGSKWMYVGKKHAGKVFYDLTGNRSDTVTINADGWGEFKVNGGSVSIWVAKTSNVT

SEQ ID NO: 26006 - protein, 487 aa, Bacillus sp. TS-23
APINETMMQYFEWDLPNDGTLWTKVKNEAANLSSLGITALWLPPAYKGTSQSDVGYGVYDLYDLGEFNQKGTIRTKYGTKTQYIEAIQAAKAAGMQVYADVVFNHKAGADGTEFVDAVEVDPSNRNQETSGTYQIQAWTKFDFPGRGNTYSSFKWRWYHFDGTDWDESRKLNRIYKFRSTGKAWDWEVDTENGNYDYLMFADLDMDHPEVVTELKNWGTWYVRTTNIDGFRLDAVKHIKYSFFPDWLTYVRNQTGKNLFAVGEFWSYDVEKLHNYITKTNGSMSLFDAPLHNNFYTASKSSGYFDMRYLLNNTLMKDQPSLAVTLVDNHDTQPGQSLQSWVEPWFKPLAYAFILTRQEGYPCVFYGDYYGIPKYNIPGLKSKIDPLLIARRDYAYGTQRDYIDHQDIIGWTREGIDTKPNSGLAALITDGPGGSKWMYVGKKHAGKVFYDLTGNRSDTVTINADGWGEFKVNGGSVSIWVAKTSNVT

SEQ ID NO: 26007 - protein, 258 aa, Synthetic construct
NGTMMQYFEWYLPNDGQHWRLNDANLSSGITALWIPPAYKGTSQSDVGYGAYDLYDLGEFNQKGTVRTKYGTKAQLAIALHAGIQVYGDVVMNHKGGADGTEVAVEVNPSDRNQEISGYIAWTKFDFPGRGNTYSFKWRWYHFDGVDWDESRKLNRIYKFRGGKAWDWEVDTENGNYDYLMYADIDMDHPEVVELKNWGWYNTLNLDGFRLDAVKHIKFSFDWLSHVRSTGKLFTVGEYWDIGALENYLKTNWMSLFD

SEQ ID NO: 26008 - protein, 516 aa, Bacillus sp. TS-23
ANTAPINETMMQYFEWDLPNDGTLWTKVKNEAANLSSLGITALWLPPAYKGTSQSDVGYGVYDLYDLGEFNQKGTIRTKYGTKTQYIQAIQAAKAAGMQVYADVVFNHKAGADGTEFVDAVEVDPSNRNQETSGTYQIQAWTKFDFPGRGNTYSSFKWRWYHFDGTDWDESRKLNRIYKFRSTGKAWDWEVDTENGNYDYLMFADLDMDHPEVVTELKNWGTWYVNTTNIDGFRLDAVKHIKYSFFPDWLTYVRNQTGKNLFAVGEFWSYDVNKLHNYITKTNGSMSLFDAPLHNNFYTASKSSGYFDMRYLLNNTLMKDQPSLAVTLVDNHDTQPGQSLQSWVEPWFKPLAYAFILTRQEGYPCYFYGDYYGIPKYNIPGLKSKIDPLLIARRDYAYGTQRDYIDHQDIIGWTREGIDTKPNSGLAALITDGPGGSKWMYVGKKHAGKVFYDLTGNRSDTVTINADGWGEFKVNGGSVSIWVAKTSNVTFTVNNATTTSGQNVYVVANIPELGNW

SEQ ID NO: 26009 - protein, 483 aa, Bacillus licheniformis
HHNQTNGTMMQYFEWYLPNDGNHWNRLRSDASNLKDKGITAVWIPPAWKGASQNDVGYGAYDLYDLGEFNQKGTVRTKYGTRNQLQAAVTALKSNGIQVYGDVVMNHKGGADATEWVRAVEVNPSNRNQEVSGDYTIEAWTKFDFPGRGNTHSNFKWRWYHFDGVDWDQSRQLQNKIYKFRGKEWDWEVDTENGNYDYLMYADYDMDHPEVVNELRNWGVWYTNTLGLDGFRIDAVKHIKYSFTRDWLTHVRNTTGKNMFAVAEFWKNDIGAIENYLSKTNWNHSVFDVPLHYNLYNASRSGGNYDMRQIFNGTVVQRHPTHAVTFVDNHDSQPEEALESFVEEWFKPLAYALTLTRDQGYPSVFYGDYYGIPTHGVPAMKSKIDPILEARQKYAYGTQRDYMDHPDVIGWTREGDGVHADSGLATLMSDGPGGSKWMEVGKNNAGEVWYDITGNQTNTVTINKDGWGQFHVSGGSVSIYVQQ

SEQ ID NO: 26010 - protein, 483 aa, Bacillus licheniformis
HHNGTNGTMMQYFEWYLPNDGNHWNRLRSDASNLKDKGITAVWIPPAWKGASQNDVGYGAYDLYDLGEFNQKGTVRTKYGTRNQLQAAVTALKSNGIQVYGDVVMNHKGGADATEWVRAVEVNPSNRNQEVSGDYTIEAWTKFDFPGRGNTHSNFKWRWWHFDGVDWDQSRQLQNKIYKFRGKEWDWEVDTENGNYDYLMYADYDMDHPEVVNELRNWGVWYTNTLGLDGFRIDAVKHIKYSFTRDWLTHVRNTTGKNMFAVAEFWKNDIGAIENYLSKTNWNHSVFDVPLHYNLYNASRSGGNYDMRQIFNGTVVQRHPTHAVTFVDNHDSQPEEALESFVEEWFKPLAYALTLTRDQGYPSVFYGDYYGIPTHGVPAMKSKIDPILEARQKYAYGTQRDYLDHPDVIGWTREGDGVHADSGLATLMSDGPGGSKWMEVGKNNAGEVWYDITGNQTNTVTINKDGWGQFHVSGGSVSIYVQQ

SEQ ID NO: 26011 - protein, 483 aa, Bacillus licheniformis
HHNGTNGTMMQYFEWYLPNDGNHWNRLRSDASNLKDKGITAVWIPPAWKGASQNDVGYGAYDLYDLGEFNQKGTVRTKYGTRNQLQAAVTALKSNGIQVYGDVVMNHKGGADATEWVRAVEVNPSNRNQEVSGDYTIEAWTKFDFPGRGNTHSNFKWRWYHFDGVDWDQSRQLQNRIYKFRGKEWDWEVDTENGNYDYLMYADYDMDHPEVVNELRNWGVWYTNTLGLDGFRIDAVKHIKYSFTRDWLEHVRNTTGKNMFAVAEFWKNDIGAIENYLSKTNWNHSVFDVPLHYNLYNASRSGGNYDMRQIFNGTVVQRHPTHGVTFVDNHDSQPEEALESFVEEWFKPLAYALTLTRDQGYPSVFYGDYYGIPTHGVPAMKSKIDPILEARQKYAYGTQRDYMDHPDVIGWTREGDGVHADSGLATLMSDGPGGSKWMEVGKNNAGEVWYDITGNQTNTVTINKDGWGQFHVSGGSVSIYVQQ

SEQ ID NO: 26012 - protein, 485 aa, Synthetic construct
HHNGTNGTMMQYFEWYLPNDGNHWNRLRSDASNLKDKGISAVWIPPAWKGASQNDVGYGAYDLYDLGEFNQKGTIRTKYGTRNQLQAAVNALKSNGIQVYGDVVMNHRMGADATETISAVEVNPSNRNQVTSGAYNISAWTDFEFPGRGNTYSSFKWHSYYFDGVDWDQSRQLSGKIYQIQGTGKAWDWEVDSENGNYDYLMGADIDMDHPEVVNELRNWGVWYTNTLGLDGFRIDAVKHIKYSFTRDWINHVRSATGKNMFAVAEFWKNDLGAIENYLNKTNWNHSVFDVPLHYNLYNASKSGGNYDMRQIFNGTVVQRHPMHAVTFVDNHDSQPEEALESFVEEWFKPLAYALTLTREQGYPSVFYGDYYGIPTHGVPAMKSKIDPILEARQKYAYGRQNDYLDHHNIIGWTREGNTAHPNSGLATIMSDGAGGNKWMFVGRNKAGQVWTDITGNRAGTVTINADGWGNFSVNGGSVSIWVNK

SEQ ID NO: 26013 - protein, 483 aa, Bacillus licheniformis
HHNGTNGTMMQYFEWYLPNDGNHWHRLRSDASNLKDKGITAVWIPPAWKGASQNDVGYGAYDLYDLGEFNQKGTVRTKYGTRNQLQAAVTALKSNGIQVYGDVVMNHKGGADATEWVRAVEVNPSNRNQEVSGDYTIEAWTKFDFPGRGNTHSNFKWRWYHFDGVDWDQSRQLQNKIYKFRGKGWDWEVDTENGNYDYLMYADYDMDHPEVVNELRNWGVWYTNTLGLDGFRIDAVKHIKYSFTRDWLTHVRNTTGKNMFAVAEFWKNDIGAIENYLSKTNWNHSVFDVPLHYNLYNASRSGGNYDMRQIFNGTVVQRHPTHAVTFVDNHDSQPEEALESFVEEWFKPLAYALTLTRDQGYPSVFYGDYYGIPTHGVPAMKSKIDPILEARQKYAYGTQRDYMDHPDVIGWTREGDGVHADSGLATLMSDGPGGSKWMEVGKNNAGEVWYDITGNQTNTVTINKDGWGQFHVSGGSVSIYVQQ

SEQ ID NO: 26014 - protein, 483 aa, Bacillus licheniformis
HHNQTNGTMMQYFEWYLPNDGNHWNRLRSDASNLKDKGITAVWIPPAWKGASQNDVGYGAYDLYDLGEFNQKGTVRTKYGTRNQLQAAVTALKSNGIQVYGDVVMNHKGGADATEWVRAVEVNPSNRNQEVSGDYTIEAWTKFDFPGRGNTHSNFKWRWYHFDGVDWDQSRQLQNKIYKFRGKGWDWEVDTENGNYDYLMYADYDMDHPEVVNELRNWGVWYTNTLGLDGFRIDAVKHIKYSFTRDWLEHVRNTTGKNMFAVAEFWKNDIGAIENYLSKTNWNHSVFDVPLHYNLYNASRSGGNYDMRQIFNGTVVQRHPTHAVTFVDNHDSQPEEALESFVEEWFKPLAYALTLTRDQGYPSVFYGDYYGIPTHGVPAMKSKIDPILEARQKYAYGTQRDYMDHPDVIGWTREGDGVHADSGLATLMSDGPGGSKWMEVGKNNAGEVWYDITGNQTGTVTINKDGWGQFHVSGGSVSIYVQQ

SEQ ID NO: 26015 - protein, 483 aa, Bacillus licheniformis
HHNGTNGTMMQYFEWYLPNDGNHWNRLRSDASNLKDKGITAVWIPPAWKGASQNDVGYGAYDLYDLGEFNQKGTVRTKYGTRNQLQAAVTALKSNGIQVYGDVVMNHKGGADATEWVRAVEVNPSNRNQEVSGDYTIEAWTKFDFPGRGNTHSNFKWRWDHFDGVDWDQSRQLQNRIYKFRGKEWDWEVDTENGNYDYLMYADIDMDHPEVVNELRNWGVWYTNTLGLDGFRIDAVKHIKYSFTRDWLTHVRNTTGKNMFAVAEFWKNDIGAIENYLSKTNWNHSVFDVPLHYNLYNASRSGGNYDMRQIFKGTVVQRHPTHAVTFVDNHDSQPEEALESFVEEWFKPLAYALTLTRDQGYPSVFYGDYYGIPTHGVPAMKSKIDPILEARQKYAYGTQRDYLDHPDVIGWTREGDGVHADSGLATLMSDGPGGSKWMEVGKNNAGEVWYDITGNQTNTVTINKDGWGQFHVSGGSVSIYVQQ

SEQ ID NO: 26016 - protein, 483 aa, Bacillus licheniformis
HHNQTNGTMMQYFEWYLPNDGNHWNRLRSDASNLKDKGITAVWIPPAWKGASQNDVGYGAYDLYDLGEFNQKGTVRTKYGTRNQLQAAVTALKSNGIQVYGDVVMNHKGGADATEWVRAVEVNPSNRNQEVSGDYTIEAWTKFDFPGRGNTHSNFKWRWYHFDGVDWDQSRQLQNKIYKFRGKGWDWEVDTENGNYDYLMYADYDMDHPEVVNELRNWGVWYTNTLGLDGFRIDAVKHIKYSFTRDWLEHVRNTTGKNMFAVAEFWKNDIGAIENYLSKTNWNHSVFDVPLHYNLYNASRSGGNYDMRQIFNGTVVQRHPTHAVTFVDNHDSQPEEALESFVEEWFKPLAYALTLTRDQGYPSVFYGDYYGIPTHGVPAMKSKIDPILEARQKYAYGTQRDYLDHPDVIGWTREGDGVHADSGLATLMSDGPGGSKWMEVGKNNAGEVWYDITGNQTGTVTINKDGWGQFHVSGGSVSIYVQQ

SEQ ID NO: 26017 - protein, 483 aa, Bacillus licheniformis
HHNGTNGTMMQYFEWYLPNDGNHWHRLRSDASNLKDKGITAVWIPPAWKGASQNDVGYGAYDLYDLGEFNQKGTVRTKYGTRNQLQAAVTALKSNGIQVYGDVVMNHKGGADATEWVRAVEVNPSNRNQEVSGDYTIEAWTKFDFPGRGNTHSNFKWRWYHFDGVDWDQSRQLQNKIYKFRGKEWDWEVDEENGNYDYLMYADYDMDHPEVVNELRNWGVWYTNTLGLDGFRIDAVKHIKYSFTRDWLEHVRNTTGKNMFAVAEFWKNDIGAIENYLSKTNWNHSVFDVPLHYNLYNASRSGGNYDMRQIFNGTVVQRHPTHAVTFVDNHDSQPEEALESFVEEWFKPLAYALTLTRDQGYPSVFYGDYYGIPTHGVPAMKSKIDPILEARQKYAYGTQRDYLDHPDVIGWTREGDGVHADSGLATLMSDGPGGSKWMEVGKNNAGEVWYDITGNQTNTVTINKDGWGQFHVSGGSVSIWVQQ

SEQ ID NO: 26018 - protein, 483 aa, Bacillus licheniformis
HHNGTNGTMMQYFEWYLPNDGNHWHRLRSDASNLKDKGITAVWIPPAWKGASQNDVGYGAYDLYDLGEFNQKGTVRTKYGTRNQLQAAVTALKSNGIQVYGDVVMNHKGGADATEWVDAVEVNPSNRNQEVSGDYTIEAWTKFDFPGRGNTHSNFKWRWYHFDGVDWDQSRQLQNKIYKFRGKEWDWEVDTENGNYDYLMYADYDMDHPEVVNELRNWGVWYTNTLGLDGFRIDAVKHIKYSFTRDWLTHVRNTTGKNMFAVAEFWKNDIGAIENYLSKTNWNHSVFDVPLHYNLYNASRSGGNYDMRQIFNGTVVQRHPTHAVTFVDNHDSQPEEALESFVEEWFKPLAYALTLTRDQGYPSVFYGDYYGIPTHGVPAMKSKIDPILEARQKYAYGTQRDYLDHPDVIGWTREGDGVHADSGLATLMSDGPGGSKWMEVGKNNAGEVWYDITGNQTNTVTINKDGWGQFHVSGGSVSIYVQQ

SEQ ID NO: 26019 - protein, 483 aa, Bacillus licheniformis
HHNGTNGTMMQYFEWYLPNDGNHWNRLRSDASNLKDKGITAVWIPPAYKGASQNDVGYGAYDLYDLGEFNQKGTVRTKYGTRNQLQAAVTALKSNGIQVYGDVVMNHKGGADATEKVRAVEVNPSNRNQEVSGDYTIEAWTKFDFPGRGNTHSNFKWRWYHFDGVDWDQSRQLQNRIYKFRGKGWDWEVDTENGNYDYLMYADIDMDHPEVVNELKNWGVWYTNTLGLDGFRIDAVKHIKYSFTRDWLTHVRNTTGKNMFAVAEFWKNDIGAIENYLSKTNWNHSVFDVPLHYNLYNASRSGGNYDMRQIFNGTVVQRHPTHAVTFVDNHDSQPEEALESFVEEWFKPLAYALTLTRDQGYPSVFYGDYYGIPTHGVPAMKSKIDPILEARQKYAYGTQRDYLDHPDVIGWTREGDGVHADSGLATLMSDGPGGSKWMEVGKNNAGEVWYDITGNQTNTVTINKDGWGQFHVSGGSVSIYVQQ

SEQ ID NO: 26020 - protein, 483 aa, Bacillus licheniformis
HHNGTNGTMMQYFEWYLPNDGNHWHRLRSDASNLKDKGITAVWIPPAWKGASQNDVGYGAYDLYDLGEFNQKGTVRTKYGTRNQLQAAVTALKSNGIQVYGDVVMNHKGGADATEWVRAVEVNPSNRNQEVSGDYTIEAWTKFDFPGRGNTHSNFKWRWYHFDGVDWDQSRQLQNKIYKFRGKEWDWEVDTENGNYDYLMYADYDMDHPEVVNELRNWGVWYTNTLGLDGFRIDAVKHIKYSFTRDWLEHVRNTTGKNMFAVAEFWKNDIGAIENYLSKTNWNHSVFDVPLHYNLYNASRSGGNYDMRQIFNGTVVQRHPTHAVTFVDNHDSQPEEALESFVEEWFKPLAYALTLTRDQGYPSVFYGDYYGIPTHGVPAMKSKIDPILEARQKYAYGTQRDYLDHPDVIGWTREGDGVHADSGLATLMSDGPGGSKWMEVGKNNAGEVWYDITGNQTNTVTINKDGWGQFHVSGGSVSIWVQQ

SEQ ID NO: 26021 - protein, 483 aa, Bacillus licheniformis
HHNQTNGTMMQYFEWYLPNDGNHWNRLRSDASNLKDKGITAVWIPPAWKGASQNDVGYGAYDLYDLGEFNQKGTVRTKYGTRNQLQAAVTALKSNGIQVYGDVVMNHKGGADATEWVRAVEVNPSNRNQEVSGDYTIEAWTKFDFPGRGNTHSNFKWRWYHFDGVDWDQSRQLQNRIYKFRGKEWDWEVDTENGNYDYLMYADYDMDHPEVVNELRNWGVWYTNTLGLDGFRIDAVKHIKYSFTRDWLEHVRNTTGKNMFAVAEFWKNDIGAIENYLSKTNWNHSVFDVPLHYNLYNASRSGGNYDMRQIFNGTVVQRHPTHAVTFVDNHDSQPEEALESFVEEWFKPLAYALTLTRDQGYPSVFYGDYYGIPTHGVPAMKSKIDPILEARQKYAYGTQRDYMDHPDVIGWTREGDGVHADSGLATLMSDGPGGSKWMEVGKNNAGEVWYDITGNQTNTVTINKDGWGQFHVSGGSVSIYVQQ

SEQ ID NO: 26022 - protein, 483 aa, Bacillus licheniformis
HHNGTNGTMMQYFEWYLPNDGNHWNRLRSDASNLKDKGITAVWIPPAWKGASQNDVGYGAYDLYDLGEFNQKGTVRTKYGTRNQLQAAVTALKSNGIQVYGDVVMNHKGGADATEWVRAVEVNPSNRNQEVSGDYTIEAWTKFDFPGRGNTHSNFKWRWWHFDGVDWDQSRQLQNKIYKFRGKEWDWEVDTENGNYDYLMYADIDMDHPEVVNELRNWGVWYTNTLGLDGFRIDAVKHIKYSFTRDWLTHVRNTTGKNMFAVAEFWKNDIGAIENYLSKTNWNHSVFDVPLHYNLYNASRSGGNYDMRQIFNGTVVQRHPTHAVTFVDNHDSQPEEALESFVEEWFKPLAYALTLTRDQGYPSVFYGDYYGIPTHGVPAMKSKIDPILEARQKYAYGTQRDYMDHPDVIGWTREGDGVHADSGLATLMSDGPGGSKWMEVGKNNAGEVWYDITGNQTNTVTINKDGWGQFHVSGGSVSIYVQQ

SEQ ID NO: 26023 - protein, 483 aa, Bacillus licheniformis
HHNQTNGTMMQYFEWYLPNDGNHWNRLRSDASNLKDKGITAVWIPPAWKGASQNDVGYGAYDLYDLGEFNQKGTVRTKYGTRNQLQAAVTALKSNGIQVYGDVVMNHKGGADATEWVRAVEVNPSNRNQEVSGDYTIEAWTKFDFPGRGNTHSNFKWRWYHFDGVDWDQSRQLQNRIYKFRGKEWDWEVDTENGNYDYLMYADIDMDHPEVVNELRNWGVWYTNTLGLDGFRIDAVKHIKYSFTRDWLTHVRNTTGKNMFAVAEFWKNDIGAIRNYLSKTNWNHSVFDVPLHYNLYNASRSGGNYDMRQIFNGTVVQRHPTHAVTFVDNHDSQPEEALESFVEEWFKPLAYALTLTRDQGYPSVFYGDYYGIPTHGVPAMKSKIDPILEARQKYAYGTQRDYLDHPDVIGWTREGDGVHADSGLATLMSDGPGGSKWMEVGKNNAGEVWYDITGNQTNTVTINKDGWGQFHVSGGSVSIYVQQ

SEQ ID NO: 26024 - protein, 483 aa, Bacillus licheniformis
HHNQTNGTMMQYFEWYLPNDGNHWNRLRSDASNLKDKGITAVWIPPAWKGASQNDVGYGAYDLYDLGEFNQKGTVRTKYGTRNQLQAAVTALKSNGIQVYGDVVMNHKGGADATEWVRAVEVNPSNRNQEVSGDYTIEAWTKFDFPGRGNTHSNFKWRWYHFDGVDWDQSRQLQNRIYKFRGKEWDWEVDTENGNYDYLMYADYDMDHPEVVNELRNWGVWYTNTLGLDGFRIDAVKHIKYSFTRDWLTHVRNTTGKNMFAVAEFWKNDIGAIRNYLSKTNWNHSVFDVPLHYNLYNASRSGGNYDMRQIFNGTVVQRHPTHAVTFVDNHDSQPEEALESFVEEWFKPLAYALTLTRDQGYPSVFYGDYYGIPTHGVPAMKSKIDPILEARQKYAYGTQRDYMDHPDVIGWTREGDGVHADSGLATLMSDGPGGSKWMEVGKNNAGEVWYDITGNQTNTVTINKDGWGQFHVSGGSVSIYVQQ

SEQ ID NO: 26025 - protein, 483 aa, Bacillus subtilis
HHNGTNGTMMQYFEWYLPNDGNHWNRLRSDASNLKDKGISAVWIPPAWKGASQNDVGYGAYDLYDLGEFNQKGTIRTKYGTRNQLQAAVNALKSNGIQVYGDVVMNHKGGADATEMVRAVEVNPNNRNQEVSGEYTIEAWTKFDFPGRGNTHSNFKWRWYHFDGVDWDQSRKLNNRIYKFRGKGWDWEVDTENGNYDYLMYADIDMDHPEVVNELRNWGVWYTNTLGLDGFRIDAVKHIKYSFTRDWINHVRSATGKNMFAVAEFWKNDLGAIENYLNKTNWNHSVFDVPLHYNLYNASKSGGNYDMRQIFNGTVVQRHPMHAVTFVDNHDSQPEEALESFVEEWFKPLAYALTLTREQGYPSVFYGDYYGIPTHGVPAMKSKIDPILEARQKYAYGTQRDYLDHPDVIGWTREGDGVHADSGLATLMSDGPGGSKWMEVGKNNAGEVWYDITGNQTNTVTINKDGWGQFHVSGGSVSIYVQQ

SEQ ID NO: 26026 - protein, 483 aa, Bacillus licheniformis
HHNGTNGTMMQYFEWYLPNDGNHWNRLRSDASNLKDKGITAVWIPPAWKGASQNDVGYGAYDLYDLGEFNQKGTVRTKYGTRNQLQAAVTALKSNGIQVYGDVVMNHKGGADATEWVRAVEVNPSNRNQEVSGDYTIEAWTKFDFPGRGNTHSNFKWRWYHFDGVDWDQSRQLQNRIYKFRGKEWDWEVDTENGNYDYLMYADIDMDHPEVVNELRNWGVWYTNTLGLDGFRIDAVKHIKYSFTRDWLTHVRNTTGKNMFAVAEFWKNDIGAIENYLSKTNWNHSVFDVPLHYNLYNASRSGGNYDMRQIFKGTVVQRHPTHAVTFVDNHDSQPEEALESFVEEWFKPLAYALTLTRDQGYPSVFYGDYYGIPTHGVPAMKSKIDPILEARQKYAYGTQRDYLDHPDVIGWTREGDGVHADSGLATLMSDGPGGSKWMEVGKNNAGERWYDITGNQTDTVTINKDGWGQFHVSGGSVSIYVQQ

SEQ ID NO: 26027 - protein, 483 aa, Bacillus licheniformis
HHNGTNGTMMQYFEWYLPNDGNHWNRLRSDASNLKDKGITAVWIPPAWKGASQNDVGYGAYDLYDLGEFNQKGTVRTKYGTRNQLQRAVTALKSNGIQVYGDVVMNHKGGADATEWVRAVEVNPSNRNQEVSGDYTIEAWTKFDFPGRGNTHSNFKWRWYHFDGVDWDQSRQLQNRIYKFRGKEWDWEVDTENGNYDYLMYADIDMDHPEVVNELRNWGVWYTNTLGLDGFRIDAVKHIKYSFTRDWLTHVRNTTGKNMFAVAEFWKNDIGAIENYLSKTNWNHSVFDVPLHYNLYNASRSGGNYDMRQIFKKTVVQRHPTHAVTFVDNHDSQPEEALESFVEEWFKPLAYALTLTRDQGYPSVFYGDYYGIPTHGVPAMKSKIDPILEARQKYAYGTQRDYLDHPDVIGWTREGDGVHADSGLATLMSDGPGGSKWMEVGKNNAGEVWYDITGNQTNTVTINKDGWGQFHVSGGSVSIYVQQ

SEQ ID NO: 26028 - protein, 483 aa, Bacillus licheniformis
HHNGTNGTMMQYFEWYLPNDGNHWNRLRSDASNLKDKGITAVWIPPAWKGASQNDVGYGAYDLYDLGEFNQKGTVRTKYGTRNQLQAAVTALKSNGIQVYGDVVMNHKGGADATEWVRAVEVNPSNRNQEVSGDYTIEAWTKFDFPGRGNTHSNFKWRWWHFDGVDWDQSRQLQNKIYKFRGKEWDWEVDEENGNYDYLMYADYDMDHPEVVNELRNWGVWYTNTLGLDGFRIDAVKHIKYSFTRDWLTHVRNTTGKNMFAVAEFWKNDIGAIENYLSKTNWNHSVFDVPLHYNLYNASRSGGNYDMRQIFNGTVVQRHPTHAVTFVDNHDSQPEEALESFVEEWFKPLAYALTLTRDQGYPSVFYGDYYGIPTHGVPAMKSKIDPILEARQKYAYGTQRDYLDHPDVIGWTREGDGVHADSGLATLMSDGPGGSKWMEVGKNNAGEVWYDITGNQTNTVTINKDGWGQFHVSGGSVSIYVQQ

SEQ ID NO: 26029 - protein, 483 aa, Bacillus licheniformis
HHNGTNGTMMQYFEWYLPNDGNHWNRLRSDASNLKDKGITAVWIPPAWKGASQNDVGYGAYDLYDLGEFNQKGTVRTKYGTRNQLQAAVTALKSNGIQVYGDVVMNHKGGADATEWVRAVEVNPSNRNQEVSGDYTIEAWTKFDFPGRGNTHSNFKWRWYHFDGVDWDQSRQLQNRIYKFRGKEWDWEVDTENGNYDYLMYADYDMDHPEVVNELRNWGVWYTNTLGLDGFRIDAVKHIKYSFTRDWLEHVRNTTGKNMFAVAEFWKNDIGAIRNYLSKTNWNHSVFDVPLHYNLYNASRSGGNYDMRQIFNGTVVQRHPTHAVTFVDNHDSQPEEALESFVEEWFKPLAYALTLTRDQGYPSVFYGDYYGIPTHGVPAMKSKIDPILEARQKYAYGTQRDYMDHPDVIGWTREGDGVHADSGLATLMSDGPGGSKWMEVGKNNAGEVWYDITGNQTNTVTINKDGWGQFHVSGGSVSIYVQQ

SEQ ID NO: 26030 - protein, 483 aa, Bacillus licheniformis
HHNQTNGTMMQYFEWYLPNDGNHWHRLRSDASNLKDKGITAVWIPPAWKGASQNDVGYGAYDLYDLGEFNQKGTVRTKYGTRNQLQAAVTALKSNGIQVYGDVVMNHKGGADATEWVRAVEVNPSNRNQEVSGDYTIEAWTKFDFPGRGNTHSNFKWRWYHFDGVDWDQSRQLQNKIYKFRGKGWDWEVDTENGNYDYLMYADYDMDHPEVVNELRNWGVWYTNTLGLDGFRIDAVKHIKYSFTRDWLEHVRNTTGKNMFAVAEFWKNDIGAIENYLSKTNWNHSVFDVPLHYNLYNASRSGGNYDMRQIFNGTVVQRHPTHAVTFVDNHDSQPEEALESFVEEWFKPLAYALTLTRDQGYPSVFYGDYYGIPTHGVPAMKSKIDPILEARQKYAYGTQRDYLDHPDVIGWTREGDGVHADSGLATLMSDGPGGSKWMEVGKNNAGEVWYDITGNQTGTVTINKDGWGQFHVSGGSVSIWVQQ

SEQ ID NO: 26031 - protein, 483 aa, Bacillus licheniformis
HHNQTNGTMMQYFEWYLPNDGNHWNRLRSDASNLKDKGITAVWIPPAWKGASQNDVGYGAYDLYDLGEFNQKGTVRTKYGTRNQLQAAVTALKSNGIQVYGDVVMNHKGGADATEWVRAVEVNPSNRNQEVSGDYTIEAWTKFDFPGRGNTHSNFKWRWYHFDGVDWDQSRQLQNKIYKFRGKEWDWEVDTENGNYDYLMYADIDMDHPEVVNELRNWGVWYTNTLGLDGFRIDAVKHIKYSFTRDWLTHVRNTTGKNMFAVAEFWKNDIGAIENYLSKTNWNHSVFDVPLHYNLYNASRSGGNYDMRQIFNGTVVQRHPTHAVTFVDNHDSQPEEALESFVEEWFKPLAYALTLTRDQGYPSVFYGDYYGIPTHGVPAMKSKIDPILEARQKYAYGTQRDYMDHPDVIGWTREGDGVHADSGLATLMSDGPGGSKWMEVGKNNAGEVWYDITGNQTNTVTINKDGWGQFHVSGGSVSIYVQQ

SEQ ID NO: 26032 - protein, 483 aa, Bacillus licheniformis
HHNGTNGTMMQYFEWYLPNDGNHWHRLRSDASNLKDKGITAVWIPPAWKGASQNDVGYGAYDLYDLGEFNQKGTVRTKYGTRNQLQAAVTALKSNGIQVYGDVVMNHKGGADATEWVRAVEVNPSNRNQEVSGDYTIEAWTKFDFPGRGNTHSNFKWRWYHFDGVDWDQSRQLQNRIYKFRGKEWDWEVDEENGNYDYLMYADYDMDHPEVVNELRNWGVWYTNTLGLDGFRIDAVKHIKYSFTRDWLTHVRNTTGKNMFAVAEFWKNDIGAIRNYLSKTNWNHSVFDVPLHYNLYNASRSGGNYDMRQIFNGTVVQRHPTHAVTFVDNHDSQPEEALESFVEEWFKPLAYALTLTRDQGYPSVFYGDYYGIPTHGVPAMKSKIDPILEARQKYAYGTQRDYMDHPDVIGWTREGDGVHADSGLATLMSDGPGGSKWMEVGKNNAGEVWYDITGNQTNTVTINKDGWGQFHVSGGSVSIYVQQ

SEQ ID NO: 26033 - protein, 483 aa, Bacillus licheniformis
HHNGTNGTMMQYFEWYLPNDGNHWHRLRSDASNLKDKGITAVWIPPAWKGASQNDVGYGAYDLYDLGEFNQKGTVRTKYGTRNQLQAAVTALKSNGIQVYGDVVMNHKGGADATEWVRAVEVNPSNRNQEVSGDYTIEAWTKFDFPGRGNTHSNFKWRWYHFDGVDWDQSRQLQNKIYKFRGKEWDWEVDTENGNYDYLMYADYDMDHPEVVNELRNWGVWYTNTLGLDGFRIDAVKHIKYSFTRDWLEHVRNTTGKNMFAVAEFWKNDIGAIENYLSKTNWNHSVFDVPLHYNLYNASRSGGNYDMRQIFNGTVVQRHPTHAVTFVDNHDSQPEEALESFVEEWFKPLAYALTLTRDQGYPSVFYGDYYGIPTHGVPAMKSKIDPILEARQKYAYGTQRDYLDHPDVIGWTREGDGVHADSGLATLMSDGPGGSKWMEVGKNNAGEVWYDITGNQTGTVTINKDGWGQFHVSGGSVSIYVQQ

SEQ ID NO: 26034 - protein, 483 aa, Bacillus licheniformis
HHNQTNGTMMQYFEWYLPNDGNHWNRLRSDASNLKDKGITAVWIPPAWKGASQNDVGYGAYDLYDLGEFNQKGTVRTKYGTRNQLQAAVTALKSNGIQVYGDVVMNHKGGADATEWVRAVEVNPSNRNQEVSGDYTIEAWTKFDFPGRGNTHSNFKWRWWHFDGVDWDQSRQLQNRIYKFRGKEWDWEVDTENGNYDYLMYADYDMDHPEVVNELRNWGVWYTNTLGLDGFRIDAVKHIKYSFTRDWLTHVRNTTGKNMFAVAEFWKNDIGAIENYLSKTNWNHSVFDVPLHYNLYNASRSGGNYDMRQIFNGTVVQRHPTHAVTFVDNHDSQPEEALESFVEEWFKPLAYALTLTRDQGYPSVFYGDYYGIPTHGVPAMKSKIDPILEARQKYAYGTQRDYMDHPDVIGWTREGDGVHADSGLATLMSDGPGGSKWMEVGKNNAGEVWYDITGNQTNTVTINKDGWGQFHVSGGSVSIYVQQ

SEQ ID NO: 26035 - protein, 483 aa, Bacillus licheniformis
HHNQTNGTMMQYFEWYLPNDGNHWNRLRSDASNLKDKGITAVWIPPAWKGASQNDVGYGAYDLYDLGEFNQKGTVRTKYGTRNQLQAAVTALKSNGIQVYGDVVMNHKGGADATEWVRAVEVNPSNRNQEVSGDYTIEAWTKFDFPGRGNTHSNFKWRWYHFDGVDWDQSRQLQNKIYKFRGKEWDWEVDEENGNYDYLMYADYDMDHPEVVNELRNWGVWYTNTLGLDGFRIDAVKHIKYSFTRDWLEHVRNTTGKNMFAVAEFWKNDIGAIENYLSKTNWNHSVFDVPLHYNLYNASRSGGNYDMRQIFNGTVVQRHPTHAVTFVDNHDSQPEEALESFVEEWFKPLAYALTLTRDQGYPSVFYGDYYGIPTHGVPAMKSKIDPILEARQKYAYGTQRDYMDHPDVIGWTREGDGVHADSGLATLMSDGPGGSKWMEVGKNNAGEVWYDITGNQTGTVTINKDGWGQFHVSGGSVSIYVQQ

SEQ ID NO: 26036 - protein, 483 aa, Bacillus licheniformis
HHNGTNGTMMQYFEWYLPNDGNHWNRLRSDASNLKDKGITAVWIPPAWKGASQNDVGYGAYDLYDLGEFNQKGTVRTKYGTRNQLQAAVTALKSNGIQVYGDVVMNHKGGADATEWVRAVEVNPSNRNQEVSGDYTIEAWTKFDFPGRGNTHSNFKWRWYHFDGVDWDQSRQLQNRIYKFRGKEWDWEVDTENGNYDYLMYADIDMDHPEVVNELRNWGVWYTDTLGLDGFRIDAVKHIKYSFTRDWLTHVRNTTGKNMFAVAEFWKNDIGAIENYLSKTNWNHSVFDVPLHYNLYNASRSGGNYDMRQIFNGTVVQRHPTHAVTFVDNHDSQPEEALESFVEEWFKPLAYALTLTRDQGYPSVFYGDYYGIPTHGVPAMKSKIDPILEARQKYAYGTQRDYLDHPDVIGWTREGDGVHADSGLATLMSDGPGGSKWMEVGKNNAGEVWYDITGNQTNEVTINKDGWGEFHVSGGSVSIYVQQ

SEQ ID NO: 26037 - protein, 483 aa, Bacillus licheniformis
HHNGTNGTMMQYFEWYLPNDGNHWHRLRSDASNLKDMGITAVWIPPAWKGASQNDVGYGAYDLYDLGEFNQKGTVRTKYGTRNQLQAAVTALKSNGIQVYGDVVMNHKGGADATEWVRAVEVNPSNRNQEVSGDYTIEAWTKFDFPGRGNTHSNFKWRWYHFDGVDWDQSRQLQNKIYKFRGKEWDWEVDTENGNYDYLMYADYDMDHPEVVNELRNWGVWYTNTLGLDGFRIDAVKHIKYSFTRDWLTHVRNTTGKNMFAVAEFWKNDIGAIENYLSKTNWNHSVFDVPLHYNLYNASRSGGNYDMRQIFNGTVVQRHPTHAVTFVDNHDSQPEEALESFVEEWFKPLAYALTLTRDQGYPSVFYGDYYGIPTHGVPAMKSKIDPILEARQKYAYGTQRDYLDHPDVIGWTREGDGVHADSGLATLMSDGPGGSKWMEVGKNNAGEVWYDITGNQTNTVTINKDGWGQFHVSGGSVSIYVQQ

SEQ ID NO: 26038 - protein, 483 aa, Bacillus licheniformis
HHNGTNGTMMQYFEWYLPNDGNHWHRLRSDASNLKDKGITAVWIPPAWKGASQNDVGYGAYDLYDLGEFNQKGTVRTKYGTRNQLQAAVTALKSNGIQVYGDVVMNHKGGADATEWVRAVEVNPSNRNQEVSGDYTIEAWTKFDFPGRGNTHSNFKWRWYHFDGVDWDQSRQLQNRIYKFRGKEWDWEVDTENGNYDYLMYADYDMDHPEVVNELRNWGVWYTNTLGLDGFRIDAVKHIKYSFTRDWLTHVRNTTGKNMFAVAEFWKNDIGAIRNYLSKTNWNHSVFDVPLHYNLYNASRSGGNYDMRQIFNGTVVQRHPTHAVTFVDNHDSQPEEALESFVEEWFKPLAYALTLTRDQGYPSVFYGDYYGIPTHGVPAMKSKIDPILEARQKYAYGTQRDYMDHPDVIGWTREGDGVHADSGLATLMSDGPGGSKWMEVGKNNAGEVWYDITGNQTNTVTINKDGWGQFHVSGGSVSIYVQQ

SEQ ID NO: 26039 - protein, 483 aa, Bacillus licheniformis
HHNGTNGTMMQYFEWYLPNDGNHWNRLRSDASNLKDKGITAVWIPPAWKGASQNDVGYGAYDLYDLGEFNQKGTVRTKYGTRNQLQAAVTALKSNGIQVYGDVVMNHKGGADATEWVRAVEVNPSNRNQEVSGDYTIEAWTKFDFPGRGNTHSNFKWRWWHFDGVDWDQSRQLQNRIYKFRGKEWDWEVDTENGNYDYLMYADYDMDHPEVVNELRNWGVWYTNTLGLDGFRIDAVKHIKYSFTRDWLTHVRNTTGKNMFAVAEFWKNDIGAIRNYLSKTNWNHSVFDVPLHYNLYNASRSGGNYDMRQIFNGTVVQRHPTHAVTFVDNHDSQPEEALESFVEEWFKPLAYALTLTRDQGYPSVFYGDYYGIPTHGVPAMKSKIDPILEARQKYAYGTQRDYMDHPDVIGWTREGDGVHADSGLATLMSDGPGGSKWMEVGKNNAGEVWYDITGNQTNTVTINKDGWGQFHVSGGSVSIYVQQ

SEQ ID NO: 26040 - protein, 483 aa, Bacillus licheniformis
HHNGTNGTMMQYFEWYLPNDGNHWYRLRSDASNLKDKGITAVWIPPAWKGASQNDVGYGAYDLYDLGEFNQKGTVRTKYGTRNQLQAAVTALKSNGIQVYGDVVMNHKGGADATEWVRAVEVNPSNRNQEVSGDYTIEAWTKFDFPGRGNTHSNFKWRWYHFDGVDWDQSRQLQNKIYKFRGKEWDWEVDTENGNYDYLMYADYDMDHPEVVNELRNWGVWYTNTLGLDGFRIDAVKHIKYSFTRDWLTHVRNTTGKNMFAVAEFWKNDIGAIENYLSKTNWNHSVFDVPLHYNLYNASRSGGNYDMRQIFNGTVVQRHPTHAVTFVDNHDSQPEEALESFVEEWFKPLAYALTLTRDQGYPSVFYGDYYGIPTHGVPAMKSKIDPILEARQKYAYGTQRDYLDHPDVIGWTREGDGVHADSGLATLMSDGPGGSKWMEVGKNNAGEVWYDITGNQTNTVTINKDGWGQFHVSGGSVSIYVQQ

SEQ ID NO: 26041 - protein, 483 aa, Bacillus licheniformis
HHNGTNGTMMQYFEWYLPNDGNHWNRLRSDASNLKDKGITAVWIPPAWKGASQNDVGYGAYDLYDLGEFNQKGTVRTKYGTRNQLQAAVTALKSNGIQVYGDVVMNHKGGADATEWVRAVEVNPSNRNQEVSGDYTIEAWTKFDFPGRGNTHSNFKWRWYHFDGVDWDQSRQLQNKIYKFRGKGWDWEVDTENGNYDYLMYADYDMDHPEVVNELRNWGVWYTNTLGLDGFRIDAVKHIKYSFTRDWLEHVRNTTGKNMFAVAEFWKNDIGAIENYLSKTNWNHSVFDVPLHYNLYNASRSGGNYDMRQIFNGTVVQRHPTHAVTFVDNHDSQPEEALESFVEEWFKPLAYALTLTRDQGYPSVFYGDYYGIPTHGVPAMKSKIDPILEARQKYAYGTQRDYMDHPDVIGWTREGDGVHADSGLATLMSDGPGGSKWMEVGKNNAGEVWYDITGNQTNTVTINKDGWGQFHVSGGSVSIYVQQ

SEQ ID NO: 26042 - protein, 483 aa, Bacillus licheniformis
HHNGTNGTMMQYFEWYLPNDGNHWHRLRSDASNLKDKGITAVWIPPAWKGASQNDVGYGAYDLYDLGEFNQKGTVRTKYGTRNQLQAAVTALKSNGIQVYGDVVMNHKGGADATEWVRAVEVNPSNRNQEVSGDYTIEAWTKFDFPGRGNTHSNFKWRWYHFDGVDWDQSRQLQNRIYKFRGKEWDWEVDTENGNYDYLMYADIDMDHPEVVNELRNWGVWYTNTLGLDGFRIDAVKHIKYSFTRDWLEHVRNTTGKNMFAVAEFWKNDIGAIENYLSKTNWNHSVFDVPLHYNLYNASRSGGNYDMRQIFNGTVVQRHPTHAVTFVDNHDSQPEEALESFVEEWFKPLAYALTLTRDQGYPSVFYGDYYGIPTHGVPAMKSKIDPILEARQKYAYGTQRDYLDHPDVIGWTREGDGVHADSGLATLMSDGPGGSKWMEVGKNNAGEVWYDITGNQTNTVTINKDGWGQFHVSGGSVSIYVQQ

SEQ ID NO: 26043 - protein, 483 aa, Bacillus licheniformis
HHNGTNGTMMQYFEWYLPNDGNHWNRLRSDASNLKDKGITAVWIPPAWKGASQNDVGYGAYDLYDLGEFNQKGTVRTKYGTRNQLQAAVTALKSNGIQVYGDVVMNHKGGADATEWVRAVEVNPSNRNQEVSGDYTIEAWTKFDFPGRGNTHSNFKWRWYHFDGVDWDQSRQLQNKIYKFRGKEWDWEVDEENGNYDYLMYADYDMDHPEVVNELRNWGVWYTNTLGLDGFRIDAVKHIKYSFTRDWLEHVRNTTGKNMFAVAEFWKNDIGAIENYLSKTNWNHSVFDVPLHYNLYNASRSGGNYDMRQIFNGTVVQRHPTHAVTFVDNHDSQPEEALESFVEEWFKPLAYALTLTRDQGYPSVFYGDYYGIPTHGVPAMKSKIDPILEARQKYAYGTQRDYMDHPDVIGWTREGDGVHADSGLATLMSDGPGGSKWMEVGKNNAGEVWYDITGNQTNTVTINKDGWGQFHVSGGSVSIYVQQ

SEQ ID NO: 26044 - protein, 483 aa, Bacillus licheniformis
HHNGTNGTMMQYFEWYLPNDGNHWNRLRSDASNLKDKGITAVWIPPAWKGASQNDVGYGAYDLYDLGEFNQKGTVRTKYGTRNQLQRAVTALKSNGIQVYGDVVMNHKGGADATEWVRAVEVNPSNRNQEVSGDYTIEAWTKFDFPGRGNTHSNFKWRWYHFDGVDWDQSRQLQNRIYKFRGKEWDWEVDTENGNYDYLMYADIDMDHPEVVNELRNWGVWYTNTLGLDGFRIDAVKHIKYSFTRDWLTHVRNTTGKNMFAVAEFWKNDIGAIENYLSKTNWNHSVFDVPLHYNLYNASRSGGNYDMRQIFNKTVVQRHPTHAVTFVDNHDSQPEEALESFVEEWFKPLAYALTLTRDQGYPSVFYGDYYGIPTHGVPAMKSKIDPILEARQKYAYGTQRDYLDHPDVIGWTREGDGVHADSGLATLMSDGPGGSKWMEVGKNNAGEVWYDITGNQTNRVTINKDGWGQFHVSGGSVSIYVQQ

SEQ ID NO: 26045 - protein, 483 aa, Bacillus licheniformis
HHNGTNGTMMQYFEWYLPNDGNHWHRLRSDASNLKDKGITAVWIPPAWKGASQNDVGYGAYDLYDLGEFNQKGTVRTKYGTRNQLQAAVTALKSNGIQVYGDVVMNHKGGADATEWVRAVEVNPSNRNQEVSGDYTIEAWTKFDFPGRGNTHSNFKWRWYHFDGVDWDQSRQLQNKIYKFRGKGWDWEVDTENGNYDYLMYADYDMDHPEVVNELRNWGVWYTNTLGLDGFRIDAVKHIKYSFTRDWLTHVRNTTGKNMFAVAEFWKNDIGAIRNYLSKTNWNHSVFDVPLHYNLYNASRSGGNYDMRQIFNGTVVQRHPTHAVTFVDNHDSQPEEALESFVEEWFKPLAYALTLTRDQGYPSVFYGDYYGIPTHGVPAMKSKIDPILEARQKYAYGTQRDYLDHPDVIGWTREGDGVHADSGLATLMSDGPGGSKWMEVGKNNAGEVWYDITGNQTGTVTINKDGWGQFHVSGGSVSIYVQQ

SEQ ID NO: 26046 - protein, 483 aa, Bacillus licheniformis
HHNGTNGTMMQYFEWYLPNDGNHWHRLRSDASNLKDKGITAVWIPPAWKGASQNDVGYGAYDLYDLGEFNQKGTVRTKYGTRNQLQAAVTALKSNGIQVYGDVVMNHKGGADATEWVRAVEVNPSNRNQEVSGDYTIEAWTKFDFPGRGNTHSNFKWRWYHFDGVDWDQSRQLQNKIYKFRGKEWDWEVDEENGNYDYLMYADYDMDHPEVVNELRNWGVWYTNTLGLDGFRIDAVKHIKYSFTRDWLTHVRNTTGKNMFAVAEFWKNDIGAIENYLSKTNWNHSVFDVPLHYNLYNASRSGGNYDMRQIFNGTVVQRHPTHAVTFVDNHDSQPEEALESFVEEWFKPLAYALTLTRDQGYPSVFYGDYYGIPTHGVPAMKSKIDPILEARQKYAYGTQRDYLDHPDVIGWTREGDGVHADSGLATLMSDGPGGSKWMEVGKNNAGEVWYDITGNQTNTVTINKDGWGQFHVSGGSVSIYVQQ

SEQ ID NO: 26047 - protein, 483 aa, Bacillus licheniformis
HHNGTNGTMMQYFEWYLPNDGNHWNRLRSDASNLKDKGITAVWIPPAWKGASQNDVGYGAYDLYDLGEFNQKGTVRTKYGTRNQLQAAVTALKSNGIQVYGDVVMNHKGGADATEWVRAVEVNPSNRNQEVSGDYTIEAWTKFDFPGRGNTHSNFKWRWYHFDGVDWDQSRQLQNKIYKFRGKGWDWEVDTENGNYDYLMYADYDMDHPEVVNELRNWGVWYTNTLGLDGFRIDAVKHIKYSFTRDWLEHVRNTTGKNMFAVAEFWKNDIGAIENYLSKTNWNHSVFDVPLHYNLYNASRSGGNYDMRQIFNGTVVQRHPTHAVTFVDNHDSQPEEALESFVEEWFKPLAYALTLTRDQGYPSVFYGDYYGIPTHGVPAMKSKIDPILEARQKYAYGTQRDYLDHPDVIGWTREGDGVHADSGLATLMSDGPGGSKWMEVGKNNAGEVWYDITGNQTNTVTINKDGWGQFHVSGGSVSIYVQQ

SEQ ID NO: 26048 - protein, 483 aa, Bacillus licheniformis
HHNGTNGTMMQYFEWYLPNDGNHWNRLRSDASNLKDKGITAVWIPPAWKGASQNDVGYGAYDLYDLGEFNQKGTVRTKYGTRNQLQAAVTALKSNGIQVYGDVVMNHKGGADATEWVRAVEVNPSNRNQEVSGDYTIEAWTKFDFPGRGNTHSNFKWRWYHFDGVDWDQSRQLQNKIYKFRGKEWDWEVDTENGNYDYLMYADYDMDHPEVVNELRNWGVWYTNTLGLDGFRIDAVKHIKYSFTRDWLTHVRNTTGKNMFAVAEFWKNDIGAIRNYLSKTNWNHSVFDVPLHYNLYNASRSGGNYDMRQIFNGTVVQRHPTHAVTFVDNHDSQPEEALESFVEEWFKPLAYALTLTRDQGYPSVFYGDYYGIPTHGVPAMKSKIDPILEARQKYAYGTQRDYMDHPDVIGWTREGDGVHADSGLATLMSDGPGGSKWMEVGKNNAGEVWYDITGNQTNTVTINKDGWGQFHVSGGSVSIYVQQ

SEQ ID NO: 26049 - protein, 483 aa, Bacillus licheniformis
HHNGTNGTMMQYFEWYLPNDGNHWNRLRSDASNLKDKGITAVWIPPAWKGASQNDVGYGAYDLYDLGEFNQKGTVRTKYGTREQLQAAVTALKSNGIQVYGDVVMNHKGGADATERVRAVEVNPSNRNQEVSGDYTIEAWTKFDFPGRGNTHSNFKWYWYHFDGVDWDQSRQLQNRIYKFEGKGWDWEVDTENGNYDYLMYADIDMDHPEVVNELRNWGVWYTNTLGLDGFRIDAVKHIKYSFTRDWLTHVRNTTGKNMFAVAEFWKNDIGAIENYLSKTNWNHSVFDVPLHYNLYNASRSGGNYDMRQIFNGTVVQRHPTHAVTFVDNHDSQPEEALESFVEEWFKPLAYALTLTRDQGYPSVFYGDYYGIPTHGVPAMKSKIDPILEARQKYAYGTQRDYLDHPDVIGWTREGDGVHADSGLATLMSDGPGGSKWMEVGKNNAGEVWYDITGNQTNTVTINKDGWGQFHVSGGSVSIYVQQ

SEQ ID NO: 26050 - protein, 483 aa, Bacillus licheniformis
HHNGTNGTMMQYFEWYLPNDGNHWNRLRSDASNLKDKGITAVWIPPAWKGASQNDVGYGAYDLYDLGEFNQKGTVRTKYGTRNQLQDAVTALKSNGIQVYGDVVMNHKGGADATEWVRAVEVNPSNRNQEVSGDYTIEAWTKFDFPGRGNTHSNFKWRWYHFDGVDWDQSRQLQNRIYKFRGKEWDWEVDTENGNYDYLMYADIDMDHPEVVNELRNWGVWYTDTLGLDGFRIDAVKHIKYSFTRDWLTHVRNTTGKNMFAVAEFWKNDIGAIENYLSKTNWNHSVFDVPLHYNLYNASRSGGNYDMRQIFNGTVVQRHPTHAVTFVDNHDSQPEEALESFVEEWFKPLAYALTLTRDQGYPSVFYGDYYGIPTHGVPAMKSKIDPILEARQKYAYGTQRDYLDHPDVIGWTREGDGEHADSGLATLMSDGPGGSKWMEVGKNNAGEVWYDITGNQTNEVTINKDGWGQFHVSGGSVSIYVQQ

SEQ ID NO: 26051 - protein, 483 aa, Bacillus licheniformis
HHNGTNGTMMQYFEWYLPNDGNHWNRLRSDASNLKDKGITAVWIPPAWKGASQNDVGYGAYDLYDLGEFNQKGTVRTKYGTRNQLQAAVTALKSNGIQVYGDVVMNHKGGADATEWVRAVEVNPSNRNQEVSGDYTIEAWTKFDFPGRGNTHSNFKWRWWHFDGVDWDQSRQLQNKIYKFRGKGWDWEVDTENGNYDYLMYADYDMDHPEVVNELRNWGVWYTNTLGLDGFRIDAVKHIKYSFTRDWLTHVRNTTGKNMFAVAEFWKNDIGAIRNYLSKTNWNHSVFDVPLHYNLYNASRSGGNYDMRQIFNGTVVQRHPTHAVTFVDNHDSQPEEALESFVEEWFKPLAYALTLTRDQGYPSVFYGDYYGIPTHGVPAMKSKIDPILEARQKYAYGTQRDYMDHPDVIGWTREGDGVHADSGLATLMSDGPGGSKWMEVGKNNAGEVWYDITGNQTGTVTINKDGWGQFHVSGGSVSIYVQQ

SEQ ID NO: 26052 - protein, 483 aa, Bacillus licheniformis
HHNGTNGTMMQYFEWYLPNDGNHWNRLRSDASNLKDKGITAVWIPPAWKGASQNDVGYGAYDLYDLGEFNQKGTVRTKYGTRNQLQAAVTALKSNGIQVYGDVVMNHKGGADATEWVRAVEVNPSNRNQEVSGDYTIEAWTKFDFPGRGNTHSNFKWRWWHFDGVDWDQSRQLQNRIYKFRGKEWDWEVDTENGNYDYLMYADIDMDHPEVVNELRNWGVWYTNTLGLDGFRIDAVKHIKYSFTRDWLTHVRNTTGKNMFAVAEFWKNDIGAIRNYLSKTNWNHSVFDVPLHYNLYNASRSGGNYDMRQIFNGTVVQRHPTHAVTFVDNHDSQPEEALESFVEEWFKPLAYALTLTRDQGYPSVFYGDYYGIPTHGVPAMKSKIDPILEARQKYAYGTQRDYMDHPDVIGWTREGDGVHADSGLATLMSDGPGGSKWMEVGKNNAGEVWYDITGNQTNTVTINKDGWGQFHVSGGSVSIYVQQ

SEQ ID NO: 26053 - protein, 483 aa, Bacillus licheniformis
HHNGTNGTMMQYFEWYLPNDGNHWHRLRSDASNLKDKGITAVWIPPAWKGASQNDVGYGAYDLYDLGEFNQKGTVRTKYGTRNQLQAAVTALKSNGIQVYGDVVMNHKGGADATEWVRAVEVNPSNRNQEVSGDYTIEAWTKFDFPGRGNTHSNFKWRWYHFDGVDWDQSRQLQNRIYKFRGKEWDWEVDTENGNYDYLMYADYDMDHPEVVNELRNWGVWYTNTLGLDGFRIDAVKHIKYSFTRDWLEHVRNTTGKNMFAVAEFWKNDIGAIENYLSKTNWNHSVFDVPLHYNLYNASRSGGNYDMRQIFNGTVVQRHPTHAVTFVDNHDSQPEEALESFVEEWFKPLAYALTLTRDQGYPSVFYGDYYGIPTHGVPAMKSKIDPILEARQKYAYGTQRDYMDHPDVIGWTREGDGVHADSGLATLMSDGPGGSKWMEVGKNNAGEVWYDITGNQTNTVTINKDGWGQFHVSGGSVSIYVQQ

SEQ ID NO: 26054 - protein, 483 aa, Bacillus licheniformis
HHNGTNGTMMQYFEWYLPNDGNHWNRLRSDASNLKDKGITAVWIPPAWKGASQNDVGYGAYDLYDLGEFNQKGTVRTKYGTRNQLQAAVTALKSNGIQVYGDVVMNHKGGADATEWVRAVEVNPSNRNQEVSGDYTIEAWTKFDFPGRGNTHSNFKWRWWHFDGVDWDQSRQLQNKIYKFRGKGWDWEVDTENGNYDYLMYADYDMDHPEVVNELRNWGVWYTNTLGLDGFRIDAVKHIKYSFTRDWLTHVRNTTGKNMFAVAEFWKNDIGAIENYLSKTNWNHSVFDVPLHYNLYNASRSGGNYDMRQIFNGTVVQRHPTHGVTFVDNHDSQPEEALESFVEEWFKPLAYALTLTRDQGYPSVFYGDYYGIPTHGVPAMKSKIDPILEARQKYAYGTQRDYMDHPDVIGWTREGDGVHADSGLATLMSDGPGGSKWMEVGKNNAGEVWYDITGNQTGTVTINKDGWGQFHVSGGSVSIYVQQ

SEQ ID NO: 26055 - protein, 483 aa, Bacillus subtilis
HHNGTNGTMMQYFEWYLPNDGNHWNRLRSDASNLKDKGITAVWIPPAWKGASQNDVGYGAYDLYDLGEFNQKGTVRTKYGTRNQLQAAVTALKSNGIQVYGDVVMNHKGGADATEWVRAVEVNPSNRNQEVSGDYTIEAWTKFDFPGRGNTHSNFKWRWYHFDGVDWDQSRQLQNRIYKFRGKGWDWEVDTENGNYDYLMYADIDMDHPEVVNELRNWGVWYTNTLGLDGFRIDAVKHIKYSFTRDWLTHVRNTTGKNMFAVAEFWKNDIGAIENYLSKTNWNHSVFDVPLHYNLYNASRSGGNYDMRQIFNGTVVQRHPTHAVTFVDNHDSQPEEALESFVEEWFKPLAYALTLTRDQGYPSVFYGDYYGIPTHGVPAMKSKIDPILEARQKYAYGTQRDYLDHPDVIGWTREGDSVHAKSGLAALMSDGPGGSKWMDVGKNNAGEVWYDITGNQTNTVTINKDGSGQFHVSGGSVSIYVQQ

SEQ ID NO: 26056 - protein, 483 aa, Bacillus licheniformis
HHNGTNGTMMQYFEWYLPNDGNHWNRLRSDASNLKDKGITAVWIPPAWKGASQNDVGYGAYDLYDLGEFNQKGTVRTKYGTRNQLQAAVTALKSNGIQVYGDVVMNHKGGADATEWVRAVEVNPSNRNQEVSGDYTIEAWTKFDFPGRGNTHSNFKWRWYHFDGVDWDQSRQLQNRIYKFRGKEWDWEVDTENGNYDYLMYADIDMDHPEVVNELRNWGVWYTNTLGLDGFRIDAVKHIKYSFTRDWLTHVRNTTGKNMFAVAEFWKNDIGAIENYLSKTNWNHSVFDVPLHYNLYNASRSGGNYDMRQIFEGTVVQRHPTHAVTFVDNHDSQPEEALESFVEEWFKPLAYALTLTRDQGYPSVFYGDYYGIPTHGVPAMKSKIDPILEARQKYAYGTQRDYLDHPDVIGWTREGDGVHADSGLATLMSDGPGGSKWMEVGKNNAGEVWYDITGNQTDEVTINKDGWGQFHVSGGSVSIYVQQ

SEQ ID NO: 26057 - protein, 483 aa, Bacillus licheniformis
HHNGTNGTMMQYFEWYLPNDGNHWHRLRSDASNLKDKGITAVWIPPAWKGASQNDVGYGAYDLYDLGEFNQKGTVRTKYGTRNQLQAAVTALKSNGIQVYGDVVMNHKGGADATEWVRAVEVNPSNRNQEVSGDYTIEAWTKFDFPGRGNTHSNFKWRWYHFDGVDWDQSRQLQNRIYKFRGKEWDWEVDTENGNYDYLIYADYDMDHPEVVNELRNWGVWYTNTLGLDGFRIDAVKHIKYSFTRDWLTHVRNTTGKNMFAVAEFWKNDIGAIENYLSKTNWNHSVFDVPLHYNLYNASRSGGNYDMRQIFNGTVVQRHPTHAVTFVDNHDSQPEEALESFVEEWFKPLAYALTLTRDQGYPSVFYGDYYGIPTHGVPAMKSKIDPILEARQKYAYGTQRDYMDHPDVIGWTREGDGVHADSGLATLMSDGPGGSKWMEVGKNNAGEVWYDITGNQTNTVTINKDGWGQFHVSGGSVSIYVQQ

SEQ ID NO: 26058 - protein, 483 aa, Bacillus licheniformis
HHNGTNGTMMQYFEWYLPNDGNHWHRLRSDASNLKDKGITAVWIPPAWKGASQNDVGYGAYDLYDLGEFNQKGTVRTKYGTRNQLQAAVTALKSNGIQVYGDVVMNHKGGADATEWVRAVEVNPSNRNQEVSGDYTIEAWTKFDFPGRGNTHSNFKWRWWHFDGVDWDQSRQLQNKIYKFRGKGWDWEVDTENGNYDYLMYADYDMDHPEVVNELRNWGVWYTNTLGLDGFRIDAVKHIKYSFTRDWLTHVRNTTGKNMFAVAEFWKNDIGAIENYLSKTNWNHSVFDVPLHYNLYNASRSGGNYDMRQIFNGTVVQRHPTHAVTFVDNHDSQPEEALESFVEEWFKPLAYALTLTRDQGYPSVFYGDYYGIPTHGVPAMKSKIDPILEARQKYAYGTQRDYLDHPDVIGWTREGDGVHADSGLATLMSDGPGGSKWMEVGKNNAGEVWYDITGNQTGTVTINKDGWGQFHVSGGSVSIYVQQ

SEQ ID NO: 26059 - protein, 483 aa, Bacillus licheniformis
HHNGTNGTMMQYFEWYLPNDGNHWNRLRSDASNLKDKGITAVWIPPAWKGASQNDVGYGAYDLYDLGEFNQKGTVRTKYGTRNQLQAAVTALKSNGIQVYGDVVMNHKGGADATEWVRAVEVNPSNRNQEVSGDYTIEAWTKFDFPGRGNTHSNFKWRWYHFDGVDWDQSRQLQNKIYKFRGKEWDWEVDTENGNYDYLMYADYDMDHPEVVNELRNWGVWYTNTLGLDGFRIDAVKHIKYSFTRDWLEHVRNTTGKNMFAVAEFWKNDIGAIENYLSKTNWNHSVFDVPLHYNLYNASRSGGNYDMRQIFNGTVVQRHPTHAVTFVDNHDSQPEEALESFVEEWFKPLAYALTLTRDQGYPSVFYGDYYGIPTHGVPAMKSKIDPILEARQKYAYGTQRDYMDHPDVIGWTREGDGVHADSGLATLMSDGPGGSKWMEVGKNNAGEVWYDITGNQTNTVTINKDGWGQFHVSGGSVSIYVQQ

SEQ ID NO: 26060 - protein, 483 aa, Bacillus licheniformis
HHNGTNGTMMQYFEWYLPNDGNHWNRLRSDASNLKDKGITAVWIPPAWKGASQNDVGYGAYDLYDLGEFNQKGTVRTKYGTRNQLQAAVTALKSNGIQVYGDVVMNHKGGADATEWVRAVEVNPSNRNQEVSGDYTIEAWTKFDFPGRGNTHSNFKWRWYHFDGVDWDQSRQLQNRIYKFRGKEWDWEVDTENGNYDYLMYADYDMDHPEVVNELRNWGVWYTNTLGLDGFRIDAVKHIKYSFTRDWLEHVRNTTGKNMFAVAEFWKNDIGAIRNYLSKTNWNHSVFDVPLHYNLYNASRSGGNYDMRQIFNGTVVQRHPTHAVTFVDNHDSQPEEALESFVEEWFKPLAYALTLTRDQGYPSVFYGDYYGIPTHGVPAMKSKIDPILEARQKYAYGTQRDYLDHPDVIGWTREGDGVHADSGLATLMSDGPGGSKWMEVGKNNAGEVWYDITGNQTNTVTINKDGWGQFHVSGGSVSIYVQQ

SEQ ID NO: 26061 - protein, 483 aa, Bacillus licheniformis
HHNGTNGTMMQYFEWYLPNDGNHWNRLRSDASNLKDKGITAVWIPPAWKGASQNDVGYGAYDLYDLGEFNQKGTVRTKYGTRNQLQAAVTALKSNGIQVYGDVVMNHKGGADATEWVRAVEVNPSNRNQEVSGDYTIEAWTKFDFPGRGNTHSNFKWRWYHFDGVDWDQSRQLQNRIYKFRGKEWDWEVDTENGNYDYLMYADIDMDHPEVVNELRNWGVWYTDTLGLDGFRIDAVKHIKYSFTRDWLTHVRNTTGKNMFAVAEFWKNDIGAIENYLSKTNWNHSVFDVPLHYNLYNASRSGGNYDMRQIFKGTVVQRHPTHAVTFVDNHDSQPEEALESFVEEWFKPLAYALTLTRDQGYPSVFYGDYYGIPTHGVPAMKSKIDPILEARQKYAYGTQRDYLDHPDVIGWTREGDGVHADSGLATLMSDGPGGSKWMEVGKNNAGEVWYDITGNQTDTVTINKDGWGEFHVSGGSVSIYVQQ

SEQ ID NO: 26062 - protein, 483 aa, Bacillus licheniformis
HHNGTNGTMMQYFEWYLPNDGNHWNRLRSDASNLKDKGITAVWIPPAWKGASQNDVGYGAYDLYDLGEFNQKGTVRTKYGTRNQLQAAVTALKSNGIQVYGDVVMNHKGGADATEWVRAVEVNPSNRNQEVSGDYTIEAWTKFDFPGRGNTHSNFKWRWWHFDGVDWDQSRQLQNKIYKFRGKGWDWEVDTENGNYDYLMYADYDMDHPEVVNELRNWGVWYTNTLGLDGFRIDAVKHIKYSFTRDWLEHVRNTTGKNMFAVAEFWKNDIGAIENYLSKTNWNHSVFDVPLHYNLYNASRSGGNYDMRQIFNGTVVQRHPTHAVTFVDNHDSQPEEALESFVEEWFKPLAYALTLTRDQGYPSVFYGDYYGIPTHGVPAMKSKIDPILEARQKYAYGTQRDYMDHPDVIGWTREGDGVHADSGLATLMSDGPGGSKWMEVGKNNAGEVWYDITGNQTGTVTINKDGWGQFHVSGGSVSIYVQQ

SEQ ID NO: 26063 - protein, 483 aa, Bacillus licheniformis
HHNGTNGTMMQYFEWYLPNDGNHWHRLRSDASNLKDKGITAVWIPPAWKGASQNDVGYGAYDLYDLGEFNQKGTVRTKYGTRNQLQAAVTALKSNGIQVYGDVVMNHKGGADATEWVRAVEVNPSNRNQEVSGDYTIEAWTKFDFPGRGNTHSNFKWRWWHFDGVDWDQSRQLQNRIYKFRGKEWDWEVDTENGNYDYLMYADYDMDHPEVVNELRNWGVWYTNTLGLDGFRIDAVKHIKYSFTRDWLTHVRNTTGKNMFAVAEFWKNDIGAIENYLSKTNWNHSVFDVPLHYNLYNASRSGGNYDMRQIFNGTVVQRHPTHAVTFVDNHDSQPEEALESFVEEWFKPLAYALTLTRDQGYPSVFYGDYYGIPTHGVPAMKSKIDPILEARQKYAYGTQRDYLDHPDVIGWTREGDGVHADSGLATLMSDGPGGSKWMEVGKNNAGEVWYDITGNQTNTVTINKDGWGQFHVSGGSVSIYVQQ

SEQ ID NO: 26064 - protein, 483 aa, Bacillus licheniformis
HHNQTNGTMMQYFEWYLPNDGNHWHRLRSDASNLKDKGITAVWIPPAWKGASQNDVGYGAYDLYDLGEFNQKGTVRTKYGTRNQLQAAVTALKSNGIQVYGDVVMNHKGGADATEWVRAVEVNPSNRNQEVSGDYTIEAWTKFDFPGRGNTHSNFKWRWYHFDGVDWDQSRQLQNKIYKFRGKGWDWEVDTENGNYDYLMYADYDMDHPEVVNELRNWGVWYTNTLGLDGFRIDAVKHIKYSFTRDWLTHVRNTTGKNMFAVAEFWKNDIGAIENYLSKTNWNHSVFDVPLHYNLYNASRSGGNYDMRQIFNGTVVQRHPTHAVTFVDNHDSQPEEALESFVEEWFKPLAYALTLTRDQGYPSVFYGDYYGIPTHGVPAMKSKIDPILEARQKYAYGTQRDYLDHPDVIGWTREGDGVHADSGLATLMSDGPGGSKWMEVGKNNAGEVWYDITGNQTGTVTINKDGWGQFHVSGGSVSIYVQQ

SEQ ID NO: 26065 - protein, 483 aa, Bacillus licheniformis
HHNGTNGTMMQYFEWYLPNDGNHWNRLRSDASNLKDKGITAVWIPPAWKGASQNDVGYGAYDLYDLGEFNQKGTVRTKYGTRNQLQAAVTALKSNGIQVYGDVVMNHKGGADATEWVRAVEVNPSNRNQEVSGDYTIEAWTKFDFPGRGNTHSNFKWRWYHFDGVDWDQSRQLQNKIYKFRGKEWDWEVDTENGNYDYLMYADYDMDHPEVVNELRNWGVWYTNTLGLDGFRIDAVKHIKYSFTRDWLTHVRNTTGKNMFAVAEFWKNDIGAIRNYLSKTNWNHSVFDVPLHYNLYNASRSGGNYDMRQIFNGTVVQRHPTHAVTFVDNHDSQPEEALESFVEEWFKPLAYALTLTRDQGYPSVFYGDYYGIPTHGVPAMKSKIDPILEARQKYAYGTQRDYLDHPDVIGWTREGDGVHADSGLATLMSDGPGGSKWMEVGKNNAGEVWYDITGNQTNTVTINKDGWGQFHVSGGSVSIYVQQ

SEQ ID NO: 26066 - protein, 483 aa, Bacillus licheniformis
HHNGTNGTMMQYFEWYLPNDGNHWHRLRSDASNLKDKGITAVWIPPAWKGASQNDVGYGAYDLYDLGEFNQKGTVRTKYGTRNQLQAAVTALKSNGIQVYGDVVMNHKGGADATEWVRAVEVNPSNRNQEVSGDYTIEAWTKFDFPGRGNTHSNFKWRWYHFDGVDWDQSRQLQNKIYKFRGKEWDWEVDTENGNYDYLMYADYDMDHPEVVNELRNWGVWYTNTLGLDGFRIDAVKHIKYSFTRDWLTHVRNTTGKNMFAVAEFWKNDIGAIENYLSKTNWNHSVFDVPLHYNLYNASRSGGNYDMRQIFNGTVVQRHPTHAVTFVDNHDSQPEEALESFVEEWFKPLAYALTLTRDQGYPSVFYGDYYGIPTHGVPAMKSKIDPILEARQKYAYGTQRDYLDHPDVIGWTREGDGVHADSGLATLMSDGPGGSKWMEVGKNNAGEVWYDITGNQTNTVTINKDGWGQFHVSGGSVSIYVQQ

SEQ ID NO: 26067 - protein, 483 aa, Bacillus licheniformis
HHNGTNGTMMQYFEWYLPNDGNHWNRLRSDASNLKDKGITAVWIPPAWKGASQNDVGYGAYDLYDLGEFNQKGTVRTKYGTRNQLQAAVTALKSNGIQVYGDVVMNHKGGADATEWVRAVEVNPSNRNQEVSGDYTIEAWTKFDFPGRGNTHSNFKWRWWHFDGVDWDQSRQLQNRIYKFRGKEWDWEVDTENGNYDYLMYADYDMDHPEVVNELRNWGVWYTNTLGLDGFRIDAVKHIKYSFTRDWLTHVRNTTGKNMFAVAEFWKNDIGAIRNYLSKTNWNHSVFDVPLHYNLYNASRSGGNYDMRQIFNGTVVQRHPTHAVTFVDNHDSQPEEALESFVEEWFKPLAYALTLTRDQGYPSVFYGDYYGIPTHGVPAMKSKIDPILEARQKYAYGTQRDYLDHPDVIGWTREGDGVHADSGLATLMSDGPGGSKWMEVGKNNAGEVWYDITGNQTNTVTINKDGWGQFHVSGGSVSIYVQQ

SEQ ID NO: 26068 - protein, 483 aa, Bacillus licheniformis
HHNGTNGTMMQYFEWYLPNDGNHWNRLRSDASNLKDKGITAVWIPPAWKGASQNDVGYGAYDLYDLGEFNQKGTVRTKYGTRNQLQAAVTALKSNGIQVYGDVVMNHKGGADATEWVRAVEVNPSNRNQEVSGDYTIEAWTKFDFPGRGNTHSNFKWRWWHFDGVDWDQSRQLQNRIYKFRGKEWDWEVDTENGNYDYLMYADYDMDHPEVVNELRNWGVWYTNTLGLDGFRIDAVKHIKYSFTRDWLEHVRNTTGKNMFAVAEFWKNDIGAIENYLSKTNWNHSVFDVPLHYNLYNASRSGGNYDMRQIFNGTVVQRHPTHAVTFVDNHDSQPEEALESFVEEWFKPLAYALTLTRDQGYPSVFYGDYYGIPTHGVPAMKSKIDPILEARQKYAYGTQRDYLDHPDVIGWTREGDGVHADSGLATLMSDGPGGSKWMEVGKNNAGEVWYDITGNQTNTVTINKDGWGQFHVSGGSVSIYVQQ

SEQ ID NO: 26069 - protein, 483 aa, Bacillus licheniformis
HHNQTNGTMMQYFEWYLPNDGNHWNRLRSDASNLKDKGITAVWIPPAWKGASQNDVGYGAYDLYDLGEFNQKGTVRTKYGTRNQLQAAVTALKSNGIQVYGDVVMNHKGGADATEWVRAVEVNPSNRNQEVSGDYTIEAWTKFDFPGRGNTHSNFKWRWWHFDGVDWDQSRQLQNRIYKFRGKEWDWEVDTENGNYDYLMYADYDMDHPEVVNELRNWGVWYTNTLGLDGFRIDAVKHIKYSFTRDWLTHVRNTTGKNMFAVAEFWKNDIGAIENYLSKTNWNHSVFDVPLHYNLYNASRSGGNYDMRQIFNGTVVQRHPTHAVTFVDNHDSQPEEALESFVEEWFKPLAYALTLTRDQGYPSVFYGDYYGIPTHGVPAMKSKIDPILEARQKYAYGTQRDYLDHPDVIGWTREGDGVHADSGLATLMSDGPGGSKWMEVGKNNAGEVWYDITGNQTNTVTINKDGWGQFHVSGGSVSIYVQQ

SEQ ID NO: 26070 - protein, 483 aa, Bacillus licheniformis
HHNGTNGTMMQYFEWYLPNDGNHWNRLRSDASNLKDKGITAVWIPPAWKGASQNDVGYGAYDLYDLGEFNQKGTVRTKYGTRNQLQAAVTALKSNGIQVYGDVVMNHKGGADATEWVRAVEVNPSNRNQEVSGDYTIEAWTKFDFPGRGNTHSNFKWRWWHFDGVDWDQSRQLQNKIYKFRGKGWDWEVDTENGNYDYLMYADYDMDHPEVVNELRNWGVWYTNTLGLDGFRIDAVKHIKYSFTRDWLTHVRNTTGKNMFAVAEFWKNDIGAIENYLSKTNWNHSVFDVPLHYNLYNASRSGGNYDMRQIFNGTVVQRHPTHAVTFVDNHDSQPEEALESFVEEWFKPLAYALTLTRDQGYPSVFYGDYYGIPTHGVPAMKSKIDPILEARQKYAYGTQRDYMDHPDVIGWTREGDGVHADSGLATLMSDGPGGSKWMEVGKNNAGEVWYDITGNQTNTVTINKDGWGQFHVSGGSVSIYVQQ

SEQ ID NO: 26071 - protein, 483 aa, Bacillus licheniformis
HHNGTNGTMMQYFEWYLPNDGNHWNRLRSDASNLKDKGITAVWIPPAWKGASQNDVGYGAYDLYDLGEFNQKGTVRTKYGTRNQLQAAVTALKSNGIQVYGDVVMNHKGGADATEWVRAVEVNPSNRNQEVSGDYTIEAWTKFDFPGRGNTHSNFKWRWYHFDGVDWDQSRQLQNRIYKFRGKEWDWEVDTENGNYDYLMYADIDMDHPEVVNELRNWGVWYTDTLGLDGFRIDAVKHIKYSFTRDWLTHVRNTTGKNMFAVAEFWKNDIGAIENYLSKTNWNHSVFDVPLHYNLYNASRSGGNYDMRQIFEGTVVQRHPTHAVTFVDNHDSQPEEALESFVEEWFKPLAYALTLTRDQGYPSVFYGDYYGIPTHGVPAMKSKIDPILEARQKYAYGTQRDYLDHPDVIGWTREGDGVHADSGLATLMSDGPGGSKWMEVGKNNAGEVWRDITGNQTNTVTINKDGWGQFHVSGGSVSIYVQQ

SEQ ID NO: 26072 - protein, 483 aa, Bacillus licheniformis
HHNGTNGTMMQYFEWYLPNDGNHWNRLRSDASNLKDKGITAVWIPPAWKGASQNDVGYGAYDLYDLGEFNQKGTVRTKYGTREQLQAAVTALKSNGIQVYGDVVMNHKGGADATEWVRAVEVNPSNRNQEVSGDYTIEAWTKFDFPGRGNTHSNFKWRWDHFDGVDWDQSRQLQNRIYKFRGKEWDWEVDTENGNYDYLMYADIDMDHPEVVNELRDWGVWYTRTLGLDGFRIDAVKHIKYSFTRDWLTHVRNTTGKNMFAVAEFWKNDIGAIENYLSKTNWNHSVFDVPLHYNLYNASRSGGNYDMRQIFNGTVVQRHPTHAVTFVDNHDSQPEEALESFVEEWFKPLAYALTLTRDQGYPSVFYGDYYGIPTHGVPAMKSKIDPILEARQKYAYGTQRDYLDHPDVIGWTREGDGVHADSGLATLMSDGPGGSKWMEVGKNNAGEVWRDITGNQTNTVTINKDGWGQFHVSGGSVSIYVQQ

SEQ ID NO: 26073 - protein, 483 aa, Bacillus licheniformis
HHNQTNGTMMQYFEWYLPNDGNHWHRLRSDASNLKDKGITAVWIPPAWKGASQNDVGYGAYDLYDLGEFNQKGTVRTKYGTRNQLQAAVTALKSNGIQVYGDVVMNHKGGADATEWVRAVEVNPSNRNQEVSGDYTIEAWTKFDFPGRGNTHSNFKWRWYHFDGVDWDQSRQLQNRIYKFRGKEWDWEVDTENGNYDYLMYADIDMDHPEVVNELRNWGVWYTNTLGLDGFRIDAVKHIKYSFTRDWLTHVRNTTGKNMFAVAEFWKNDIGAIENYLSKTNWNHSVFDVPLHYNLYNASRSGGNYDMRQIFNGTVVQRHPTHAVTFVDNHDSQPEEALESFVEEWFKPLAYALTLTRDQGYPSVFYGDYYGIPTHGVPAMKSKIDPILEARQKYAYGTQRDYMDHPDVIGWTREGDGVHADSGLATLMSDGPGGSKWMEVGKNNAGEVWYDITGNQTNTVTINKDGWGQFHVSGGSVSIYVQQ

SEQ ID NO: 26074 - protein, 485 aa, Synthetic construct
HHDGTNGTIMQYFEWNVPNDGQHWNRLHNNAQNLKNAGITAIWIPPAWKGTSQNDVGYGAYDLYDLGEFNQKGTVRTKYGTKAELERAIRSLKANGIQVYGDVVMNHKGGADATENVLAVEVNPNNRNQEISGDYTIEAWTKFDFPGRGNTYSDFKWRWYHFDGVDWDQSRQFQNRIYKFRGDGKAWDWEVDSENGNYDYLMYADVDMDHPEVINELNRWGVWYANTLNLDGFRLDAVKHIKFSFMRDWLGHVRGQTGKNLFAVAEYWKNDLGALENYLSKTNWTMSAFDVPLHYNLYQASNSSGNYDMRNLLNGTLVQRHPSHAVTFVDNHDTQPGEALESFVQGWFKPLAYATILTREQGYPQVFYGDYYGIPSDGVPSYRQQIDPLLKARQQYAYGRQHDYFDHWDVIGWTREGNASHPNSGLATIMSDGPGGSKWMYVGRQKAGEVWHDMTGNRSGTVTINQDGWGHFFVNGGSVSVWVKR

SEQ ID NO: 26075 - protein, 483 aa, Bacillus licheniformis
HHNQTNGTMMQYFEWYLPNDGNHWHRLRSDASNLKDKGITAVWIPPAWKGASQNDVGYGAYDLYDLGEFNQKGTVRTKYGTRNQLQAAVTALKSNGIQVYGDVVMNHKGGADATEWVRAVEVNPSNRNQEVSGDYTIEAWTKFDFPGRGNTHSNFKWRWYHFDGVDWDQSRQLQNRIYKFRGKEWDWEVDTENGNYDYLMYADYDMDHPEVVNELRNWGVWYTNTLGLDGFRIDAVKHIKYSFTRDWLTHVRNTTGKNMFAVAEFWKNDIGAIENYLSKTNWNHSVFDVPLHYNLYNASRSGGNYDMRQIFNGTVVQRHPTHAVTFVDNHDSQPEEALESFVEEWFKPLAYALTLTRDQGYPSVFYGDYYGIPTHGVPAMKSKIDPILEARQKYAYGTQRDYMDHPDVIGWTREGDGVHADSGLATLMSDGPGGSKWMEVGKNNAGEVWYDITGNQTNTVTINKDGWGQFHVSGGSVSIYVQQ

SEQ ID NO: 26076 - protein, 483 aa, Bacillus licheniformis
HHNQTNGTMMQYFEWYLPNDGNHWNRLRSDASNLKDKGITAVWIPPAWKGASQNDVGYGAYDLYDLGEFNQKGTVRTKYGTRNQLQAAVTALKSNGIQVYGDVVMNHKGGADATEWVRAVEVNPSNRNQEVSGDYTIEAWTKFDFPGRGNTHSNFKWRWYHFDGVDWDQSRQLQNKIYKFRGKEWDWEVDEENGNYDYLMYADYDMDHPEVVNELRNWGVWYTNTLGLDGFRIDAVKHIKYSFTRDWLEHVRNTTGKNMFAVAEFWKNDIGAIENYLSKTNWNHSVFDVPLHYNLYNASRSGGNYDMRQIFNGTVVQRHPTHAVTFVDNHDSQPEEALESFVEEWFKPLAYALTLTRDQGYPSVFYGDYYGIPTHGVPAMKSKIDPILEARQKYAYGTQRDYMDHPDVIGWTREGDGVHADSGLATLMSDGPGGSKWMEVGKNNAGEVWYDITGNQTNTVTINKDGWGQFHVSGGSVSIWVQQ

SEQ ID NO: 26077 - protein, 483 aa, Bacillus licheniformis
HHNQTNGTMMQYFEWYLPNDGNHWHRLRSDASNLKDKGITAVWIPPAWKGASQNDVGYGAYDLYDLGEFNQKGTVRTKYGTRNQLQAAVTALKSNGIQVYGDVVMNHKGGADATEWVRAVEVNPSNRNQEVSGDYTIEAWTKFDFPGRGNTHSNFKWRWYHFDGVDWDQSRQLQNRIYKFRGKEWDWEVDTENGNYDYLMYADYDMDHPEVVNELRNWGVWYTNTLGLDGFRIDAVKHIKYSFTRDWLTHVRNTTGKNMFAVAEFWKNDIGAIENYLSKTNWNHSVFDVPLHYNLYNASRSGGNYDMRQIFNGTVVQRHPTHAVTFVDNHDSQPEEALESFVEEWFKPLAYALTLTRDQGYPSVFYGDYYGIPTHGVPAMKSKIDPILEARQKYAYGTQRDYLDHPDVIGWTREGDGVHADSGLATLMSDGPGGSKWMEVGKNNAGEVWYDITGNQTNTVTINKDGWGQFHVSGGSVSIYVQQ

SEQ ID NO: 26078 - protein, 483 aa, Bacillus licheniformis
HHNQTNGTMMQYFEWYLPNDGNHWNRLRSDASNLKDKGITAVWIPPAWKGASQNDVGYGAYDLYDLGEFNQKGTVRTKYGTRNQLQAAVTALKSNGIQVYGDVVMNHKGGADATEWVRAVEVNPSNRNQEVSGDYTIEAWTKFDFPGRGNTHSNFKWRWYHFDGVDWDQSRQLQNKIYKFRGKGWDWEVDTENGNYDYLMYADYDMDHPEVVNELRNWGVWYTNTLGLDGFRIDAVKHIKYSFTRDWLTHVRNTTGKNMFAVAEFWKNDIGAIENYLSKTNWNHSVFDVPLHYNLYNASRSGGNYDMRQIFNGTVVQRHPTHAVTFVDNHDSQPEEALESFVEEWFKPLAYALTLTRDQGYPSVFYGDYYGIPTHGVPAMKSKIDPILEARQKYAYGTQRDYLDHPDVIGWTREGDGVHADSGLATLMSDGPGGSKWMEVGKNNAGEVWYDITGNQTNTVTINKDGWGQFHVSGGSVSIYVQQ

SEQ ID NO: 26079 - protein, 483 aa, Bacillus licheniformis
HHNGTNGTMMQYFEWYLPNDGNHWNRLRSDASNLKDKGITAVWIPPAWKGASQNDVGYGAYDLYDLGEFNQKGTVRTKYGTRNQLQAAVTALKSNGIQVYGDVVMNHKGGADATEWVRAVEVNPSNRNQEVSGDYTIEAWTKFDFPGRGNTHSNFKWRWYHFDGVDWDQSRQLQNKIYKFRGKEWDWEVDTENGNYDYLMYADIDMDHPEVVNELRNWGVWYTNTLGLDGFRIDAVKHIKYSFTRDWLEHVRNTTGKNMFAVAEFWKNDIGAIENYLSKTNWNHSVFDVPLHYNLYNASRSGGNYDMRQIFNGTVVQRHPTHAVTFVDNHDSQPEEALESFVEEWFKPLAYALTLTRDQGYPSVFYGDYYGIPTHGVPAMKSKIDPILEARQKYAYGTQRDYMDHPDVIGWTREGDGVHADSGLATLMSDGPGGSKWMEVGKNNAGEVWYDITGNQTNTVTINKDGWGQFHVSGGSVSIYVQQ

SEQ ID NO: 26080 - protein, 483 aa, Bacillus licheniformis
HHNGTNGTMMQYFEWYLPNDGNHWNRLRSDASNLKDKGITAVWIPPAWKGASQNDVGYGAYDLYDLGEFNQKGTVRTKYGTRNQLQAAVTALKSNGIQVYGDVVMNHKGGADATEWVRAVEVNPSNRNQEVSGDYTIEAWTKFDFPGRGNTHSNFKWRWWHFDGVDWDQSRQLQNRIYKFRGKEWDWEVDTENGNYDYLMYADYDMDHPEVVNELRNWGVWYTNTLGLDGFRIDAVKHIKYSFTRDWLEHVRNTTGKNMFAVAEFWKNDIGAIENYLSKTNWNHSVFDVPLHYNLYNASRSGGNYDMRQIFNGTVVQRHPTHAVTFVDNHDSQPEEALESFVEEWFKPLAYALTLTRDQGYPSVFYGDYYGIPTHGVPAMKSKIDPILEARQKYAYGTQRDYMDHPDVIGWTREGDGVHADSGLATLMSDGPGGSKWMEVGKNNAGEVWYDITGNQTNTVTINKDGWGQFHVSGGSVSIYVQQ

SEQ ID NO: 26081 - protein, 483 aa, Bacillus licheniformis
HHNGTNGTMMQYFEWYLPNDGNHWHRLRSDASNLKDKGITAVWIPPAWKGASQNDVGYGAYDLYDLGEFNQKGTVRTKYGTRNQLQAAVTALKSNGIQVYGDVVMNHKGGADATEWVRAVEVNPSNRNQEVSGDYTIEAWTKFDFPGRGNTHSNFKWRWYHFDGVDWDQSRQLQNRIYKFRGKEWDWEVDEENGNYDYLMYADYDMDHPEVVNELRNWGVWYTNTLGLDGFRIDAVKHIKYSFTRDWLEHVRNTTGKNMFAVAEFWKNDIGAIRNYLSKTNWNHSVFDVPLHYNLYNASRSGGNYDMRQIFNGTVVQRHPTHAVTFVDNHDSQPEEALESFVEEWFKPLAYALTLTRDQGYPSVFYGDYYGIPTHGVPAMKSKIDPILEARQKYAYGTQRDYMDHPDVIGWTREGDGVHADSGLATLMSDGPGGSKWMEVGKNNAGEVWYDITGNQTNTVTINKDGWGQFHVSGGSVSIWVQQ

SEQ ID NO: 26082 - protein, 483 aa, Bacillus licheniformis
HHNGTNGTMMQYFEWYLPNDGNHWNRLRSDASNLKDKGITAVWIPPAWKGASQNDVGYGAYDLYDLGEFNQKGTVRTKYGTRNQLQAAVTALKSNGIQVYGDVVMNHKGGADATEWVRAVEVNPSNRNQEVSGDYTIEAWTKFDFPGRGNTHSNFKWRWWHFDGVDWDQSRQLQNKIYKFRGKEWDWEVDEENGNYDYLMYADYDMDHPEVVNELRNWGVWYTNTLGLDGFRIDAVKHIKYSFTRDWLTHVRNTTGKNMFAVAEFWKNDIGAIENYLSKTNWNHSVFDVPLHYNLYNASRSGGNYDMRQIFNGTVVQRHPTHAVTFVDNHDSQPEEALESFVEEWFKPLAYALTLTRDQGYPSVFYGDYYGIPTHGVPAMKSKIDPILEARQKYAYGTQRDYMDHPDVIGWTREGDGVHADSGLATLMSDGPGGSKWMEVGKNNAGEVWYDITGNQTNTVTINKDGWGQFHVSGGSVSIYVQQ

SEQ ID NO: 26083 - protein, 483 aa, Bacillus licheniformis
HHNGTNGTMMQYFEWYLPNDGNHWNRLRSDASNLKDKGITAVWIPPAWKGASQNDVGYGAYDLYDLGEFNQKGTVRTKYGTRNQLQAAVTALKSNGIQVYGDVVMNHKGGADATEWVRAVEVNPSNRNQEVSGDYTIEAWTKFDFPGRGNTHSNFKWRWYHFDGVDWDQSRQLQNKIYKFRGKGWDWEVDTENGNYDYLMYADYDMDHPEVVNELRNWGVWYTNTLGLDGFRIDAVKHIKYSFTRDWLTHVRNTTGKNMFAVAEFWKNDIGAIRNYLSKTNWNHSVFDVPLHYNLYNASRSGGNYDMRQIFNGTVVQRHPTHAVTFVDNHDSQPEEALESFVEEWFKPLAYALTLTRDQGYPSVFYGDYYGIPTHGVPAMKSKIDPILEARQKYAYGTQRDYLDHPDVIGWTREGDGVHADSGLATLMSDGPGGSKWMEVGKNNAGEVWYDITGNQTNTVTINKDGWGQFHVSGGSVSIYVQQ

SEQ ID NO: 26084 - protein, 483 aa, Bacillus licheniformis
HHNGTNGTMMQYFEWYLPNDGNHWNRLRSDASNLKDKGITAVWIPPAWKGASQNDVGYGAYDLYDLGEFNQKGTVRTKYGTRNQLQDAVTALKSNGIQVYGDVVMNHKGGADATEWVRAVEVNPSNRNQEVSGDYTIEAWTKFDFPGRGNTHSNFKWRWDHFDGVDWDQSRQLQNRIYKFRGKEWDWEVDTENGNYDYLMYADIDMDHPEVVNELRNWGVWYTNTLGLDGFRIDAVKHIKYSFTRDWLTHVRNTTGKNMFAVAEFWKNDIGAIENYLSKTNWNHSVFDVPLHYNLYNASRSGGNYDMRQIFNGTVVQRHPTHAVTFVDNHDSQPEEALESFVEEWFKPLAYALTLTRDQGYPSVFYGDYYGIPTHGVPAMKSKIDPILEARQKYAYGTQRDYLDHPDVIGWTREGDGVHADSGLATLMSDGPGGSKWMEVGKNNAGEVWYDITGNQTNEVTINKDGWGQFHVSGGSVSIYVQQ

SEQ ID NO: 26085 - protein, 483 aa, Bacillus licheniformis
HHNQTNGTMMQYFEWYLPNDGNHWHRLRSDASNLKDKGITAVWIPPAWKGASQNDVGYGAYDLYDLGEFNQKGTVRTKYGTRNQLQAAVTALKSNGIQVYGDVVMNHKGGADATEWVRAVEVNPSNRNQEVSGDYTIEAWTKFDFPGRGNTHSNFKWRWYHFDGVDWDQSRQLQNKIYKFRGKGWDWEVDTENGNYDYLMYADYDMDHPEVVNELRNWGVWYTNTLGLDGFRIDAVKHIKYSFTRDWLTHVRNTTGKNMFAVAEFWKNDIGAIENYLSKTNWNHSVFDVPLHYNLYNASRSGGNYDMRQIFNGTVVQRHPTHAVTFVDNHDSQPEEALESFVEEWFKPLAYALTLTRDQGYPSVFYGDYYGIPTHGVPAMKSKIDPILEARQKYAYGTQRDYMDHPDVIGWTREGDGVHADSGLATLMSDGPGGSKWMEVGKNNAGEVWYDITGNQTGTVTINKDGWGQFHVSGGSVSIYVQQ

SEQ ID NO: 26086 - protein, 483 aa, Bacillus licheniformis
HHNGTNGTMMQYFEWYLPNDGNHWDRLRSDASNLKDKGITAVWIPPAWKGASQNDVGYGAYDLYDLGEFNQKGTVRTKYGTRNQLQAAVTALKSNGIQVYGDVVMNHKGGADATEWVRAVEVNPSNRNQEVSGDYTIEAWTKFDFPGRGNTHSNFKWRWYHFDGVDWDQSRQLQNKIYKFRGKEWDWEVDTENGNYDYLMYADYDMDHPEVVNELRNWGVWYTNTLGLDGFRIDAVKHIKYSFTRDWLTHVRNTTGKNMFAVAEFWKNDIGAIENYLSKTNWNHSVFDVPLHYNLYNASRSGGNYDMRQIFNGTVVQRHPTHAVTFVDNHDSQPEEALESFVEEWFKPLAYALTLTRDQGYPSVFYGDYYGIPTHGVPAMKSKIDPILEARQKYAYGTQRDYLDHPDVIGWTREGDGVHADSGLATLMSDGPGGSKWMEVGKNNAGEVWYDITGNQTNTVTINKDGWGQFHVSGGSVSIYVQQ

SEQ ID NO: 26087 - protein, 483 aa, Bacillus licheniformis
HHNQTNGTMMQYFEWYLPNDGNHWNRLRSDASNLKDKGITAVWIPPAWKGASQNDVGYGAYDLYDLGEFNQKGTVRTKYGTRNQLQAAVTALKSNGIQVYGDVVMNHKGGADATEWVRAVEVNPSNRNQEVSGDYTIEAWTKFDFPGRGNTHSNFKWRWYHFDGVDWDQSRQLQNKIYKFRGKGWDWEVDTENGNYDYLMYADYDMDHPEVVNELRNWGVWYTNTLGLDGFRIDAVKHIKYSFTRDWLTHVRNTTGKNMFAVAEFWKNDIGAIENYLSKTNWNHSVFDVPLHYNLYNASRSGGNYDMRQIFNGTVVQRHPTHAVTFVDNHDSQPEEALESFVEEWFKPLAYALTLTRDQGYPSVFYGDYYGIPTHGVPAMKSKIDPILEARQKYAYGTQRDYMDHPDVIGWTREGDGVHADSGLATLMSDGPGGSKWMEVGKNNAGEVWYDITGNQTNTVTINKDGWGQFHVSGGSVSIYVQQ

SEQ ID NO: 26088 - protein, 483 aa, Bacillus licheniformis
HHNGTNGTMMQYFEWYLPNDGNHWNRLRSDASNLKDKGITAVWIPPAWKGASQNDVGYGAYDLYDLGEFNQKGTVRTKYGTRNQLQAAVTALKSNGIQVYGDVVMNHKGGADATEWVRAVEVNPSNRNQEVSGDYTIEAWTKFDFPGRGNTHSNFKWRWWHFDGVDWDQSRQLQNRIYKFRGKEWDWEVDTENGNYDYLMYADIDMDHPEVVNELRNWGVWYTNTLGLDGFRIDAVKHIKYSFTRDWLTHVRNTTGKNMFAVAEFWKNDIGAIENYLSKTNWNHSVFDVPLHYNLYNASRSGGNYDMRQIFNGTVVQRHPTHGVTFVDNHDSQPEEALESFVEEWFKPLAYALTLTRDQGYPSVFYGDYYGIPTHGVPAMKSKIDPILEARQKYAYGTQRDYMDHPDVIGWTREGDGVHADSGLATLMSDGPGGSKWMEVGKNNAGEVWYDITGNQTNTVTINKDGWGQFHVSGGSVSIYVQQ

SEQ ID NO: 26089 - protein, 483 aa, Bacillus licheniformis
HHNGTNGTMMQYFEWYLPNDGNHWHRLRSDASNLKDKGITAVWIPPAWKGASQNDVGYGAYDLYDLGEFNQKGTVRTKYGTRNQLQAAVTALKSNGIQVYGDVVMNHKGGADATEWVRAVEVNPSNRNQEVSGDYTIEAWTKFDFPGRGNTHSNFKWRWYHFDGVDWDQSRQLQNKIYKFRGKEWDWEVDTENGNYDYLMYADIDMDHPEVVNELRNWGVWYTNTLGLDGFRIDAVKHIKYSFTRDWLTHVRNTTGKNMFAVAEFWKNDIGAIENYLSKTNWNHSVFDVPLHYNLYNASRSGGNYDMRQIFNGTVVQRHPTHAVTFVDNHDSQPEEALESFVEEWFKPLAYALTLTRDQGYPSVFYGDYYGIPTHGVPAMKSKIDPILEARQKYAYGTQRDYLDHPDVIGWTREGDGVHADSGLATLMSDGPGGSKWMEVGKNNAGEVWYDITGNQTNTVTINKDGWGQFHVSGGSVSIYVQQ

SEQ ID NO: 26090 - protein, 483 aa, Bacillus licheniformis
HHNGTNGTMMQYFEWYLPNDGNHWHRLRSDASNLKDKGITAVWIPPAWKGASQNDVGYGAYDLYDLGEFNQKGTVRTKYGTRNQLQAAVTALKSNGIQVYGDVVMNHKGGADATEWVRAVEVNPSNRNQEVSGDYTIEAWTKFDFPGRGNTHSNFKWRWYHFDGVDWDQSRQLQNKIYKFRGKEWDWEVDEENGNYDYLMYADYDMDHPEVVNELRNWGVWYTNTLGLDGFRIDAVKHIKYSFTRDWLEHVRNTTGKNMFAVAEFWKNDIGAIENYLSKTNWNHSVFDVPLHYNLYNASRSGGNYDMRQIFNGTVVQRHPTHAVTFVDNHDSQPEEALESFVEEWFKPLAYALTLTRDQGYPSVFYGDYYGIPTHGVPAMKSKIDPILEARQKYAYGTQRDYLDHPDVIGWTREGDGVHADSGLATLMSDGPGGSKWMEVGKNNAGEVWYDITGNQTGTVTINKDGWGQFHVSGGSVSIYVQQ

SEQ ID NO: 26091 - protein, 483 aa, Bacillus licheniformis
HHNGTNGTMMQYFEWYLPNDGNHWNRLRSDASNLKDKGITAVWIPPAWKGASQNDVGYGAYDLYDLGEFNQKGTVRTKYGTRNQLQAAVTALKSNGIQVYGDVVMNHKGGADATEWVRAVEVNPSNRNQEVSGDYTIEAWTKFDFPGRGNTHSNFKWRWYHFDGVDWDQSRQLQNRIYKFRGKEWDWEVDTENGNYDYLMYADIDMDHPEVVNELRNWGVWYTNTLGLDGFRIDAVKHIKYSFTRDWLTHVRNTTGKNMFAVAEFWKNDIGAIENYLSKTNWNHSVFDVPLHYNLYNASRSGGNYDMRQIFEGTVVQRHPTHAVTFVDNHDSQPEEALESFVEEWFKPLAYALTLTRDQGYPSVFYGDYYGIPTHGVPAMKSKIDPILEARQKYAYGTQRDYLDHPDVIGWTREGDGEHADSGLATLMSDGPGGSKWMEVGKNNAGEVWRDITGNQTNEVTINKDGWGQFHVSGGSVSIYVQQ

SEQ ID NO: 26092 - protein, 483 aa, Bacillus licheniformis
HHNGTNGTMMQYFEWYLPNDGNHWHRLRSDASNLKDKGITAVWIPPAWKGASQNDVGYGAYDLYDLGEFNQKGTVRTKYGTRNQLQAAVTALKSNGIQVYGDVVMNHKGGADATEWVRAVEVNPSNRNQEVSGDYTIEAWTKFDFPGRGNTHSNFKWRWYHFDGVDWDQSRQLQNKIYKFRGKGWDWEVDTENGNYDYLMYADYDMDHPEVVNELRNWGVWYTNTLGLDGFRIDAVKHIKYSFTRDWLTHVRNTTGKNMFAVAEFWKNDIGAIENYLSKTNWNHSVFDVPLHYNLYNASRSGGNYDMRQIFNGTVVQRHPTHAVTFVDNHDSQPEEALESFVEEWFKPLAYALTLTRDQGYPSVFYGDYYGIPTHGVPAMKSKIDPILEARQKYAYGTQRDYLDHPDVIGWTREGDGVHADSGLATLMSDGPGGSKWMEVGKNNAGEVWYDITGNQTNTVTINKDGWGQFHVSGGSVSIYVQQ

SEQ ID NO: 26093 - protein, 483 aa, Bacillus licheniformis
HHNGTNGTMMQYFEWYLPNDGNHWHRLRSDASNLKDKGITAVWIPPAWKGASQNDVGYGAYDLYDLGEFNQKGTVRTKYGTRNQLQAAVTALKSNGIQVYGDVVMNHKGGADATEWVRAVEVNPSNRNQEVSGDYTIEAWTKFDFPGRGNTHSNFKWRWYHFDGVDWDQSRQLQNKIYKFRGKEWDWEVDTENGNYDYLMYADIDMDHPEVVNELRNWGVWYTNTLGLDGFRIDAVKHIKYSFTRDWLTHVRNTTGKNMFAVAEFWKNDIGAIENYLSKTNWNHSVFDVPLHYNLYNASRSGGNYDMRQIFNGTVVQRHPTHAVTFVDNHDSQPEEALESFVEEWFKPLAYALTLTRDQGYPSVFYGDYYGIPTHGVPAMKSKIDPILEARQKYAYGTQRDYMDHPDVIGWTREGDGVHADSGLATLMSDGPGGSKWMEVGKNNAGEVWYDITGNQTNTVTINKDGWGQFHVSGGSVSIYVQQ

SEQ ID NO: 26094 - protein, 483 aa, Bacillus licheniformis
HHNQTNGTMMQYFEWYLPNDGNHWNRLRSDASNLKDKGITAVWIPPAWKGASQNDVGYGAYDLYDLGEFNQKGTVRTKYGTRNQLQAAVTALKSNGIQVYGDVVMNHKGGADATEWVRAVEVNPSNRNQEVSGDYTIEAWTKFDFPGRGNTHSNFKWRWYHFDGVDWDQSRQLQNRIYKFRGKEWDWEVDEENGNYDYLMYADYDMDHPEVVNELRNWGVWYTNTLGLDGFRIDAVKHIKYSFTRDWLEHVRNTTGKNMFAVAEFWKNDIGAIENYLSKTNWNHSVFDVPLHYNLYNASRSGGNYDMRQIFNGTVVQRHPTHAVTFVDNHDSQPEEALESFVEEWFKPLAYALTLTRDQGYPSVFYGDYYGIPTHGVPAMKSKIDPILEARQKYAYGTQRDYMDHPDVIGWTREGDGVHADSGLATLMSDGPGGSKWMEVGKNNAGEVWYDITGNQTNTVTINKDGWGQFHVSGGSVSIYVQQ

SEQ ID NO: 26095 - protein, 483 aa, Bacillus licheniformis
HHNQTNGTMMQYFEWYLPNDGNHWNRLRSDASNLKDKGITAVWIPPAWKGASQNDVGYGAYDLYDLGEFNQKGTVRTKYGTRNQLQAAVTALKSNGIQVYGDVVMNHKGGADATEWVRAVEVNPSNRNQEVSGDYTIEAWTKFDFPGRGNTHSNFKWRWYHFDGVDWDQSRQLQNRIYKFRGKEWDWEVDEENGNYDYLMYADYDMDHPEVVNELRNWGVWYTNTLGLDGFRIDAVKHIKYSFTRDWLTHVRNTTGKNMFAVAEFWKNDIGAIRNYLSKTNWNHSVFDVPLHYNLYNASRSGGNYDMRQIFNGTVVQRHPTHAVTFVDNHDSQPEEALESFVEEWFKPLAYALTLTRDQGYPSVFYGDYYGIPTHGVPAMKSKIDPILEARQKYAYGTQRDYLDHPDVIGWTREGDGVHADSGLATLMSDGPGGSKWMEVGKNNAGEVWYDITGNQTNTVTINKDGWGQFHVSGGSVSIYVQQ

SEQ ID NO: 26096 - protein, 483 aa, Bacillus licheniformis
HHNQTNGTMMQYFEWYLPNDGNHWNRLRSDASNLKDKGITAVWIPPAWKGASQNDVGYGAYDLYDLGEFNQKGTVRTKYGTRNQLQAAVTALKSNGIQVYGDVVMNHKGGADATEWVRAVEVNPSNRNQEVSGDYTIEAWTKFDFPGRGNTHSNFKWRWWHFDGVDWDQSRQLQNRIYKFRGKEWDWEVDTENGNYDYLMYADIDMDHPEVVNELRNWGVWYTNTLGLDGFRIDAVKHIKYSFTRDWLTHVRNTTGKNMFAVAEFWKNDIGAIENYLSKTNWNHSVFDVPLHYNLYNASRSGGNYDMRQIFNGTVVQRHPTHAVTFVDNHDSQPEEALESFVEEWFKPLAYALTLTRDQGYPSVFYGDYYGIPTHGVPAMKSKIDPILEARQKYAYGTQRDYMDHPDVIGWTREGDGVHADSGLATLMSDGPGGSKWMEVGKNNAGEVWYDITGNQTNTVTINKDGWGQFHVSGGSVSIYVQQ

SEQ ID NO: 26097 - protein, 485 aa, Bacillus subtilis
HHNGTNGTMMQYFEWYLPNDGNHWNRLRSDASNLKDKGITAVWIPPAWKGASQNDVGYGAYDLYDLGEFNQKGTVRTKYGTRNQLQAAVTALKSNGIQVYGDVVMNHKGGADATEWVRAVEVNPSNRNQEVSGDYTIEAWTKFDFPGRGNTHSNFKWRWYHFDGVDWDQSRQLQNRIYKFRGDGKGWDWEVDTENGNYDYLMYADIDMDHPEVVNELRNWGVWYTNTLGLDGFRIDAVKHIKYSFTRDWLTHVRNTTGKNMFAVAEFWKNDIGAIENYLSKTNWNHSVFDVPLHYNLYNASRSGGNYDMRQIFNGTVVQRHPTHAVTFVDNHDSQPEEALESFVEEWFKPLAYALTLTRDQGYPSVFYGDYYGIPTHGVPAMKSKIDPILEARQKYAYGTQRDYLDHPDVIGWTREGDGVHADSGLATLISDGPGGSKWMEVGKNNAGEVWYDMTGNQTNTVTINKDGWGQFHVSGGSVSIYVQQ

SEQ ID NO: 26098 - protein, 491 aa, Geobacillus stearothermophilus
AAPFNGTMMQYFXWXLPXXGXXWXXVANEAXXXXSLGITALWLPPAYXGTXRXXVGXGVXXLXDLGXFNQKGAVRTKYGTKAQYLQAIQAAHAAGMQVYADVVFDHKGGADGTEWYDAVEVNPSDXXQXISGTXQIXXWTKFDFPGRGNTYSSFKWRWYHFDGVDWDESRKLSRIYKFRGIGKAWDWEVDTENGNYDYLMYADLDMDHPEVVTELKSWGKWYVNTTMIDGFRLDAVKHIKFSFFPDWLSXVRSXXGXPLFXVGXXWSYDINKLHNYXMKTNGTMSLFDAPXHNKFYTASKSGGTFDMRTLMTNTLMKDQPTLAVTFVDNHXXXPXXXLXSWVXPWFXPLAXAFXLTRQEGYPCVFYGDXXGIPQYNIPSLKSKIDPLLIARRDYAYGTQHDYLDHSDIIGWTRXGVTEXPGSGLAALXTDGPGGXKWMXVGXXHAGKVFYDLTGNRSDTVTINSDGWGEFKVNGGSVSVWVPRKTTVSXIA

SEQ ID NO: 26099 - protein, 513 aa, Bacillus sp. TS-23
APINETMMQYFEWDLPNDGTLWTKVKNEAANLSSLGITALWLPPAYKGTSQSDVGYGVYDLYDLGEFNQKGTIRTKYGTKTQYIRAIQAAKAAGMQVYADVVFNHKAGADGTEFVDAVEVDPSNRNQETSGTYQIQAWTKFDFPGRGNTYSSFKWRWYHFDGTDWDESRKLNRIYKFRSTGKAWDWEVDTENGNYDYLMFADLDMDHPEVVTELKNWGTWYVETTNIDGFRLDAVKHIKYSFFPDWLTYVRNQTGKNLFAVGEFWSYDVRKLHNYITKTEGSMSLFDAPLHNNFYTASKSSGYFDMRYLLNNTLMKDQPSLAVTLVDNHDTQPGQSLQSWVEPWFKPLAYAFILTRQEGYPCVFYGDYYGIPKYNIPGLKSKIDPLLIARRDYAYGTQRDYIDHQDIIGWTREGIDTKPNSGLAALITDGPGGSKWMYVGKKHAGKVFYDLTGNRSDTVTINADGWGEFKVNGGSVSIWVAKTSNVTFTVNNATTTSGQNVYVVANIPELGNW

SEQ ID NO: 26100 - protein, 513 aa, Bacillus sp. TS-23
APINETMMQYFEWDLPNDGTLWTKVKNEAANLSSLGITALWLPPAYKGTSQSDVGYGVYDLYDLGEFNQKGTIRTKYGTKTQYIEAIQAAKAAGMQVYADVVFNHKAGADGTEFVDAVEVDPSNRNQETSGTYQIQAWTKFDFPGRGNTYSSFKWRWYHFDGTDWDESRKLNRIYKFRSTGKAWDWEVDTENGNYDYLMFADLDMDHPEVVTELKNWGTWYVRTTNIDGFRLDAVKHIKYSFFPDWLTYVRNQTGKNLFAVGEFWSYDVEKLHNYITKTRGSMSLFDAPLHNNFYTASKSSGYFDMRYLLNNTLMKDQPSLAVTLVDNHDTQPGQSLQSWVEPWFKPLAYAFILTRQEGYPCVFYGDYYGIPKYNIPGLKSKIDPLLIARRDYAYGTQRDYIDHQDIIGWTREGIDTKPNSGLAALITDGPGGSKWMYVGKKHAGKVFYDLTGNRSDTVTINADGWGEFKVNGGSVSIWVAKTSNVTFTVNNATTTSGQNVYVVANIPELGNW

SEQ ID NO: 26101 - protein, 513 aa, Bacillus sp. TS-23
APINETMMQYFEWDLPNDGTLWTKVKNEAANLSSLGITALWLPPAYKGTSQSDVGYGVYDLYDLGEFNQKGTIRTKYGTKTQYIRAIQAAKAAGMQVYADVVFNHKAGADGTEFVDAVEVDPSNRNQETSGTYQIQAWTKFDFPGRGNTYSSFKWRWYHFDGTDWDESRKLNRIYKFRSTGKAWDWEVDTENGNYDYLMFADLDMDHPEVVTELKNWGTWYVRTTNIDGFRLDAVKHIKYSFFPDWLTYVRNQTGKNLFAVGEFWSYDVRKLHNYITKTNGSMSLFDAPLHNNFYTASKSSGYFDMRYLLNNTLMKDQPSLAVTLVDNHDTQPGQSLQSWVEPWFKPLAYAFILTRQEGYPCVFYGDYYGIPKYNIPGLKSKIDPLLIARRDYAYGTQRDYIDHQDIIGWTREGIDTKPNSGLAALITDGPGGSKWMYVGKKHAGKVFYDLTGNRSDTVTINADGWGEFKVNGGSVSIWVAKTSNVTFTVNNATTTSGQNVYVVANIPELGNW

SEQ ID NO: 26102 - protein, 513 aa, Bacillus sp. TS-23
APINETMMQYFEWDLPNDGTLWTKVKNEAANLSSLGITALWLPPAYKGTSQSDVGYGVYDLYDLGEFNQKGTIRTKYGTKTQYIEAIQAAKAAGMQVYADVVFNHKAGADGTEFVDAVEVDPSNRNQETSGTYQIQAWTKFDFPGRGNTYSSFKWRWYHFDGTDWDESRKLNRIYKFRSTGKAWDWEVDTENGNYDYLMFADLDMDHPEVVTELKNWGTWYVETTNIDGFRLDAVKHIKYSFFPDWLTYVRNQTGKNLFAVGEFWSYDVEKLHNYITKTNGSMSLFDAPLHNNFYTASKSSGYFDMRYLLNNTLMKDQPSLAVTLVDNHDTQPGQSLQSWVEPWFKPLAYAFILTRQEGYPCVFYGDYYGIPKYNIPGLKSKIDPLLIARRDYAYGTQRDYIDHQDIIGWTREGIDTKPNSGLAALITDGPGGSKWMYVGKKHAGKVFYDLTGNRSDTVTINADGWGEFKVNGGSVSIWVAKTSNVTFTVNNATTTSGQNVYVVANIPELGNW

SEQ ID NO: 26103 - protein, 511 aa, Bacillus sp. TS-23
APINETMMQYFEWDLPNDGTLWTKVKNEAANLSSLGITALWLPPAWKGTSQSDVGYGVYDLYDLGEFNQKGTIRTKYGTKTQYIQAIQAAKAAGMQVYADVVFNHKAGADGTEFVDAVEVDPSNRNQETSGTYQIQAWTKFDFPGRGNTYSSFKWRWYHFDGTDWDESRKLNRIYKFSGKAWDWEVDTENGNYDYLMFADYDMDHPEVVTELKNWGTWYVNTTNIDGFRLDAVKHIKYSFFPDWLTYVRNQTGKNLFAVGEFWSYDVNKLHNYITKTNGSMSLFDAPLHNNFYTASKSSGYFDMRYLLNNTLMKDQPSLAVTLVDNHDTQPGQSLQSWVEPWFKPLAYAFILTRQEGYPCVFYGDYYGIPKYNIPGLKSKIDPLLIARRDYAYGTQRDYIDHQDIIGWTREGIDTKPNSGLAALITDGPGGSKWMYVGKKHAGKVFYDLTGNRSDTVTINADGWGEFKVNGGSVSIWVAKTSNVTFTVNNATTTSGQNVYVVANIPELGNW

SEQ ID NO: 26104 - protein, 511 aa, Bacillus sp. TS-23
APINETMMQYFEWDLPNDGTLWTKVKNEAANLSSLGITALWLPPAYKGTSQSDVGYGAYDLYDLGEFNQKGTIRTKYGTKTQYIQAIQAAKAAGMQVYADVVFNHKAGADGTEFVDAVEVDPSNRNQETSGTYQIQAWTKFDFPGRGNTYSSFKWRWYHFDGTDWDESRKLNRIYKFSGKAWDWEVDTENGNYDYLMFADYDMDHPEVVTELKNWGTWYVNTTNIDGFRLDAVKHIKYSFFPDWLTYVRNQTGKNLFAVGEFWSYDVNKLHNYITKTNGSMSLFDAPLHNNFYTASKSSGYFDMRYLLNNTLMKDQPSLAVTLVDNHDTQPGQSLQSWVEPWFKPLAYAFILTRQEGYPCVFYGDYYGIPKYNIPGLKSKIDPLLIARRDYAYGTQRDYIDHQDIIGWTREGIDTKPNSGLAALITDGPGGSKWMYVGKKHAGKVFYDLTGNRSDTVTINADGWGEFKVNGGSVSIWVAKTSNVTFTVNNATTTSGQNVYVVANIPELGNW

SEQ ID NO: 26105 - protein, 513 aa, Bacillus sp. TS-23
APINETMMQYFEWDLPNDGTLWTKVKNEAANLSSLGITALWLPPAYKGTSQSDVGYGVYDLYDLGEFNQKGTIRTKYGTKTQYIRAIQAAKAAGMQVYADVVFNHKAGADGTEFVDAVEVDPSNRNQETSGTYQIQAWTKFDFPGRGNTYSSFKWRWYHFDGTDWDESRKLNRIYKFRSTGKAWDWEVDTENGNYDYLMFADLDMDHPEVVTELKNWGTWYVRTTNIDGFRLDAVKHIKYSFFPDWLTYVRNQTGKNLFAVGEFWSYDVEKLHNYITKTRGSMSLFDAPLHNNFYTASKSSGYFDMRYLLNNTLMKDQPSLAVTLVDNHDTQPGQSLQSWVEPWFKPLAYAFILTRQEGYPCVFYGDYYGIPKYNIPGLKSKIDPLLIARRDYAYGTQRDYIDHQDIIGWTREGIDTKPNSGLAALITDGPGGSKWMYVGKKHAGKVFYDLTGNRSDTVTINADGWGEFKVNGGSVSIWVAKTSNVTFTVNNATTTSGQNVYVVANIPELGNW

SEQ ID NO: 26106 - protein, 513 aa, Bacillus sp. TS-23
APINETMMQYFEWDLPNDGTLWTKVKNEAANLSSLGITALWLPPAYKGTSQSDVGYGVYDLYDLGEFNQKGTIRTKYGTKTQYIRAIQAAKAAGMQVYADVVFNHKAGADGTEFVDAVEVDPSNRNQETSGTYQIQAWTKFDFPGRGNTYSSFKWRWYHFDGTDWDESRKLNRIYKFRSTGKAWDWEVDTENGNYDYLMFADLDMDHPEVVTELKNWGTWYVETTNIDGFRLDAVKHIKYSFFPDWLTYVRNQTGKNLFAVGEFWSYDVRKLHNYITKTRGSMSLFDAPLHNNFYTASKSSGYFDMRYLLNNTLMKDQPSLAVTLVDNHDTQPGQSLQSWVEPWFKPLAYAFILTRQEGYPCVFYGDYYGIPKYNIPGLKSKIDPLLIARRDYAYGTQRDYIDHQDIIGWTREGIDTKPNSGLAALITDGPGGSKWMYVGKKHAGKVFYDLTGNRSDTVTINADGWGEFKVNGGSVSIWVAKTSNVTFTVNNATTTSGQNVYVVANIPELGNW

SEQ ID NO: 26107 - protein, 511 aa, Bacillus sp.
APINETMMQYFEWDLPNDGTLWTKVKNEAANLSSLGITALWLPPAYKGTSQSDVGYGVYDLYDLGEFNQKGTIRTKYGTKTQYIQAIQAAKAAGMQVYADVVFNHKAGADGTEFVDAVEVDPSNRNQETSGTYQIQAWTKFDFPGRGNTYSSFKWRWYHFDGTDWDESRKLNRIYKFSGKAWDWEVDTENGNYDYLMFADLDMDHPEVVTELKNWGTWYVNTTNIDGFRLDAVKHIKYQFFPDWLTYVRNQTGKNLFAVGEFWSYDVNKLHNYITKTNGSMSLFDAPLHNNFYTASKSSGYFDMRYLLNNTLMKDQPSLAVTLVDNHDTQPGQSLQSWVEPWFKPLAYAFILTRQEGYPCVFYGDYYGIPKYNIPGLKSKIDPLLIARRDYAYGTQRDYIDHQDIIGWTREGIDTKPNSGLAALITDGPGGSKWMYVGKKHAGKVFYDLTGNRSDTVTINADGWGEFKVNKGSVSIWVAKTSNVTFTVNNATTTSGQNVYVVANIPELGNW

SEQ ID NO: 26108 - protein, 511 aa, Bacillus sp.
APINETMMQYFEWDLPNDGTLWTKVKNEAANLSSLGITALWLPPAYKGTSQSDVGYGVYDLYDLGEFNQKGTIRTKYGTKTQYIQAIQAAKAAGMQVYADVVFNHKAGADGTEFVDAVEVDPSNRNQETSGTYQIQAWTKFDFPGRGNTYSSFKWRWYHFDGTDWDESRKLNRIYKFTGKAWDWEVDTENGNYDYLMFADLDMDHPEVVTELKNWGTWYVNTTNIDGFRLDAVKHIKYQFFPDWLTYVRNQTGKNLFAVGEFWSYDVNKLHNYITKTNGSMSLFDAPLHNNFYTASKSSGYFDMRYLLNNTLMKDQPSLAVTLVDNHDTQPGQSLQSWVEPWFKPLAYAFILTRQEGYPCVFYGDYYGIPKYNIPGLKSKIDPLLIARRDYAYGTQRDYIDHQDIIGWTREGIDTKPNSGLAALITDGPGGSKWMYVGKKHAGKVFYDLTGNRSDTVTINADGWGEFKVNKGSVSIWVAKTSNVTFTVNNATTTSGQNVYVVANIPELGNW

SEQ ID NO: 26109 - protein, 513 aa, Bacillus sp. TS-23
APINETMMQYFEWDLPNDGTLWTKVKNEAANLSSLGITALWLPPAYKGTSQSDVGYGVYDLYDLGEFNQKGTIRTKYGTKTQYIEAIQAAKAAGMQVYADVVFNHKAGADGTEFVDAVEVDPSNRNQETSGTYQIQAWTKFDFPGRGNTYSSFKWRWYHFDGTDWDESRKLNRIYKFRSTGKAWDWEVDTENGNYDYLMFADLDMDHPEVVTELKNWGTWYVRTTNIDGFRLDAVKHIKYSFFPDWLTYVRNQTGKNLFAVGEFWSYDVEKLHNYITKTEGSMSLFDAPLHNNFYTASKSSGYFDMRYLLNNTLMKDQPSLAVTLVDNHDTQPGQSLQSWVEPWFKPLAYAFILTRQEGYPCVFYGDYYGIPKYNIPGLKSKIDPLLIARRDYAYGTQRDYIDHQDIIGWTREGIDTKPNSGLAALITDGPGGSKWMYVGKKHAGKVFYDLTGNRSDTVTINADGWGEFKVNGGSVSIWVAKTSNVTFTVNNATTTSGQNVYVVANIPELGNW

SEQ ID NO: 26110 - protein, 513 aa, Bacillus sp. TS-23
APINETMMQYFEWDLPNDGTLWTKVKNEAANLSSLGITALWLPPAYKGTSQSDVGYGVYDLYDLGEFNQKGTIRTKYGTKTQYIRAIQAAKAAGMQVYADVVFNHKAGADGTEFVDAVEVDPSNRNQETSGTYQIQAWTKFDFPGRGNTYSSFKWRWYHFDGTDWDESRKLNRIYKFRSTGKAWDWEVDTENGNYDYLMFADLDMDHPEVVTELKNWGTWYVRTTNIDGFRLDAVKHIKYSFFPDWLTYVRNQTGKNLFAVGEFWSYDVRKLHNYITKTRGSMSLFDAPLHNNFYTASKSSGYFDMRYLLNNTLMKDQPSLAVTLVDNHDTQPGQSLQSWVEPWFKPLAYAFILTRQEGYPCVFYGDYYGIPKYNIPGLKSKIDPLLIARRDYAYGTQRDYIDHQDIIGWTREGIDTKPNSGLAALITDGPGGSKWMYVGKKHAGKVFYDLTGNRSDTVTINADGWGEFKVNGGSVSIWVAKTSNVTFTVNNATTTSGQNVYVVANIPELGNW

SEQ ID NO: 26111 - protein, 513 aa, Bacillus sp. TS-23
APINETMMQYFEWDLPNDGTLWTKVKNEAANLSSLGITALWLPPAYKGTSQSDVGYGVYDLYDLGEFNQKGTIRTKYGTKTQYIEAIQAAKAAGMQVYADVVFNHKAGADGTEFVDAVEVDPSNRNQETSGTYQIQAWTKFDFPGRGNTYSSFKWRWYHFDGTDWDESRKLNRIYKFRSTGKAWDWEVDTENGNYDYLMFADLDMDHPEVVTELKNWGTWYVRTTNIDGFRLDAVKHIKYSFFPDWLTYVRNQTGKNLFAVGEFWSYDVRKLHNYITKTRGSMSLFDAPLHNNFYTASKSSGYFDMRYLLNNTLMKDQPSLAVTLVDNHDTQPGQSLQSWVEPWFKPLAYAFILTRQEGYPCVFYGDYYGIPKYNIPGLKSKIDPLLIARRDYAYGTQRDYIDHQDIIGWTREGIDTKPNSGLAALITDGPGGSKWMYVGKKHAGKVFYDLTGNRSDTVTINADGWGEFKVNGGSVSIWVAKTSNVTFTVNNATTTSGQNVYVVANIPELGNW

SEQ ID NO: 26112 - protein, 513 aa, Bacillus sp. TS-23
APINETMMQYFEWDLPNDGTLWTKVKNEAANLSSLGITALWLPPAYKGTSQSDVGYGVYDLYDLGEFNQKGTIRTKYGTKTQYIEAIQAAKAAGMQVYADVVFNHKAGADGTEFVDAVEVDPSNRNQETSGTYQIQAWTKFDFPGRGNTYSSFKWRWYHFDGTDWDESRKLNRIYKFRSTGKAWDWEVDTENGNYDYLMFADLDMDHPEVVTELKNWGTWYVRTTNIDGFRLDAVKHIKYSFFPDWLTYVRNQTGKNLFAVGEFWSYDVRKLHNYITKTNGSMSLFDAPLHNNFYTASKSSGYFDMRYLLNNTLMKDQPSLAVTLVDNHDTQPGQSLQSWVEPWFKPLAYAFILTRQEGYPCVFYGDYYGIPKYNIPGLKSKIDPLLIARRDYAYGTQRDYIDHQDIIGWTREGIDTKPNSGLAALITDGPGGSKWMYVGKKHAGKVFYDLTGNRSDTVTINADGWGEFKVNGGSVSIWVAKTSNVTFTVNNATTTSGQNVYVVANIPELGNW

SEQ ID NO: 26113 - protein, 511 aa, Bacillus sp. TS-23
APINETMMQYFEWDLPNDGTLWTKVKNEAANLSSLGITALWLPPAWKGTSQSDVGYGAYDLYDLGEFNQKGTIRTKYGTKTQYIQAIQAAKAAGMQVYADVVFNHKAGADGTEFVDAVEVDPSNRNQETSGTYQIQAWTKFDFPGRGNTYSSFKWRWYHFDGTDWDESRKLNRIYKFRGKAWDWEVDTENGNYDYLMFADYDMDHPEVVTELKNWGTWYVNTTNIDGFRLDAVKHIKYSFFPDWLTYVRNQTGKNLFAVGEFWSYDVNKLHNYITKTNGSMSLFDAPLHNNFYTASKSSGYFDMRYLLNNTLMKDQPSLAVTLVDNHDTQPGQSLQSWVEPWFKPLAYAFILTRQEGYPCVFYGDYYGIPKYNIPGLKSKIDPLLIARRDYAYGTQRDYIDHQDIIGWTREGIDTKPNSGLAALITDGPGGSKWMYVGKKHAGKVFYDLTGNRSDTVTINADGWGEFKVNGGSVSIWVAKTSNVTFTVNNATTTSGQNVYVVANIPELGNW

SEQ ID NO: 26114 - protein, 511 aa, Bacillus sp. TS-23
APINETMMQYFEWDLPNDGTLWTKVKNEAANLSSLGITALWLPPAWKGTSQSDVGYGVYDLYDLGEFNQKGTIRTKYGTKTQYIQAIQAAKAAGMQVYADVVFNHKAGADGTEFVDAVEVDPSNRNQETSGTYQIQAWTKFDFPGRGNTYSSFKWRWYHFDGTDWDESRKLNRIYKFSTKAWDWEVDTENGNYDYLMFADLDMDHPEVVTELKNWGTWYVNTTNIDGFRLDAVKHIKYSFFPDWLTYVRNQTGKNLFAVGEFWSYDVNKLHNYITKTNGSMSLFDAPLHNNFYTASKSSGYFDMRYLLNNTLMKDQPSLAVTLVDNHDTQPGQSLQSWVEPWFKPLAYAFILTRQEGYPCVFYGDYYGIPKYNIPGLKSKIDPLLIARRDYAYGTQRDYIDHQDIIGWTREGIDTKPNSGLAALITDGPGGSKWMYVGKKHAGKVFYDLTGNRSDTVTINADGWGEFKVNGGSVSIWVAKTSNVTFTVNNATTTSGQNVYVVANIPELGNW

SEQ ID NO: 26115 - protein, 511 aa, Bacillus sp. TS-23
APINETMMQYFEWDLPNDGTLWTKVKNEAANLSSLGITALWLPPAYKGTSQSDVGYGAYDLYDLGEFNQKGTIRTKYGTKTQYIQAIQAAKAAGMQVYADVVFNHKAGADGTEFVDAVEVDPSNRNQETSGTYQIQAWTKFDFPGRGNTYSSFKWRWYHFDGTDWDESRKLNRIYKFRSKAWDWEVDTENGNYDYLMFADYDMDHPEVVTELKNWGTWYVNTTNIDGFRLDAVKHIKYSFFPDWLTYVRNQTGKNLFAVGEFWSYDVNKLHNYITKTNGSMSLFDAPLHNNFYTASKSSGYFDMRYLLNNTLMKDQPSLAVTLVDNHDTQPGQSLQSWVEPWFKPLAYAFILTRQEGYPCVFYGDYYGIPKYNIPGLKSKIDPLLIARRDYAYGTQRDYIDHQDIIGWTREGIDTKPNSGLAALITDGPGGSKWMYVGKKHAGKVFYDLTGNRSDTVTINADGWGEFKVNGGSVSIWVAKTSNVTFTVNNATTTSGQNVYVVANIPELGNW

SEQ ID NO: 26116 - protein, 513 aa, Bacillus sp. TS-23
APINETMMQYFEWDLPNDGTLWTKVKNEAANLSSLGITALWLPPAYKGTSQSDVGYGVYDLYDLGEFNQKGTIRTKYGTKTQYIEAIQAAKAAGMQVYADVVFNHKAGADGTEFVDAVEVDPSNRNQETSGTYQIQAWTKFDFPGRGNTYSSFKWRWYHFDGTDWDESRKLNRIYKFRSTGKAWDWEVDTENGNYDYLMFADLDMDHPEVVTELKNWGTWYVRTTNIDGFRLDAVKHIKYSFFPDWLTYVRNQTGKNLFAVGEFWSYDVEKLHNYITKTNGSMSLFDAPLHNNFYTASKSSGYFDMRYLLNNTLMKDQPSLAVTLVDNHDTQPGQSLQSWVEPWFKPLAYAFILTRQEGYPCVFYGDYYGIPKYNIPGLKSKIDPLLIARRDYAYGTQRDYIDHQDIIGWTREGIDTKPNSGLAALITDGPGGSKWMYVGKKHAGKVFYDLTGNRSDTVTINADGWGEFKVNGGSVSIWVAKTSNVTFTVNNATTTSGQNVYVVANIPELGNW

SEQ ID NO: 26117 - protein, 513 aa, Bacillus sp. TS-23
APVNGTMMQYFEWDLPNDGTLWTKVKNEASSLSALGITALWLPPAYKGTSQADVGYGVYDLYDLGEFNQKGTIRTKYGTKTQYLQAIQAAKSAGMQVYADVVFNHKAGADSTEWVDAVEVNPSNRNQETSGTYQIQAWTKFDFPGRGNTYSSFKWRWYHFDGTDWDESRKLNRIYKFRGTGKAWDWEVDTENGNYDYLMFADLDMDHPEVVAELKNWGKWYVNTTNVDGFRLDAVKHIKYSFFPDWLSYVRNQTGKNLFAVGEFWGYDVNKLHNYITKTNGAMSLFDAPLHNNFYIASKSSGYFDMRYLLNNTLMKDQPALAVTLVDNHDTQPGQSLQSWVEPWFKPLAYAFILTRQEGYPCVFYGDYYGIPKYNIPGLKSKIDPLLIARRDYAYGTQRDYIDHQDIIGWTREGIDAKPNSGLAALITDGPGGSKWMYVGKRHAGKVFYDLTGNRSDTVTINADGWGEFKVNGGSVSIWVAKTSNVTFTVNNATTVYGQNVYVVGNIPELGNW

SEQ ID NO: 26118 - protein, 513 aa, Bacillus sp. TS-23
APINETMMQYFEWDLPNDGTLWTKVKNEAANLSSLGITALWLPPAYKGTSQSDVGYGVYDLYDLGEFNQKGTIRTKYGTKTQYIEAIQAAKAAGMQVYADVVFNHKAGADGTEFVDAVEVDPSNRNQETSGTYQIQAWTKFDFPGRGNTYSSFKWRWYHFDGTDWDESRKLNRIYKFRSTGKAWDWEVDTENGNYDYLMFADLDMDHPEVVTELKNWGTWYVRTTNIDGFRLDAVKHIKYSFFPDWLTYVRNQTGKNLFAVGEFWSYDVRKLHNYITKTEGSMSLFDAPLHNNFYTASKSSGYFDMRYLLNNTLMKDQPSLAVTLVDNHDTQPGQSLQSWVEPWFKPLAYAFILTRQEGYPCVFYGDYYGIPKYNIPGLKSKIDPLLIARRDYAYGTQRDYIDHQDIIGWTREGIDTKPNSGLAALITDGPGGSKWMYVGKKHAGKVFYDLTGNRSDTVTINADGWGEFKVNGGSVSIWVAKTSNVTFTVNNATTTSGQNVYVVANIPELGNW

SEQ ID NO: 26119 - protein, 511 aa, Bacillus sp. TS-23
APINETMMQYFEWDLPNDGTLWTKVKNEAANLSSLGITALWLPPAYKGTSQSDVGYGAYDLYDLGEFNQKGTIRTKYGTKTQYIQAIQAAKAAGMQVYADVVFNHKAGADGTEFVDAVEVDPSNRNQETSGTYQIQAWTKFDFPGRGNTYSSFKWRWYHFDGTDWDESRKLNRIYKFTGKAWDWEVDTENGNYDYLMFADYDMDHPEVVTELKNWGTWYVNTTNIDGFRLDAVKHIKYSFFPDWLTYVRNQTGKNLFAVGEFWSYDVNKLHNYITKTNGSMSLFDAPLHNNFYTASKSSGYFDMRYLLNNTLMKDQPSLAVTLVDNHDTQPGQSLQSWVEPWFKPLAYAFILTRQEGYPCVFYGDYYGIPKYNIPGLKSKIDPLLIARRDYAYGTQRDYIDHQDIIGWTREGIDTKPNSGLAALITDGPGGSKWMYVGKKHAGKVFYDLTGNRSDTVTINADGWGEFKVNGGSVSIWVAKTSNVTFTVNNATTTSGQNVYVVANIPELGNW

SEQ ID NO: 26120 - protein, 513 aa, Bacillus sp. TS-23
APINETMMQYFEWDLPNDGTLWTKVKNEAANLSSLGITALWLPPAYKGTSQSDVGYGVYDLYDLGEFNQKGTIRTKYGTKTQYIEAIQAAKAAGMQVYADVVFNHKAGADGTEFVDAVEVDPSNRNQETSGTYQIQAWTKFDFPGRGNTYSSFKWRWYHFDGTDWDESRKLNRIYKFRSTGKAWDWEVDTENGNYDYLMFADLDMDHPEVVTELKNWGTWYVETTNIDGFRLDAVKHIKYSFFPDWLTYVRNQTGKNLFAVGEFWSYDVEKLHNYITKTEGSMSLFDAPLHNNFYTASKSSGYFDMRYLLNNTLMKDQPSLAVTLVDNHDTQPGQSLQSWVEPWFKPLAYAFILTRQEGYPCVFYGDYYGIPKYNIPGLKSKIDPLLIARRDYAYGTQRDYIDHQDIIGWTREGIDTKPNSGLAALITDGPGGSKWMYVGKKHAGKVFYDLTGNRSDTVTINADGWGEFKVNGGSVSIWVAKTSNVTFTVNNATTTSGQNVYVVANIPELGNW

SEQ ID NO: 26121 - protein, 513 aa, Bacillus sp. TS-23
APINETMMQYFEWDLPNDGTLWTKVKNEAANLSSLGITALWLPPAYKGTSQSDVGYGVYDLYDLGEFNQKGTIRTKYGTKTQYIEAIQAAKAAGMQVYADVVFNHKAGADGTEFVDAVEVDPSNRNQETSGTYQIQAWTKFDFPGRGNTYSSFKWRWYHFDGTDWDESRKLNRIYKFRSTGKAWDWEVDTENGNYDYLMFADLDMDHPEVVTELKNWGTWYVETTNIDGFRLDAVKHIKYSFFPDWLTYVRNQTGKNLFAVGEFWSYDVEKLHNYITKTRGSMSLFDAPLHNNFYTASKSSGYFDMRYLLNNTLMKDQPSLAVTLVDNHDTQPGQSLQSWVEPWFKPLAYAFILTRQEGYPCVFYGDYYGIPKYNIPGLKSKIDPLLIARRDYAYGTQRDYIDHQDIIGWTREGIDTKPNSGLAALITDGPGGSKWMYVGKKHAGKVFYDLTGNRSDTVTINADGWGEFKVNGGSVSIWVAKTSNVTFTVNNATTTSGQNVYVVANIPELGNW

SEQ ID NO: 26122 - protein, 511 aa, Bacillus sp. TS-23
APINETMMQYFEWDLPNDGTLWTKVKNEAANLSSLGITALWLPPAYKGTSQSDVGYGVYDLYDLGEFNQKGTIRTKYGTKTQYIQAIQAAKAAGMQVYADVVFNHKAGADGTEFVDAVEVDPSNRNQETSGTYQIQAWTKFDFPGRGNTYSSFKWRWYHFDGTDWDESRKLNRIYKFSTKAWDWEVDTENGNYDYLMFADFDMDHPEVVTELKNWGTWYVNTTNIDGFRLDAVKHIKYSFFPDWLTYVRNQTGKNLFAVGEFWSYDVNKLHNYITKTNGSMSLFDAPLHNNFYTASKSSGYFDMRYLLNNTLMKDQPSLAVTLVDNHDTQPGQSLQSWVEPWFKPLAYAFILTRQEGYPCVFYGDYYGIPKYNIPGLKSKIDPLLIARRDYAYGTQRDYIDHQDIIGWTREGIDTKPNSGLAALITDGPGGSKWMYVGKKHAGKVFYDLTGNRSDTVTINADGWGEFKVNGGSVSIWVAKTSNVTFTVNNATTTSGQNVYVVANIPELGNW

SEQ ID NO: 26123 - protein, 513 aa, Bacillus sp. TS-23
APINETMMQYFEWDLPNDGTLWTKVKNEAANLSSLGITALWLPPAYKGTSQSDVGYGVYDLYDLGEFNQKGTIRTKYGTKTQYIEAIQAAKAAGMQVYADVVFNHKAGADGTEFVDAVEVDPSNRNQETSGTYQIQAWTKFDFPGRGNTYSSFKWRWYHFDGTDWDESRKLNRIYKFRSTGKAWDWEVDTENGNYDYLMFADLDMDHPEVVTELKNWGTWYVETTNIDGFRLDAVKHIKYSFFPDWLTYVRNQTGKNLFAVGEFWSYDVRKLHNYITKTNGSMSLFDAPLHNNFYTASKSSGYFDMRYLLNNTLMKDQPSLAVTLVDNHDTQPGQSLQSWVEPWFKPLAYAFILTRQEGYPCVFYGDYYGIPKYNIPGLKSKIDPLLIARRDYAYGTQRDYIDHQDIIGWTREGIDTKPNSGLAALITDGPGGSKWMYVGKKHAGKVFYDLTGNRSDTVTINADGWGEFKVNGGSVSIWVAKTSNVTFTVNNATTTSGQNVYVVANIPELGNW

SEQ ID NO: 26124 - protein, 513 aa, Bacillus sp. TS-23
APINETMMQYFEWDLPNDGTLWTKVKNEAANLSSLGITALWLPPAYKGTSQSDVGYGVYDLYDLGEFNQKGTIRTKYGTKTQYIRAIQAAKAAGMQVYADVVFNHKAGADGTEFVDAVEVDPSNRNQETSGTYQIQAWTKFDFPGRGNTYSSFKWRWYHFDGTDWDESRKLNRIYKFRSTGKAWDWEVDTENGNYDYLMFADLDMDHPEVVTELKNWGTWYVRTTNIDGFRLDAVKHIKYSFFPDWLTYVRNQTGKNLFAVGEFWSYDVEKLHNYITKTNGSMSLFDAPLHNNFYTASKSSGYFDMRYLLNNTLMKDQPSLAVTLVDNHDTQPGQSLQSWVEPWFKPLAYAFILTRQEGYPCVFYGDYYGIPKYNIPGLKSKIDPLLIARRDYAYGTQRDYIDHQDIIGWTREGIDTKPNSGLAALITDGPGGSKWMYVGKKHAGKVFYDLTGNRSDTVTINADGWGEFKVNGGSVSIWVAKTSNVTFTVNNATTTSGQNVYVVANIPELGNW

SEQ ID NO: 26125 - protein, 513 aa, Bacillus sp. TS-23
APINETMMQYFEWDLPNDGTLWTKVKNEAANLSSLGITALWLPPAYKGTSQSDVGYGVYDLYDLGEFNQKGTIRTKYGTKTQYIEAIQAAKAAGMQVYADVVFNHKAGADGTEFVDAVEVDPSNRNQETSGTYQIQAWTKFDFPGRGNTYSSFKWRWYHFDGTDWDESRKLNRIYKFRSTGKAWDWEVDTENGNYDYLMFADLDMDHPEVVTELKNWGTWYVETTNIDGFRLDAVKHIKYSFFPDWLTYVRNQTGKNLFAVGEFWSYDVRKLHNYITKTEGSMSLFDAPLHNNFYTASKSSGYFDMRYLLNNTLMKDQPSLAVTLVDNHDTQPGQSLQSWVEPWFKPLAYAFILTRQEGYPCVFYGDYYGIPKYNIPGLKSKIDPLLIARRDYAYGTQRDYIDHQDIIGWTREGIDTKPNSGLAALITDGPGGSKWMYVGKKHAGKVFYDLTGNRSDTVTINADGWGEFKVNGGSVSIWVAKTSNVTFTVNNATTTSGQNVYVVANIPELGNW

SEQ ID NO: 26126 - protein, 513 aa, Bacillus sp. TS-23
APINETMMQYFEWDLPNDGTLWTKVKNEAANLSSLGITALWLPPAYKGTSQSDVGYGVYDLYDLGEFNQKGTIRTKYGTKTQYIRAIQAAKAAGMQVYADVVFNHKAGADGTEFVDAVEVDPSNRNQETSGTYQIQAWTKFDFPGRGNTYSSFKWRWYHFDGTDWDESRKLNRIYKFRSTGKAWDWEVDTENGNYDYLMFADLDMDHPEVVTELKNWGTWYVETTNIDGFRLDAVKHIKYSFFPDWLTYVRNQTGKNLFAVGEFWSYDVEKLHNYITKTRGSMSLFDAPLHNNFYTASKSSGYFDMRYLLNNTLMKDQPSLAVTLVDNHDTQPGQSLQSWVEPWFKPLAYAFILTRQEGYPCVFYGDYYGIPKYNIPGLKSKIDPLLIARRDYAYGTQRDYIDHQDIIGWTREGIDTKPNSGLAALITDGPGGSKWMYVGKKHAGKVFYDLTGNRSDTVTINADGWGEFKVNGGSVSIWVAKTSNVTFTVNNATTTSGQNVYVVANIPELGNW

SEQ ID NO: 26127 - protein, 511 aa, Bacillus sp. TS-23
APINETMMQYFEWDLPNDGTLWTKVKNEAANLSSLGITALWLPPAYKGTSQSDVGYGVYDLYDLGEFNQKGTIRTKYGTKTQYIQAIQAAKAAGMQVYADVVFNHKAGADGTEFVDAVEVDPSNRNQETSGTYQIQAWTKFDFPGRGNTYSSFKWRWYHFDGTDWDESRKLNRIYKFSTKAWDWEVDTENGNYDYLMFADYDMDHPEVVTELKNWGTWYVNTTNIDGFRLDAVKHIKYSFFPDWLTYVRNQTGKNLFAVGEFWSYDVNKLHNYITKTNGSMSLFDAPLHNNFYTASKSSGYFDMRYLLNNTLMKDQPSLAVTLVDNHDTQPGQSLQSWVEPWFKPLAYAFILTRQEGYPCVFYGDYYGIPKYNIPGLKSKIDPLLIARRDYAYGTQRDYIDHQDIIGWTREGIDTKPNSGLAALITDGPGGSKWMYVGKKHAGKVFYDLTGNRSDTVTINADGWGEFKVNGGSVSIWVAKTSNVTFTVNNATTTSGQNVYVVANIPELGNW

SEQ ID NO: 26128 - protein, 513 aa, Bacillus sp. TS-23
APINETMMQYFEWDLPNDGTLWTKVKNEAANLSSLGITALWLPPAYKGTSQSDVGYGVYDLYDLGEFNQKGTIRTKYGTKTQYIRAIQAAKAAGMQVYADVVFNHKAGADGTEFVDAVEVDPSNRNQETSGTYQIQAWTKFDFPGRGNTYSSFKWRWYHFDGTDWDESRKLNRIYKFRSTGKAWDWEVDTENGNYDYLMFADLDMDHPEVVTELKNWGTWYVETTNIDGFRLDAVKHIKYSFFPDWLTYVRNQTGKNLFAVGEFWSYDVEKLHNYITKTEGSMSLFDAPLHNNFYTASKSSGYFDMRYLLNNTLMKDQPSLAVTLVDNHDTQPGQSLQSWVEPWFKPLAYAFILTRQEGYPCVFYGDYYGIPKYNIPGLKSKIDPLLIARRDYAYGTQRDYIDHQDIIGWTREGIDTKPNSGLAALITDGPGGSKWMYVGKKHAGKVFYDLTGNRSDTVTINADGWGEFKVNGGSVSIWVAKTSNVTFTVNNATTTSGQNVYVVANIPELGNW

SEQ ID NO: 26129 - protein, 511 aa, Bacillus sp. TS-23
APINETMMQYFEWDLPNDGTLWTKVKNEAANLSSLGITALWLPPAWKGTSQSDVGYGVYDLYDLGEFNQKGTIRTKYGTKTQYIQAIQAAKAAGMQVYADVVFNHKAGADGTEFVDAVEVDPSNRNQETSGTYQIQAWTKFDFPGRGNTYSSFKWRWYHFDGTDWDESRKLNRIYKFRSKAWDWEVDTENGNYDYLMFADYDMDHPEVVTELKNWGTWYVNTTNIDGFRLDAVKHIKYSFFPDWLTYVRNQTGKNLFAVGEFWSYDVNKLHNYITKTNGSMSLFDAPLHNNFYTASKSSGYFDMRYLLNNTLMKDQPSLAVTLVDNHDTQPGQSLQSWVEPWFKPLAYAFILTRQEGYPCVFYGDYYGIPKYNIPGLKSKIDPLLIARRDYAYGTQRDYIDHQDIIGWTREGIDTKPNSGLAALITDGPGGSKWMYVGKKHAGKVFYDLTGNRSDTVTINADGWGEFKVNGGSVSIWVAKTSNVTFTVNNATTTSGQNVYVVANIPELGNW

SEQ ID NO: 26130 - protein, 511 aa, Bacillus sp. TS-23
APINETMMQYFEWDLPNDGTLWTKVKNEAANLSSLGITALWLPPAYKGTSQSDVGYGVYDLYDLGEFNQKGTIRTKYGTKTQYIQAIQAAKAAGMQVYADVVFNHKAGADGTEFVDAVEVDPSNRNQETSGTYQIQAWTKFDFPGRGNTYSSFKWRWYHFDGTDWDESRKLNRIYKFSTKAWDWEVDTENGNYDYLMFADLDMDHPEVVTELKNWGTWYVNTTNIDGFRLDAVKHIKYSFFPDWLTYVRNQTGKNLFAVGEFWSYDVNKLHNYITKTNGSMSLFDAPLHNNFYTASKSSGYFDMQYLLNNTLMKDQPSLAVTLVDNHDTQPGQSLQSWVEPWFKPLAYAFILTRQEGYPCVFYGDYYGIPKYNIPGLKSKIDPLLIARRDYAYGTQRDYIDHQDIIGWTREGIDTKPNSGLAALITDGPGGSKWMYVGKKHAGKVFYDLTGNRSDTVTINADGWGEFKVNGGSVSIWVAKTSNVTFTVNNATTTSGQNVYVVANIPELGNW

SEQ ID NO: 26131 - protein, 513 aa, Bacillus sp. TS-23
APINETMMQYFEWDLPNDGTLWTKVKNEAANLSSLGITALWLPPAYKGTSQSDVGYGVYDLYDLGEFNQKGTIRTKYGTKTQYIRAIQAAKAAGMQVYADVVFNHKAGADGTEFVDAVEVDPSNRNQETSGTYQIQAWTKFDFPGRGNTYSSFKWRWYHFDGTDWDESRKLNRIYKFRSTGKAWDWEVDTENGNYDYLMFADLDMDHPEVVTELKNWGTWYVRTTNIDGFRLDAVKHIKYSFFPDWLTYVRNQTGKNLFAVGEFWSYDVRKLHNYITKTEGSMSLFDAPLHNNFYTASKSSGYFDMRYLLNNTLMKDQPSLAVTLVDNHDTQPGQSLQSWVEPWFKPLAYAFILTRQEGYPCVFYGDYYGIPKYNIPGLKSKIDPLLIARRDYAYGTQRDYIDHQDIIGWTREGIDTKPNSGLAALITDGPGGSKWMYVGKKHAGKVFYDLTGNRSDTVTINADGWGEFKVNGGSVSIWVAKTSNVTFTVNNATTTSGQNVYVVANIPELGNW

SEQ ID NO: 26132 - protein, 513 aa, Bacillus sp. TS-23
APINETMMQYFEWDLPNDGTLWTKVKNEAANLSSLGITALWLPPAYKGTSQSDVGYGVYDLYDLGEFNQKGTIRTKYGTKTQYIRAIQAAKAAGMQVYADVVFNHKAGADGTEFVDAVEVDPSNRNQETSGTYQIQAWTKFDFPGRGNTYSSFKWRWYHFDGTDWDESRKLNRIYKFRSTGKAWDWEVDTENGNYDYLMFADLDMDHPEVVTELKNWGTWYVETTNIDGFRLDAVKHIKYSFFPDWLTYVRNQTGKNLFAVGEFWSYDVRKLHNYITKTNGSMSLFDAPLHNNFYTASKSSGYFDMRYLLNNTLMKDQPSLAVTLVDNHDTQPGQSLQSWVEPWFKPLAYAFILTRQEGYPCVFYGDYYGIPKYNIPGLKSKIDPLLIARRDYAYGTQRDYIDHQDIIGWTREGIDTKPNSGLAALITDGPGGSKWMYVGKKHAGKVFYDLTGNRSDTVTINADGWGEFKVNGGSVSIWVAKTSNVTFTVNNATTTSGQNVYVVANIPELGNW

SEQ ID NO: 26133 - protein, 513 aa, Bacillus sp. TS-23
APINETMMQYFEWDLPNDGTLWTKVKNEAANLSSLGITALWLPPAYKGTSQSDVGYGVYDLYDLGEFNQKGTIRTKYGTKTQYIEAIQAAKAAGMQVYADVVFNHKAGADGTEFVDAVEVDPSNRNQETSGTYQIQAWTKFDFPGRGNTYSSFKWRWYHFDGTDWDESRKLNRIYKFRSTGKAWDWEVDTENGNYDYLMFADLDMDHPEVVTELKNWGTWYVETTNIDGFRLDAVKHIKYSFFPDWLTYVRNQTGKNLFAVGEFWSYDVRKLHNYITKTRGSMSLFDAPLHNNFYTASKSSGYFDMRYLLNNTLMKDQPSLAVTLVDNHDTQPGQSLQSWVEPWFKPLAYAFILTRQEGYPCVFYGDYYGIPKYNIPGLKSKIDPLLIARRDYAYGTQRDYIDHQDIIGWTREGIDTKPNSGLAALITDGPGGSKWMYVGKKHAGKVFYDLTGNRSDTVTINADGWGEFKVNGGSVSIWVAKTSNVTFTVNNATTTSGQNVYVVANIPELGNW

SEQ ID NO: 26134 - protein, 513 aa, Bacillus sp. TS-23
APINETMMQYFEWDLPNDGTLWTKVKNEAANLSSLGITALWLPPAYKGTSQSDVGYGVYDLYDLGEFNQKGTIRTKYGTKTQYIRAIQAAKAAGMQVYADVVFNHKAGADGTEFVDAVEVDPSNRNQETSGTYQIQAWTKFDFPGRGNTYSSFKWRWYHFDGTDWDESRKLNRIYKFRSTGKAWDWEVDTENGNYDYLMFADLDMDHPEVVTELKNWGTWYVETTNIDGFRLDAVKHIKYSFFPDWLTYVRNQTGKNLFAVGEFWSYDVEKLHNYITKTNGSMSLFDAPLHNNFYTASKSSGYFDMRYLLNNTLMKDQPSLAVTLVDNHDTQPGQSLQSWVEPWFKPLAYAFILTRQEGYPCVFYGDYYGIPKYNIPGLKSKIDPLLIARRDYAYGTQRDYIDHQDIIGWTREGIDTKPNSGLAALITDGPGGSKWMYVGKKHAGKVFYDLTGNRSDTVTINADGWGEFKVNGGSVSIWVAKTSNVTFTVNNATTTSGQNVYVVANIPELGNW

SEQ ID NO: 26135 - protein, 511 aa, Bacillus sp. TS-23
APINETMMQYFEWDLPNDGTLWTKVKNEAANLSSLGITALWLPPAWKGTSQSDVGYGVYDLYDLGEFNQKGTIRTKYGTKTQYIQAIQAAKAAGMQVYADVVFNHKAGADGTEFVDAVEVDPSNRNQETSGTYQIQAWTKFDFPGRGNTYSSFKWRWYHFDGTDWDESRKLNRIYKFTGKAWDWEVDTENGNYDYLMFADYDMDHPEVVTELKNWGTWYVNTTNIDGFRLDAVKHIKYSFFPDWLTYVRNQTGKNLFAVGEFWSYDVNKLHNYITKTNGSMSLFDAPLHNNFYTASKSSGYFDMRYLLNNTLMKDQPSLAVTLVDNHDTQPGQSLQSWVEPWFKPLAYAFILTRQEGYPCVFYGDYYGIPKYNIPGLKSKIDPLLIARRDYAYGTQRDYIDHQDIIGWTREGIDTKPNSGLAALITDGPGGSKWMYVGKKHAGKVFYDLTGNRSDTVTINADGWGEFKVNGGSVSIWVAKTSNVTFTVNNATTTSGQNVYVVANIPELGNW

SEQ ID NO: 26136 - protein, 513 aa, Bacillus sp. TS-23
APINETMMQYFEWDLPNDGTLWTKVKNEAANLSSLGITALWLPPAYKGTSQSDVGYGVYDLYDLGEFNQKGTIRTKYGTKTQYIRAIQAAKAAGMQVYADVVFNHKAGADGTEFVDAVEVDPSNRNQETSGTYQIQAWTKFDFPGRGNTYSSFKWRWYHFDGTDWDESRKLNRIYKFRSTGKAWDWEVDTENGNYDYLMFADLDMDHPEVVTELKNWGTWYVRTTNIDGFRLDAVKHIKYSFFPDWLTYVRNQTGKNLFAVGEFWSYDVEKLHNYITKTEGSMSLFDAPLHNNFYTASKSSGYFDMRYLLNNTLMKDQPSLAVTLVDNHDTQPGQSLQSWVEPWFKPLAYAFILTRQEGYPCVFYGDYYGIPKYNIPGLKSKIDPLLIARRDYAYGTQRDYIDHQDIIGWTREGIDTKPNSGLAALITDGPGGSKWMYVGKKHAGKVFYDLTGNRSDTVTINADGWGEFKVNGGSVSIWVAKTSNVTFTVNNATTTSGQNVYVVANIPELGNW

SEQ ID NO: 26137 - protein, 480 aa, Bacillus sp.
APINETMMQYFEWDLPNDGTLWTKVKNEAANLSSLGITALWLPPAYKGTSQSDVGYGVYDLYDLGEFNQKGTIRTKYGTKTQYIQAIQAAKAAGMQVYADVVFNHKAGADQTEFVDAVEVDPSNRNQEVSGTYQIEAWTKFDFPGRGNTYSSFKWRWYHFDGTDWDESRKLNRIYKFRGKAWDWEVDTENGNYDYLMFADLDMDHPEVVTELKNWGTWYVNTTNIDGFRLDAVKHIKFSFMRDWLGHVRGQTGKNLFAVGEFWSYDVNKLHNYITKTNGSMSLFDAPLHNNFYTASKSSGYFDMRYLLNNTLMKDQPSLAVTLVDNHDTQPGEALESFVQGWFKPLAYAFILTRQEGYPCVFYGDYYGIPKYNIPGLKSKIDPLLIARRDYAYGTQRDYIDHQDIIGWTREGIDTKPNSGLAALITDGPGGSKWMYVGKKHAGKVFYDLTGNRSDTVTINADGWGEFKVNGGSVSIWVAK

SEQ ID NO: 26138 - protein, 480 aa, Synthetic construct
APVNGTMMQYFEWDLPNDGTLWTKVKNEAANLSSLGITALWLPPAYKGTSQSDVGYGVYDLYDLGEFNQKGTIRTKYGTKTQYIQAIQAAKAAGMQVYADVVFNHKGGADATEDVTAVEVDPADRNRVISGEHLIKAWTHFHFPGRGSTYSDFKWHWYHFDGTDWDESRKLNRIYKFQGKAWDWEVSNEFGNYDYLMYADIDMDHPEVVAELKNWGKWYVNTTNVDGFRLDAVKHIKYSFFPDWLSYVRNQTGKNLFAVGEFWSYDVNKLHNYITKTNGTMSLFDAPLHNNFYIASKSSGYFDMRYLLNNTLMKDQPALAVTLVDNHDTQPGQSLQSWVEPWFKPLAYAFILTRQEGYPCVFYGDYYGIPKYNIPGLKSKIDPLLIARRDYAYGTQRDYIDHPDIIGWTREGIDAKPNSGLAALITDGPGGSKWMYVGKKHAGKVFYDLTGNRSDTVTINADGWGQFKVNGGSVSIWVAK

SEQ ID NO: 26139 - protein, 483 aa, Synthetic construct
APVNGTMMQYFEWDLPNDGTLWTKVKNEAANLSSLGITALWLPPAYKGTSQSDVGYGVYDLYDLGEFNQKGTIRTKYGTKTQYIQAIQAAKAAGMQVYADVVFNHKGGADFTERVQAVEVNPQNRNQEVSGTYQIEAWTGFNFPGRGNQHSSFKWRWYHFDGTDWDQSRQLANRIYKFRGDGKAWDWEVDTENGNYDYLMYADVDMDHPEVVAELKNWGKWYVNTTNVDGFRLDAVKHIKYSFFPDWLSYVRNQTGKNLFAVGEFWSYDVNKLHNYITKTNGTMSLFDAPLHNNFYIASKSSGYFDMRYLLNNTLMKDQPALAVTLVDNHDTQPGQSLQSWVEPWFKPLAYAFILTRQEGYPCVFYGDYYGIPKYNIPGLKSKIDPLLIARRDYAYGTQRDYIDHPDIIGWTREGIDAKPNSGLAALITDGPGGSKWMYVGKKHAGKVFYDLTGNRSDTVTINADGWGQFKVNGGSVSIWVAK

SEQ ID NO: 26140 - protein, 483 aa, Synthetic construct
APVNGTMMQYFEWDLPNDGTLWTKVKNEAANLSSLGITALWLPPAYKGTSQSDVGYGVYDLYDLGEFNQKGTIRTKYGTKTQYIQAIQAAKAAGMQVYADVVFNHKGGADATEMVRAVEVNPNNRNQEVTGEYTIEAWTRFDFPGRGNTHSSFKWRWYHFDGVDWDQSRRLNNRIYKFRGHGKAWDWEVDTENGNYDYLMYADIDMDHPEVVAELKNWGKWYVNTTNVDGFRLDAVKHIKYSFFPDWLSYVRNQTGKNLFAVGEFWSYDVNKLHNYITKTNGTMSLFDAPLHNNFYIASKSSGYFDMRYLLNNTLMKDQPALAVTLVDNHDTQPGQSLQSWVEPWFKPLAYAFILTRQEGYPCVFYGDYYGIPKYNIPGLKSKIDPLLIARRDYAYGTQRDYIDHPDIIGWTREGIDAKPNSGLAALITDGPGGSKWMYVGKKHAGKVFYDLTGNRSDTVTINADGWGQFKVNGGSVSIWVAK

SEQ ID NO: 26141 - protein, 483 aa, Bacillus licheniformis
HHNQTNGTMMQYFEWYLPNDGNHWHRLRSDASNLKDKGITAVWIPPAWKGASQNDVGYGAYDLYDLGEFNQKGTVRTKYGTRNQLQAAVTALKSNGIQVYGDVVMNHKGGADATEWVRAVEVNPSNRNQEVSGDYTIEAWTKFDFPGRGNTHSNFKWRWYHFDGVDWDQSRQLQNRIYKFRGKEWDWEVDTENGNYDYLMYADYDMDHPEVVNELRNWGVWYTNTLGLDGFRIDAVKHIKYSFTRDWLTHVRNTTGKNMFAVAEFWKNDIGAIRNYLSKTNWNHSVFDVPLHYNLYNASRSGGNYDMRQIFNGTVVQRHPTHAVTFVDNHDSQPEEALESFVEEWFKPLAYALTLTRDQGYPSVFYGDYYGIPTHGVPAMKSKIDPILEARQKYAYGTQRDYLDHPDVIGWTREGDGVHADSGLATLMSDGPGGSKWMEVGKNNAGEVWYDITGNQTNTVTINKDGWGQFHVSGGSVSIYVQQ

SEQ ID NO: 26142 - protein, 483 aa, Bacillus licheniformis
HHNGTNGTMMQYFEWYLPNDGNHWHRLRSDASNLKDKGITAVWIPPAWKGASQNDVGYGAYDLYDLGEFNQKGTVRTKYGTRNQLQAAVTALKSNGIQVYGDVVMNHKGGADATEWVRAVEVNPSNRNQEVSGDYTIEAWTKFDFPGRGNTHSNFKWRWYHFDGVDWDQSRQLQNKIYKFRGKGWDWEVDTENGNYDYLMYADYDMDHPEVVNELRNWGVWYTNTLGLDGFRIDAVKHIKYSFTRDWLTHVRNTTGKNMFAVAEFWKNDIGAIRNYLSKTNWNHSVFDVPLHYNLYNASRSGGNYDMRQIFNGTVVQRHPTHAVTFVDNHDSQPEEALESFVEEWFKPLAYALTLTRDQGYPSVFYGDYYGIPTHGVPAMKSKIDPILEARQKYAYGTQRDYMDHPDVIGWTREGDGVHADSGLATLMSDGPGGSKWMEVGKNNAGEVWYDITGNQTNTVTINKDGWGQFHVSGGSVSIYVQQ

SEQ ID NO: 26143 - protein, 483 aa, Bacillus licheniformis
HHNGTNGTMMQYFEWYLPNDGNHWHRLRSDASNLKDKGITAVWIPPAWKGASQNDVGYGAYDLYDLGEFNQKGTVRTKYGTRNQLQAAVTALKSNGIQVYGDVVMNHKGGADATEWVRAVEVNPSNRNQEVSGDYTIEAWTKFDFPGRGNTHSNFKWRWYHFDGVDWDQSRQLQNKIYKFRGKEWDWEVDTENGNYDYLMYADYDMDHPEVVNELRNWGVWYTNTLGLDGFRIDAVKHIKYSFTRDWLTHVRNTTGKNMFAVAEFWKNDIGAIENYLSKTNWNHSVFDVPLHYNLYNASRSGGNYDMRQIFNGTVVQRHPTHAVTFVDNHDSQPEEALESFVEEWFKPLAYALTLTRDQGHPSVFYGDYYGIPTHGVPAMKSKIDPILEARQKYAYGTQRDYLDHPDVIGWTREGDGVHADSGLATLMSDGPGGSKWMEVGKNNAGEVWYDITGNQTNTVTINKDGWGQFHVSGGSVSIYVQQ

SEQ ID NO: 26144 - protein, 483 aa, Bacillus licheniformis
HHNGTNGTMMQYFEWYLPNDGNHWHRLRSDASNLKDKGITAVWIPPAWKGASQNDVGYGAYDLYDLGEFNQKGTVRTKYGTRNQLQAAVTALKSNGIQVYGDVVMNHKGGADATEWVRAVEVNPSNRNQEVSGDYTIEAWTKFDFPGRGNTHSNFKWRWYHFDGVDWDQSRQLQNKIYKFRDKEWDWEVDTENGNYDYLMYADYDMDHPEVVNELRNWGVWYTNTLGLDGFRIDAVKHIKYSFTRDWLTHVRNTTGKNMFAVAEFWKNDIGAIENYLSKTNWNHSVFDVPLHYNLYNASRSGGNYDMRQIFNGTVVQRHPTHAVTFVDNHDSQPEEALESFVEEWFKPLAYALTLTRDQGYPSVFYGDYYGIPTHGVPAMKSKIDPILEARQKYAYGTQRDYLDHPDVIGWTREGDGVHADSGLATLMSDGPGGSKWMEVGKNNAGEVWYDITGNQTNTVTINKDGWGQFHVSGGSVSIYVQQ

SEQ ID NO: 26145 - protein, 483 aa, Bacillus licheniformis
HHNGTNGTMMQYFEWYLPNDGNHWHRLRSDASNLKDKGITAVWIPPAWKGASQNDVGYGAYDLYDLGEFNQKGTVRTKYGTRNQLQAAVTALKSNGIQVYGDVVMNHKGGADATEWVRAVEVNPSNRNQEVSGDYTIEAWTKFDFPGRGNTHSNFKWRWWHFDGVDWDQSRQLQNRIYKFRGKEWDWEVDTENGNYDYLMYADYDMDHPEVVNELRNWGVWYTNTLGLDGFRIDAVKHIKYSFTRDWLEHVRNTTGKNMFAVAEFWKNDIGAIENYLSKTNWNHSVFDVPLHYNLYNASRSGGNYDMRQIFNGTVVQRHPTHAVTFVDNHDSQPEEALESFVEEWFKPLAYALTLTRDQGYPSVFYGDYYGIPTHGVPAMKSKIDPILEARQKYAYGTQRDYMDHPDVIGWTREGDGVHADSGLATLMSDGPGGSKWMEVGKNNAGEVWYDITGNQTNTVTINKDGWGQFHVSGGSVSIYVQQ

SEQ ID NO: 26146 - protein, 483 aa, Bacillus licheniformis
HHNGTNGTMMQYFEWYLPNDGNHWHRLRSDASNLKDKGITAVWIPPAWKGASQNDVGYGAYDLYDLGEFNQKGTVRTKYGTRNQLQAAVTALKSNGIQVYGDVVMNHKGGADATEWVRAVEVNPSNRNQEVSGDYTIEAWTKFDFPGRGNTHSNFKWRWWHFDGVDWDQSRQLQNKIYKFRGKEWDWEVDTENGNYDYLMYADIDMDHPEVVNELRNWGVWYTNTLGLDGFRIDAVKHIKYSFTRDWLEHVRNTTGKNMFAVAEFWKNDIGAIENYLSKTNWNHSVFDVPLHYNLYNASRSGGNYDMRQIFNGTVVQRHPTHAVTFVDNHDSQPEEALESFVEEWFKPLAYALTLTRDQGYPSVFYGDYYGIPTHGVPAMKSKIDPILEARQKYAYGTQRDYMDHPDVIGWTREGDGVHADSGLATLMSDGPGGSKWMEVGKNNAGEVWYDITGNQTNTVTINKDGWGQFHVSGGSVSIWVQQ

SEQ ID NO: 26147 - protein, 483 aa, Bacillus licheniformis
HHNGTNGTMMQYFEWYLPNDGNHWHRLRSDASNLKDKGITAVWIPPAWKGASQNDVGYGAYDLYDLGEFNQKGTVRTKYGTRNQLQAAVTALKSNGIQVYGDVVMNHKGGADATEWVRAVEVNPSNRNQEVSGDYTIEAWTKFDFPGRGNTHSNFKWRWYHFDGVDWDQSRQLQNKIYKFRGKGWDWEVDTENGNYDYLMYADYDMDHPEVVNELRNWGVWYTNTLGLDGFRIDAVKHIKYSFTRDWLEHVRNTTGKNMFAVAEFWKNDIGAIRNYLSKTNWNHSVFDVPLHYNLYNASRSGGNYDMRQIFNGTVVQRHPTHAVTFVDNHDSQPEEALESFVEEWFKPLAYALTLTRDQGYPSVFYGDYYGIPTHGVPAMKSKIDPILEARQKYAYGTQRDYMDHPDVIGWTREGDGVHADSGLATLMSDGPGGSKWMEVGKNNAGEVWYDITGNQTGTVTINKDGWGQFHVSGGSVSIYVQQ

SEQ ID NO: 26148 - protein, 483 aa, Bacillus licheniformis
HHNQTNGTMMQYFEWYLPNDGNHWHRLRSDASNLKDKGITAVWIPPAWKGASQNDVGYGAYDLYDLGEFNQKGTVRTKYGTRNQLQAAVTALKSNGIQVYGDVVMNHKGGADATEWVRAVEVNPSNRNQEVSGDYTIEAWTKFDFPGRGNTHSNFKWRWYHFDGVDWDQSRQLQNRIYKFRGKEWDWEVDTENGNYDYLMYADYDMDHPEVVNELRNWGVWYTNTLGLDGFRIDAVKHIKYSFTRDWLTHVRNTTGKNMFAVAEFWKNDIGAIRNYLSKTNWNHSVFDVPLHYNLYNASRSGGNYDMRQIFNGTVVQRHPTHAVTFVDNHDSQPEEALESFVEEWFKPLAYALTLTRDQGYPSVFYGDYYGIPTHGVPAMKSKIDPILEARQKYAYGTQRDYMDHPDVIGWTREGDGVHADSGLATLMSDGPGGSKWMEVGKNNAGEVWYDITGNQTNTVTINKDGWGQFHVSGGSVSIYVQQ

SEQ ID NO: 26149 - protein, 483 aa, Bacillus licheniformis
HHNGTNGTMMQYFEWYLPNDGNHWHRLRSDASNLKDKGITAVWIPPAWKGASQNDVGYGAYDLYDLGEFNQKGTVRTKYGTRNQLQAAVTALKSNGIQVYGDVVMNHKGGADATEWVRAVEVNPSNRNQEVSGDYTIEAWTKFDFPGRGNTHSNFKWRWYHFDGVDWDQSRQLQNRIYKFRGKEWDWEVDTENGNYDYLMYADYDMDHPEVVNELRNWGVWYTNTLGLDGFRIDAVKHIKYSFTRDWLTHVRNTTGKNMFAVAEFWKNDIGAIRNYLSKTNWNHSVFDVPLHYNLYNASRSGGNYDMRQIFNGTVVQRHPTHGVTFVDNHDSQPEEALESFVEEWFKPLAYALTLTRDQGYPSVFYGDYYGIPTHGVPAMKSKIDPILEARQKYAYGTQRDYLDHPDVIGWTREGDGVHADSGLATLMSDGPGGSKWMEVGKNNAGEVWYDITGNQTNTVTINKDGWGQFHVSGGSVSIYVQQ

SEQ ID NO: 26150 - protein, 483 aa, Bacillus licheniformis
HHNGTNGTMMQYFEWYLPNDGNHWHRLRSDASNLKDKGITAVWIPPAWKGASQNDVGYGAYDLYDLGEFNQKGTVRTKYGTRNQLQAAVTALKSNGIQVYGDVVMNHKGGADATEWVRAVEVNPSNRNQEVSGDYTIEAWTKFDFPGRGNTHSNFKWRWYHFDGVDWDQSRQLQNKIYKFRGKEWDWEVDTENGNYDYLMYADYDMDHPEVVNELRNWGVWYTNTLGLDGFRIDAVKHIKYSFTRDWLEHVRNTTGKNMFAVAEFWKNDIGAIENYLSKTNWNHSVFDVPLHYNLYNASRSGGNYDMRQIFNGTVVQRHPTHAVTFVDNHDSQPEEALESFVEEWFKPLAYALTLTRDQGYPSVFYGDYYGIPTHGVPAMKSKIDPILEARQKYAYGTQRDYMDHPDVIGWTREGDGVHADSGLATLMSDGPGGSKWMEVGKNNAGEVWYDITGNQTNTVTINKDGWGQFHVSGGSVSIYVQQ

SEQ ID NO: 26151 - protein, 483 aa, Bacillus licheniformis
HHNGTNGTMMQYFEWYLPNDGNHWNRLRSDASNLKDKGITAVWIPPAWKGASQNDVGYGAYDLYDLGEFNQKGTVRTKYGTRNQLQRAVTALKSNGIQVYGDVVMNHKGGADATEWVRAVEVNPSNRNQEVSGDYTIEAWTKFDFPGRGNTHSNFKWRWYHFDGVDWDQSRQLQNRIYKFRGKEWDWEVDTENGNYDYLMYADIDMDHPEVVNELRNWGVWYTRTLGLDGFRIDAVKHIKYSFTRDWLTHVRNTTGKNMFAVAEFWKNDIGAIENYLSKTNWNHSVFDVPLHYNLYNASRSGGNYDMRQIFKGTVVQRHPTHAVTFVDNHDSQPEEALESFVEEWFKPLAYALTLTRDQGYPSVFYGDYYGIPTHGVPAMKSKIDPILEARQKYAYGTQRDYLDHPDVIGWTREGDGKHADSGLATLMSDGPGGSKWMEVGKNNAGEVWYDITGNQTNRVTINKDGWGQFHVSGGSVSIYVQQ

SEQ ID NO: 26152 - protein, 483 aa, Bacillus licheniformis
HHNQTNGTMMQYFEWYLPNDGNHWNRLRSDASNLKDKGITAVWIPPAWKGASQNDVGYGAYDLYDLGEFNQKGTVRTKYGTRNQLQAAVTALKSNGIQVYGDVVMNHKGGADATEWVRAVEVNPSNRNQEVSGDYTIEAWTKFDFPGRGNTHSNFKWRWYHFDGVDWDQSRQLQNRIYKFRGKEWDWEVDTENGNYDYLMYADYDMDHPEVVNELRNWGVWYTNTLGLDGFRIDAVKHIKYSFTRDWLEHVRNTTGKNMFAVAEFWKNDIGAIENYLSKTNWNHSVFDVPLHYNLYNASRSGGNYDMRQIFNGTVVQRHPTHGVTFVDNHDSQPEEALESFVEEWFKPLAYALTLTRDQGYPSVFYGDYYGIPTHGVPAMKSKIDPILEARQKYAYGTQRDYMDHPDVIGWTREGDGVHADSGLATLMSDGPGGSKWMEVGKNNAGEVWYDITGNQTNTVTINKDGWGQFHVSGGSVSIYVQQ

SEQ ID NO: 26153 - protein, 483 aa, Bacillus licheniformis
HHNGTNGTMMQYFEWYLPNDGNHWHRLRSDASNLKDKGITAVWIPPAWKGASQNDVGYGAYDLYDLGEFNQKGTVRTKYGTRNQLQAAVTALKSNGIQVWGDVVMNHKGGADATEWVRAVEVNPSNRNQEVSGDYTIEAWTKFDFPGRGNTHSNFKWRWYHFDGVDWDQSRQLQNKIYKFRGKEWDWEVDEENGNYDYLMYADYDMDHPEVVNELRNWGVWYTNTLGLDGFRIDAVKHIKYSFTRDWLTHVRNTTGKNMFAVAEFWKNDIGAIENYLSKTNWNHSVFDVPLHYNLYNASRSGGNYDMRQIFNGTVVQRHPTHAVTFVDNHDSQPEEALESFVEEWFKPLAYALTLTRDQGYPSVFYGDYYGIPTHGVPAMKSKIDPILEARQKYAYGTQRDYLDHPDVIGWTREGDGVHADSGLATLMSDGPGGSKWMEVGKNNAGEVWYDITGNQTNTVTINKDGWGQFHVSGGSVSIYVQQ

SEQ ID NO: 26154 - protein, 483 aa, Bacillus licheniformis
HHNGTNGTMMQYFEWYLPNDGNHWHRLRSDASNLKDKGITAVWIPPAWKGASQNDVGYGAYDLYDLGEFNQKGTVRTKYGTRNQLQAAVTALKSNGIQVYGDVVMNHKGGADATEWVRAVEVNPSNRNQEVSGDYTIEAWTKFDFPGRGNTHSNFKWRWYHFDGVDWDQSRQLQNKIYKFRGKEWDWEVDTENGNYDYLMYADYDMDHPEVVNELRNWGVWYTNTLGLDGFRIDAVKHIKYSFTRDWLTHVRNTTGKNMFAVAEFWKNDIGAIENYLSKTNWNHSVFDVPLHYNLYNASRSGGNYDMRQIFNGTVVQRHPTHAVTFVDNHDSQPEEALESFVEEWFKPLAYALTLTRDQGEPSVFYGDYYGIPTHGVPAMKSKIDPILEARQKYAYGTQRDYLDHPDVIGWTREGDGVHADSGLATLMSDGPGGSKWMEVGKNNAGEVWYDITGNQTNTVTINKDGWGQFHVSGGSVSIYVQQ

SEQ ID NO: 26155 - protein, 483 aa, Bacillus licheniformis
HHNQTNGTMMQYFEWYLPNDGNHWHRLRSDASNLKDKGITAVWIPPAWKGASQNDVGYGAYDLYDLGEFNQKGTVRTKYGTRNQLQAAVTALKSNGIQVYGDVVMNHKGGADATEWVRAVEVNPSNRNQEVSGDYTIEAWTKFDFPGRGNTHSNFKWRWYHFDGVDWDQSRQLQNKIYKFRGKEWDWEVDEENGNYDYLMYADIDMDHPEVVNELRNWGVWYTNTLGLDGFRIDAVKHIKYSFTRDWLEHVRNTTGKNMFAVAEFWKNDIGAIENYLSKTNWNHSVFDVPLHYNLYNASRSGGNYDMRQIFNGTVVQRHPTHAVTFVDNHDSQPEEALESFVEEWFKPLAYALTLTRDQGYPSVFYGDYYGIPTHGVPAMKSKIDPILEARQKYAYGTQRDYLDHPDVIGWTREGDGVHADSGLATLMSDGPGGSKWMEVGKNNAGEVWYDITGNQTNTVTINKDGWGQFHVSGGSVSIWVQQ

SEQ ID NO: 26156 - protein, 483 aa, Bacillus licheniformis
HHNGTNGTMMQYFEWYLPNDGNHWHRLRSDASNLKDKGITAVWIPPAWKGASQNDVGYGAYDLYDLGEFNQKGTVRTKYGTRNQLQAAVTALKSNGIQVYGDVVMNHKGGADATEWVRAVEVNPSNRNQEVSGDYTIEAWTKFDFPGRGNTHSNFKWRWWHFDGVDWDQSRQLQNKIYKFRGKEWDWEVDEENGNYDYLMYADYDMDHPEVVNELRNWGVWYTNTLGLDGFRIDAVKHIKYSFTRDWLTHVRNTTGKNMFAVAEFWKNDIGAIENYLSKTNWNHSVFDVPLHYNLYNASRSGGNYDMRQIFNGTVVQRHPTHAVTFVDNHDSQPEEALESFVEEWFKPLAYALTLTRDQGYPSVFYGDYYGIPTHGVPAMKSKIDPILEARQKYAYGTQRDYMDHPDVIGWTREGDGVHADSGLATLMSDGPGGSKWMEVGKNNAGEVWYDITGNQTNTVTINKDGWGQFHVSGGSVSIYVQQ

SEQ ID NO: 26157 - protein, 483 aa, Bacillus licheniformis
HHNQTNGTMMQYFEWYLPNDGNHWNRLRSDASNLKDKGITAVWIPPAWKGASQNDVGYGAYDLYDLGEFNQKGTVRTKYGTRNQLQAAVTALKSNGIQVYGDVVMNHKGGADATEWVRAVEVNPSNRNQEVSGDYTIEAWTKFDFPGRGNTHSNFKWRWYHFDGVDWDQSRQLQNKIYKFRGKEWDWEVDEENGNYDYLMYADYDMDHPEVVNELRNWGVWYTNTLGLDGFRIDAVKHIKYSFTRDWLEHVRNTTGKNMFAVAEFWKNDIGAIENYLSKTNWNHSVFDVPLHYNLYNASRSGGNYDMRQIFNGTVVQRHPTHAVTFVDNHDSQPEEALESFVEEWFKPLAYALTLTRDQGYPSVFYGDYYGIPTHGVPAMKSKIDPILEARQKYAYGTQRDYMDHPDVIGWTREGDGVHADSGLATLMSDGPGGSKWMEVGKNNAGEVWYDITGNQTNTVTINKDGWGQFHVSGGSVSIYVQQ

SEQ ID NO: 26158 - protein, 483 aa, Bacillus licheniformis
HHNGTNGTMMQYFEWYLPNDGNHWHRLRSDASNLKDKGITAVWIPPAWKGASQNDVGYGAYDLYDLGEFNQKGTVRTKYGTRNQLQAAVTALKSNGIQVYGDVVMNHKGGADATEWVRAVEVNPSNRNQEVSGDYTIEAWTKFDFPGRGNTHSNFKWRWYHFDGVDWDQSRQLQNKIYKFRGKEWDWEVDTENGNYDYLMYADYDMDHPEVVNELRNWGVWYTNTLGLDGFRIDAVKHIKYSFTRDWLTHVRNTTGKNMFAVAEFWKNDIGAIRNYLSKTNWNHSVFDVPLHYNLYNASRSGGNYDMRQIFNGTVVQRHPTHAVTFVDNHDSQPEEALESFVEEWFKPLAYALTLTRDQGYPSVFYGDYYGIPTHGVPAMKSKIDPILEARQKYAYGTQRDYLDHPDVIGWTREGDGVHADSGLATLMSDGPGGSKWMEVGKNNAGEVWYDITGNQTNTVTINKDGWGQFHVSGGSVSIYVQQ

SEQ ID NO: 26159 - protein, 483 aa, Bacillus licheniformis
HHNQTNGTMMQYFEWYLPNDGNHWNRLRSDASNLKDKGITAVWIPPAWKGASQNDVGYGAYDLYDLGEFNQKGTVRTKYGTRNQLQAAVTALKSNGIQVYGDVVMNHKGGADATEWVRAVEVNPSNRNQEVSGDYTIEAWTKFDFPGRGNTHSNFKWRWYHFDGVDWDQSRQLQNKIYKFRGKGWDWEVDTENGNYDYLMYADYDMDHPEVVNELRNWGVWYTNTLGLDGFRIDAVKHIKYSFTRDWLTHVRNTTGKNMFAVAEFWKNDIGAIRNYLSKTNWNHSVFDVPLHYNLYNASRSGGNYDMRQIFNGTVVQRHPTHAVTFVDNHDSQPEEALESFVEEWFKPLAYALTLTRDQGYPSVFYGDYYGIPTHGVPAMKSKIDPILEARQKYAYGTQRDYLDHPDVIGWTREGDGVHADSGLATLMSDGPGGSKWMEVGKNNAGEVWYDITGNQTNTVTINKDGWGQFHVSGGSVSIYVQQ

SEQ ID NO: 26160 - protein, 483 aa, Bacillus licheniformis
HHNGTNGTMMQYFEWYLPNDGNHWNRLRSDASNLKDKGITAVWIPPAWKGASQNDVGYGAYDLYDLGEFNQKGTVRTKYGTRNQLQAAVTALKSNGIQVYGDVVMNHKGGADATEWVRAVEVNPSNRNQEVSGDYTIEAWTKFDFPGRGNTHSNFKWRWDHFDGVDWDQSRQLQNRIYKFRGKEWDWEVDTENGNYDYLMYADIDMDHPEVVNELRNWGVWYTNTLGLDGFRIDAVKHIKYSFTRDWLTHVRNTTGKNMFAVAEFWKNDIGAIENYLSKTNWNHSVFDVPLHYNLYNASRSGGNYDMRQIFNKTVVQRHPTHAVTFVDNHDSQPEEALESFVEEWFKPLAYALTLTRDQGYPSVFYGDYYGIPTHGVPAMKSKIDPILEARQKYAYGTQRDYLDHPDVIGWTREGDGVHADSGLATLMSDGPGGSKWMEVGKNNAGERWYDITGNQTNTVTINKDGWGQFHVSGGSVSIYVQQ

SEQ ID NO: 26161 - protein, 483 aa, Bacillus licheniformis
HHNGTNGTMMQYFEWYLPNDGNHWHRLRSDASNLKDKGITAVWIPPAWKGASQNDVGYGAYDLYDLGEFNQKGTVRTKYGTRNQLQAAVTALKSNGIQVYGDVVMNHKGGADATEWVRAVEVNPSNRNQEVSGDYTIEAWTKFDFPGRGNTHSNFKWRWWHFDGVDWDQSRQLQNRIYKFRGKEWDWEVDTENGNYDYLMYADYDMDHPEVVNELRNWGVWYTNTLGLDGFRIDAVKHIKYSFTRDWLEHVRNTTGKNMFAVAEFWKNDIGAIENYLSKTNWNHSVFDVPLHYNLYNASRSGGNYDMRQIFNGTVVQRHPTHAVTFVDNHDSQPEEALESFVEEWFKPLAYALTLTRDQGYPSVFYGDYYGIPTHGVPAMKSKIDPILEARQKYAYGTQRDYLDHPDVIGWTREGDGVHADSGLATLMSDGPGGSKWMEVGKNNAGEVWYDITGNQTNTVTINKDGWGQFHVSGGSVSIYVQQ

SEQ ID NO: 26162 - protein, 483 aa, Bacillus licheniformis
HHNGTNGTMMQYFEWYLPNDGNHWHRLRSDASNLKDKGITAVWIPPAWKGASQNDVGYGAYDLYDLGEFNQKGTVRTKYGTRNQLQAAVTALKSNGIQVYGDVVMNHKGGADATEWVRAVEVNPSNRNQEVSGDDTIEAWTKFDFPGRGNTHSNFKWRWYHFDGVDWDQSRQLQNKIYKFRGKEWDWEVDTENGNYDYLMYADYDMDHPEVVNELRNWGVWYTNTLGLDGFRIDAVKHIKYSFTRDWLTHVRNTTGKNMFAVAEFWKNDIGAIENYLSKTNWNHSVFDVPLHYNLYNASRSGGNYDMRQIFNGTVVQRHPTHAVTFVDNHDSQPEEALESFVEEWFKPLAYALTLTRDQGYPSVFYGDYYGIPTHGVPAMKSKIDPILEARQKYAYGTQRDYLDHPDVIGWTREGDGVHADSGLATLMSDGPGGSKWMEVGKNNAGEVWYDITGNQTNTVTINKDGWGQFHVSGGSVSIYVQQ

SEQ ID NO: 26163 - protein, 483 aa, Bacillus licheniformis
HHNQTNGTMMQYFEWYLPNDGNHWHRLRSDASNLKDKGITAVWIPPAWKGASQNDVGYGAYDLYDLGEFNQKGTVRTKYGTRNQLQAAVTALKSNGIQVYGDVVMNHKGGADATEWVRAVEVNPSNRNQEVSGDYTIEAWTKFDFPGRGNTHSNFKWRWYHFDGVDWDQSRQLQNKIYKFRGKEWDWEVDTENGNYDYLMYADYDMDHPEVVNELRNWGVWYTNTLGLDGFRIDAVKHIKYSFTRDWLEHVRNTTGKNMFAVAEFWKNDIGAIENYLSKTNWNHSVFDVPLHYNLYNASRSGGNYDMRQIFNGTVVQRHPTHAVTFVDNHDSQPEEALESFVEEWFKPLAYALTLTRDQGYPSVFYGDYYGIPTHGVPAMKSKIDPILEARQKYAYGTQRDYMDHPDVIGWTREGDGVHADSGLATLMSDGPGGSKWMEVGKNNAGEVWYDITGNQTGTVTINKDGWGQFHVSGGSVSIYVQQ

SEQ ID NO: 26164 - protein, 483 aa, Bacillus licheniformis
HHNQTNGTMMQYFEWYLPNDGNHWNRLRSDASNLKDKGITAVWIPPAWKGASQNDVGYGAYDLYDLGEFNQKGTVRTKYGTRNQLQAAVTALKSNGIQVYGDVVMNHKGGADATEWVRAVEVNPSNRNQEVSGDYTIEAWTKFDFPGRGNTHSNFKWRWYHFDGVDWDQSRQLQNKIYKFRGKEWDWEVDTENGNYDYLMYADYDMDHPEVVNELRNWGVWYTNTLGLDGFRIDAVKHIKYSFTRDWLTHVRNTTGKNMFAVAEFWKNDIGAIRNYLSKTNWNHSVFDVPLHYNLYNASRSGGNYDMRQIFNGTVVQRHPTHAVTFVDNHDSQPEEALESFVEEWFKPLAYALTLTRDQGYPSVFYGDYYGIPTHGVPAMKSKIDPILEARQKYAYGTQRDYLDHPDVIGWTREGDGVHADSGLATLMSDGPGGSKWMEVGKNNAGEVWYDITGNQTNTVTINKDGWGQFHVSGGSVSIYVQQ

SEQ ID NO: 26165 - protein, 483 aa, Bacillus licheniformis
HHNGTNGTMMQYFEWYLPNDGNHWNRLRSDASNLKDKGITAVWIPPAWKGASQNDVGYGAYDLYDLGEFNQKGTVRTKYGTRNQLQAAVTALKSNGIQVYGDVVMNHKGGADATEWVRAVEVNPSNRNQEVSGDYTIEAWTKFDFPGRGNTHSNFKWRWWHFDGVDWDQSRQLQNKIYKFRGKGWDWEVDTENGNYDYLMYADYDMDHPEVVNELRNWGVWYTNTLGLDGFRIDAVKHIKYSFTRDWLTHVRNTTGKNMFAVAEFWKNDIGAIRNYLSKTNWNHSVFDVPLHYNLYNASRSGGNYDMRQIFNGTVVQRHPTHGVTFVDNHDSQPEEALESFVEEWFKPLAYALTLTRDQGYPSVFYGDYYGIPTHGVPAMKSKIDPILEARQKYAYGTQRDYLDHPDVIGWTREGDGVHADSGLATLMSDGPGGSKWMEVGKNNAGEVWYDITGNQTGTVTINKDGWGQFHVSGGSVSIYVQQ

SEQ ID NO: 26166 - protein, 483 aa, Bacillus licheniformis
HHNGTNGTMMQYFEWYLPNDGNHWNRLRSDASNLKDKGITAVWIPPAWKGASQNDVGYGAYDLYDLGEFNQKGTVRTKYGTRNQLQAAVTALKSNGIQVYGDVVMNHKGGADATEWVRAVEVNPSNRNQEVSGDYTIEAWTKFDFPGRGNTHSNFKWRWYHFDGVDWDQSRQLQNKIYKFRGKEWDWEVDTENGNYDYLMYADIDMDHPEVVNELRNWGVWYTNTLGLDGFRIDAVKHIKYSFTRDWLEHVRNTTGKNMFAVAEFWKNDIGAIRNYLSKTNWNHSVFDVPLHYNLYNASRSGGNYDMRQIFNGTVVQRHPTHAVTFVDNHDSQPEEALESFVEEWFKPLAYALTLTRDQGYPSVFYGDYYGIPTHGVPAMKSKIDPILEARQKYAYGTQRDYMDHPDVIGWTREGDGVHADSGLATLMSDGPGGSKWMEVGKNNAGEVWYDITGNQTNTVTINKDGWGQFHVSGGSVSIYVQQ

SEQ ID NO: 26167 - protein, 483 aa, Alicyclobacillus
HHNGTNGTMMQYFEWYLPNDGNHWNRLRDDAANLKSKGITAVWIPPAWKGTSQNDVGYGAYDLYDLGEFNQKGTVRTKYGTRNQLQAAVTSLKNNGIQVYGDVVMNHKGGADGTEIVNAVEVNRSNRNQETSGEYAIEAWTKFDFPGRGNNHSSFKWRWYHFDGTDWDQSRQLQNKIYKFRGKAWDWEVDTENGNYDYLMYADVDMDHPEVIHELRNWGVWYTNTLNLDGFRIDAVKHIKYSFTRDWLTHVRNTTGKPMFAVAEFWKNDLGAIENYLNKTSWNHSVFDVPLHYNLYNASNSGGYYDMRNILNGSVVQKHPTHAVTFVDNHDSQPGEALESFVQQWFKPLAYALVLTREQGYPSVFYGDYYGIPTHGVPAMKSKIDPLLQARQTFAYGTQHDYLDNQDVIGWTREGDSAHAGSGLATVMSDGPGGSKTMYVGTAHAGQVFKDITGNRTDTVTINSAGNGTFPCNGGSVSIWVKQ

SEQ ID NO: 26168 - protein, 483 aa, Bacillus licheniformis
HHNGTNGTMMQYFEWYLPNDGNHWHRLRSDASNLKDKGITAVWIPPAWKGASQNDVGYGAYDLYDLGEFNQKGTVRTKYGTRNQLQAAVTALKSNGIQVYGDVVMNHKGGADATEWVRAVEVNPSNRNQEVSGDYTIEAWTKFDFPGRGNTHSNFKWRWWHFDGVDWDQSRQLQNKIYKFRGKEWDWEVDEENGNYDYLMYADYDMDHPEVVNELRNWGVWYTNTLGLDGFRIDAVKHIKYSFTRDWLTHVRNTTGKNMFAVAEFWKNDIGAIENYLSKTNWNHSVFDVPLHYNLYNASRSGGNYDMRQIFNGTVVQRHPTHAVTFVDNHDSQPEEALESFVEEWFKPLAYALTLTRDQGYPSVFYGDYYGIPTHGVPAMKSKIDPILEARQKYAYGTQRDYLDHPDVIGWTREGDGVHADSGLATLMSDGPGGSKWMEVGKNNAGEVWYDITGNQTNTVTINKDGWGQFHVSGGSVSIYVQQ

SEQ ID NO: 26169 - protein, 483 aa, Bacillus licheniformis
HHNQTNGTMMQYFEWYLPNDGNHWHRLRSDASNLKDKGITAVWIPPAWKGASQNDVGYGAYDLYDLGEFNQKGTVRTKYGTRNQLQAAVTALKSNGIQVYGDVVMNHKGGADATEWVRAVEVNPSNRNQEVSGDYTIEAWTKFDFPGRGNTHSNFKWRWYHFDGVDWDQSRQLQNKIYKFRGKEWDWEVDTENGNYDYLMYADIDMDHPEVVNELRNWGVWYTNTLGLDGFRIDAVKHIKYSFTRDWLEHVRNTTGKNMFAVAEFWKNDIGAIENYLSKTNWNHSVFDVPLHYNLYNASRSGGNYDMRQIFNGTVVQRHPTHAVTFVDNHDSQPEEALESFVEEWFKPLAYALTLTRDQGYPSVFYGDYYGIPTHGVPAMKSKIDPILEARQKYAYGTQRDYMDHPDVIGWTREGDGVHADSGLATLMSDGPGGSKWMEVGKNNAGEVWYDITGNQTNTVTINKDGWGQFHVSGGSVSIWVQQ

SEQ ID NO: 26170 - protein, 483 aa, Bacillus licheniformis
HHNQTNGTMMQYFEWYLPNDGNHWHRLRSDASNLKDKGITAVWIPPAWKGASQNDVGYGAYDLYDLGEFNQKGTVRTKYGTRNQLQAAVTALKSNGIQVYGDVVMNHKGGADATEWVRAVEVNPSNRNQEVSGDYTIEAWTKFDFPGRGNTHSNFKWRWWHFDGVDWDQSRQLQNKIYKFRGKGWDWEVDTENGNYDYLMYADYDMDHPEVVNELRNWGVWYTNTLGLDGFRIDAVKHIKYSFTRDWLTHVRNTTGKNMFAVAEFWKNDIGAIENYLSKTNWNHSVFDVPLHYNLYNASRSGGNYDMRQIFNGTVVQRHPTHAVTFVDNHDSQPEEALESFVEEWFKPLAYALTLTRDQGYPSVFYGDYYGIPTHGVPAMKSKIDPILEARQKYAYGTQRDYLDHPDVIGWTREGDGVHADSGLATLMSDGPGGSKWMEVGKNNAGEVWYDITGNQTGTVTINKDGWGQFHVSGGSVSIYVQQ

SEQ ID NO: 26171 - protein, 483 aa, Bacillus licheniformis
HHNQTNGTMMQYFEWYLPNDGNHWNRLRSDASNLKDKGITAVWIPPAWKGASQNDVGYGAYDLYDLGEFNQKGTVRTKYGTRNQLQAAVTALKSNGIQVYGDVVMNHKGGADATEWVRAVEVNPSNRNQEVSGDYTIEAWTKFDFPGRGNTHSNFKWRWWHFDGVDWDQSRQLQNRIYKFRGKEWDWEVDTENGNYDYLMYADIDMDHPEVVNELRNWGVWYTNTLGLDGFRIDAVKHIKYSFTRDWLTHVRNTTGKNMFAVAEFWKNDIGAIRNYLSKTNWNHSVFDVPLHYNLYNASRSGGNYDMRQIFNGTVVQRHPTHAVTFVDNHDSQPEEALESFVEEWFKPLAYALTLTRDQGYPSVFYGDYYGIPTHGVPAMKSKIDPILEARQKYAYGTQRDYMDHPDVIGWTREGDGVHADSGLATLMSDGPGGSKWMEVGKNNAGEVWYDITGNQTNTVTINKDGWGQFHVSGGSVSIYVQQ

SEQ ID NO: 26172 - protein, 483 aa, Bacillus licheniformis
HHNGTNGTMMQYFEWYLPNDGNHWHRLRSDASNLKDKGITAVWIPPAWKGASQNDVGYGAYDLYDLGEFNQKGTVRTKYGTRNQLQAAVTALKSNGIQVYGDVVMNHKGGADATEWVRAVEVNPSNRNQEVSGDYTIEAWTKFDFPGRGNTHSNFKWRWYHFDGVDWDQSRQLQNKIYKFRGKEWDWEVDTENGNYDYLMYADYDMDHPEVVNELRNWGVWYTNTLGLDGFRIDAVKHIKYSFTRDWLTHVRNTTGKNMFAVAEFWKNDIGAIENYLSNTNWNHSVFDVPLHYNLYNASRSGGNYDMRQIFNGTVVQRHPTHAVTFVDNHDSQPEEALESFVEEWFKPLAYALTLTRDQGYPSVFYGDYYGIPTHGVPAMKSKIDPILEARQKYAYGTQRDYLDHPDVIGWTREGDGVHADSGLATLMSDGPGGSKWMEVGKNNAGEVWYDITGNQTNTVTINKDGWGQFHVSGGSVSIYVQQ

SEQ ID NO: 26173 - protein, 483 aa, Bacillus licheniformis
HHNQTNGTMMQYFEWYLPNDGNHWNRLRSDASNLKDKGITAVWIPPAWKGASQNDVGYGAYDLYDLGEFNQKGTVRTKYGTRNQLQAAVTALKSNGIQVYGDVVMNHKGGADATEWVRAVEVNPSNRNQEVSGDYTIEAWTKFDFPGRGNTHSNFKWRWWHFDGVDWDQSRQLQNKIYKFRGKEWDWEVDTENGNYDYLMYADIDMDHPEVVNELRNWGVWYTNTLGLDGFRIDAVKHIKYSFTRDWLTHVRNTTGKNMFAVAEFWKNDIGAIENYLSKTNWNHSVFDVPLHYNLYNASRSGGNYDMRQIFNGTVVQRHPTHAVTFVDNHDSQPEEALESFVEEWFKPLAYALTLTRDQGYPSVFYGDYYGIPTHGVPAMKSKIDPILEARQKYAYGTQRDYLDHPDVIGWTREGDGVHADSGLATLMSDGPGGSKWMEVGKNNAGEVWYDITGNQTNTVTINKDGWGQFHVSGGSVSIYVQQ

SEQ ID NO: 26174 - protein, 483 aa, Bacillus licheniformis
HHNQTNGTMMQYFEWYLPNDGNHWNRLRSDASNLKDKGITAVWIPPAWKGASQNDVGYGAYDLYDLGEFNQKGTVRTKYGTRNQLQAAVTALKSNGIQVYGDVVMNHKGGADATEWVRAVEVNPSNRNQEVSGDYTIEAWTKFDFPGRGNTHSNFKWRWWHFDGVDWDQSRQLQNRIYKFRGKEWDWEVDTENGNYDYLMYADIDMDHPEVVNELRNWGVWYTNTLGLDGFRIDAVKHIKYSFTRDWLEHVRNTTGKNMFAVAEFWKNDIGAIENYLSKTNWNHSVFDVPLHYNLYNASRSGGNYDMRQIFNGTVVQRHPTHAVTFVDNHDSQPEEALESFVEEWFKPLAYALTLTRDQGYPSVFYGDYYGIPTHGVPAMKSKIDPILEARQKYAYGTQRDYMDHPDVIGWTREGDGVHADSGLATLMSDGPGGSKWMEVGKNNAGEVWYDITGNQTNTVTINKDGWGQFHVSGGSVSIYVQQ

SEQ ID NO: 26175 - protein, 483 aa, Bacillus licheniformis
HHNGTNGTMMQYFEWYLPNDGNHWHRLRSDASNLKDKGITAVWIPPAWKGASQNDVGYGAYDLYDLGEFNQKGTVRTKYGTRNQLQAAVTALKSNGIQVYGDVVMNHKGGADATEWVRAVEVNPSNRNQEVSGDYTIEAWTKFDFPGRGNTHSNFKWRWYHFDGVDWDQSRQLQNKIYKFRGKEWDWEVDTENGNYDYLMYADYDMDHPEVVNELRNWGVWYTNTLGLDGFRIDAVKHIKYSFTRDWLTHVRNTTQKNMFAVAEFWKNDIGAIENYLSKTNWNHSVFDVPLHYNLYNASRSGGNYDMRQIFNGTVVQRHPTHAVTFVDNHDSQPEEALESFVEEWFKPLAYALTLTRDQGYPSVFYGDYYGIPTHGVPAMKSKIDPILEARQKYAYGTQRDYLDHPDVIGWTREGDGVHADSGLATLMSDGPGGSKWMEVGKNNAGEVWYDITGNQTNTVTINKDGWGQFHVSGGSVSIYVQQ

SEQ ID NO: 26176 - protein, 483 aa, Bacillus licheniformis
HHNQTNGTMMQYFEWYLPNDGNHWNRLRSDASNLKDKGITAVWIPPAWKGASQNDVGYGAYDLYDLGEFNQKGTVRTKYGTRNQLQAAVTALKSNGIQVYGDVVMNHKGGADATEWVRAVEVNPSNRNQEVSGDYTIEAWTKFDFPGRGNTHSNFKWRWYHFDGVDWDQSRQLQNKIYKFRGKGWDWEVDTENGNYDYLMYADYDMDHPEVVNELRNWGVWYTNTLGLDGFRIDAVKHIKYSFTRDWLEHVRNTTGKNMFAVAEFWKNDIGAIENYLSKTNWNHSVFDVPLHYNLYNASRSGGNYDMRQIFNGTVVQRHPTHAVTFVDNHDSQPEEALESFVEEWFKPLAYALTLTRDQGYPSVFYGDYYGIPTHGVPAMKSKIDPILEARQKYAYGTQRDYMDHPDVIGWTREGDGVHADSGLATLMSDGPGGSKWMEVGKNNAGEVWYDITGNQTNTVTINKDGWGQFHVSGGSVSIYVQQ

SEQ ID NO: 26177 - protein, 483 aa, Bacillus licheniformis
HHNGTNGTMMQYFEWYLPNDGNHWHRLRSDASNLKDKGITAVWIPPAWKGASQNDVGYGAYDLYDLGEFNQKGTVRTKYGTRNQLQAAVTALKSNGIQVYGDVVMNHKGGADATEWVRAVEVNPSNRNQEVSGDYTIEAWTKFDFPGRGNTHSNFKWRWYHFDGVDWDQSRQLQNKIYKFRGKEWDWEVDTENGNYDYLMYADYDMDHPEVVNELRNWGVWYTNTLGLDGFRIDAVKHIKYSFTRDWLEHVRNTTGKNMFAVAEFWKNDIGAIENYLSKTNWNHSVFDVPLHYNLYNASRSGGNYDMRQIFNGTVVQRHPTHAVTFVDNHDSQPEEALESFVEEWFKPLAYALTLTRDQGYPSVFYGDYYGIPTHGVPAMKSKIDPILEARQKYAYGTQRDYLDHPDVIGWTREGDGVHADSGLATLMSDGPGGSKWMEVGKNNAGEVWYDITGNQTNTVTINKDGWGQFHVSGGSVSIYVQQ

SEQ ID NO: 26178 - protein, 483 aa, Bacillus licheniformis
HHNQTNGTMMQYFEWYLPNDGNHWNRLRSDASNLKDKGITAVWIPPAWKGASQNDVGYGAYDLYDLGEFNQKGTVRTKYGTRNQLQAAVTALKSNGIQVYGDVVMNHKGGADATEWVRAVEVNPSNRNQEVSGDYTIEAWTKFDFPGRGNTHSNFKWRWYHFDGVDWDQSRQLQNKIYKFRGKEWDWEVDTENGNYDYLMYADYDMDHPEVVNELRNWGVWYTNTLGLDGFRIDAVKHIKYSFTRDWLTHVRNTTGKNMFAVAEFWKNDIGAIRNYLSKTNWNHSVFDVPLHYNLYNASRSGGNYDMRQIFNGTVVQRHPTHAVTFVDNHDSQPEEALESFVEEWFKPLAYALTLTRDQGYPSVFYGDYYGIPTHGVPAMKSKIDPILEARQKYAYGTQRDYMDHPDVIGWTREGDGVHADSGLATLMSDGPGGSKWMEVGKNNAGEVWYDITGNQTNTVTINKDGWGQFHVSGGSVSIYVQQ

SEQ ID NO: 26179 - protein, 483 aa, Bacillus licheniformis
HHNGTNGTMMQYFEWYLPNDGNHWHRLRSDASNLKDKGITAVWIPPAWKGASQNDVGYGAYDLYDLGEFNQKGTVRTKYGTRNQLQAAVTALKSNGIQVYGDVVMNHKGGADATEWVRAVEVNPSNRNQEVSGDETIEAWTKFDFPGRGNTHSNFKWRWYHFDGVDWDQSRQLQNKIYKFRGKEWDWEVDTENGNYDYLMYADYDMDHPEVVNELRNWGVWYTNTLGLDGFRIDAVKHIKYSFTRDWLTHVRNTTGKNMFAVAEFWKNDIGAIENYLSKTNWNHSVFDVPLHYNLYNASRSGGNYDMRQIFNGTVVQRHPTHAVTFVDNHDSQPEEALESFVEEWFKPLAYALTLTRDQGYPSVFYGDYYGIPTHGVPAMKSKIDPILEARQKYAYGTQRDYLDHPDVIGWTREGDGVHADSGLATLMSDGPGGSKWMEVGKNNAGEVWYDITGNQTNTVTINKDGWGQFHVSGGSVSIYVQQ

SEQ ID NO: 26180 - protein, 483 aa, Bacillus licheniformis
HHNGTNGTMMQYFEWYLPNDGNHWHRLRSDASNLKDKGITAVWIPPAWKGASQNDVGYGAYDLYDLGEFNQKGTVRTKYGTRNQLQAAVTALKSNGIQVYGDVVMNHKGGADATEWVRAVEVNPSNRNQEVSGDYTIEAWTKFDFPGRGNTHSNFKWRWWHFDGVDWDQSRQLQNRIYKFRGKEWDWEVDTENGNYDYLMYADYDMDHPEVVNELRNWGVWYTNTLGLDGFRIDAVKHIKYSFTRDWLTHVRNTTGKNMFAVAEFWKNDIGAIENYLSKTNWNHSVFDVPLHYNLYNASRSGGNYDMRQIFNGTVVQRHPTHGVTFVDNHDSQPEEALESFVEEWFKPLAYALTLTRDQGYPSVFYGDYYGIPTHGVPAMKSKIDPILEARQKYAYGTQRDYMDHPDVIGWTREGDGVHADSGLATLMSDGPGGSKWMEVGKNNAGEVWYDITGNQTNTVTINKDGWGQFHVSGGSVSIYVQQ

SEQ ID NO: 26181 - protein, 483 aa, Bacillus licheniformis
HHNQTNGTMMQYFEWYLPNDGNHWNRLRSDASNLKDKGITAVWIPPAWKGASQNDVGYGAYDLYDLGEFNQKGTVRTKYGTRNQLQAAVTALKSNGIQVYGDVVMNHKGGADATEWVRAVEVNPSNRNQEVSGDYTIEAWTKFDFPGRGNTHSNFKWRWYHFDGVDWDQSRQLQNKIYKFRGKEWDWEVDTENGNYDYLMYADIDMDHPEVVNELRNWGVWYTNTLGLDGFRIDAVKHIKYSFTRDWLTHVRNTTGKNMFAVAEFWKNDIGAIRNYLSKTNWNHSVFDVPLHYNLYNASRSGGNYDMRQIFNGTVVQRHPTHAVTFVDNHDSQPEEALESFVEEWFKPLAYALTLTRDQGYPSVFYGDYYGIPTHGVPAMKSKIDPILEARQKYAYGTQRDYMDHPDVIGWTREGDGVHADSGLATLMSDGPGGSKWMEVGKNNAGEVWYDITGNQTNTVTINKDGWGQFHVSGGSVSIYVQQ

SEQ ID NO: 26182 - protein, 483 aa, Bacillus licheniformis
HHNGLNGTMMQYFEWYLPNDGNHWNRLRSDASNLKDKGITAVWIPPAWKGASQNDVGYGAYDLYDLGEFNQKGTVRTKYGTRNQLQAAVTALKSNGIQVYGDVVMNHKGGADATEWVRAVEVNPSNRNQEVSGDYTIEAWTKFDFPGRGNTHSNFKWRWYHFDGVDWDQSRQLQNRIYKFRGKGWDWEVDTENGNYDYLMYADIDMDHPEVVNELKNWGVWYSNTLGLDGFRIDAVKHIKYSFTRDWLTHVRNTTGKNMFAVAEFWKNDIGAIENYLSKTNWNHSVFDVPLHYNLYNASRSGGNYDMRQIFNGTVVQRHPTHAVTFVDNHDSQPEEALESFVEEWFKPLAYALTLTRDQGYPSVFYGDYYGIPTHGVPAMKSKIDPILEARQKYAYGTQRDYLDHPDVIGWTREGDGVHADSGLATLMSDGPGGSKWMEVGKNNAGEVWYDITGNQTNTVTINKDGWGQFHVSGGSVSIYVQQ

SEQ ID NO: 26183 - protein, 483 aa, Bacillus licheniformis
HHNGTNGTMMQYFEWYLPNDGNHWHRLRSDASNLKDKGITAVWIPPAWKGASQNDVGYGAYDLYDLGEFNQKGTVRTKYGTRNQLQAAVTALKSNGIQVYGDVVMNHKGGADATEWVRAVEVNPSNRNQEVSGDYTIEAWTKFDFPGRGNTHSNFKWRWYHFDGVDWDQSRQLQNKIYKFRGKGWDWEVDTENGNYDYLMYADYDMDHPEVVNELRNWGVWYTNTLGLDGFRIDAVKHIKYSFTRDWLEHVRNTTGKNMFAVAEFWKNDIGAIENYLSKTNWNHSVFDVPLHYNLYNASRSGGNYDMRQIFNGTVVQRHPTHAVTFVDNHDSQPEEALESFVEEWFKPLAYALTLTRDQGYPSVFYGDYYGIPTHGVPAMKSKIDPILEARQKYAYGTQRDYMDHPDVIGWTREGDGVHADSGLATLMSDGPGGSKWMEVGKNNAGEVWYDITGNQTNTVTINKDGWGQFHVSGGSVSIYVQQ

SEQ ID NO: 26184 - protein, 483 aa, Bacillus licheniformis
HHNGTNGTMMQYFEWYLPNDGNHWNRLRSDASNLKDKGITAVWIPPAWKGASQNDVGYGAYDLYDLGEFNQKGTVRTKYGTRNQLQAAVTALKSNGIQVYGDVVMNHKGGADATEWVRAVEVNPSNRNQEVSGDYTIEAWTKFDFPGRGNTHSNFKWRWWHFDGVDWDQSRQLQNKIYKFRGKEWDWEVDTENGNYDYLMYADIDMDHPEVVNELRNWGVWYTNTLGLDGFRIDAVKHIKYSFTRDWLTHVRNTTGKNMFAVAEFWKNDIGAIRNYLSKTNWNHSVFDVPLHYNLYNASRSGGNYDMRQIFNGTVVQRHPTHAVTFVDNHDSQPEEALESFVEEWFKPLAYALTLTRDQGYPSVFYGDYYGIPTHGVPAMKSKIDPILEARQKYAYGTQRDYMDHPDVIGWTREGDGVHADSGLATLMSDGPGGSKWMEVGKNNAGEVWYDITGNQTNTVTINKDGWGQFHVSGGSVSIYVQQ

SEQ ID NO: 26185 - protein, 483 aa, Bacillus licheniformis
HHNGTNGTMMQYFEWYLPNDGNHWNRLRSDASNLKDKGITAVWIPPAWKGASQNDVGYGAYDLYDLGEFNQKGTVRTKYGTRNQLQAAVTALKSNGIQVYGDVVMNHKGGADATEWVRAVEVNPSNRNQEVSGDYTIEAWTKFDFPGRGNTHSNFKWRWYHFDGVDWDQSRQLQNRIYKFRGKEWDWEVDTENGNYDYLMYADIDMDHPEVVNELRNWGVWYTDTLGLDGFRIDAVKHIKYSFTRDWLTHVRNTTGKNMFAVAEFWKNDIGAIENYLSKTNWNHSVFDVPLHYNLYNASRSGGNYDMRQIFEGTVVQRHPTHAVTFVDNHDSQPEEALESFVEEWFKPLAYALTLTRDQGYPSVFYGDYYGIPTHGVPAMKSKIDPILEARQKYAYGTQRDYLDHPDVIGWTREGDGVHADSGLATLMSDGPGGSKWMEVGKNNAGEVWYDITGNQTNEVTINKDGWGEFHVSGGSVSIYVQQ

SEQ ID NO: 26186 - protein, 483 aa, Bacillus licheniformis
HHNQTNGTMMQYFEWYLPNDGNHWNRLRSDASNLKDKGITAVWIPPAWKGASQNDVGYGAYDLYDLGEFNQKGTVRTKYGTRNQLQAAVTALKSNGIQVYGDVVMNHKGGADATEWVDAVEVNPSNRNQEVSGDYTIEAWTKFDFPGRGNTHSNFKWRWYHFDGVDWDQSRQLQNKIYKFRGKEWDWEVDEENGNYDYLMYADYDMDHPEVVNELRNWGVWYTNTLGLDGFRIDAVKHIKYSFTRDWLEHVRNTTGKNMFAVAEFWKNDIGAIENYLSKTNWNHSVFDVPLHYNLYNASRSGGNYDMRQIFNGTVVQRHPTHAVTFVDNHDSQPEEALESFVEEWFKPLAYALTLTRDQGYPSVFYGDYYGIPTHGVPAMKSKIDPILEARQKYAYGTQRDYMDHPDVIGWTREGDGVHADSGLATLMSDGPGGSKWMEVGKNNAGEVWYDITGNQTNTVTINKDGWGQFHVSGGSVSIYVQQ

SEQ ID NO: 26187 - protein, 483 aa, Bacillus licheniformis
HHNGTNGTMMQYFEWYLPNDGNHWHRLRSDASNLKDKGITAVWIPPAWKGASQNDVGYGAYDLYDLGEFNQKGTVRTKYGTRNQLQAAVTALKSNGIQVYGDVVMNHKGGADATEWVRAVEVNPSNRNQEVSGDYTIEAWTKFDFPGRGNTHSNFKWRWYHFDGVDWDQSRQLQNKIYKFRGKGWDWEVDTENGNYDYLMYADYDMDHPEVVNELRNWGVWYTNTLGLDGFRIDAVKHIKYSFTRDWLTHVRNTTGKNMFAVAEFWKNDIGAIRNYLSKTNWNHSVFDVPLHYNLYNASRSGGNYDMRQIFNGTVVQRHPTHAVTFVDNHDSQPEEALESFVEEWFKPLAYALTLTRDQGYPSVFYGDYYGIPTHGVPAMKSKIDPILEARQKYAYGTQRDYLDHPDVIGWTREGDGVHADSGLATLMSDGPGGSKWMEVGKNNAGEVWYDITGNQTNTVTINKDGWGQFHVSGGSVSIYVQQ

SEQ ID NO: 26188 - protein, 483 aa, Bacillus licheniformis
HHNGTNGTMMQYFEWYLPNDGNHWHRLRSDASNLKDKGITAVWIPPAWKGASQNDVGYGAYDLYDLGEFNQKGTVRTKYGTRNQLQAAVTALKSNGIQVYGDVVMNHKGGADATEWVRAVEVNPSNRNQEVSGDYTIEAWTKFDFPGRGNTHSNFKWRWYHFDGVDWDQSRQLQNKIYKFQGKEWDWEVDEENGNYDYLMYADYDMDHPEVVNELRNWGVWYTNTLGLDGFRIDAVKHIKYSFTRDWLTHVRNTTGKNMFAVAEFWKNDIGAIENYLSKTNWNHSVFDVPLHYNLYNASRSGGNYDMRQIFNGTVVQRHPTHAVTFVDNHDSQPEEALESFVEEWFKPLAYALTLTRDQGYPSVFYGDYYGIPTHGVPAMKSKIDPILEARQKYAYGTQRDYLDHPDVIGWTREGDGVHADSGLATLMSDGPGGSKWMEVGKNNAGEVWYDITGNQTNTVTINKDGWGQFHVSGGSVSIYVQQ

SEQ ID NO: 26189 - protein, 483 aa, Bacillus licheniformis
HHNQTNGTMMQYFEWYLPNDGNHWHRLRSDASNLKDKGITAVWIPPAWKGASQNDVGYGAYDLYDLGEFNQKGTVRTKYGTRNQLQAAVTALKSNGIQVYGDVVMNHKGGADATEWVRAVEVNPSNRNQEVSGDYTIEAWTKFDFPGRGNTHSNFKWRWYHFDGVDWDQSRQLQNKIYKFRGKEWDWEVDTENGNYDYLMYADYDMDHPEVVNELRNWGVWYTNTLGLDGFRIDAVKHIKYSFTRDWLEHVRNTTGKNMFAVAEFWKNDIGAIENYLSKTNWNHSVFDVPLHYNLYNASRSGGNYDMRQIFNGTVVQRHPTHAVTFVDNHDSQPEEALESFVEEWFKPLAYALTLTRDQGYPSVFYGDYYGIPTHGVPAMKSKIDPILEARQKYAYGTQRDYLDHPDVIGWTREGDGVHADSGLATLMSDGPGGSKWMEVGKNNAGEVWYDITGNQTGTVTINKDGWGQFHVSGGSVSIYVQQ

SEQ ID NO: 26190 - protein, 483 aa, Bacillus licheniformis
HHNGTNGTMMQYFEWYLPNDGNHWHRLRSDASNLKDKGITAVWIPPAWKGASQNDVGYGAYDLYDLGEFNQKGTVRTKYGTRNQLQAAVTALKSNGIQVWGDVVMNHKGGADATEWVRAVEVNPSNRNQEVSGDYTIEAWTKFDFPGRGNTHSNFKWRWYHFDGVDWDQSRQLQNKIYKFRGKEWDWEVDTENGNYDYLMYADYDMDHPEVVNELRNWGVWYTNTLGLDGFRIDAVKHIKYSFTRDWLTHVRNTTGKNMFAVAEFWKNDIGAIENYLSKTNWNHSVFDVPLHYNLYNASRSGGNYDMRQIFNGTVVQRHPTHAVTFVDNHDSQPEEALESFVEEWFKPLAYALTLTRDQGYPSVFYGDYYGIPTHGVPAMKSKIDPILEARQKYAYGTQRDYLDHPDVIGWTREGDGVHADSGLATLMSDGPGGSKWMEVGKNNAGEVWYDITGNQTNTVTINKDGWGQFHVSGGSVSIYVQQ

SEQ ID NO: 26191 - protein, 483 aa, Bacillus licheniformis
HHNGTNGTMMQYFEWYLPNDGNHWHRLRSDASNLKDKGITAVWIPPAWKGASQNDVGYGAYDLYDLGEFNQKGTVRTKYGTRNQLQAAVTALKSNGIQVYGDVVMNHKGGADATEWVRAVEVNPSNRNQEVSGDYTIEAWTKFDFPGRGNTHSNFKWRWWHFDGVDWDQSRQLQNKIYKFRGKEWDWEVDTENGNYDYLMYADIDMDHPEVVNELRNWGVWYTNTLGLDGFRIDAVKHIKYSFTRDWLTHVRNTTGKNMFAVAEFWKNDIGAIENYLSKTNWNHSVFDVPLHYNLYNASRSGGNYDMRQIFNGTVVQRHPTHAVTFVDNHDSQPEEALESFVEEWFKPLAYALTLTRDQGYPSVFYGDYYGIPTHGVPAMKSKIDPILEARQKYAYGTQRDYMDHPDVIGWTREGDGVHADSGLATLMSDGPGGSKWMEVGKNNAGEVWYDITGNQTNTVTINKDGWGQFHVSGGSVSIYVQQ

SEQ ID NO: 26192 - protein, 483 aa, Bacillus licheniformis
HHNGTNGTMMQYFEWYLPNDGNHWNRLRSDASNLKDKGITAVWIPPAWKGASQNDVGYGAYDLYDLGEFNQKGTVRTKYGTRNQLQAAVTALKSNGIQVYGDVVMNHKGGADATEWVRAVEVNPSNRNQEVSGDYTIEAWTKFDFPGRGNTHSNFKWRWWHFDGVDWDQSRQLQNKIYKFRGKEWDWEVDEENGNYDYLMYADYDMDHPEVVNELRNWGVWYTNTLGLDGFRIDAVKHIKYSFTRDWLEHVRNTTGKNMFAVAEFWKNDIGAIENYLSKTNWNHSVFDVPLHYNLYNASRSGGNYDMRQIFNGTVVQRHPTHAVTFVDNHDSQPEEALESFVEEWFKPLAYALTLTRDQGYPSVFYGDYYGIPTHGVPAMKSKIDPILEARQKYAYGTQRDYLDHPDVIGWTREGDGVHADSGLATLMSDGPGGSKWMEVGKNNAGEVWYDITGNQTNTVTINKDGWGQFHVSGGSVSIYVQQ

SEQ ID NO: 26193 - protein, 483 aa, Bacillus licheniformis
HHNQTNGTMMQYFEWYLPNDGNHWHRLRSDASNLKDKGITAVWIPPAWKGASQNDVGYGAYDLYDLGEFNQKGTVRTKYGTRNQLQAAVTALKSNGIQVYGDVVMNHKGGADATEWVRAVEVNPSNRNQEVSGDYTIEAWTKFDFPGRGNTHSNFKWRWYHFDGVDWDQSRQLQNKIYKFRGKGWDWEVDTENGNYDYLMYADYDMDHPEVVNELRNWGVWYTNTLGLDGFRIDAVKHIKYSFTRDWLTHVRNTTGKNMFAVAEFWKNDIGAIENYLSKTNWNHSVFDVPLHYNLYNASRSGGNYDMRQIFNGTVVQRHPTHAVTFVDNHDSQPEEALESFVEEWFKPLAYALTLTRDQGYPSVFYGDYYGIPTHGVPAMKSKIDPILEARQKYAYGTQRDYLDHPDVIGWTREGDGVHADSGLATLMSDGPGGSKWMEVGKNNAGEVWYDITGNQTNTVTINKDGWGQFHVSGGSVSIYVQQ

SEQ ID NO: 26194 - protein, 483 aa, Bacillus licheniformis
HHNGTNGTMMQYFEWYLPNDGNHWNRLRSDASNLKDKGITAVWIPPAWKGASQNDVGYGAYDLYDLGEFNQKGTVRTKYGTRNQLQDAVTALKSNGIQVYGDVVMNHKGGADATEWVRAVEVNPSNRNQEVSGDYTIEAWTKFDFPGRGNTHSNFKWRWYHFDGVDWDQSRQLQNRIYKFRGKEWDWEVDTENGNYDYLMYADIDMDHPEVVNELRNWGVWYTDTLGLDGFRIDAVKHIKYSFTRDWLTHVRNTTGKNMFAVAEFWKNDIGAIENYLSKTNWNHSVFDVPLHYNLYNASRSGGNYDMRQIFEGTVVQRHPTHAVTFVDNHDSQPEEALESFVEEWFKPLAYALTLTRDQGYPSVFYGDYYGIPTHGVPAMKSKIDPILEARQKYAYGTQRDYLDHPDVIGWTREGDGEHADSGLATLMSDGPGGSKWMEVGKNNAGEVWYDITGNQTNEVTINKDGWGQFHVSGGSVSIYVQQ

SEQ ID NO: 26195 - protein, 483 aa, Bacillus licheniformis
HHNGTNGTMMQYFEWYLPNDGNHWHRLRSDASNLKDKGITAVWIPPAWKGASQNDVGYGAYDLYDLGEFNQKGTVRTKYGTRNQLQAAVTALKSNGIQVYGDVVMNHKGGADATEWVRAVEVNPSNRNQEVSGDYTIEAWTKFDFPGRGNTHSNFKWRWYHFDGVDWDQSRQLQNKIYKFRGKEWDWEVDEENGNYDYLMYADYDMDHPEVVNELRNWGVWYTNTLGLDGFRIDAVKHIKYSFTRDWLTHVRNTTGKNMFAVAEFWKNDIGAIENYLSKTNWNHSVFDVPLHYNLYNASRSGGNYDMRQIFNGTVVQRHPTHAVTFVDNHDSQPEEALESFVEEWFKPLAYALTLTRDQGEPSVFYGDYYGIPTHGVPAMKSKIDPILEARQKYAYGTQRDYLDHPDVIGWTREGDGVHADSGLATLMSDGPGGSKWMEVGKNNAGEVWYDITGNQTNTVTINKDGWGQFHVSGGSVSIYVQQ

SEQ ID NO: 26196 - protein, 483 aa, Bacillus licheniformis
HHNGTNGTMMQYFEWYLPNDGNHWHRLRSDASNLKDKGITAVWIPPAWKGASQNDVGYGAYDLYDLGEFNQKGTVRTKYGTRNQLQAAVTALKSNGIQVYGDVVMNHKGGADATEWVRAVEVNPSNRNQEVSGDYTIEAWTKFDFPGRGNTHSNFKWRWYHFDGVDWDQSRQLQNRIYKFRGKEWDWEVDEENGNYDYLMYADYDMDHPEVVNELRNWGVWYTNTLGLDGFRIDAVKHIKYSFTRDWLEHVRNTTGKNMFAVAEFWKNDIGAIRNYLSKTNWNHSVFDVPLHYNLYNASRSGGNYDMRQIFNGTVVQRHPTHAVTFVDNHDSQPEEALESFVEEWFKPLAYALTLTRDQGYPSVFYGDYYGIPTHGVPAMKSKIDPILEARQKYAYGTQRDYMDHPDVIGWTREGDGVHADSGLATLMSDGPGGSKWMEVGKNNAGEVWYDITGNQTNTVTINKDGWGQFHVSGGSVSIYVQQ

SEQ ID NO: 26197 - protein, 483 aa, Bacillus licheniformis
HHNQTNGTMMQYFEWYLPNDGNHWHRLRSDASNLKDKGITAVWIPPAWKGASQNDVGYGAYDLYDLGEFNQKGTVRTKYGTRNQLQAAVTALKSNGIQVYGDVVMNHKGGADATEWVRAVEVNPSNRNQEVSGDYTIEAWTKFDFPGRGNTHSNFKWRWYHFDGVDWDQSRQLQNRIYKFRGKEWDWEVDTENGNYDYLMYADYDMDHPEVVNELRNWGVWYTNTLGLDGFRIDAVKHIKYSFTRDWLEHVRNTTGKNMFAVAEFWKNDIGAIENYLSKTNWNHSVFDVPLHYNLYNASRSGGNYDMRQIFNGTVVQRHPTHAVTFVDNHDSQPEEALESFVEEWFKPLAYALTLTRDQGYPSVFYGDYYGIPTHGVPAMKSKIDPILEARQKYAYGTQRDYMDHPDVIGWTREGDGVHADSGLATLMSDGPGGSKWMEVGKNNAGEVWYDITGNQTNTVTINKDGWGQFHVSGGSVSIYVQQ

SEQ ID NO: 26198 - protein, 483 aa, Bacillus licheniformis
HHNQTNGTMMQYFEWYLPNDGNHWHRLRSDASNLKDKGITAVWIPPAWKGASQNDVGYGAYDLYDLGEFNQKGTVRTKYGTRNQLQAAVTALKSNGIQVYGDVVMNHKGGADATEWVRAVEVNPSNRNQEVSGDYTIEAWTKFDFPGRGNTHSNFKWRWYHFDGVDWDQSRQLQNKIYKFRGKGWDWEVDTENGNYDYLMYADYDMDHPEVVNELRNWGVWYTNTLGLDGFRIDAVKHIKYSFTRDWLEHVRNTTGKNMFAVAEFWKNDIGAIENYLSKTNWNHSVFDVPLHYNLYNASRSGGNYDMRQIFNGTVVQRHPTHAVTFVDNHDSQPEEALESFVEEWFKPLAYALTLTRDQGYPSVFYGDYYGIPTHGVPAMKSKIDPILEARQKYAYGTQRDYLDHPDVIGWTREGDGVHADSGLATLMSDGPGGSKWMEVGKNNAGEVWYDITGNQTGTVTINKDGWGQFHVSGGSVSIYVQQ

SEQ ID NO: 26199 - protein, 483 aa, Bacillus licheniformis
HHNQTNGTMMQYFEWYLPNDGNHWNRLRSDASNLKDKGITAVWIPPAWKGASQNDVGYGAYDLYDLGEFNQKGTVRTKYGTRNQLQAAVTALKSNGIQVYGDVVMNHKGGADATEWVRAVEVNPSNRNQEVSGDYTIEAWTKFDFPGRGNTHSNFKWRWWHFDGVDWDQSRQLQNKIYKFRGKGWDWEVDTENGNYDYLMYADYDMDHPEVVNELRNWGVWYTNTLGLDGFRIDAVKHIKYSFTRDWLTHVRNTTGKNMFAVAEFWKNDIGAIENYLSKTNWNHSVFDVPLHYNLYNASRSGGNYDMRQIFNGTVVQRHPTHAVTFVDNHDSQPEEALESFVEEWFKPLAYALTLTRDQGYPSVFYGDYYGIPTHGVPAMKSKIDPILEARQKYAYGTQRDYLDHPDVIGWTREGDGVHADSGLATLMSDGPGGSKWMEVGKNNAGEVWYDITGNQTNTVTINKDGWGQFHVSGGSVSIYVQQ

SEQ ID NO: 26200 - protein, 483 aa, Bacillus licheniformis
HHNQTNGTMMQYFEWYLPNDGNHWNRLRSDASNLKDMGITAVWIPPAWKGASQNDVGYGAYDLYDLGEFNQKGTVRTKYGTRNQLQAAVTALKSNGIQVYGDVVMNHKGGADATEWVRAVEVNPSNRNQEVSGDYTIEAWTKFDFPGRGNTHSNFKWRWYHFDGVDWDQSRQLQNKIYKFRGKEWDWEVDEENGNYDYLMYADYDMDHPEVVNELRNWGVWYTNTLGLDGFRIDAVKHIKYSFTRDWLEHVRNTTGKNMFAVAEFWKNDIGAIENYLSKTNWNHSVFDVPLHYNLYNASRSGGNYDMRQIFNGTVVQRHPTHAVTFVDNHDSQPEEALESFVEEWFKPLAYALTLTRDQGYPSVFYGDYYGIPTHGVPAMKSKIDPILEARQKYAYGTQRDYMDHPDVIGWTREGDGVHADSGLATLMSDGPGGSKWMEVGKNNAGEVWYDITGNQTNTVTINKDGWGQFHVSGGSVSIYVQQ

SEQ ID NO: 26201 - protein, 483 aa, Bacillus licheniformis
HHNQTNGTMMQYFEWYLPNDGNHWNRLRSDASNLKDKGITAVWIPPAWKGASQNDVGYGAYDLYDLGEFNQKGTVRTKYGTRNQLQAAVTALKSNGIQVYGDVVMNHKGGADATEWVRAVEVNPSNRNQEVSGDYTIEAWTKFDFPGRGNTHSNFKWRWYHFDGVDWDQSRQLQNRIYKFRGKEWDWEVDTENGNYDYLMYADYDMDHPEVVNELRNWGVWYTNTLGLDGFRIDAVKHIKYSFTRDWLEHVRNTTGKNMFAVAEFWKNDIGAIRNYLSKTNWNHSVFDVPLHYNLYNASRSGGNYDMRQIFNGTVVQRHPTHAVTFVDNHDSQPEEALESFVEEWFKPLAYALTLTRDQGYPSVFYGDYYGIPTHGVPAMKSKIDPILEARQKYAYGTQRDYLDHPDVIGWTREGDGVHADSGLATLMSDGPGGSKWMEVGKNNAGEVWYDITGNQTNTVTINKDGWGQFHVSGGSVSIYVQQ

SEQ ID NO: 26202 - protein, 483 aa, Bacillus licheniformis
HHNGTNGTMMQYFEWYLPNDGNHWNRLRSDASNLKDKGITAVWIPPAWKGASQNDVGYGAYDLYDLGEFNQKGTVRTKYGTRNQLQAAVTALKSNGIQVYGDVVMNHKGGADATEWVRAVEVNPSNRNQEVSGDYTIEAWTKFDFPGRGNTHSNFKWRWDHFDGVDWDQSRQLQNRIYKFRGKEWDWEVDTENGNYDYLMYADIDMDHPEVVNELRNWGVWYTDTLGLDGFRIDAVKHIKYSFTRDWLTHVRNTTGKNMFAVAEFWKNDIGAIENYLSKTNWNHSVFDVPLHYNLYNASRSGGNYDMRQIFKGTVVQRHPTHAVTFVDNHDSQPEEALESFVEEWFKPLAYALTLTRDQGYPSVFYGDYYGIPTHGVPAMKSKIDPILEARQKYAYGTQRDYLDHPDVIGWTREGDGEHADSGLATLMSDGPGGSKWMEVGKNNAGEVWYDITGNQTNTVTINKDGWGQFHVSGGSVSIYVQQ

SEQ ID NO: 26203 - protein, 483 aa, Bacillus licheniformis
HHNGTNGTMMQYFEWYLPNDGNHWHRLRSDASNLKDKGITAVWIPPAWKGASQNDVGYGAYDLYDLGEFNQKGTVRTKYGTRNQLQAAVTALKSNGIQVYGDVVMNHKGGADATEWVRAVEVNPSNRNQEVSGDYTIEAWTKFDFPGRGNTHSNFKWRWYHFDGVDWDQSRQLQNKIYKFRGKEWDWEVDTENGNYDYLMYADYDMDHPEVVNELRNWGVWYTNTLGLDGFRIDAVKHIKYSFTRDWLTHVRNTTGKNMFAVAEFWKNDIGAIENYLSKTNWNHSVFDVPLHYNLYNASRSGGNYDMRQIFNGTVVQRHPTHAVTFVDNHDSQPEEALESFVEEWFKPLAYALTLTRDQGNPSVFYGDYYGIPTHGVPAMKSKIDPILEARQKYAYGTQRDYLDHPDVIGWTREGDGVHADSGLATLMSDGPGGSKWMEVGKNNAGEVWYDITGNQTNTVTINKDGWGQFHVSGGSVSIYVQQ

SEQ ID NO: 26204 - protein, 483 aa, Bacillus licheniformis
HHNQTNGTMMQYFEWYLPNDGNHWNRLRSDASNLKDKGITAVWIPPAWKGASQNDVGYGAYDLYDLGEFNQKGTVRTKYGTRNQLQAAVTALKSNGIQVYGDVVMNHKGGADATEWVRAVEVNPSNRNQEVSGDYTIEAWTKFDFPGRGNTHSNFKWRWYHFDGVDWDQSRQLQNKIYKFRGKEWDWEVDTENGNYDYLMYADIDMDHPEVVNELRNWGVWYTNTLGLDGFRIDAVKHIKYSFTRDWLTHVRNTTGKNMFAVAEFWKNDIGAIENYLSKTNWNHSVFDVPLHYNLYNASRSGGNYDMRQIFNGTVVQRHPTHGVTFVDNHDSQPEEALESFVEEWFKPLAYALTLTRDQGYPSVFYGDYYGIPTHGVPAMKSKIDPILEARQKYAYGTQRDYMDHPDVIGWTREGDGVHADSGLATLMSDGPGGSKWMEVGKNNAGEVWYDITGNQTNTVTINKDGWGQFHVSGGSVSIYVQQ

SEQ ID NO: 26205 - protein, 483 aa, Bacillus licheniformis
HHNGTNGTMMQYFEWYLPNDGNHWHRLRSDASNLKDKGITAVWIPPAWKGASQNDVGYGAYDLYDLGEFNQKGTVRTKYGTRNQLQAAVTALKSNGIQVYGDVVMNHKGGADATEWVRAVEVNPSNRNQEVSGDYTIEAWTKFDFPGRGNTHSNFKWRWYHFDGVDWDQSRQLQNKIYKFRGKGWDWEVDTENGNYDYLMYADYDMDHPEVVNELRNWGVWYTNTLGLDGFRIDAVKHIKYSFTRDWLEHVRNTTGKNMFAVAEFWKNDIGAIENYLSKTNWNHSVFDVPLHYNLYNASRSGGNYDMRQIFNGTVVQRHPTHAVTFVDNHDSQPEEALESFVEEWFKPLAYALTLTRDQGYPSVFYGDYYGIPTHGVPAMKSKIDPILEARQKYAYGTQRDYLDHPDVIGWTREGDGVHADSGLATLMSDGPGGSKWMEVGKNNAGEVWYDITGNQTNTVTINKDGWGQFHVSGGSVSIYVQQ

SEQ ID NO: 26206 - protein, 483 aa, Bacillus licheniformis
HHNGTNWTMMQYFEWYLPNDGNHWHRLRSDASNLKDKGITAVWIPPAWKGASQNDVGYGAYDLYDLGEFNQKGTVRTKYGTRNQLQAAVTALKSNGIQVYGDVVMNHKGGADATEWVRAVEVNPSNRNQEVSGDYTIEAWTKFDFPGRGNTHSNFKWRWYHFDGVDWDQSRQLQNKIYKFRGKEWDWEVDTENGNYDYLMYADYDMDHPEVVNELRNWGVWYTNTLGLDGFRIDAVKHIKYSFTRDWLTHVRNTTGKNMFAVAEFWKNDIGAIENYLSKTNWNHSVFDVPLHYNLYNASRSGGNYDMRQIFNGTVVQRHPTHAVTFVDNHDSQPEEALESFVEEWFKPLAYALTLTRDQGYPSVFYGDYYGIPTHGVPAMKSKIDPILEARQKYAYGTQRDYLDHPDVIGWTREGDGVHADSGLATLMSDGPGGSKWMEVGKNNAGEVWYDITGNQTNTVTINKDGWGQFHVSGGSVSIYVQQ

SEQ ID NO: 26207 - protein, 483 aa, Bacillus licheniformis
HHNGTNGTMMQYFEWYLPNDGNHWHRLRSDASNLKDKGITAVWIPPAWKGASQNDVGYGAYDLYDLGEFNQKGTVRTKYGTRNQLQAAVTALKSNGIQVYGDVVMNHKGGADATEWVRAVEVNPSNRNQEVSGDYTIEAWTKFDFPGRGNTHSNFKWRWYHFDGVDWDQSRQLQNKIYKFRGKEWDWEVDEENGNYDYLMYADYDMDHPEVVNELRNWGVWYTNTLGLDGFRIDAVKHIKYSFTRDWLTHVRNTTQKNMFAVAEFWKNDIGAIENYLSKTNWNHSVFDVPLHYNLYNASRSGGNYDMRQIFNGTVVQRHPTHAVTFVDNHDSQPEEALESFVEEWFKPLAYALTLTRDQGYPSVFYGDYYGIPTHGVPAMKSKIDPILEARQKYAYGTQRDYLDHPDVIGWTREGDGVHADSGLATLMSDGPGGSKWMEVGKNNAGEVWYDITGNQTNTVTINKDGWGQFHVSGGSVSIYVQQ

SEQ ID NO: 26208 - protein, 483 aa, Bacillus licheniformis
HHNGTNGTMMQYFEWYLPNDGNHWHRLRSDASNLKDKGITAVWIPPAWKGASQNDVGYGAYDLYDLGEFNQKGTVRTKYGTRNQLQAAVTALKSNGIQVYGDVVMNHKGGADATEWVRAVEVNPSNRNQEVSGDYEIEAWTKFDFPGRGNTHSNFKWRWYHFDGVDWDQSRQLQNKIYKFRGKEWDWEVDTENGNYDYLMYADYDMDHPEVVNELRNWGVWYTNTLGLDGFRIDAVKHIKYSFTRDWLTHVRNTTGKNMFAVAEFWKNDIGAIENYLSKTNWNHSVFDVPLHYNLYNASRSGGNYDMRQIFNGTVVQRHPTHAVTFVDNHDSQPEEALESFVEEWFKPLAYALTLTRDQGYPSVFYGDYYGIPTHGVPAMKSKIDPILEARQKYAYGTQRDYLDHPDVIGWTREGDGVHADSGLATLMSDGPGGSKWMEVGKNNAGEVWYDITGNQTNTVTINKDGWGQFHVSGGSVSIYVQQ

SEQ ID NO: 26209 - protein, 483 aa, Bacillus licheniformis
HHNGTNGTMMQYFEWYLPNDGNHWNRLRSDASNLKDKGITAVWIPPAWKGASQNDVGYGAYDLYDLGEFNQKGTVRTKYGTRNQLQAAVTALKSNGIQVYGDVVMNHKGGADATEWVRAVEVNPSNRNQEVSGDYTIEAWTKFDFPGRGNTHSNFKWRWWHFDGVDWDQSRQLQNKIYKFRGKEWDWEVDTENGNYDYLMYADYDMDHPEVVNELRNWGVWYTNTLGLDGFRIDAVKHIKYSFTRDWLEHVRNTTGKNMFAVAEFWKNDIGAIENYLSKTNWNHSVFDVPLHYNLYNASRSGGNYDMRQIFNGTVVQRHPTHAVTFVDNHDSQPEEALESFVEEWFKPLAYALTLTRDQGYPSVFYGDYYGIPTHGVPAMKSKIDPILEARQKYAYGTQRDYMDHPDVIGWTREGDGVHADSGLATLMSDGPGGSKWMEVGKNNAGEVWYDITGNQTNTVTINKDGWGQFHVSGGSVSIYVQQ

SEQ ID NO: 26210 - protein, 483 aa, Bacillus licheniformis
HHNQTNGTMMQYFEWYLPNDGNHWNRLRSDASNLKDKGITAVWIPPAWKGASQNDVGYGAYDLYDLGEFNQKGTVRTKYGTRNQLQAAVTALKSNGIQVYGDVVMNHKGGADATEWVRAVEVNPSNRNQEVSGDYTIEAWTKFDFPGRGNTHSNFKWRWYHFDGVDWDQSRQLQNKIYKFRGKEWDWEVDTENGNYDYLMYADIDMDHPEVVNELRNWGVWYTNTLGLDGFRIDAVKHIKYSFTRDWLEHVRNTTGKNMFAVAEFWKNDIGAIENYLSKTNWNHSVFDVPLHYNLYNASRSGGNYDMRQIFNGTVVQRHPTHAVTFVDNHDSQPEEALESFVEEWFKPLAYALTLTRDQGYPSVFYGDYYGIPTHGVPAMKSKIDPILEARQKYAYGTQRDYMDHPDVIGWTREGDGVHADSGLATLMSDGPGGSKWMEVGKNNAGEVWYDITGNQTNTVTINKDGWGQFHVSGGSVSIYVQQ

SEQ ID NO: 26211 - protein, 483 aa, Bacillus licheniformis
HHNGTNGTMMQYFEWYLPNDGNHWHRLRSDASNLKDKGITAVWIPPAWKGASQNDVGYGAYDLYDLGEFNQKGTVRTKYGTRNQLQAAVTALKSNGIQVYGDVVMNHKGGADATEWVRAVEVNPSNRNQEVSGDYTIEAWTKFDFPGRGNTHSNFKWRWDHFDGVDWDQSRQLQNKIYKFRGKEWDWEVDTENGNYDYLMYADYDMDHPEVVNELRNWGVWYTNTLGLDGFRIDAVKHIKYSFTRDWLTHVRNTTGKNMFAVAEFWKNDIGAIENYLSKTNWNHSVFDVPLHYNLYNASRSGGNYDMRQIFNGTVVQRHPTHAVTFVDNHDSQPEEALESFVEEWFKPLAYALTLTRDQGYPSVFYGDYYGIPTHGVPAMKSKIDPILEARQKYAYGTQRDYLDHPDVIGWTREGDGVHADSGLATLMSDGPGGSKWMEVGKNNAGEVWYDITGNQTNTVTINKDGWGQFHVSGGSVSIYVQQ

SEQ ID NO: 26212 - protein, 483 aa, Bacillus licheniformis
HHNQTNGTMMQYFEWYLPNDGNHWNRLRSDASNLKDKGITAVWIPPAWKGASQNDVGYGAYDLYDLGEFNQKGTVRTKYGTRNQLQAAVTALKSNGIQVYGDVVMNHKGGADATEWVRAVEVNPSNRNQEVSGDYTIEAWTKFDFPGRGNTHSNFKWRWYHFDGVDWDQSRQLQNKIYKFRGKEWDWEVDTENGNYDYLMYADYDMDHPEVVNELRNWGVWYTNTLGLDGFRIDAVKHIKYSFTRDWLEHVRNTTGKNMFAVAEFWKNDIGAIENYLSKTNWNHSVFDVPLHYNLYNASRSGGNYDMRQIFNGTVVQRHPTHAVTFVDNHDSQPEEALESFVEEWFKPLAYALTLTRDQGYPSVFYGDYYGIPTHGVPAMKSKIDPILEARQKYAYGTQRDYMDHPDVIGWTREGDGVHADSGLATLMSDGPGGSKWMEVGKNNAGEVWYDITGNQTNTVTINKDGWGQFHVSGGSVSIYVQQ

SEQ ID NO: 26213 - protein, 483 aa, Bacillus licheniformis
HHNGTNHTMMQYFEWYLPNDGNHWHRLRSDASNLKDKGITAVWIPPAWKGASQNDVGYGAYDLYDLGEFNQKGTVRTKYGTRNQLQAAVTALKSNGIQVYGDVVMNHKGGADATEWVRAVEVNPSNRNQEVSGDYTIEAWTKFDFPGRGNTHSNFKWRWYHFDGVDWDQSRQLQNKIYKFRGKEWDWEVDTENGNYDYLMYADYDMDHPEVVNELRNWGVWYTNTLGLDGFRIDAVKHIKYSFTRDWLTHVRNTTGKNMFAVAEFWKNDIGAIENYLSKTNWNHSVFDVPLHYNLYNASRSGGNYDMRQIFNGTVVQRHPTHAVTFVDNHDSQPEEALESFVEEWFKPLAYALTLTRDQGYPSVFYGDYYGIPTHGVPAMKSKIDPILEARQKYAYGTQRDYLDHPDVIGWTREGDGVHADSGLATLMSDGPGGSKWMEVGKNNAGEVWYDITGNQTNTVTINKDGWGQFHVSGGSVSIYVQQ

SEQ ID NO: 26214 - protein, 483 aa, Bacillus licheniformis
HHNGTNGTMMQYFEWYLPNDGNHWHRLRSDASNLKDKGITAVWIPPAWKGASQNDVGYGAYDLYDLGEFNQKGTVRTKYGTRNQLQAAVTALKSNGIQVYGDVVMNHKGGADATEWVRAVEVNPSNRNQEVSGDYTIEAWTKFDFPGRGNTHSNFKWRWEHFDGVDWDQSRQLQNKIYKFRGKEWDWEVDTENGNYDYLMYADYDMDHPEVVNELRNWGVWYTNTLGLDGFRIDAVKHIKYSFTRDWLTHVRNTTGKNMFAVAEFWKNDIGAIENYLSKTNWNHSVFDVPLHYNLYNASRSGGNYDMRQIFNGTVVQRHPTHAVTFVDNHDSQPEEALESFVEEWFKPLAYALTLTRDQGYPSVFYGDYYGIPTHGVPAMKSKIDPILEARQKYAYGTQRDYLDHPDVIGWTREGDGVHADSGLATLMSDGPGGSKWMEVGKNNAGEVWYDITGNQTNTVTINKDGWGQFHVSGGSVSIYVQQ

SEQ ID NO: 26215 - protein, 483 aa, Bacillus licheniformis
HHNQTNGTMMQYFEWYLPNDGNHWNRLRSDASNLKDKGITAVWIPPAWKGASQNDVGYGAYDLYDLGEFNQKGTVRTKYGTRNQLQAAVTALKSNGIQVYGDVVMNHKGGADATEWVRAVEVNPSNRNQEVSGDYTIEAWTKFDFPGRGNTHSNFKWRWYHFDGVDWDQSRQLQNKIYKFRGKEWDWEVDEENGNYDYLMYADYDMDHPEVVNELRNWGVWYTNTLGLDGFRIDAVKHIKYSFTRDWLTHVRNTTGKNMFAVAEFWKNDIGAIRNYLSKTNWNHSVFDVPLHYNLYNASRSGGNYDMRQIFNGTVVQRHPTHAVTFVDNHDSQPEEALESFVEEWFKPLAYALTLTRDQGYPSVFYGDYYGIPTHGVPAMKSKIDPILEARQKYAYGTQRDYMDHPDVIGWTREGDGVHADSGLATLMSDGPGGSKWMEVGKNNAGEVWYDITGNQTNTVTINKDGWGQFHVSGGSVSIYVQQ

SEQ ID NO: 26216 - protein, 483 aa, Bacillus licheniformis
HHNGTNGTMMQYFEWYLPNDGNHWHRLRSDASNLKDKGITAVWIPPAWKGASQNDVGYGAYDLYDLGEFNQKGTVRTKYGTRNQLQAAVTALKSNGIQVYGDVVMNHKGGADATEWVRAVEVNPSNRNQEVSGDYTIEAWTKFDFPGRGNTHSNFKWRWYHFDGVDWDQSRQLQNKIYKFRGKGWDWEVDTENGNYDYLMYADYDMDHPEVVNELRNWGVWYTNTLGLDGFRIDAVKHIKYSFTRDWLEHVRNTTGKNMFAVAEFWKNDIGAIRNYLSKTNWNHSVFDVPLHYNLYNASRSGGNYDMRQIFNGTVVQRHPTHAVTFVDNHDSQPEEALESFVEEWFKPLAYALTLTRDQGYPSVFYGDYYGIPTHGVPAMKSKIDPILEARQKYAYGTQRDYLDHPDVIGWTREGDGVHADSGLATLMSDGPGGSKWMEVGKNNAGEVWYDITGNQTGTVTINKDGWGQFHVSGGSVSIYVQQ

SEQ ID NO: 26217 - protein, 483 aa, Bacillus licheniformis
HHNQTNGTMMQYFEWYLPNDGNHWNRLRSDASNLKDKGITAVWIPPAWKGASQNDVGYGAYDLYDLGEFNQKGTVRTKYGTRNQLQAAVTALKSNGIQVYGDVVMNHKGGADATEWVRAVEVNPSNRNQEVSGDYTIEAWTKFDFPGRGNTHSNFKWRWYHFDGVDWDQSRQLQNRIYKFRGKEWDWEVDTENGNYDYLMYADYDMDHPEVVNELRNWGVWYTNTLGLDGFRIDAVKHIKYSFTRDWLEHVRNTTGKNMFAVAEFWKNDIGAIRNYLSKTNWNHSVFDVPLHYNLYNASRSGGNYDMRQIFNGTVVQRHPTHAVTFVDNHDSQPEEALESFVEEWFKPLAYALTLTRDQGYPSVFYGDYYGIPTHGVPAMKSKIDPILEARQKYAYGTQRDYMDHPDVIGWTREGDGVHADSGLATLMSDGPGGSKWMEVGKNNAGEVWYDITGNQTNTVTINKDGWGQFHVSGGSVSIYVQQ

SEQ ID NO: 26218 - protein, 483 aa, Bacillus licheniformis
HHNQTNGTMMQYFEWYLPNDGNHWHRLRSDASNLKDKGITAVWIPPAWKGASQNDVGYGAYDLYDLGEFNQKGTVRTKYGTRNQLQAAVTALKSNGIQVYGDVVMNHKGGADATEWVRAVEVNPSNRNQEVSGDYTIEAWTKFDFPGRGNTHSNFKWRWWHFDGVDWDQSRQLQNRIYKFRGKEWDWEVDTENGNYDYLMYADYDMDHPEVVNELRNWGVWYTNTLGLDGFRIDAVKHIKYSFTRDWLTHVRNTTGKNMFAVAEFWKNDIGAIENYLSKTNWNHSVFDVPLHYNLYNASRSGGNYDMRQIFNGTVVQRHPTHAVTFVDNHDSQPEEALESFVEEWFKPLAYALTLTRDQGYPSVFYGDYYGIPTHGVPAMKSKIDPILEARQKYAYGTQRDYMDHPDVIGWTREGDGVHADSGLATLMSDGPGGSKWMEVGKNNAGEVWYDITGNQTNTVTINKDGWGQFHVSGGSVSIYVQQ

SEQ ID NO: 26219 - protein, 483 aa, Bacillus licheniformis
HHNGTNGTMMQYFEWYLPNDGNHWHRLRSDASNLKDKGITAVWIPPAWKGASQNDVGYGAYDLYDLGEFNQKGTVRTKYGTRNQLQAAVTALKSNGIQVYGDVVMNHKGGADATEWVRAVEVNPSNRNQEVSGDYTIEAWTKFDFPGRGNTHSNFKWRWYHFDGVDWDQSRQLQNRIYKFRGKEWDWEVDTENGNYDYLMYADIDMDHPEVVNELRNWGVWYTNTLGLDGFRIDAVKHIKYSFTRDWLEHVRNTTGKNMFAVAEFWKNDIGAIRNYLSKTNWNHSVFDVPLHYNLYNASRSGGNYDMRQIFNGTVVQRHPTHAVTFVDNHDSQPEEALESFVEEWFKPLAYALTLTRDQGYPSVFYGDYYGIPTHGVPAMKSKIDPILEARQKYAYGTQRDYLDHPDVIGWTREGDGVHADSGLATLMSDGPGGSKWMEVGKNNAGEVWYDITGNQTNTVTINKDGWGQFHVSGGSVSIYVQQ

SEQ ID NO: 26220 - protein, 483 aa, Bacillus licheniformis
HHNQTNGTMMQYFEWYLPNDGNHWNRLRSDASNLKDKGITAVWIPPAWKGASQNDVGYGAYDLYDLGEFNQKGTVRTKYGTRNQLQAAVTALKSNGIQVYGDVVMNHKGGADATEWVRAVEVNPSNRNQEVSGDYTIEAWTKFDFPGRGNTHSNFKWRWWHFDGVDWDQSRQLQNRIYKFRGKEWDWEVDTENGNYDYLMYADYDMDHPEVVNELRNWGVWYTNTLGLDGFRIDAVKHIKYSFTRDWLEHVRNTTGKNMFAVAEFWKNDIGAIENYLSKTNWNHSVFDVPLHYNLYNASRSGGNYDMRQIFNGTVVQRHPTHAVTFVDNHDSQPEEALESFVEEWFKPLAYALTLTRDQGYPSVFYGDYYGIPTHGVPAMKSKIDPILEARQKYAYGTQRDYLDHPDVIGWTREGDGVHADSGLATLMSDGPGGSKWMEVGKNNAGEVWYDITGNQTNTVTINKDGWGQFHVSGGSVSIYVQQ

SEQ ID NO: 26221 - protein, 483 aa, Bacillus licheniformis
HHNGTNGTMMQYFEWYLPNDGNHWHRLRSDASNLKDKGITAVWIPPAWKGASQNDVGYGAYDLYDLGEFNQKGTVRTKYGTRNQLQAAVTALKSNGIQVYGDVVMNHKGGADATEWVRAVEVNPSNRNQEVSGDWTIEAWTKFDFPGRGNTHSNFKWRWYHFDGVDWDQSRQLQNKIYKFRGKEWDWEVDTENGNYDYLMYADYDMDHPEVVNELRNWGVWYTNTLGLDGFRIDAVKHIKYSFTRDWLTHVRNTTGKNMFAVAEFWKNDIGAIENYLSKTNWNHSVFDVPLHYNLYNASRSGGNYDMRQIFNGTVVQRHPTHAVTFVDNHDSQPEEALESFVEEWFKPLAYALTLTRDQGYPSVFYGDYYGIPTHGVPAMKSKIDPILEARQKYAYGTQRDYLDHPDVIGWTREGDGVHADSGLATLMSDGPGGSKWMEVGKNNAGEVWYDITGNQTNTVTINKDGWGQFHVSGGSVSIYVQQ

SEQ ID NO: 26222 - protein, 485 aa, Bacillus sp.
HHNGTNGTMMQYFEWYLPNDGNHWNRLRDDAANLKSKGITAVWIPPAWKGTSQNDVGYGAYDLYDLGEFNQKGTVRTKYGTRNQLQAAVTSLKNNGIQVYGDVVMNHKGGADGTEIVNAVEVNRSNRNQETSGEYAIEAWTKFDFPGRGNNHSSFKWRWYHFDGTDWDQSRQLQNKIYKFRGTGKAWDWEVDTENGNYDYLMYADVDMDHPEVIHELRNWGVWYTNTLNLDGFRIDAVKHIKYSFTRDWLTHVRNTTGKPMFAVAEFWKNDLGAIENYLNKTSWNHSVFDVPLHYNLYNASNSGGYYDMRNILNGSVVQKHPTHAVTFVDNHDSQPGEALESFVQQWFKPLAYALVLTREQGYPSVFYGDYYGIPTHGVPAMKSKIDPLLQARQTFAYGTQHDYLDNQDVIGWTREGDSAHAGSGLATVMSDGPGGSKTMYVGTAHAGQVFKDITGNRTDTVTINSAGNGTFPCNGGSVSIWVKQ

SEQ ID NO: 26223 - protein, 483 aa, Bacillus licheniformis
HHNGTNGTMMQYFEWYLPNDGNHWHRLRSDASNLKDKGITAVWIPPAWKGASQNDVGYGAYDLYDLGEFNQKGTVRTKYGTRNQLQAAVTALKSNGIQVYGDVVMNHKGGADATEWVRAVEVNPSNRNQEVSGDYTIEAWTKFDFPGRGNTHSNFKWRWYHFDGVDWDQSRQLQNKIYKFQGKEWDWEVDTENGNYDYLMYADYDMDHPEVVNELRNWGVWYTNTLGLDGFRIDAVKHIKYSFTRDWLTHVRNTTGKNMFAVAEFWKNDIGAIENYLSKTNWNHSVFDVPLHYNLYNASRSGGNYDMRQIFNGTVVQRHPTHAVTFVDNHDSQPEEALESFVEEWFKPLAYALTLTRDQGYPSVFYGDYYGIPTHGVPAMKSKIDPILEARQKYAYGTQRDYLDHPDVIGWTREGDGVHADSGLATLMSDGPGGSKWMEVGKNNAGEVWYDITGNQTNTVTINKDGWGQFHVSGGSVSIYVQQ

SEQ ID NO: 26224 - protein, 483 aa, Bacillus licheniformis
HHNGTNGTMMQYFEWYLPNDGNHWHRLRSDASNLKDKGITAVWIPPAWKGASQNDVGYGAYDLYDLGEFNQKGTVRTKYGTRNQLQAAVTALKSNGIQVYGDVVMNHKGGADATEWVRAVEVNPSNRNQEVSGDYTIEAWTKFDFPGRGNTHSNFKWRWYHFDGVDWDQSRQLQNKIYKFDGKEWDWEVDTENGNYDYLMYADYDMDHPEVVNELRNWGVWYTNTLGLDGFRIDAVKHIKYSFTRDWLTHVRNTTGKNMFAVAEFWKNDIGAIENYLSKTNWNHSVFDVPLHYNLYNASRSGGNYDMRQIFNGTVVQRHPTHAVTFVDNHDSQPEEALESFVEEWFKPLAYALTLTRDQGYPSVFYGDYYGIPTHGVPAMKSKIDPILEARQKYAYGTQRDYLDHPDVIGWTREGDGVHADSGLATLMSDGPGGSKWMEVGKNNAGEVWYDITGNQTNTVTINKDGWGQFHVSGGSVSIYVQQ

SEQ ID NO: 26225 - protein, 483 aa, Bacillus licheniformis
HHNQTNGTMMQYFEWYLPNDGNHWNRLRSDASNLKDKGITAVWIPPAWKGASQNDVGYGAYDLYDLGEFNQKGTVRTKYGTRNQLQAAVTALKSNGIQVYGDVVMNHKGGADATEWVRAVEVNPSNRNQEVSGDYTIEAWTKFDFPGRGNTHSNFKWRWYHFDGVDWDQSRQLQNRIYKFRGKEWDWEVDTENGNYDYLMYADIDMDHPEVVNELRNWGVWYTNTLGLDGFRIDAVKHIKYSFTRDWLEHVRNTTGKNMFAVAEFWKNDIGAIRNYLSKTNWNHSVFDVPLHYNLYNASRSGGNYDMRQIFNGTVVQRHPTHAVTFVDNHDSQPEEALESFVEEWFKPLAYALTLTRDQGYPSVFYGDYYGIPTHGVPAMKSKIDPILEARQKYAYGTQRDYMDHPDVIGWTREGDGVHADSGLATLMSDGPGGSKWMEVGKNNAGEVWYDITGNQTNTVTINKDGWGQFHVSGGSVSIYVQQ

SEQ ID NO: 26226 - protein, 483 aa, Bacillus licheniformis
HHNGTNGTMMQYFEWYLPNDGNHWNRLRSDASNLKDKGITAVWIPPAWKGASQNDVGYGAYDLYDLGEFNQKGTVRTKYGTRNQLQAAVTALKSNGIQVYGDVVMNHKGGADATEWVRAVEVNPSNRNQEVSGDYTIEAWTKFDFPGRGNTHSNFKWRWWHFDGVDWDQSRQLQNRIYKFRGKEWDWEVDTENGNYDYLMYADIDMDHPEVVNELRNWGVWYTNTLGLDGFRIDAVKHIKYSFTRDWLEHVRNTTGKNMFAVAEFWKNDIGAIRNYLSKTNWNHSVFDVPLHYNLYNASRSGGNYDMRQIFNGTVVQRHPTHAVTFVDNHDSQPEEALESFVEEWFKPLAYALTLTRDQGYPSVFYGDYYGIPTHGVPAMKSKIDPILEARQKYAYGTQRDYLDHPDVIGWTREGDGVHADSGLATLMSDGPGGSKWMEVGKNNAGEVWYDITGNQTNTVTINKDGWGQFHVSGGSVSIYVQQ

SEQ ID NO: 26227 - protein, 483 aa, Bacillus licheniformis
HHNQTNGTMMQYFEWYLPNDGNHWHRLRSDASNLKDKGITAVWIPPAWKGASQNDVGYGAYDLYDLGEFNQKGTVRTKYGTRNQLQAAVTALKSNGIQVYGDVVMNHKGGADATEWVRAVEVNPSNRNQEVSGDYTIEAWTKFDFPGRGNTHSNFKWRWYHFDGVDWDQSRQLQNRIYKFRGKEWDWEVDTENGNYDYLMYADYDMDHPEVVNELRNWGVWYTNTLGLDGFRIDAVKHIKYSFTRDWLTHVRNTTGKNMFAVAEFWKNDIGAIENYLSKTNWNHSVFDVPLHYNLYNASRSGGNYDMRQIFNGTVVQRHPTHGVTFVDNHDSQPEEALESFVEEWFKPLAYALTLTRDQGYPSVFYGDYYGIPTHGVPAMKSKIDPILEARQKYAYGTQRDYMDHPDVIGWTREGDGVHADSGLATLMSDGPGGSKWMEVGKNNAGEVWYDITGNQTNTVTINKDGWGQFHVSGGSVSIYVQQ

SEQ ID NO: 26228 - protein, 483 aa, Bacillus licheniformis
HHNQTNGTMMQYFEWYLPNDGNHWHRLRSDASNLKDKGITAVWIPPAWKGASQNDVGYGAYDLYDLGEFNQKGTVRTKYGTRNQLQAAVTALKSNGIQVYGDVVMNHKGGADATEWVRAVEVNPSNRNQEVSGDYTIEAWTKFDFPGRGNTHSNFKWRWYHFDGVDWDQSRQLQNKIYKFRGKEWDWEVDTENGNYDYLMYADYDMDHPEVVNELRNWGVWYTNTLGLDGFRIDAVKHIKYSFTRDWLEHVRNTTGKNMFAVAEFWKNDIGAIENYLSKTNWNHSVFDVPLHYNLYNASRSGGNYDMRQIFNGTVVQRHPTHAVTFVDNHDSQPEEALESFVEEWFKPLAYALTLTRDQGYPSVFYGDYYGIPTHGVPAMKSKIDPILEARQKYAYGTQRDYMDHPDVIGWTREGDGVHADSGLATLMSDGPGGSKWMEVGKNNAGEVWYDITGNQTNTVTINKDGWGQFHVSGGSVSIWVQQ

SEQ ID NO: 26229 - protein, 483 aa, Bacillus licheniformis
HHNGTNGTMMQYFEWYLPNDGNHWHRLRSDASNLKDKGITAVWIPPAWKGASQNDVGYGAYDLYDLGEFNQKGTVRTKYGTRNQLQAAVTALKSNGIQVYGDVVMNHKGGADATEWVRAVEVNPSNRNQEVSGDTTIEAWTKFDFPGRGNTHSNFKWRWYHFDGVDWDQSRQLQNKIYKFRGKEWDWEVDTENGNYDYLMYADYDMDHPEVVNELRNWGVWYTNTLGLDGFRIDAVKHIKYSFTRDWLTHVRNTTGKNMFAVAEFWKNDIGAIENYLSKTNWNHSVFDVPLHYNLYNASRSGGNYDMRQIFNGTVVQRHPTHAVTFVDNHDSQPEEALESFVEEWFKPLAYALTLTRDQGYPSVFYGDYYGIPTHGVPAMKSKIDPILEARQKYAYGTQRDYLDHPDVIGWTREGDGVHADSGLATLMSDGPGGSKWMEVGKNNAGEVWYDITGNQTNTVTINKDGWGQFHVSGGSVSIYVQQ

SEQ ID NO: 26230 - protein, 483 aa, Bacillus licheniformis
HHNGTNGTMMQYFEWYLPNDGNHWNRLRSDASNLKDKGITAVWIPPAWKGASQNDVGYGAYDLYDLGEFNQKGTVRTKYGTRNQLQAAVTALKSNGIQVYGDVVMNHKGGADATEWVRAVEVNPSNRNQEVSGDYTIEAWTKFDFPGRGNTHSNFKWRWWHFDGVDWDQSRQLQNRIYKFRGKEWDWEVDTENGNYDYLMYADIDMDHPEVVNELRNWGVWYTNTLGLDGFRIDAVKHIKYSFTRDWLEHVRNTTGKNMFAVAEFWKNDIGAIRNYLSKTNWNHSVFDVPLHYNLYNASRSGGNYDMRQIFNGTVVQRHPTHAVTFVDNHDSQPEEALESFVEEWFKPLAYALTLTRDQGYPSVFYGDYYGIPTHGVPAMKSKIDPILEARQKYAYGTQRDYMDHPDVIGWTREGDGVHADSGLATLMSDGPGGSKWMEVGKNNAGEVWYDITGNQTNTVTINKDGWGQFHVSGGSVSIYVQQ

SEQ ID NO: 26231 - protein, 485 aa, Synthetic construct
HHNGTNGTMMQYFEWYLPNDGNHWNRLNSDASNLKSKGITAVWIPPAWKGASQNDVGYGAYDLYDLGEFNQKGTVRTKYGTRSQLQAAVTSLKNNGIQVYGDVVMNHRMGADATETISAVEVNPSNRNQVTSGAYNISAWTDFEFPGRGNTYSSFKWHSYYFDGVDWDQSRQLSGKIYQIQGTGKAWDWEVDSENGNYDYLMGADIDMDHPEVVNELRNWGVWYTNTLGLDGFRIDAVKHIKYSFTRDWINHVRSATGKNMFAVAEFWKNDLGAIENYLQKTNWNHSVFDVPLHYNLYNASKSGGNYDMRNIFNGTVVQRHPSHAVTFVDNHDSQPEEALESFVEEWFKPLAYALTLTREQGYPSVFYGDYYGIPTHGVPAMRSKIDPILEARQKYAYGKQNDYLDHHNIIGWTREGNTAHPNSGLATIMSDGAGGSKWMFVGRNKAGQVWSDITGNRTGTVTINADGWGNFSVNGGSVSIWVNK

SEQ ID NO: 26232 - protein, 483 aa, Bacillus licheniformis
HHNGTNGTMMQYFEWYLPNDGNHWHRLRSDASNLKDKGITAVWIPPAWKGASQNDVGYGAYDLYDLGEFNQKGTVRTKYGTRNQLQAAVTALKSNGIQVYGDVVMNHKGGADATEWVRAVEVNPSNRNQEVSGDYTIEAWTKFDFPGRGNTHSNFKWRWYHFDGVDWDQSRQLQNKIYKFNGKEWDWEVDTENGNYDYLMYADYDMDHPEVVNELRNWGVWYTNTLGLDGFRIDAVKHIKYSFTRDWLTHVRNTTGKNMFAVAEFWKNDIGAIENYLSKTNWNHSVFDVPLHYNLYNASRSGGNYDMRQIFNGTVVQRHPTHAVTFVDNHDSQPEEALESFVEEWFKPLAYALTLTRDQGYPSVFYGDYYGIPTHGVPAMKSKIDPILEARQKYAYGTQRDYLDHPDVIGWTREGDGVHADSGLATLMSDGPGGSKWMEVGKNNAGEVWYDITGNQTNTVTINKDGWGQFHVSGGSVSIYVQQ

SEQ ID NO: 26233 - protein, 483 aa, Bacillus licheniformis
HHNQTNGTMMQYFEWYLPNDGNHWHRLRSDASNLKDKGITAVWIPPAWKGASQNDVGYGAYDLYDLGEFNQKGTVRTKYGTRNQLQAAVTALKSNGIQVYGDVVMNHKGGADATEWVRAVEVNPSNRNQEVSGDYTIEAWTKFDFPGRGNTHSNFKWRWWHFDGVDWDQSRQLQNRIYKFRGKEWDWEVDTENGNYDYLMYADIDMDHPEVVNELRNWGVWYTNTLGLDGFRIDAVKHIKYSFTRDWLTHVRNTTGKNMFAVAEFWKNDIGAIENYLSKTNWNHSVFDVPLHYNLYNASRSGGNYDMRQIFNGTVVQRHPTHAVTFVDNHDSQPEEALESFVEEWFKPLAYALTLTRDQGYPSVFYGDYYGIPTHGVPAMKSKIDPILEARQKYAYGTQRDYMDHPDVIGWTREGDGVHADSGLATLMSDGPGGSKWMEVGKNNAGEVWYDITGNQTNTVTINKDGWGQFHVSGGSVSIYVQQ

SEQ ID NO: 26234 - protein, 483 aa, Bacillus licheniformis
HHNGTNGTMMQYFEWYLPNDGNHWHRLRSDASNLKDKGITAVWIPPAWKGASQNDVGYGAYDLYDLGEFNQKGTVRTKYGTRNQLQAAVTALKSNGIQVYGDVVMNHKGGADATEWVRAVEVNPSNRNQEVSGDYTIEAWTKFDFPGRGNTHSNFKWRWYHFDGVDWDQSRQLQNKIYKFRGKEWDWEVDEENGNYDYLMYADYDMDHPEVVNELRNWGVWYTNTLGLDGFRIDAVKHIKYSFTRDWLEHVRNTTGKNMFAVAEFWKNDIGAIENYLSKTNWNHSVFDVPLHYNLYNASRSGGNYDMRQIFNGTVVQRHPTHAVTFVDNHDSQPEEALESFVEEWFKPLAYALTLTRDQGYPSVFYGDYYGIPTHGVPAMKSKIDPILEARQKYAYGTQRDYLDHPDVIGWTREGDGVHADSGLATLMSDGPGGSKWMEVGKNNAGEVWYDITGNQTNTVTINKDGWGQFHVSGGSVSIYVQQ

SEQ ID NO: 26235 - protein, 483 aa, Bacillus licheniformis
HHNQTNGTMMQYFEWYLPNDGNHWNRLRSDASNLKDKGITAVWIPPAWKGASQNDVGYGAYDLYDLGEFNQKGTVRTKYGTRNQLQAAVTALKSNGIQVYGDVVMNHKGGADATEWVRAVEVNPSNRNQEVSGDYTIEAWTKFDFPGRGNTHSNFKWRWYHFDGVDWDQSRQLQNKIYKFRGKGWDWEVDTENGNYDYLMYADYDMDHPEVVNELRNWGVWYTNTLGLDGFRIDAVKHIKYSFTRDWLEHVRNTTGKNMFAVAEFWKNDIGAIRNYLSKTNWNHSVFDVPLHYNLYNASRSGGNYDMRQIFNGTVVQRHPTHAVTFVDNHDSQPEEALESFVEEWFKPLAYALTLTRDQGYPSVFYGDYYGIPTHGVPAMKSKIDPILEARQKYAYGTQRDYMDHPDVIGWTREGDGVHADSGLATLMSDGPGGSKWMEVGKNNAGEVWYDITGNQTGTVTINKDGWGQFHVSGGSVSIYVQQ

SEQ ID NO: 26236 - protein, 483 aa, Bacillus sonorensis
LNGTLMQYFEWNLPNDGQHWKRLQNDAGYLSDIGITAVWIPPAYKGTSQADVGYGPYDLYDLGEFLQKGTVRTKYGMKTELQSAVGSLHSQNIQVYGDVVLNHKAGADLTEDVTAVEVNPGNRNQEISGEYRIKAWTGFNFPGRGSTYSDFKWHWYHFDGTDWDESRKLNRIYKFRGDGKAWDWEVSSENGNYDYLMYADVDYDHPDVVAEMKRWGTWYAKELQLDGFRLDAVKHIKFSFLSDWLKAVRQSTGKEMFTVAEYWQNNLGEIENYLQKTDFQHSVFDVPLHFNLQAASSHGGSYDMRNLLNGTVVSKHPLKAVTFVDNHDTQPGQSLESTVQTWFKPLAYAFILTREAGYPQVFYGDMYGTKGPTSREIPSLKSKLEPILKARKYYAYGTQHDYFDHPDAIGWTREGDQSVAASGLAALITDGPGGSKRMYVGRQHAGETWHDITGNRSDSVVINSDGWGEFYVNGGSVSIYVQR

SEQ ID NO: 26237 - protein, 520 aa, Anoxybacillus flavithermus
KKIFPWILSLLLLFLFIAPFSIQTEKVRAGSVPVNGTMMQYFEWYLPDDGTLWTKVANNAQSLANLGITALWLPPAYKGTSSSDVGYGVYDLYDLGEFNQKGTVRTKYGTKTQYIQAIQAAHTAGMQVYADVVFNHKAGADGTELVDAVEVNPSDRNQEISGTYQIQAWTKFDFPGRGNTYSSFKWRWYHFDGTDWDESRKLNRIYKFRGTGKAWDWEVDTENGNYDYLMYADLDMDHPEVVSELKNWGKWYVTTTNIDGFRLDAVKHIKYSFFPDWLSYVRTQTQKPLFAVGEFWSYDISKLHNYITKTNGSMSLFDAPLHNNFYIASKSGGYFDMRTLLNNTLMKDQPTLAVTLVDNHDTEPGQSLQSWVEPWFKPLAYAFILTRQEGYPCVFYGDYYGIPKYNIPALKSKLDPLLIARRDYAYGTQHDYIDSADIIGWTREGVAEKANSGLAALITDGPGGSKWMYVGKQHAGKTFYDLTGNRSDTVTINADGWGEFKVNGGSVSIWVPKTSTTSQI

SEQ ID NO: 26238 - protein, 520 aa, Bacteria
KKSFPWILSLLLLFLFIAPFSIQTEKVRAGSVPVNGTMMQYFEWYLPDDGTLWTKVANNAQSLANLGITALWLPPAYKGTSSSDVGYGVYDLYDLGEFNQKGTVRTKYGTKTQYIQAIQAAHTAGMQVYADVVFNHKAGADGTELVDAVEVNPSDRNQEISGTYQIQAWTKFDFPGRGNTYSSFKWRWYHFDGTDWDESRKLNRIYKFRGTGKAWDWEVDTENGNYDYLMYADLDMDHPEVVSELKNWGKWYVTTTNIDGFRLDAVKHIKYSFFPDWLSYVRTQTQKPLFSVGEFWSYDISKLHNYITKTNGSMSLFDAPLHNNFYIASKSGGYFDMRTLLNNTLMKDQPTLAVTLVDNHDTEPGQSLQSWVEPWFKPLAYAFILTRQEGYPCVFYGDYYGIPKYNIPALKSKLDPLLIARRDYAYGTQHDYIDSADIIGWTREGVAEKANSGLAALITDGPGGSKWMYVGKQHAGKTFYDLTGNRSDTVTINADGWGEFKVNGGSVSIWVPKTSTTSQI

SEQ ID NO: 26239 - protein, 520 aa, Anoxybacillus flavithermus
KKSFPWILSLLLLFSFIAPFSIQTEKVRAGSVPVNGTMMQYFEWYLPDDGTLWTKVANNAQSLANLGITALWLPPAYKGTSSSDVGYGVYDLYDLGEFNQKGTVRTKYGTKTQYIQAIQAAHTAGMQVYADVVFNHKAGADGTELVDAVEVNPSDRNQEISGTYQIQAWTKFDFPGRGNTYSSFKWRWYHFDGTDWDESRKLNRIYKFRGTGKAWDWEVDTENGNYDYLMYADLDMDHPEVVSELKNWGKWYVTTTNIDGFRLDAVKHIKYSFFPDWLSYVRTQTQKPLFAVGEFWSYDISKLHNYITKTNGSMSLFDAPLHNNFYIASKSGGYFDMRTLLNNTLMKDQPTLAVTLVDNHDTEPGQSLQSWVEPWFKPLAYAFILTRQEGYPCVFYGDYYGIPKYNIPALKSKLDPLLIARRDYAYGTQHDYIDSADIIGWTREGVAEKANSGLAALITDGPGGSKWMYVGKQHAGKTFYDLTGNRSDTVTINADGWGEFKVNGGSVSIWVPKISTTSQI

SEQ ID NO: 26240 - protein, 481 aa, Bacillus licheniformis
VNGTLMQYFEWYTPNDGQHWKRLQNDAEHLSDIGITAVWIPPAYKGLSQSDNGYGPYDLYDLGEFQQKGTVRTKYGTKGELQSAIKSLHSRDINVYGDVVINHKGGADATEDVTAVEVDPADRNRVISGEHRIKAWTHFHFPGRGSTYSDFKWHWYHFDGTDWDESRKLNRIYKFQGKAWDWEVSNENGNYDYLMYADIDYDHPDVAAEIKRWGTWYANELQLDGFRLDAVKHIKFSFLRDWVNHVREKTGKEMFTVAEYWQNDLGALENYLNKTNFNHSVFDVPLHYQFHAASTQGGGYDMRKLLNSTVVSKHPLKAVTFVDNHDTQPGQSLESTVQTWFKPLAYAFILTRESGYPQVFYGDMYGTKGDSQREIPALKHKIEPILKARKQYAYGAQHDYFDHHDIVGWTREGDSSVANSGLAALITDGPGGAKRMYVGRQNAGETWHDITGNRSEPVVINSEGWGEFHVNGGSVSIYVQR

SEQ ID NO: 26241 - protein, 483 aa, Synthetic construct
SVPVNGTMMQYFEWYLPDDGTLWTKVANNAQSLANLGITALWLPPAYKGTSSSDVGYGVYDLYDLGEFNQKGTVRTKYGTKTQYIQAIQAAHTAGMQVYADVVFNHKAGADATEDVTAVEVNPANRNQETSEEYQIKAWTDFRFPGRGNTYSDFKWHWYHFDGADWDESRKISRIFKFRGEGKAWDWEVSSENGNYDYLMYADVDMDHPEVVSELKNWGKWYVTTTNIDGFRLDAVKHIKYSFFPDWLSYVRTQTQKPLFAVGEFWSYDISKLHNYITKTNGSMSLFDAPLHNNFYIASKSGGYFDMRTLLNNTLMKDQPTLAVTLVDNHDTEPGQSLQSWVEPWFKPLAYAFILTRQEGYPCVFYGDYYGIPKYNIPALKSKLDPLLIARRDYAYGTQHDYIDSADIIGWTREGVAEKANSGLAALITDGPGGSKWMYVGKQHAGKTFYDLTGNRSDTVTINADGWGEFKVNGGSVSIWVPK

SEQ ID NO: 26242 - protein, 511 aa, Bacillus sp. TS-23
APINETMMQYFEWDLPNDGTLWTKVKNEAANLSSLGITALWLPPAWKGTSQSDVGYGAYDLYDLGEFNQKGTIRTKYGTKTQYIQAIQAAKAAGMQVYADVVFNHKAGADGTEFVDAVEVDPSNRNQETSGTYQIQAWTKFDFPGRGNTYSSFKWRWYHFDGTDWDESRKLNRIYKFRGKAWDWEVDTENGNYDYLMFADYDMDHPEVVTELKNWGTWYVNTTNIDGFRLDAVKHIKYSFFPDWLTYVRNQTGKNLFAVGEFWSYDVNKLHNYITKTNGSMSLFDAPLHNNFYTASKSSGYFDMRYLLNNTLMKDQPSLAVTLVDNHDTQPGQSLQSWVEPWFKPLAYAFILTRQEGYPCVFYGDYYGIPKYNIPGLKSKIDPLLEARRDYAYGTQRDYIDHQDIIGWTREGIDTKPNSGLAALITDGPGGSKWMYVGKKHAGKVFYDLTGNRSDTVTINADGWGEFKVNGGSVSIWVAKTSNVTFTVNNATTTSGQNVYVVANIPELGNW

SEQ ID NO: 26243 - protein, 511 aa, Bacillus sp. TS-23
APINETMMQYFEWDLPNDGTLWTKVKNEAANLSSLGITALWLPPAWKGTSQSDVGYGAYDLYDLGEFNQKGTIRTKYGTKTQYIQAIQAAKAAGMQVYADVVFNHKAGADGTEFVDAVEVDPSNRNQETSGTYQIQAWTKFDFPGRGNTYSSFKWRWYHFDGTDWDESRKLNRIYKFSGKAWDWEVDTENGNYDYLMFADYDMDHPEVVTELKNWGTWYVNTTNIDGFRLDAVKHIKYSFFPDWLTYVRNQTGKNLFAVGEFWSYDVNKLHNYITKTNGSMSLFDAPLHNNFYTASKSSGYFDMRYLLNNTLMKDQPSLAVTLVDNHDTQPGQSLQSWVEPWFKPLAYAFILTRQEGYPCVFYGDYYGIPKYNIPGLKSKIDPLLIARRDYAYGTQRDYIDHQDIIGWTREGIDTKPNSGLAALITDGPGGSKWMYVGKKHAGKVFYDLTGNRSDTVTINADGWGEFKVNGGSVSIWVAKTSNVTFTVNNATTTSGQNVYVVANIPELGNW

SEQ ID NO: 26244 - protein, 511 aa, Bacillus sp. TS-23
APINETMMQYFEWDLPNDGTLWTKVKNEAANLSSLGITALWLPPAWKGTSQSDVGYGAYDLYDLGEFNQKGTIRTKYGTKTQYIQAIQAAKAAGMQVYADVVFNHKAGADGTEFVDAVEVDPSNRNQETSGTYQIQAWTKFDFPGRGNTYSSFKWRWYHFDGTDWDESRKLNRIYKFRSKAWDWEVDTENGNYDYLMFADYDMDHPEVVTELKNWGTWYVNTTNIDGFRLDAVKHIKYSFFPDWLTYVRNQTGKNLFAVGEFWSYDVNKLHNYITKTNGSMSLFDAPLHNNFYTASKSSGYFDMRYLLNNTLMKDQPSLAVTLVDNHDTQPGQSLQSWVEPWFKPLAYAFILTRQEGYPCVFYGDYYGIPKYNIPGLKSKIDPLLIARRDYAYGTQRDYIDHQDIIGWTREGIDTKPNSGLAALITDGPGGSKWMYVGKKHAGKVFYDLTGNRSDTVTINADGWGEFKVNGGSVSIWVAKTSNVTFTVNNATTTSGQNVYVVANIPELGNW

SEQ ID NO: 26245 - protein, 511 aa, Bacillus sp. TS-23
APINETMMQYFEWDLPNDGTLWTKVKNEAANLSSLGITALWLPPAWKGTSQSDVGYGVYDLYDLGEFNQKGTIRTKYGTKTQYIQAIQAAKAAGMQVYADVVFNHKAGADGTEFVDAVEVDPSNRNQETSGTYQIQAWTKFDFPGRGNTYSSFKWRWYHFDGTDWDESRKLNRIYKFSTKAWDWEVDTENGNYDYLMFADYDMDHPEVVTELKNWGTWYVNTTNIDGFRLDAVKHIKYSFFPDWLTYVRNQTGKNLFAVGEFWSYDVNKLHNYITKTNGSMSLFDAPLHNNFYTASKSSGYFDMRYLLNNTLMKDQPSLAVTLVDNHDTQPGQSLQSWVEPWFKPLAYAFILTRQEGYPCVFYGDYYGIPKYNIPGLKSKIDPLLIARRDYAYGTQRDYIDHQDIIGWTREGIDTKPNSGLAALITDGPGGSKWMYVGKKHAGKVFYDLTGNRSDTVTINADGWGEFKVNGGSVSIWVAKTSNVTFTVNNATTTSGQNVYVVANIPELGNW

SEQ ID NO: 26246 - protein, 511 aa, Bacillus sp.
APINETMMQYFEWDLPNDGTLWTKVKNEAANLSSLGITALWLPPAYKGTSQSDVGYGVYDLYDLGEFNQKGTIRTKYGTKTQYIQAIQAAKAAGMQVYADVVFNHKAGADGTEFVDAVEVDPSNRNQETSGTYQIQAWTKFDFPGRGNTYSSFKWRWYHFDGTDWDESRKLNRIYKFSSKAWDWEVDTENGNYDYLMFADLDMDHPEVVTELKNWGTWYVNTTNIDGFRLDAVKHIKYQFFPDWLTYVRNQTGKNLFAVGEFWSYDVNKLHNYITKTNGSMSLFDAPLHNNFYTASKSSGYFDMRYLLNNTLMKDQPSLAVTLVDNHDTQPGQSLQSWVEPWFKPLAYAFILTRQEGYPCVFYGDYYGIPKYNIPGLKSKIDPLLIARRDYAYGTQRDYIDHQDIIGWTREGIDTKPNSGLAALITDGPGGSKWMYVGKKHAGKVFYDLTGNRSDTVTINADGWGEFKVNKGSVSIWVAKTSNVTFTVNNATTTSGQNVYVVANIPELGNW

SEQ ID NO: 26247 - protein, 511 aa, Bacillus sp. TS-23
APINETMMQYFEWDLPNDGTLWTKVKNEAANLSSLGITALWLPPAYKGTSQSDVGYGAYDLYDLGEFNQKGTIRTKYGTKTQYIQAIQAAKAAGMQVYADVVFNHKAGADGTEFVDAVEVDPSNRNQETSGTYQIQAWTKFDFPGRGNTYSSFKWRWYHFDGTDWDESRKLNRIYKFSTKAWDWEVDTENGNYDYLMFADYDMDHPEVVTELKNWGTWYVNTTNIDGFRLDAVKHIKYSFFPDWLTYVRNQTGKNLFAVGEFWSYDVNKLHNYITKTNGSMSLFDAPLHNNFYTASKSSGYFDMRYLLNNTLMKDQPSLAVTLVDNHDTQPGQSLQSWVEPWFKPLAYAFILTRQEGYPCVFYGDYYGIPKYNIPGLKSKIDPLLIARRDYAYGTQRDYIDHQDIIGWTREGIDTKPNSGLAALITDGPGGSKWMYVGKKHAGKVFYDLTGNRSDTVTINADGWGEFKVNGGSVSIWVAKTSNVTFTVNNATTTSGQNVYVVANIPELGNW

SEQ ID NO: 26248 - protein, 511 aa, Bacillus sp. TS-23
APINETMMQYFEWDLPNDGTLWTKVKNEAANLSSLGITALWLPPAWKGTSQSDVGYGAYDLYDLGEFNQKGTIRTKYGTKTQYIQAIQAAKAAGMQVYADVVFNHKAGADGTEFVDAVEVDPSNRNQETSGTYQIQAWTKFDFPGRGNTYSSFKWRWYHFDGTDWDESRKLNRIYKFTGKAWDWEVDTENGNYDYLMFADYDMDHPEVVTELKNWGTWYVNTTNIDGFRLDAVKHIKYSFFPDWLTYVRNQTGKNLFAVGEFWSYDVNKLHNYITKTNGSMSLFDAPLHNNFYTASKSSGYFDMRYLLNNTLMKDQPSLAVTLVDNHDTQPGQSLQSWVEPWFKPLAYAFILTRQEGYPCVFYGDYYGIPKYNIPGLKSKIDPLLIARRDYAYGTQRDYIDHQDIIGWTREGIDTKPNSGLAALITDGPGGSKWMYVGKKHAGKVFYDLTGNRSDTVTINADGWGEFKVNGGSVSIWVAKTSNVTFTVNNATTTSGQNVYVVANIPELGNW

SEQ ID NO: 26249 - protein, 480 aa, Bacillus sp.
APINETMMQYFEWDLPNDGTLWTKVKNEAANLSSLGITALWLPPAYKGTSQSDVGYGVYDLYDLGEFNQKGTIRTKYGTKTQLERAIRSLKANGIQVYADVVFNHKAGADGTEFVDAVEVDPSNRNQETSGTYQIQAWTKFDFPGRGNTYSSFKWRWYHFDGTDWDESRKLNRIYKFRGKAWDWEVDTENGNYDYLMFADLDMDHPEVVTELKNWGTWYVNTTNIDGFRLDAVKHIKFSFMRDWLTYVRNQTGKNLFAVGEFWSYDVNKLHNYITKTNGSMSLFDAPLHNNFYTASKSSGYFDMRYLLNNTLMKDQPSLAVTLVDNHDTQPGQSLQSWVEPWFKPLAYAFILTRQEGYPCVFYGDYYGIPKYNIPGLKSKIDPLLIARRDYAYGTQRDYIDHQDIIGWTREGIDTKPNSGLAALITDGPGGSKWMYVGKKHAGKVFYDLTGNRSDTVTINADGWGEFKVNGGSVSIWVAK

SEQ ID NO: 26250 - protein, 480 aa, Synthetic construct
APVNGTMMQYFEWDLPNDGTLWTKVKNEATNLFSLGITALWLPPAYKGTSQSDVGYGVYDLYDLGEFNQKGTIRTKYGTKTQYIQAIQAAKAAGMQVYADVVFNHKGGADATEDVTAVEVDPADRNRVISGEHLIKAWTHFHFPGRGSTYSDFKWHWYHFDGTDWDESRKLNRIYKFQGKAWDWEVSNEFGNYDYLMYADIDMDHPEVVTELKNWGTWYVNTTNIDGFRLDAVKHIKYSFFPDWLTYVRNQTGKNLFAVGEFWSYDVNKLHNYITKTNGSMSLFDAPLHNNFYTASKSSGYFDMRYLLNNTLMKDQPSLAVTLVDNHDTQPGQSLQSWVEPWFKPLAYAFILTRQEGYPCVFYGDYYGIPKYNIPGLKSKIDPLLIARRDYAYGTQRDYIDHQDIIGWTREGIDTKPNSGLAALITDGPGGSKWMYVGKKHAGKVFYDLTGNRSDTVTINADGWGEFKVNGGSVSIWVAK

SEQ ID NO: 26251 - protein, 480 aa, Synthetic construct
APINETMMQYFEWDLPNDGTLWTKVKNEAANLSSLGITALWLPPAYKGTSQSDVGYGVYDLYDLGEFNQKGTIRTKYGTKTQYIQAIQAAKAAGMQVYADVVFNHKGGADATEDVTAVEVDPADRNRVISGEHLIKAWTHFHFPGRGSTYSDFKWHWYHFDGTDWDESRKLNRIYKFQGKAWDWEVSNEFGNYDYLMYADIDMDHPEVVTELKNWGTWYVNTTNIDGFRLDAVKHIKYSFFPDWLTYVRNQTGKNLFAVGEFWSYDVNKLHNYITKTNGSMSLFDAPLHNNFYTASKSSGYFDMRYLLNNTLMKDQPSLAVTLVDNHDTQPGQSLQSWVEPWFKPLAYAFILTRQEGYPCVFYGDYYGIPKYNIPGLKSKIDPLLIARRDYAYGTQRDYIDHQDIIGWTREGIDTKPNSGLAALITDGPGGSKWMYVGKKHAGKVFYDLTGNRSDTVTINADGWGEFKVNGGSVSIWVAK

SEQ ID NO: 26252 - protein, 480 aa, Bacillus sp.
APINETMMQYFEWDLPNDGTLWTKVKNEAANLSSLGITALWLPPAYKGTSQSDVGYGVYDLYDLGEFNQKGTIRTKYGTKTQYIQAIQAAKAAGMQVYADVVFNHKAGADGTEFVDAVEVDPSNRNQEVSGTYQIEAWTKFDFPGRGNTYSSFKWRWYHFDGTDWDESRKLNRIYKFRGKAWDWEVDTENGNYDYLMFADLDMDHPEVVTELKNWGTWYVNTTNIDGFRLDAVKHIKFSFMRDWLTYVRNQTGKNLFAVGEFWSYDVNKLHNYITKTNGSMSLFDAPLHNNFYTASKSSGYFDMRNLLNGTLVQRHPSHAVTLVDNHDTQPGQSLQSWVEPWFKPLAYAFILTRQEGYPCVFYGDYYGIPKYNIPGLKSKIDPLLIARRDYAYGTQRDYIDHQDIIGWTREGIDTKPNSGLAALITDGPGGSKWMYVGKKHAGKVFYDLTGNRSDTVTINADGWGEFKVNGGSVSIWVAK

SEQ ID NO: 26253 - protein, 482 aa, Synthetic construct
APVNGTMMQYFEWDLPNDGTLWTKVKNEAANLSSLGITALWLPPAYKGTSQSDVGYGVYDLYDLGEFNQKGTVRTKYGTKDQYIQAIQAAKAAGMQVYADVVFNHKAGADATEDVTAVEVNPANRNQETSEEYQIKAWTDFRFPGRGNTYSDFKWHWYHFDGADWDESRKISRIFKFRGEGKAWDWEVSSENGNYDYLMYADVDMDHPEVVTELKNWGKWYVNTTNVDGFRLDAVKHIKYSFFPDWLASVRSQTGKNLFAVGEFWSYDVNKLHNYITKTNGTMSLFDAPLHNNFYTASKSSGYFDMRYLLNNTLMKDQPVLAVTLVDNHDTQPGQSLQSWVEPWFKPLAYAFILTRQEGYPCVFYGDYYGIPKYNIPGLKSKIDPLLIARRDYAYGTQRDYIDHQDIIGWTREGIDSKPNSGLAALITDGPGGSKWMYVGKKHAGKVFYDLTGNRSDTVTINADGWGEFKVNGGSVSIWVAK

SEQ ID NO: 26254 - protein, 483 aa, Synthetic construct
APINETMMQYFEWDLPNDGTLWTKVKNEAANLSSLGITALWLPPAYKGTSQSDVGYGVYDLYDLGEFNQKGTIRTKYGTKTQYIQAIQAAKAAGMQVYADVVFNHKGGADFTERVQAVEVNPQNRNQEVSGTYQIEAWTGFNFPGRGNQHSSFKWRWYHFDGTDWDQSRQLANRIYKFRGDGKAWDWEVDTENGNYDYLMYADVDMDHPEVVTELKNWGTWYVNTTNIDGFRLDAVKHIKYSFFPDWLTYVRNQTGKNLFAVGEFWSYDVNKLHNYITKTNGSMSLFDAPLHNNFYTASKSSGYFDMRYLLNNTLMKDQPSLAVTLVDNHDTQPGQSLQSWVEPWFKPLAYAFILTRQEGYPCVFYGDYYGIPKYNIPGLKSKIDPLLIARRDYAYGTQRDYIDHQDIIGWTREGIDTKPNSGLAALITDGPGGSKWMYVGKKHAGKVFYDLTGNRSDTVTINADGWGEFKVNGGSVSIWVAK

SEQ ID NO: 26255 - protein, 483 aa, Synthetic construct
APINETMMQYFEWDLPNDGTLWTKVKNEAANLSSLGITALWLPPAYKGTSQSDVGYGVYDLYDLGEFNQKGTIRTKYGTKTQYIQAIQAAKAAGMQVYADVVFNHKGGADATEMVRAVEVNPNNRNQEVTGEYTIEAWTRFDFPGRGNTHSSFKWRWYHFDGVDWDQSRRLNNRIYKFRGHGKAWDWEVDTENGNYDYLMYADIDMDHPEVVTELKNWGTWYVNTTNIDGFRLDAVKHIKYSFFPDWLTYVRNQTGKNLFAVGEFWSYDVNKLHNYITKTNGSMSLFDAPLHNNFYTASKSSGYFDMRYLLNNTLMKDQPSLAVTLVDNHDTQPGQSLQSWVEPWFKPLAYAFILTRQEGYPCVFYGDYYGIPKYNIPGLKSKIDPLLIARRDYAYGTQRDYIDHQDIIGWTREGIDTKPNSGLAALITDGPGGSKWMYVGKKHAGKVFYDLTGNRSDTVTINADGWGEFKVNGGSVSIWVAK

SEQ ID NO: 26256 - protein, 483 aa, Synthetic construct
APVNGTMMQYFEWDLPNDGTLWTKVKNEATNLFSLGITALWLPPAYKGTSQSDVGYGVYDLYDLGEFNQKGTIRTKYGTKTQYIQAIQAAKAAGMQVYADVVFNHKGGADFTERVQAVEVNPQNRNQEVSGTYQIEAWTGFNFPGRGNQHSSFKWRWYHFDGTDWDQSRQLANRIYKFRGDGKAWDWEVDTENGNYDYLMYADVDMDHPEVVTELKNWGTWYVNTTNIDGFRLDAVKHIKYSFFPDWLTYVRNQTGKNLFAVGEFWSYDVNKLHNYITKTNGSMSLFDAPLHNNFYTASKSSGYFDMRYLLNNTLMKDQPSLAVTLVDNHDTQPGQSLQSWVEPWFKPLAYAFILTRQEGYPCVFYGDYYGIPKYNIPGLKSKIDPLLIARRDYAYGTQRDYIDHQDIIGWTREGIDTKPNSGLAALITDGPGGSKWMYVGKKHAGKVFYDLTGNRSDTVTINADGWGEFKVNGGSVSIWVAK

SEQ ID NO: 26257 - protein, 483 aa, Synthetic construct
APVNGTMMQYFEWDLPNDGTLWTKVKNEATNLFSLGITALWLPPAYKGTSQSDVGYGVYDLYDLGEFNQKGTIRTKYGTKTQYIQAIQAAKAAGMQVYADVVFNHKGGADATEMVRAVEVNPNNRNQEVTGEYTIEAWTRFDFPGRGNTHSSFKWRWYHFDGVDWDQSRRLNNRIYKFRGHGKAWDWEVDTENGNYDYLMYADIDMDHPEVVTELKNWGTWYVNTTNIDGFRLDAVKHIKYSFFPDWLTYVRNQTGKNLFAVGEFWSYDVNKLHNYITKTNGSMSLFDAPLHNNFYTASKSSGYFDMRYLLNNTLMKDQPSLAVTLVDNHDTQPGQSLQSWVEPWFKPLAYAFILTRQEGYPCVFYGDYYGIPKYNIPGLKSKIDPLLIARRDYAYGTQRDYIDHQDIIGWTREGIDTKPNSGLAALITDGPGGSKWMYVGKKHAGKVFYDLTGNRSDTVTINADGWGEFKVNGGSVSIWVAK

SEQ ID NO: 26258 - protein, 478 aa, Bacillus sp. 707
NGTLMQYFEWYLPNDGQHWNRLNSDASNLKSKGITAVWIPPAYKGTTQNDVGYGAYDLYDLGEFNQKGTVRTKYGTRSQLQAAVTSLKNNGIQVYGDAVMNHKGGADATEMVRAVEVNPSNRNQETSGEYNIQAWTGFNFPGRGNTHSSFKWRWYHFDGVDWDQSRRLNNRIYKFDGKAWDWPVSSENGNYDYLMYADLDFDHPDVVNEMKEWGVWYANTLGLDGFRIDAVKHIKYSFTRDWINHVRSATGKNMFAVAEFWKNDLGAIENYLQKTNWNHSVFDVPLHYNLYNASKSGGNYDMRNIFNGTVVQRHPSHAVTFVDNHDSQPEEALESFVEEWFKPLAYALTLTREQGYPSVFYGDYYGIPTHGVPAMRSKIDPILEARQKYAYGKQNDYLDHHNIIGWTREGNTAHPNSGLATIMSDGPGGSKWMFVGRNKAGQVWSDITGNRTGTVTINADGWGNFSVNGGSVSIWVNK

SEQ ID NO: 26259 - protein, 483 aa, Bacillus licheniformis
HHNGTNGTMMQYFEWYLPNDGNHWHRLRSDASNLKDKGITAVWIPPAWKGASQNDVGYGAYDLYDLGEFNQKGTVRTKYGTRNQLQAAVTALKSNGIQVYGDVVMNHKGGADATEWVRAVEVNPSNRNQEVSGDYTIEAWTKFDFPGRGNTHSNFKWRWYHFDGVDWDQSRQLQNKIYKFRGKEWDWEVDTENGNYDYLMYADIDMDHPEVVNELRNWGVWYTNTLGLDGFRIDAVKHIKYSFTRDWLTHVRNTTGKNMFAVAEFWKNDIGAIRNYLSKTNWNHSVFDVPLHYNLYNASRSGGNYDMRQIFNGTVVQRHPTHGVTFVDNHDSQPEEALESFVEEWFKPLAYALTLTRDQGYPSVFYGDYYGIPTHGVPAMKSKIDPILEARQKYAYGTQRDYMDHPDVIGWTREGDGVHADSGLATLMSDGPGGSKWMEVGKNNAGEVWYDITGNQTNTVTINKDGWGQFHVSGGSVSIYVQQ

SEQ ID NO: 26260 - protein, 483 aa, Bacillus licheniformis
HHNGTNGTMMQYFEWYLPNDGNHWNRLRSDASNLKDKGITAVWIPPAWKGASQNDVGYGAYDLYDLGEFNQKGTVRTKYGTRNQLQAAVTALKSNGIQVYGDVVMNHKGGADATEWVRAVEVNPSNRNQEVSGDYTIEAWTKFDFPGRGNTHSNFKWRWWHFDGVDWDQSRQLQNKIYKFRGKGWDWEVDTENGNYDYLMYADYDMDHPEVVNELRNWGVWYTNTLGLDGFRIDAVKHIKYSFTRDWLEHVRNTTGKNMFAVAEFWKNDIGAIRNYLSKTNWNHSVFDVPLHYNLYNASRSGGNYDMRQIFNGTVVQRHPTHAVTFVDNHDSQPEEALESFVEEWFKPLAYALTLTRDQGYPSVFYGDYYGIPTHGVPAMKSKIDPILEARQKYAYGTQRDYLDHPDVIGWTREGDGVHADSGLATLMSDGPGGSKWMEVGKNNAGEVWYDITGNQTNTVTINKDGWGQFHVSGGSVSIYVQQ

SEQ ID NO: 26261 - protein, 483 aa, Bacillus licheniformis
HHNQTNGTMMQYFEWYLPNDGNHWNRLRSDASNLKDKGITAVWIPPAWKGASQNDVGYGAYDLYDLGEFNQKGTVRTKYGTRNQLQAAVTALKSNGIQVYGDVVMNHKGGADATEWVRAVEVNPSNRNQEVSGDYTIEAWTKFDFPGRGNTHSNFKWRWWHFDGVDWDQSRQLQNKIYKFRGKGWDWEVDTENGNYDYLMYADYDMDHPEVVNELRNWGVWYTNTLGLDGFRIDAVKHIKYSFTRDWLEHVRNTTGKNMFAVAEFWKNDIGAIRNYLSKTNWNHSVFDVPLHYNLYNASRSGGNYDMRQIFNGTVVQRHPTHAVTFVDNHDSQPEEALESFVEEWFKPLAYALTLTRDQGYPSVFYGDYYGIPTHGVPAMKSKIDPILEARQKYAYGTQRDYLDHPDVIGWTREGDGVHADSGLATLMSDGPGGSKWMEVGKNNAGEVWYDITGNQTGTVTINKDGWGQFHVSGGSVSIYVQQ

SEQ ID NO: 26262 - protein, 483 aa, Bacillus licheniformis
HHNQTNGTMMQYFEWYLPNDGNHWNRLRSDASNLKDKGITAVWIPPAWKGASQNDVGYGAYDLYDLGEFNQKGTVRTKYGTRNQLQAAVTALKSNGIQVYGDVVMNHKGGADATEWVRAVEVNPSNRNQEVSGDYTIEAWTKFDFPGRGNTHSNFKWRWYHFDGVDWDQSRQLQNKIYKFQGKEWDWEVDEENGNYDYLMYADYDMDHPEVVNELRNWGVWYTNTLGLDGFRIDAVKHIKYSFTRDWLEHVRNTTGKNMFAVAEFWKNDIGAIENYLSKTNWNHSVFDVPLHYNLYNASRSGGNYDMRQIFNGTVVQRHPTHAVTFVDNHDSQPEEALESFVEEWFKPLAYALTLTRDQGYPSVFYGDYYGIPTHGVPAMKSKIDPILEARQKYAYGTQRDYMDHPDVIGWTREGDGVHADSGLATLMSDGPGGSKWMEVGKNNAGEVWYDITGNQTNTVTINKDGWGQFHVSGGSVSIYVQQ

SEQ ID NO: 26263 - protein, 483 aa, Bacillus licheniformis
HHNGTNGTMMQYFEWYLPNDGNHWHRLRSDASNLKDKGITAVWIPPAWKGASQNDVGYGAYDLYDLGEFNQKGTVRTKYGTRNQLQAAVTALKSNGIQVYGDVVMNHKGGADATEWVRAVEVNPSNRNQEVSGDYTIEAWTKFDFPGRGNTHSNFKWRWWHFDGVDWDQSRQLQNKIYKFRGKEWDWEVDTENGNYDYLMYADIDMDHPEVVNELRNWGVWYTNTLGLDGFRIDAVKHIKYSFTRDWLEHVRNTTGKNMFAVAEFWKNDIGAIENYLSKTNWNHSVFDVPLHYNLYNASRSGGNYDMRQIFNGTVVQRHPTHAVTFVDNHDSQPEEALESFVEEWFKPLAYALTLTRDQGYPSVFYGDYYGIPTHGVPAMKSKIDPILEARQKYAYGTQRDYLDHPDVIGWTREGDGVHADSGLATLMSDGPGGSKWMEVGKNNAGEVWYDITGNQTNTVTINKDGWGQFHVSGGSVSIYVQQ

SEQ ID NO: 26264 - protein, 483 aa, Bacillus licheniformis
HHNQTNGTMMQYFEWYLPNDGNHWNRLRSDASNLKDKGITAVWIPPAWKGASQNDVGYGAYDLYDLGEFNQKGTVRTKYGTRNQLQAAVTALKSNGIQVYGDVVMNHKGGADATEWVRAVEVNPSNRNQEVSGDYTIEAWTKFDFPGRGNTHSNFKWRWYHFDGVDWDQSRQLQNKIYKFRGKEWDWEVDEENGNYDYLMYADYDMDHPEVVNELRNWGVWYTNTLGLDGFRIDAVKHIKYSFTRDWLEHVRNTTGKNMFAVAEFWKNDIGAIENYLSNTNWNHSVFDVPLHYNLYNASRSGGNYDMRQIFNGTVVQRHPTHAVTFVDNHDSQPEEALESFVEEWFKPLAYALTLTRDQGYPSVFYGDYYGIPTHGVPAMKSKIDPILEARQKYAYGTQRDYMDHPDVIGWTREGDGVHADSGLATLMSDGPGGSKWMEVGKNNAGEVWYDITGNQTNTVTINKDGWGQFHVSGGSVSIYVQQ

SEQ ID NO: 26265 - protein, 483 aa, Bacillus licheniformis
HHNQTNGTMMQYFEWYLPNDGNHWNRLRSDASNLKDKGITAVWIPPAWKGASQNDVGYGAYDLYDLGEFNQKGTVRTKYGTRNQLQAAVTALKSNGIQVYGDVVMNHKGGADATEWVRAVEVNPSNRNQEVSGDETIEAWTKFDFPGRGNTHSNFKWRWYHFDGVDWDQSRQLQNKIYKFRGKEWDWEVDEENGNYDYLMYADYDMDHPEVVNELRNWGVWYTNTLGLDGFRIDAVKHIKYSFTRDWLEHVRNTTGKNMFAVAEFWKNDIGAIENYLSKTNWNHSVFDVPLHYNLYNASRSGGNYDMRQIFNGTVVQRHPTHAVTFVDNHDSQPEEALESFVEEWFKPLAYALTLTRDQGYPSVFYGDYYGIPTHGVPAMKSKIDPILEARQKYAYGTQRDYMDHPDVIGWTREGDGVHADSGLATLMSDGPGGSKWMEVGKNNAGEVWYDITGNQTNTVTINKDGWGQFHVSGGSVSIYVQQ

SEQ ID NO: 26266 - protein, 483 aa, Bacillus licheniformis
HHNQTNGTMMQYFEWYLPNDGNHWHRLRSDASNLKDKGITAVWIPPAWKGASQNDVGYGAYDLYDLGEFNQKGTVRTKYGTRNQLQAAVTALKSNGIQVYGDVVMNHKGGADATEWVRAVEVNPSNRNQEVSGDYTIEAWTKFDFPGRGNTHSNFKWRWWHFDGVDWDQSRQLQNKIYKFRGKEWDWEVDTENGNYDYLMYADIDMDHPEVVNELRNWGVWYTNTLGLDGFRIDAVKHIKYSFTRDWLTHVRNTTGKNMFAVAEFWKNDIGAIENYLSKTNWNHSVFDVPLHYNLYNASRSGGNYDMRQIFNGTVVQRHPTHAVTFVDNHDSQPEEALESFVEEWFKPLAYALTLTRDQGYPSVFYGDYYGIPTHGVPAMKSKIDPILEARQKYAYGTQRDYMDHPDVIGWTREGDGVHADSGLATLMSDGPGGSKWMEVGKNNAGEVWYDITGNQTNTVTINKDGWGQFHVSGGSVSIYVQQ

SEQ ID NO: 26267 - protein, 483 aa, Bacillus licheniformis
HHNGTNGTMMQYFEWYLPNDGNHWHRLRSDASNLKDKGITAVWIPPAWKGASQNDVGYGAYDLYDLGEFNQKGTVRTKYGTRNQLQAAVTALKSNGIQVYGDVVMNHKGGADATEWVRAVEVNPSNRNQEVSGDYTIEAWTKFDFPGRGNTHSNFKWRWYHFDGVDWDQSRQLQNKIYKFQGKEWDWEVDTENGNYDYLMYADYDMDHPEVVNELRNWGVWYTNTLGLDGFRIDAVKHIKYSFTRDWLTHVRNTTGKNMFAVAEFWKNDIGAIENYLSKTNWNHSVFDVPLHYNLYNASRSGGNYDMRQIFNGTVVQRHPTHAVTFVDNHDSQPEEALESFVEEWFKPLAYALTLTRDQGEPSVFYGDYYGIPTHGVPAMKSKIDPILEARQKYAYGTQRDYLDHPDVIGWTREGDGVHADSGLATLMSDGPGGSKWMEVGKNNAGEVWYDITGNQTNTVTINKDGWGQFHVSGGSVSIYVQQ

SEQ ID NO: 26268 - protein, 483 aa, Bacillus licheniformis
HHNGTNGTMMQYFEWYLPNDGNHWHRLRSDASNLKDKGITAVWIPPAWKGASQNDVGYGAYDLYDLGEFNQKGTVRTKYGTRNQLQAAVTALKSNGIQVYGDVVMNHKGGADATEWVRAVEVNPSNRNQEVSGDYTIEAWTKFDFPGRGNTHSNFKWRWWHFDGVDWDQSRQLQNKIYKFRGKEWDWEVDTENGNYDYLMYADYDMDHPEVVNELRNWGVWYTNTLGLDGFRIDAVKHIKYSFTRDWLEHVRNTTGKNMFAVAEFWKNDIGAIENYLSKTNWNHSVFDVPLHYNLYNASRSGGNYDMRQIFNGTVVQRHPTHAVTFVDNHDSQPEEALESFVEEWFKPLAYALTLTRDQGYPSVFYGDYYGIPTHGVPAMKSKIDPILEARQKYAYGTQRDYMDHPDVIGWTREGDGVHADSGLATLMSDGPGGSKWMEVGKNNAGEVWYDITGNQTNTVTINKDGWGQFHVSGGSVSIYVQQ

SEQ ID NO: 26269 - protein, 483 aa, Bacillus licheniformis
HHNGTNGTMMQYFEWYLPNDGNHWHRLRSDASNLKDKGITAVWIPPAWKGASQNDVGYGAYDLYDLGEFNQKGTVRTKYGTRNQLQAAVTALKSNGIQVWGDVVMNHKGGADATEWVRAVEVNPSNRNQEVSGDTTIEAWTKFDFPGRGNTHSNFKWRWYHFDGVDWDQSRQLQNKIYKFRGKEWDWEVDEENGNYDYLMYADYDMDHPEVVNELRNWGVWYTNTLGLDGFRIDAVKHIKYSFTRDWLTHVRNTTGKNMFAVAEFWKNDIGAIENYLSKTNWNHSVFDVPLHYNLYNASRSGGNYDMRQIFNGTVVQRHPTHAVTFVDNHDSQPEEALESFVEEWFKPLAYALTLTRDQGYPSVFYGDYYGIPTHGVPAMKSKIDPILEARQKYAYGTQRDYLDHPDVIGWTREGDGVHADSGLATLMSDGPGGSKWMEVGKNNAGEVWYDITGNQTNTVTINKDGWGQFHVSGGSVSIYVQQ

SEQ ID NO: 26270 - protein, 483 aa, Bacillus licheniformis
HHNGTNGTMMQYFEWYLPNDGNHWHRLRSDASNLKDKGITAVWIPPAWKGASQNDVGYGAYDLYDLGEFNQKGTVRTKYGTRNQLQAAVTALKSNGIQVYGDVVMNHKGGADATEWVRAVEVNPSNRNQEVSGDYTIEAWTKFDFPGRGNTHSNFKWRWWHFDGVDWDQSRQLQNKIYKFRGKEWDWEVDTENGNYDYLMYADIDMDHPEVVNELRNWGVWYTNTLGLDGFRIDAVKHIKYSFTRDWLEHVRNTTGKNMFAVAEFWKNDIGAIENYLSKTNWNHSVFDVPLHYNLYNASRSGGNYDMRQIFNGTVVQRHPTHAVTFVDNHDSQPEEALESFVEEWFKPLAYALTLTRDQGYPSVFYGDYYGIPTHGVPAMKSKIDPILEARQKYAYGTQRDYMDHPDVIGWTREGDGVHADSGLATLMSDGPGGSKWMEVGKNNAGEVWYDITGNQTNTVTINKDGWGQFHVSGGSVSIYVQQ

SEQ ID NO: 26271 - protein, 483 aa, Bacillus licheniformis
HHNQTNGTMMQYFEWYLPNDGNHWHRLRSDASNLKDKGITAVWIPPAWKGASQNDVGYGAYDLYDLGEFNQKGTVRTKYGTRNQLQAAVTALKSNGIQVYGDVVMNHKGGADATEWVRAVEVNPSNRNQEVSGDYTIEAWTKFDFPGRGNTHSNFKWRWYHFDGVDWDQSRQLQNKIYKFRGKEWDWEVDTENGNYDYLMYADYDMDHPEVVNELRNWGVWYTNTLGLDGFRIDAVKHIKYSFTRDWLTHVRNTTGKNMFAVAEFWKNDIGAIRNYLSKTNWNHSVFDVPLHYNLYNASRSGGNYDMRQIFNGTVVQRHPTHAVTFVDNHDSQPEEALESFVEEWFKPLAYALTLTRDQGYPSVFYGDYYGIPTHGVPAMKSKIDPILEARQKYAYGTQRDYLDHPDVIGWTREGDGVHADSGLATLMSDGPGGSKWMEVGKNNAGEVWYDITGNQTNTVTINKDGWGQFHVSGGSVSIYVQQ

SEQ ID NO: 26272 - protein, 483 aa, Bacillus licheniformis
HHNGTNGTMMQYFEWYLPNDGNHWHRLRSDASNLKDKGITAVWIPPAWKGASQNDVGYGAYDLYDLGEFNQKGTVRTKYGTRNQLQAAVTALKSNGIQVWGDVVMNHKGGADATEWVRAVEVNPSNRNQEVSGDTTIEAWTKFDFPGRGNTHSNFKWRWYHFDGVDWDQSRQLQNKIYKFRGKEWDWEVDTENGNYDYLMYADYDMDHPEVVNELRNWGVWYTNTLGLDGFRIDAVKHIKYSFTRDWLTHVRNTTGKNMFAVAEFWKNDIGAIENYLSKTNWNHSVFDVPLHYNLYNASRSGGNYDMRQIFNGTVVQRHPTHAVTFVDNHDSQPEEALESFVEEWFKPLAYALTLTRDQGYPSVFYGDYYGIPTHGVPAMKSKIDPILEARQKYAYGTQRDYLDHPDVIGWTREGDGVHADSGLATLMSDGPGGSKWMEVGKNNAGEVWYDITGNQTNTVTINKDGWGQFHVSGGSVSIYVQQ

SEQ ID NO: 26273 - protein, 483 aa, Bacillus licheniformis
HHNGTNGTMMQYFEWYLPNDGNHWHRLRSDASNLKDKGITAVWIPPAWKGASQNDVGYGAYDLYDLGEFNQKGTVRTKYGTRNQLQAAVTALKSNGIQVYGDVVMNHKGGADATEWVRAVEVNPSNRNQEVSGDTTIEAWTKFDFPGRGNTHSNFKWRWYHFDGVDWDQSRQLQNKIYKFRGKEWDWEVDTENGNYDYLMYADYDMDHPEVVNELRNWGVWYTNTLGLDGFRIDAVKHIKYSFTRDWLTHVRNTTGKNMFAVAEFWKNDIGAIENYLSNTNWNHSVFDVPLHYNLYNASRSGGNYDMRQIFNGTVVQRHPTHAVTFVDNHDSQPEEALESFVEEWFKPLAYALTLTRDQGYPSVFYGDYYGIPTHGVPAMKSKIDPILEARQKYAYGTQRDYLDHPDVIGWTREGDGVHADSGLATLMSDGPGGSKWMEVGKNNAGEVWYDITGNQTNTVTINKDGWGQFHVSGGSVSIYVQQ

SEQ ID NO: 26274 - protein, 483 aa, Bacillus licheniformis
HHNGTNGTMMQYFEWYLPNDGNHWHRLRSDASNLKDKGITAVWIPPAWKGASQNDVGYGAYDLYDLGEFNQKGTVRTKYGTRNQLQAAVTALKSNGIQVYGDVVMNHKGGADATEWVRAVEVNPSNRNQEVSGDYTIEAWTKFDFPGRGNTHSNFKWRWYHFDGVDWDQSRQLQNRIYKFRGKEWDWEVDTENGNYDYLMYADYDMDHPEVVNELRNWGVWYTNTLGLDGFRIDAVKHIKYSFTRDWLEHVRNTTGKNMFAVAEFWKNDIGAIRNYLSKTNWNHSVFDVPLHYNLYNASRSGGNYDMRQIFNGTVVQRHPTHGVTFVDNHDSQPEEALESFVEEWFKPLAYALTLTRDQGYPSVFYGDYYGIPTHGVPAMKSKIDPILEARQKYAYGTQRDYMDHPDVIGWTREGDGVHADSGLATLMSDGPGGSKWMEVGKNNAGEVWYDITGNQTNTVTINKDGWGQFHVSGGSVSIYVQQ

SEQ ID NO: 26275 - protein, 483 aa, Bacillus licheniformis
HHNGTNGTMMQYFEWYLPNDGNHWHRLRSDASNLKDKGITAVWIPPAWKGASQNDVGYGAYDLYDLGEFNQKGTVRTKYGTRNQLQAAVTALKSNGIQVYGDVVMNHKGGADATEWVRAVEVNPSNRNQEVSGDYTIEAWTKFDFPGRGNTHSNFKWRWYHFDGVDWDQSRQLQNKIYKFRGKEWDWEVDTENGNYDYLMYADYDMDHPEVVNELRNWGVWYTNTLGLDGFRIDAVKHIKYSFTRDWLTHVRNTTQKNMFAVAEFWKNDIGAIENYLSNTNWNHSVFDVPLHYNLYNASRSGGNYDMRQIFNGTVVQRHPTHAVTFVDNHDSQPEEALESFVEEWFKPLAYALTLTRDQGYPSVFYGDYYGIPTHGVPAMKSKIDPILEARQKYAYGTQRDYLDHPDVIGWTREGDGVHADSGLATLMSDGPGGSKWMEVGKNNAGEVWYDITGNQTNTVTINKDGWGQFHVSGGSVSIYVQQ

SEQ ID NO: 26276 - protein, 483 aa, Bacillus licheniformis
HHNQTNGTMMQYFEWYLPNDGNHWNRLRSDASNLKDKGITAVWIPPAWKGASQNDVGYGAYDLYDLGEFNQKGTVRTKYGTRNQLQAAVTALKSNGIQVYGDVVMNHKGGADATEWVRAVEVNPSNRNQEVSGDYTIEAWTKFDFPGRGNTHSNFKWRWEHFDGVDWDQSRQLQNKIYKFRGKEWDWEVDEENGNYDYLMYADYDMDHPEVVNELRNWGVWYTNTLGLDGFRIDAVKHIKYSFTRDWLEHVRNTTGKNMFAVAEFWKNDIGAIENYLSKTNWNHSVFDVPLHYNLYNASRSGGNYDMRQIFNGTVVQRHPTHAVTFVDNHDSQPEEALESFVEEWFKPLAYALTLTRDQGYPSVFYGDYYGIPTHGVPAMKSKIDPILEARQKYAYGTQRDYMDHPDVIGWTREGDGVHADSGLATLMSDGPGGSKWMEVGKNNAGEVWYDITGNQTNTVTINKDGWGQFHVSGGSVSIYVQQ

SEQ ID NO: 26277 - protein, 483 aa, Bacillus licheniformis
HHNGTNGTMMQYFEWYLPNDGNHWHRLRSDASNLKDKGITAVWIPPAWKGASQNDVGYGAYDLYDLGEFNQKGTVRTKYGTRNQLQAAVTALKSNGIQVYGDVVMNHKGGADATEWVRAVEVNPSNRNQEVSGDYTIEAWTKFDFPGRGNTHSNFKWRWWHFDGVDWDQSRQLQNKIYKFRGKEWDWEVDTENGNYDYLMYADYDMDHPEVVNELRNWGVWYTNTLGLDGFRIDAVKHIKYSFTRDWLTHVRNTTGKNMFAVAEFWKNDIGAIRNYLSKTNWNHSVFDVPLHYNLYNASRSGGNYDMRQIFNGTVVQRHPTHAVTFVDNHDSQPEEALESFVEEWFKPLAYALTLTRDQGYPSVFYGDYYGIPTHGVPAMKSKIDPILEARQKYAYGTQRDYMDHPDVIGWTREGDGVHADSGLATLMSDGPGGSKWMEVGKNNAGEVWYDITGNQTNTVTINKDGWGQFHVSGGSVSIYVQQ

SEQ ID NO: 26278 - protein, 483 aa, Bacillus licheniformis
HHNGTNGTMMQYFEWYLPNDGNHWHRLRSDASNLKDKGITAVWIPPAWKGASQNDVGYGAYDLYDLGEFNQKGTVRTKYGTRNQLQAAVTALKSNGIQVYGDVVMNHKGGADATEWVRAVEVNPSNRNQEVSGDYTIEAWTKFDFPGRGNTHSNFKWRWWHFDGVDWDQSRQLQNKIYKFRGKGWDWEVDTENGNYDYLMYADYDMDHPEVVNELRNWGVWYTNTLGLDGFRIDAVKHIKYSFTRDWLEHVRNTTGKNMFAVAEFWKNDIGAIENYLSKTNWNHSVFDVPLHYNLYNASRSGGNYDMRQIFNGTVVQRHPTHAVTFVDNHDSQPEEALESFVEEWFKPLAYALTLTRDQGYPSVFYGDYYGIPTHGVPAMKSKIDPILEARQKYAYGTQRDYLDHPDVIGWTREGDGVHADSGLATLMSDGPGGSKWMEVGKNNAGEVWYDITGNQTNTVTINKDGWGQFHVSGGSVSIYVQQ

SEQ ID NO: 26279 - protein, 483 aa, Bacillus licheniformis
HHNQTNGTMMQYFEWYLPNDGNHWNRLRSDASNLKDKGITAVWIPPAWKGASQNDVGYGAYDLYDLGEFNQKGTVRTKYGTRNQLQAAVTALKSNGIQVYGDVVMNHKGGADATEWVRAVEVNPSNRNQEVSGDYTIEAWTKFDFPGRGNTHSNFKWRWYHFDGVDWDQSRQLQNKIYKFDGKEWDWEVDEENGNYDYLMYADYDMDHPEVVNELRNWGVWYTNTLGLDGFRIDAVKHIKYSFTRDWLEHVRNTTGKNMFAVAEFWKNDIGAIENYLSKTNWNHSVFDVPLHYNLYNASRSGGNYDMRQIFNGTVVQRHPTHAVTFVDNHDSQPEEALESFVEEWFKPLAYALTLTRDQGYPSVFYGDYYGIPTHGVPAMKSKIDPILEARQKYAYGTQRDYMDHPDVIGWTREGDGVHADSGLATLMSDGPGGSKWMEVGKNNAGEVWYDITGNQTNTVTINKDGWGQFHVSGGSVSIYVQQ

SEQ ID NO: 26280 - protein, 483 aa, Bacillus licheniformis
HHNQTNGTMMQYFEWYLPNDGNHWNRLRSDASNLKDKGITAVWIPPAWKGASQNDVGYGAYDLYDLGEFNQKGTVRTKYGTRNQLQAAVTALKSNGIQVYGDVVMNHKGGADATEWVRAVEVNPSNRNQEVSGDYTIEAWTKFDFPGRGNTHSNFKWRWYHFDGVDWDQSRQLQNKIYKFRGKGWDWEVDTENGNYDYLMYADYDMDHPEVVNELRNWGVWYTNTLGLDGFRIDAVKHIKYSFTRDWLEHVRNTTGKNMFAVAEFWKNDIGAIRNYLSKTNWNHSVFDVPLHYNLYNASRSGGNYDMRQIFNGTVVQRHPTHAVTFVDNHDSQPEEALESFVEEWFKPLAYALTLTRDQGYPSVFYGDYYGIPTHGVPAMKSKIDPILEARQKYAYGTQRDYMDHPDVIGWTREGDGVHADSGLATLMSDGPGGSKWMEVGKNNAGEVWYDITGNQTNTVTINKDGWGQFHVSGGSVSIYVQQ

SEQ ID NO: 26281 - protein, 483 aa, Bacillus licheniformis
HHNQTNGTMMQYFEWYLPNDGNHWHRLRSDASNLKDKGITAVWIPPAWKGASQNDVGYGAYDLYDLGEFNQKGTVRTKYGTRNQLQAAVTALKSNGIQVYGDVVMNHKGGADATEWVRAVEVNPSNRNQEVSGDYTIEAWTKFDFPGRGNTHSNFKWRWWHFDGVDWDQSRQLQNKIYKFRGKGWDWEVDTENGNYDYLMYADYDMDHPEVVNELRNWGVWYTNTLGLDGFRIDAVKHIKYSFTRDWLEHVRNTTGKNMFAVAEFWKNDIGAIENYLSKTNWNHSVFDVPLHYNLYNASRSGGNYDMRQIFNGTVVQRHPTHAVTFVDNHDSQPEEALESFVEEWFKPLAYALTLTRDQGYPSVFYGDYYGIPTHGVPAMKSKIDPILEARQKYAYGTQRDYLDHPDVIGWTREGDGVHADSGLATLMSDGPGGSKWMEVGKNNAGEVWYDITGNQTGTVTINKDGWGQFHVSGGSVSIYVQQ

SEQ ID NO: 26282 - protein, 483 aa, Bacillus licheniformis
HHNQTNGTMMQYFEWYLPNDGNHWHRLRSDASNLKDKGITAVWIPPAWKGASQNDVGYGAYDLYDLGEFNQKGTVRTKYGTRNQLQAAVTALKSNGIQVYGDVVMNHKGGADATEWVRAVEVNPSNRNQEVSGDYTIEAWTKFDFPGRGNTHSNFKWRWYHFDGVDWDQSRQLQNKIYKFRGKGWDWEVDTENGNYDYLMYADYDMDHPEVVNELRNWGVWYTNTLGLDGFRIDAVKHIKYSFTRDWLTHVRNTTGKNMFAVAEFWKNDIGAIENYLSKTNWNHSVFDVPLHYNLYNASRSGGNYDMRQIFNGTVVQRHPTHGVTFVDNHDSQPEEALESFVEEWFKPLAYALTLTRDQGYPSVFYGDYYGIPTHGVPAMKSKIDPILEARQKYAYGTQRDYLDHPDVIGWTREGDGVHADSGLATLMSDGPGGSKWMEVGKNNAGEVWYDITGNQTNTVTINKDGWGQFHVSGGSVSIYVQQ

SEQ ID NO: 26283 - protein, 483 aa, Bacillus licheniformis
HHNQTNGTMMQYFEWYLPNDGNHWNRLRSDASNLKDKGITAVWIPPAWKGASQNDVGYGAYDLYDLGEFNQKGTVRTKYGTRNQLQAAVTALKSNGIQVYGDVVMNHKGGADATEWVRAVEVNPSNRNQEVSGDYEIEAWTKFDFPGRGNTHSNFKWRWYHFDGVDWDQSRQLQNKIYKFRGKEWDWEVDEENGNYDYLMYADYDMDHPEVVNELRNWGVWYTNTLGLDGFRIDAVKHIKYSFTRDWLEHVRNTTGKNMFAVAEFWKNDIGAIENYLSKTNWNHSVFDVPLHYNLYNASRSGGNYDMRQIFNGTVVQRHPTHAVTFVDNHDSQPEEALESFVEEWFKPLAYALTLTRDQGYPSVFYGDYYGIPTHGVPAMKSKIDPILEARQKYAYGTQRDYMDHPDVIGWTREGDGVHADSGLATLMSDGPGGSKWMEVGKNNAGEVWYDITGNQTNTVTINKDGWGQFHVSGGSVSIYVQQ

SEQ ID NO: 26284 - protein, 483 aa, Bacillus licheniformis
HHNQTNGTMMQYFEWYLPNDGNHWDRLRSDASNLKDKGITAVWIPPAWKGASQNDVGYGAYDLYDLGEFNQKGTVRTKYGTRNQLQAAVTALKSNGIQVYGDVVMNHKGGADATEWVRAVEVNPSNRNQEVSGDYTIEAWTKFDFPGRGNTHSNFKWRWYHFDGVDWDQSRQLQNKIYKFRGKEWDWEVDEENGNYDYLMYADYDMDHPEVVNELRNWGVWYTNTLGLDGFRIDAVKHIKYSFTRDWLEHVRNTTGKNMFAVAEFWKNDIGAIENYLSKTNWNHSVFDVPLHYNLYNASRSGGNYDMRQIFNGTVVQRHPTHAVTFVDNHDSQPEEALESFVEEWFKPLAYALTLTRDQGYPSVFYGDYYGIPTHGVPAMKSKIDPILEARQKYAYGTQRDYMDHPDVIGWTREGDGVHADSGLATLMSDGPGGSKWMEVGKNNAGEVWYDITGNQTNTVTINKDGWGQFHVSGGSVSIYVQQ

SEQ ID NO: 26285 - protein, 483 aa, Bacillus licheniformis
HHNQTNGTMMQYFEWYLPNDGNHWNRLRSDASNLKDKGITAVWIPPAWKGASQNDVGYGAYDLYDLGEFNQKGTVRTKYGTRNQLQAAVTALKSNGIQVWGDVVMNHKGGADATEWVRAVEVNPSNRNQEVSGDYTIEAWTKFDFPGRGNTHSNFKWRWYHFDGVDWDQSRQLQNKIYKFRGKEWDWEVDEENGNYDYLMYADYDMDHPEVVNELRNWGVWYTNTLGLDGFRIDAVKHIKYSFTRDWLEHVRNTTGKNMFAVAEFWKNDIGAIENYLSKTNWNHSVFDVPLHYNLYNASRSGGNYDMRQIFNGTVVQRHPTHAVTFVDNHDSQPEEALESFVEEWFKPLAYALTLTRDQGYPSVFYGDYYGIPTHGVPAMKSKIDPILEARQKYAYGTQRDYMDHPDVIGWTREGDGVHADSGLATLMSDGPGGSKWMEVGKNNAGEVWYDITGNQTNTVTINKDGWGQFHVSGGSVSIYVQQ

SEQ ID NO: 26286 - protein, 483 aa, Bacillus licheniformis
HHNQTNGTMMQYFEWYLPNDGNHWNRLRSDASNLKDKGITAVWIPPAWKGASQNDVGYGAYDLYDLGEFNQKGTVRTKYGTRNQLQAAVTALKSNGIQVYGDVVMNHKGGADATEWVRAVEVNPSNRNQEVSGDDTIEAWTKFDFPGRGNTHSNFKWRWYHFDGVDWDQSRQLQNKIYKFRGKEWDWEVDEENGNYDYLMYADYDMDHPEVVNELRNWGVWYTNTLGLDGFRIDAVKHIKYSFTRDWLEHVRNTTGKNMFAVAEFWKNDIGAIENYLSKTNWNHSVFDVPLHYNLYNASRSGGNYDMRQIFNGTVVQRHPTHAVTFVDNHDSQPEEALESFVEEWFKPLAYALTLTRDQGYPSVFYGDYYGIPTHGVPAMKSKIDPILEARQKYAYGTQRDYMDHPDVIGWTREGDGVHADSGLATLMSDGPGGSKWMEVGKNNAGEVWYDITGNQTNTVTINKDGWGQFHVSGGSVSIYVQQ

SEQ ID NO: 26287 - protein, 483 aa, Bacillus licheniformis
HHNQTNGTMMQYFEWYLPNDGNHWNRLRSDASNLKDKGITAVWIPPAWKGASQNDVGYGAYDLYDLGEFNQKGTVRTKYGTRNQLQAAVTALKSNGIQVYGDVVMNHKGGADATEWVRAVEVNPSNRNQEVSGDYTIEAWTKFDFPGRGNTHSNFKWRWYHFDGVDWDQSRQLQNKIYKFRGKEWDWEVDEENGNYDYLMYADYDMDHPEVVNELRNWGVWYTNTLGLDGFRIDAVKHIKYSFTRDWLEHVRNTTGKNMFAVAEFWKNDIGAIENYLSKTNWNHSVFDVPLHYNLYNASRSGGNYDMRQIFNGTVVQRHPTHAVTFVDNHDSQPEEALESFVEEWFKPLAYALTLTRDQGNPSVFYGDYYGIPTHGVPAMKSKIDPILEARQKYAYGTQRDYMDHPDVIGWTREGDGVHADSGLATLMSDGPGGSKWMEVGKNNAGEVWYDITGNQTNTVTINKDGWGQFHVSGGSVSIYVQQ

SEQ ID NO: 26288 - protein, 483 aa, Bacillus licheniformis
HHNGTNGTMMQYFEWYLPNDGNHWHRLRSDASNLKDKGITAVWIPPAWKGASQNDVGYGAYDLYDLGEFNQKGTVRTKYGTRNQLQAAVTALKSNGIQVYGDVVMNHKGGADATEWVRAVEVNPSNRNQEVSGDYTIEAWTKFDFPGRGNTHSNFKWRWWHFDGVDWDQSRQLQNKIYKFRGKEWDWEVDTENGNYDYLMYADYDMDHPEVVNELRNWGVWYTNTLGLDGFRIDAVKHIKYSFTRDWLTHVRNTTGKNMFAVAEFWKNDIGAIRNYLSKTNWNHSVFDVPLHYNLYNASRSGGNYDMRQIFNGTVVQRHPTHAVTFVDNHDSQPEEALESFVEEWFKPLAYALTLTRDQGYPSVFYGDYYGIPTHGVPAMKSKIDPILEARQKYAYGTQRDYLDHPDVIGWTREGDGVHADSGLATLMSDGPGGSKWMEVGKNNAGEVWYDITGNQTNTVTINKDGWGQFHVSGGSVSIYVQQ

SEQ ID NO: 26289 - protein, 483 aa, Alicyclobacillus
HHNGTNGTMMQYFEWYLPNDGNHWNRLRSDASNLKDKGISAVWIPPAWKGASQNDVGYGAYDLYDLGEFNQKGTIRTKYGTRNQLQAAVNALKSNGIQVYGDVVMNHKGGADATEMVKAVEVNPNNRNQEVSGEYTIEAWTKFDFPGRGNTHSNFKWRWYHFDGVDWDQSRKLNNRIYKFRGKGWDWEVDTEFGNYDYLMYADIDMDHPEVVNELRNWGVWYTNTLGLDGFRIDAVKHIKYSFTRDWINHVRSATGKNMFAVAEFWKNDLGAIENYLNKTNWNHSVFDVPLHYNLYNASKSGGNYDMRQIFNGTVVQKHPMHAVTFVDNHDSQPEEALESFVEEWFKPLAYALTLTREQGYPSVFYGDYYGIPTHGVPAMKSKIDPILEARQKYAYGRQHDYLDNQDVIGWTREGDSAHAGSGLATVMSDGPGGSKTMYVGTAHAGQVFKDITGNRTDTVTINSAGNGTFPCNGGSVSIWVKQ

SEQ ID NO: 26290 - protein, 483 aa, Bacillus licheniformis
HHNGTNGTMMQYFEWYLPNDGNHWHRLRSDASNLKDKGITAVWIPPAWKGASQNDVGYGAYDLYDLGEFNQKGTVRTKYGTRNQLQAAVTALKSNGIQVWGDVVMNHKGGADATEWVRAVEVNPSNRNQEVSGDYTIEAWTKFDFPGRGNTHSNFKWRWYHFDGVDWDQSRQLQNKIYKFQGKEWDWEVDEENGNYDYLMYADYDMDHPEVVNELRNWGVWYTNTLGLDGFRIDAVKHIKYSFTRDWLTHVRNTTGKNMFAVAEFWKNDIGAIENYLSKTNWNHSVFDVPLHYNLYNASRSGGNYDMRQIFNGTVVQRHPTHAVTFVDNHDSQPEEALESFVEEWFKPLAYALTLTRDQGYPSVFYGDYYGIPTHGVPAMKSKIDPILEARQKYAYGTQRDYLDHPDVIGWTREGDGVHADSGLATLMSDGPGGSKWMEVGKNNAGEVWYDITGNQTNTVTINKDGWGQFHVSGGSVSIYVQQ

SEQ ID NO: 26291 - protein, 483 aa, Bacillus licheniformis
HHNQTNGTMMQYFEWYLPNDGNHWHRLRSDASNLKDKGITAVWIPPAWKGASQNDVGYGAYDLYDLGEFNQKGTVRTKYGTRNQLQAAVTALKSNGIQVYGDVVMNHKGGADATEWVRAVEVNPSNRNQEVSGDYTIEAWTKFDFPGRGNTHSNFKWRWWHFDGVDWDQSRQLQNRIYKFRGKEWDWEVDEENGNYDYLMYADYDMDHPEVVNELRNWGVWYTNTLGLDGFRIDAVKHIKYSFTRDWLTHVRNTTGKNMFAVAEFWKNDIGAIRNYLSKTNWNHSVFDVPLHYNLYNASRSGGNYDMRQIFNGTVVQRHPTHAVTFVDNHDSQPEEALESFVEEWFKPLAYALTLTRDQGYPSVFYGDYYGIPTHGVPAMKSKIDPILEARQKYAYGTQRDYLDHPDVIGWTREGDGVHADSGLATLMSDGPGGSKWMEVGKNNAGEVWYDITGNQTNTVTINKDGWGQFHVSGGSVSIYVQQ

SEQ ID NO: 26292 - protein, 483 aa, Bacillus licheniformis
HHNQTNGTMMQYFEWYLPNDGNHWNRLRSDASNLKDKGITAVWIPPAWKGASQNDVGYGAYDLYDLGEFNQKGTVRTKYGTRNQLQAAVTALKSNGIQVYGDVVMNHKGGADATEWVRAVEVNPSNRNQEVSGDYTIEAWTKFDFPGRGNTHSNFKWRWWHFDGVDWDQSRQLQNRIYKFRGKEWDWEVDTENGNYDYLMYADYDMDHPEVVNELRNWGVWYTNTLGLDGFRIDAVKHIKYSFTRDWLEHVRNTTGKNMFAVAEFWKNDIGAIRNYLSKTNWNHSVFDVPLHYNLYNASRSGGNYDMRQIFNGTVVQRHPTHAVTFVDNHDSQPEEALESFVEEWFKPLAYALTLTRDQGYPSVFYGDYYGIPTHGVPAMKSKIDPILEARQKYAYGTQRDYMDHPDVIGWTREGDGVHADSGLATLMSDGPGGSKWMEVGKNNAGEVWYDITGNQTNTVTINKDGWGQFHVSGGSVSIYVQQ

SEQ ID NO: 26293 - protein, 483 aa, Bacillus licheniformis
HHNGTNGTMMQYFEWYLPNDGNHWHRLRSDASNLKDKGITAVWIPPAWKGASQNDVGYGAYDLYDLGEFNQKGTVRTKYGTRNQLQAAVTALKSNGIQVWGDVVMNHKGGADATEWVRAVEVNPSNRNQEVSGDYTIEAWTKFDFPGRGNTHSNFKWRWYHFDGVDWDQSRQLQNKIYKFRGKEWDWEVDTENGNYDYLMYADYDMDHPEVVNELRNWGVWYTNTLGLDGFRIDAVKHIKYSFTRDWLTHVRNTTGKNMFAVAEFWKNDIGAIENYLSKTNWNHSVFDVPLHYNLYNASRSGGNYDMRQIFNGTVVQRHPTHAVTFVDNHDSQPEEALESFVEEWFKPLAYALTLTRDQGEPSVFYGDYYGIPTHGVPAMKSKIDPILEARQKYAYGTQRDYLDHPDVIGWTREGDGVHADSGLATLMSDGPGGSKWMEVGKNNAGEVWYDITGNQTNTVTINKDGWGQFHVSGGSVSIYVQQ

SEQ ID NO: 26294 - protein, 483 aa, Bacillus licheniformis
HHNGTNGTMMQYFEWYLPNDGNHWHRLRSDASNLKDKGITAVWIPPAWKGASQNDVGYGAYDLYDLGEFNQKGTVRTKYGTRNQLQAAVTALKSNGIQVYGDVVMNHKGGADATEWVRAVEVNPSNRNQEVSGDYTIEAWTKFDFPGRGNTHSNFKWRWYHFDGVDWDQSRQLQNKIYKFRGKEWDWEVDEENGNYDYLMYADYDMDHPEVVNELRNWGVWYTNTLGLDGFRIDAVKHIKYSFTRDWLTHVRNTTGKNMFAVAEFWKNDIGAIENYLSNTNWNHSVFDVPLHYNLYNASRSGGNYDMRQIFNGTVVQRHPTHAVTFVDNHDSQPEEALESFVEEWFKPLAYALTLTRDQGEPSVFYGDYYGIPTHGVPAMKSKIDPILEARQKYAYGTQRDYLDHPDVIGWTREGDGVHADSGLATLMSDGPGGSKWMEVGKNNAGEVWYDITGNQTNTVTINKDGWGQFHVSGGSVSIYVQQ

SEQ ID NO: 26295 - protein, 483 aa, Bacillus licheniformis
HHNQTNGTMMQYFEWYLPNDGNHWNRLRSDASNLKDKGITAVWIPPAWKGASQNDVGYGAYDLYDLGEFNQKGTVRTKYGTRNQLQAAVTALKSNGIQVYGDVVMNHKGGADATEWVRAVEVNPSNRNQEVSGDYTIEAWTKFDFPGRGNTHSNFKWRWYHFDGVDWDQSRQLQNKIYKFRGKEWDWEVDTENGNYDYLMYADYDMDHPEVVNELRNWGVWYTNTLGLDGFRIDAVKHIKYSFTRDWLEHVRNTTGKNMFAVAEFWKNDIGAIRNYLSKTNWNHSVFDVPLHYNLYNASRSGGNYDMRQIFNGTVVQRHPTHAVTFVDNHDSQPEEALESFVEEWFKPLAYALTLTRDQGYPSVFYGDYYGIPTHGVPAMKSKIDPILEARQKYAYGTQRDYMDHPDVIGWTREGDGVHADSGLATLMSDGPGGSKWMEVGKNNAGEVWYDITGNQTNTVTINKDGWGQFHVSGGSVSIYVQQ

SEQ ID NO: 26296 - protein, 483 aa, Bacillus licheniformis
HHNQTNGTMMQYFEWYLPNDGNHWHRLRSDASNLKDKGITAVWIPPAWKGASQNDVGYGAYDLYDLGEFNQKGTVRTKYGTRNQLQAAVTALKSNGIQVYGDVVMNHKGGADATEWVRAVEVNPSNRNQEVSGDYTIEAWTKFDFPGRGNTHSNFKWRWWHFDGVDWDQSRQLQNRIYKFRGKEWDWEVDTENGNYDYLMYADIDMDHPEVVNELRNWGVWYTNTLGLDGFRIDAVKHIKYSFTRDWLTHVRNTTGKNMFAVAEFWKNDIGAIENYLSKTNWNHSVFDVPLHYNLYNASRSGGNYDMRQIFNGTVVQRHPTHGVTFVDNHDSQPEEALESFVEEWFKPLAYALTLTRDQGYPSVFYGDYYGIPTHGVPAMKSKIDPILEARQKYAYGTQRDYLDHPDVIGWTREGDGVHADSGLATLMSDGPGGSKWMEVGKNNAGEVWYDITGNQTNTVTINKDGWGQFHVSGGSVSIYVQQ

SEQ ID NO: 26297 - protein, 483 aa, Bacillus licheniformis
HHNQTNGTMMQYFEWYLPNDGNHWNRLRSDASNLKDKGITAVWIPPAWKGASQNDVGYGAYDLYDLGEFNQKGTVRTKYGTRNQLQAAVTALKSNGIQVYGDVVMNHKGGADATEWVRAVEVNPSNRNQEVSGDYTIEAWTKFDFPGRGNTHSNFKWRWYHFDGVDWDQSRQLQNKIYKFRGKEWDWEVDTENGNYDYLMYADIDMDHPEVVNELRNWGVWYTNTLGLDGFRIDAVKHIKYSFTRDWLEHVRNTTGKNMFAVAEFWKNDIGAIRNYLSKTNWNHSVFDVPLHYNLYNASRSGGNYDMRQIFNGTVVQRHPTHAVTFVDNHDSQPEEALESFVEEWFKPLAYALTLTRDQGYPSVFYGDYYGIPTHGVPAMKSKIDPILEARQKYAYGTQRDYMDHPDVIGWTREGDGVHADSGLATLMSDGPGGSKWMEVGKNNAGEVWYDITGNQTNTVTINKDGWGQFHVSGGSVSIYVQQ

SEQ ID NO: 26298 - protein, 483 aa, Bacillus licheniformis
HHNQTNGTMMQYFEWYLPNDGNHWHRLRSDASNLKDKGITAVWIPPAWKGASQNDVGYGAYDLYDLGEFNQKGTVRTKYGTRNQLQAAVTALKSNGIQVYGDVVMNHKGGADATEWVRAVEVNPSNRNQEVSGDYTIEAWTKFDFPGRGNTHSNFKWRWWHFDGVDWDQSRQLQNRIYKFRGKEWDWEVDTENGNYDYLMYADYDMDHPEVVNELRNWGVWYTNTLGLDGFRIDAVKHIKYSFTRDWLTHVRNTTGKNMFAVAEFWKNDIGAIENYLSKTNWNHSVFDVPLHYNLYNASRSGGNYDMRQIFNGTVVQRHPTHGVTFVDNHDSQPEEALESFVEEWFKPLAYALTLTRDQGYPSVFYGDYYGIPTHGVPAMKSKIDPILEARQKYAYGTQRDYMDHPDVIGWTREGDGVHADSGLATLMSDGPGGSKWMEVGKNNAGEVWYDITGNQTNTVTINKDGWGQFHVSGGSVSIYVQQ

SEQ ID NO: 26299 - protein, 483 aa, Bacillus licheniformis
HHNGTNGTMMQYFEWYLPNDGNHWHRLRSDASNLKDKGITAVWIPPAWKGASQNDVGYGAYDLYDLGEFNQKGTVRTKYGTRNQLQAAVTALKSNGIQVYGDVVMNHKGGADATEWVRAVEVNPSNRNQEVSGDYTIEAWTKFDFPGRGNTHSNFKWRWWHFDGVDWDQSRQLQNKIYKFRGKEWDWEVDEENGNYDYLMYADYDMDHPEVVNELRNWGVWYTNTLGLDGFRIDAVKHIKYSFTRDWLEHVRNTTGKNMFAVAEFWKNDIGAIENYLSKTNWNHSVFDVPLHYNLYNASRSGGNYDMRQIFNGTVVQRHPTHAVTFVDNHDSQPEEALESFVEEWFKPLAYALTLTRDQGYPSVFYGDYYGIPTHGVPAMKSKIDPILEARQKYAYGTQRDYMDHPDVIGWTREGDGVHADSGLATLMSDGPGGSKWMEVGKNNAGEVWYDITGNQTNTVTINKDGWGQFHVSGGSVSIYVQQ

SEQ ID NO: 26300 - protein, 483 aa, Bacillus licheniformis
HHNGTNGTMMQYFEWYLPNDGNHWHRLRSDASNLKDKGITAVWIPPAWKGASQNDVGYGAYDLYDLGEFNQKGTVRTKYGTRNQLQAAVTALKSNGIQVYGDVVMNHKGGADATEWVRAVEVNPSNRNQEVSGDTTIEAWTKFDFPGRGNTHSNFKWRWYHFDGVDWDQSRQLQNKIYKFRGKEWDWEVDTENGNYDYLMYADYDMDHPEVVNELRNWGVWYTNTLGLDGFRIDAVKHIKYSFTRDWLTHVRNTTGKNMFAVAEFWKNDIGAIENYLSKTNWNHSVFDVPLHYNLYNASRSGGNYDMRQIFNGTVVQRHPTHAVTFVDNHDSQPEEALESFVEEWFKPLAYALTLTRDQGEPSVFYGDYYGIPTHGVPAMKSKIDPILEARQKYAYGTQRDYLDHPDVIGWTREGDGVHADSGLATLMSDGPGGSKWMEVGKNNAGEVWYDITGNQTNTVTINKDGWGQFHVSGGSVSIYVQQ

SEQ ID NO: 26301 - protein, 483 aa, Bacillus licheniformis
HHNQTNGTMMQYFEWYLPNDGNHWHRLRSDASNLKDKGITAVWIPPAWKGASQNDVGYGAYDLYDLGEFNQKGTVRTKYGTRNQLQAAVTALKSNGIQVYGDVVMNHKGGADATEWVRAVEVNPSNRNQEVSGDYTIEAWTKFDFPGRGNTHSNFKWRWYHFDGVDWDQSRQLQNKIYKFRGKGWDWEVDTENGNYDYLMYADYDMDHPEVVNELRNWGVWYTNTLGLDGFRIDAVKHIKYSFTRDWLEHVRNTTGKNMFAVAEFWKNDIGAIENYLSKTNWNHSVFDVPLHYNLYNASRSGGNYDMRQIFNGTVVQRHPTHAVTFVDNHDSQPEEALESFVEEWFKPLAYALTLTRDQGYPSVFYGDYYGIPTHGVPAMKSKIDPILEARQKYAYGTQRDYLDHPDVIGWTREGDGVHADSGLATLMSDGPGGSKWMEVGKNNAGEVWYDITGNQTNTVTINKDGWGQFHVSGGSVSIYVQQ

SEQ ID NO: 26302 - protein, 483 aa, Bacillus licheniformis
HHNQTNGTMMQYFEWYLPNDGNHWNRLRSDASNLKDKGITAVWIPPAWKGASQNDVGYGAYDLYDLGEFNQKGTVRTKYGTRNQLQAAVTALKSNGIQVYGDVVMNHKGGADATEWVRAVEVNPSNRNQEVSGDYTIEAWTKFDFPGRGNTHSNFKWRWDHFDGVDWDQSRQLQNKIYKFRGKEWDWEVDEENGNYDYLMYADYDMDHPEVVNELRNWGVWYTNTLGLDGFRIDAVKHIKYSFTRDWLEHVRNTTGKNMFAVAEFWKNDIGAIENYLSKTNWNHSVFDVPLHYNLYNASRSGGNYDMRQIFNGTVVQRHPTHAVTFVDNHDSQPEEALESFVEEWFKPLAYALTLTRDQGYPSVFYGDYYGIPTHGVPAMKSKIDPILEARQKYAYGTQRDYMDHPDVIGWTREGDGVHADSGLATLMSDGPGGSKWMEVGKNNAGEVWYDITGNQTNTVTINKDGWGQFHVSGGSVSIYVQQ

SEQ ID NO: 26303 - protein, 483 aa, Bacillus licheniformis
HHNQTNGTMMQYFEWYLPNDGNHWHRLRSDASNLKDKGITAVWIPPAWKGASQNDVGYGAYDLYDLGEFNQKGTVRTKYGTRNQLQAAVTALKSNGIQVYGDVVMNHKGGADATEWVRAVEVNPSNRNQEVSGDYTIEAWTKFDFPGRGNTHSNFKWRWYHFDGVDWDQSRQLQNKIYKFRGKEWDWEVDTENGNYDYLMYADIDMDHPEVVNELRNWGVWYTNTLGLDGFRIDAVKHIKYSFTRDWLEHVRNTTGKNMFAVAEFWKNDIGAIENYLSKTNWNHSVFDVPLHYNLYNASRSGGNYDMRQIFNGTVVQRHPTHAVTFVDNHDSQPEEALESFVEEWFKPLAYALTLTRDQGYPSVFYGDYYGIPTHGVPAMKSKIDPILEARQKYAYGTQRDYMDHPDVIGWTREGDGVHADSGLATLMSDGPGGSKWMEVGKNNAGEVWYDITGNQTNTVTINKDGWGQFHVSGGSVSIYVQQ

SEQ ID NO: 26304 - protein, 483 aa, Bacillus licheniformis
HHNQTNGTMMQYFEWYLPNDGNHWNRLRSDASNLKDKGITAVWIPPAWKGASQNDVGYGAYDLYDLGEFNQKGTVRTKYGTRNQLQAAVTALKSNGIQVYGDVVMNHKGGADATEWVRAVEVNPSNRNQEVSGDYTIEAWTKFDFPGRGNTHSNFKWRWYHFDGVDWDQSRQLQNKIYKFRGKEWDWEVDEENGNYDYLMYADYDMDHPEVVNELRNWGVWYTNTLGLDGFRIDAVKHIKYSFTRDWLEHVRNTTGKNMFAVAEFWKNDIGAIENYLSKTNWNHSVFDVPLHYNLYNASRSGGNYDMRQIFNGTVVQRHPTHAVTFVDNHDSQPEEALESFVEEWFKPLAYALTLTRDQGHPSVFYGDYYGIPTHGVPAMKSKIDPILEARQKYAYGTQRDYMDHPDVIGWTREGDGVHADSGLATLMSDGPGGSKWMEVGKNNAGEVWYDITGNQTNTVTINKDGWGQFHVSGGSVSIYVQQ

SEQ ID NO: 26305 - protein, 483 aa, Bacillus licheniformis
HHNQTNGTMMQYFEWYLPNDGNHWHRLRSDASNLKDKGITAVWIPPAWKGASQNDVGYGAYDLYDLGEFNQKGTVRTKYGTRNQLQAAVTALKSNGIQVYGDVVMNHKGGADATEWVRAVEVNPSNRNQEVSGDYTIEAWTKFDFPGRGNTHSNFKWRWYHFDGVDWDQSRQLQNKIYKFRGKEWDWEVDTENGNYDYLMYADYDMDHPEVVNELRNWGVWYTNTLGLDGFRIDAVKHIKYSFTRDWLTHVRNTTGKNMFAVAEFWKNDIGAIRNYLSKTNWNHSVFDVPLHYNLYNASRSGGNYDMRQIFNGTVVQRHPTHAVTFVDNHDSQPEEALESFVEEWFKPLAYALTLTRDQGYPSVFYGDYYGIPTHGVPAMKSKIDPILEARQKYAYGTQRDYMDHPDVIGWTREGDGVHADSGLATLMSDGPGGSKWMEVGKNNAGEVWYDITGNQTNTVTINKDGWGQFHVSGGSVSIYVQQ

SEQ ID NO: 26306 - protein, 483 aa, Bacillus licheniformis
HHNGTNGTMMQYFEWYLPNDGNHWHRLRSDASNLKDKGITAVWIPPAWKGASQNDVGYGAYDLYDLGEFNQKGTVRTKYGTRNQLQAAVTALKSNGIQVWGDVVMNHKGGADATEWVRAVEVNPSNRNQEVSGDYTIEAWTKFDFPGRGNTHSNFKWRWYHFDGVDWDQSRQLQNKIYKFRGKEWDWEVDTENGNYDYLMYADYDMDHPEVVNELRNWGVWYTNTLGLDGFRIDAVKHIKYSFTRDWLTHVRNTTQKNMFAVAEFWKNDIGAIENYLSKTNWNHSVFDVPLHYNLYNASRSGGNYDMRQIFNGTVVQRHPTHAVTFVDNHDSQPEEALESFVEEWFKPLAYALTLTRDQGYPSVFYGDYYGIPTHGVPAMKSKIDPILEARQKYAYGTQRDYLDHPDVIGWTREGDGVHADSGLATLMSDGPGGSKWMEVGKNNAGEVWYDITGNQTNTVTINKDGWGQFHVSGGSVSIYVQQ

SEQ ID NO: 26307 - protein, 483 aa, Bacillus licheniformis
HHNGTNGTMMQYFEWYLPNDGNHWHRLRSDASNLKDKGITAVWIPPAWKGASQNDVGYGAYDLYDLGEFNQKGTVRTKYGTRNQLQAAVTALKSNGIQVYGDVVMNHKGGADATEWVRAVEVNPSNRNQEVSGDYTIEAWTKFDFPGRGNTHSNFKWRWYHFDGVDWDQSRQLQNKIYKFRGKEWDWEVDTENGNYDYLMYADYDMDHPEVVNELRNWGVWYTNTLGLDGFRIDAVKHIKYSFTRDWLTHVRNTTQKNMFAVAEFWKNDIGAIENYLSKTNWNHSVFDVPLHYNLYNASRSGGNYDMRQIFNGTVVQRHPTHAVTFVDNHDSQPEEALESFVEEWFKPLAYALTLTRDQGEPSVFYGDYYGIPTHGVPAMKSKIDPILEARQKYAYGTQRDYLDHPDVIGWTREGDGVHADSGLATLMSDGPGGSKWMEVGKNNAGEVWYDITGNQTNTVTINKDGWGQFHVSGGSVSIYVQQ

SEQ ID NO: 26308 - protein, 483 aa, Bacillus licheniformis
HHNQTNGTMMQYFEWYLPNDGNHWNRLRSDASNLKDKGITAVWIPPAWKGASQNDVGYGAYDLYDLGEFNQKGTVRTKYGTRNQLQAAVTALKSNGIQVYGDVVMNHKGGADATEWVRAVEVNPSNRNQEVSGDYTIEAWTKFDFPGRGNTHSNFKWRWWHFDGVDWDQSRQLQNKIYKFRGKEWDWEVDTENGNYDYLMYADIDMDHPEVVNELRNWGVWYTNTLGLDGFRIDAVKHIKYSFTRDWLEHVRNTTGKNMFAVAEFWKNDIGAIENYLSKTNWNHSVFDVPLHYNLYNASRSGGNYDMRQIFNGTVVQRHPTHAVTFVDNHDSQPEEALESFVEEWFKPLAYALTLTRDQGYPSVFYGDYYGIPTHGVPAMKSKIDPILEARQKYAYGTQRDYMDHPDVIGWTREGDGVHADSGLATLMSDGPGGSKWMEVGKNNAGEVWYDITGNQTNTVTINKDGWGQFHVSGGSVSIYVQQ

SEQ ID NO: 26309 - protein, 483 aa, Bacillus licheniformis
HHNQTNGTMMQYFEWYLPNDGNHWNRLRSDASNLKDKGITAVWIPPAWKGASQNDVGYGAYDLYDLGEFNQKGTVRTKYGTRNQLQAAVTALKSNGIQVYGDVVMNHKGGADATEWVRAVEVNPSNRNQEVSGDYTIEAWTKFDFPGRGNTHSNFKWRWWHFDGVDWDQSRQLQNKIYKFRGKEWDWEVDTENGNYDYLMYADYDMDHPEVVNELRNWGVWYTNTLGLDGFRIDAVKHIKYSFTRDWLEHVRNTTGKNMFAVAEFWKNDIGAIENYLSKTNWNHSVFDVPLHYNLYNASRSGGNYDMRQIFNGTVVQRHPTHAVTFVDNHDSQPEEALESFVEEWFKPLAYALTLTRDQGYPSVFYGDYYGIPTHGVPAMKSKIDPILEARQKYAYGTQRDYLDHPDVIGWTREGDGVHADSGLATLMSDGPGGSKWMEVGKNNAGEVWYDITGNQTNTVTINKDGWGQFHVSGGSVSIYVQQ

SEQ ID NO: 26310 - protein, 485 aa, Bacillus sp.
HHNGTNGTMMQYFEWYLPNDGNHWNRLRSDASNLKDKGISAVWIPPAWKGASQNDVGYGAYDLYDLGEFNQKGTIRTKYGTRNQLQAAVNALKSNGIQVYGDVVMNHKGGADATEMVKAVEVNPNNRNQEVSGEYTIEAWTKFDFPGRGNTHSNFKWRWYHFDGVDWDQSRKLNNRIYKFRGDGKGWDWEVDTEFGNYDYLMYADIDMDHPEVVNELRNWGVWYTNTLGLDGFRIDAVKHIKYSFTRDWINHVRSATGKNMFAVAEFWKNDLGAIENYLNKTNWNHSVFDVPLHYNLYNASKSGGNYDMRQIFNGTVVQKHPMHAVTFVDNHDSQPEEALESFVEEWFKPLAYALTLTREQGYPSVFYGDYYGIPTHGVPAMKSKIDPILEARQKYAYGRQHDYLDNQDVIGWTREGDSAHAGSGLATVMSDGPGGSKTMYVGTAHAGQVFKDITGNRTDTVTINSAGNGTFPCNGGSVSIWVKQ

SEQ ID NO: 26311 - protein, 483 aa, Bacillus licheniformis
HHNQTNGTMMQYFEWYLPNDGNHWNRLRSDASNLKDKGITAVWIPPAWKGASQNDVGYGAYDLYDLGEFNQKGTVRTKYGTRNQLQAAVTALKSNGIQVYGDVVMNHKGGADATEWVRAVEVNPSNRNQEVSGDWTIEAWTKFDFPGRGNTHSNFKWRWYHFDGVDWDQSRQLQNKIYKFRGKEWDWEVDEENGNYDYLMYADYDMDHPEVVNELRNWGVWYTNTLGLDGFRIDAVKHIKYSFTRDWLEHVRNTTGKNMFAVAEFWKNDIGAIENYLSKTNWNHSVFDVPLHYNLYNASRSGGNYDMRQIFNGTVVQRHPTHAVTFVDNHDSQPEEALESFVEEWFKPLAYALTLTRDQGYPSVFYGDYYGIPTHGVPAMKSKIDPILEARQKYAYGTQRDYMDHPDVIGWTREGDGVHADSGLATLMSDGPGGSKWMEVGKNNAGEVWYDITGNQTNTVTINKDGWGQFHVSGGSVSIYVQQ

SEQ ID NO: 26312 - protein, 483 aa, Bacillus licheniformis
HHNGTNGTMMQYFEWYLPNDGNHWHRLRSDASNLKDKGITAVWIPPAWKGASQNDVGYGAYDLYDLGEFNQKGTVRTKYGTRNQLQAAVTALKSNGIQVYGDVVMNHKGGADATEWVRAVEVNPSNRNQEVSGDYTIEAWTKFDFPGRGNTHSNFKWRWYHFDGVDWDQSRQLQNKIYKFRGKEWDWEVDTENGNYDYLMYADIDMDHPEVVNELRNWGVWYTNTLGLDGFRIDAVKHIKYSFTRDWLEHVRNTTGKNMFAVAEFWKNDIGAIRNYLSKTNWNHSVFDVPLHYNLYNASRSGGNYDMRQIFNGTVVQRHPTHAVTFVDNHDSQPEEALESFVEEWFKPLAYALTLTRDQGYPSVFYGDYYGIPTHGVPAMKSKIDPILEARQKYAYGTQRDYLDHPDVIGWTREGDGVHADSGLATLMSDGPGGSKWMEVGKNNAGEVWYDITGNQTNTVTINKDGWGQFHVSGGSVSIYVQQ

SEQ ID NO: 26313 - protein, 483 aa, Bacillus licheniformis
HHNGTNGTMMQYFEWYLPNDGNHWHRLRSDASNLKDKGITAVWIPPAWKGASQNDVGYGAYDLYDLGEFNQKGTVRTKYGTRNQLQAAVTALKSNGIQVYGDVVMNHKGGADATEWVRAVEVNPSNRNQEVSGDTTIEAWTKFDFPGRGNTHSNFKWRWYHFDGVDWDQSRQLQNKIYKFRGKEWDWEVDTENGNYDYLMYADYDMDHPEVVNELRNWGVWYTNTLGLDGFRIDAVKHIKYSFTRDWLTHVRNTTQKNMFAVAEFWKNDIGAIENYLSKTNWNHSVFDVPLHYNLYNASRSGGNYDMRQIFNGTVVQRHPTHAVTFVDNHDSQPEEALESFVEEWFKPLAYALTLTRDQGYPSVFYGDYYGIPTHGVPAMKSKIDPILEARQKYAYGTQRDYLDHPDVIGWTREGDGVHADSGLATLMSDGPGGSKWMEVGKNNAGEVWYDITGNQTNTVTINKDGWGQFHVSGGSVSIYVQQ

SEQ ID NO: 26314 - protein, 483 aa, Bacillus licheniformis
HHNQTNGTMMQYFEWYLPNDGNHWYRLRSDASNLKDKGITAVWIPPAWKGASQNDVGYGAYDLYDLGEFNQKGTVRTKYGTRNQLQAAVTALKSNGIQVYGDVVMNHKGGADATEWVRAVEVNPSNRNQEVSGDYTIEAWTKFDFPGRGNTHSNFKWRWYHFDGVDWDQSRQLQNKIYKFRGKEWDWEVDEENGNYDYLMYADYDMDHPEVVNELRNWGVWYTNTLGLDGFRIDAVKHIKYSFTRDWLEHVRNTTGKNMFAVAEFWKNDIGAIENYLSKTNWNHSVFDVPLHYNLYNASRSGGNYDMRQIFNGTVVQRHPTHAVTFVDNHDSQPEEALESFVEEWFKPLAYALTLTRDQGYPSVFYGDYYGIPTHGVPAMKSKIDPILEARQKYAYGTQRDYMDHPDVIGWTREGDGVHADSGLATLMSDGPGGSKWMEVGKNNAGEVWYDITGNQTNTVTINKDGWGQFHVSGGSVSIYVQQ

SEQ ID NO: 26315 - protein, 483 aa, Bacillus licheniformis
HHNQTNGTMMQYFEWYLPNDGNHWNRLRSDASNLKDKGITAVWIPPAWKGASQNDVGYGAYDLYDLGEFNQKGTVRTKYGTRNQLQAAVTALKSNGIQVYGDVVMNHKGGADATEWVRAVEVNPSNRNQEVSGDYTIEAWTKFDFPGRGNTHSNFKWRWWHFDGVDWDQSRQLQNRIYKFRGKEWDWEVDTENGNYDYLMYADYDMDHPEVVNELRNWGVWYTNTLGLDGFRIDAVKHIKYSFTRDWLTHVRNTTGKNMFAVAEFWKNDIGAIRNYLSKTNWNHSVFDVPLHYNLYNASRSGGNYDMRQIFNGTVVQRHPTHGVTFVDNHDSQPEEALESFVEEWFKPLAYALTLTRDQGYPSVFYGDYYGIPTHGVPAMKSKIDPILEARQKYAYGTQRDYLDHPDVIGWTREGDGVHADSGLATLMSDGPGGSKWMEVGKNNAGEVWYDITGNQTNTVTINKDGWGQFHVSGGSVSIYVQQ

SEQ ID NO: 26316 - protein, 483 aa, Bacillus licheniformis
HHNGTNGTMMQYFEWYLPNDGNHWHRLRSDASNLKDKGITAVWIPPAWKGASQNDVGYGAYDLYDLGEFNQKGTVRTKYGTRNQLQAAVTALKSNGIQVYGDVVMNHKGGADATEWVRAVEVNPSNRNQEVSGDYTIEAWTKFDFPGRGNTHSNFKWRWWHFDGVDWDQSRQLQNRIYKFRGKEWDWEVDTENGNYDYLMYADYDMDHPEVVNELRNWGVWYTNTLGLDGFRIDAVKHIKYSFTRDWLEHVRNTTGKNMFAVAEFWKNDIGAIRNYLSKTNWNHSVFDVPLHYNLYNASRSGGNYDMRQIFNGTVVQRHPTHAVTFVDNHDSQPEEALESFVEEWFKPLAYALTLTRDQGYPSVFYGDYYGIPTHGVPAMKSKIDPILEARQKYAYGTQRDYLDHPDVIGWTREGDGVHADSGLATLMSDGPGGSKWMEVGKNNAGEVWYDITGNQTNTVTINKDGWGQFHVSGGSVSIYVQQ

SEQ ID NO: 26317 - protein, 483 aa, Bacillus licheniformis
HHNGTNGTMMQYFEWYLPNDGNHWHRLRSDASNLKDKGITAVWIPPAWKGASQNDVGYGAYDLYDLGEFNQKGTVRTKYGTRNQLQAAVTALKSNGIQVWGDVVMNHKGGADATEWVRAVEVNPSNRNQEVSGDYTIEAWTKFDFPGRGNTHSNFKWRWYHFDGVDWDQSRQLQNKIYKFRGKEWDWEVDEENGNYDYLMYADYDMDHPEVVNELRNWGVWYTNTLGLDGFRIDAVKHIKYSFTRDWLTHVRNTTQKNMFAVAEFWKNDIGAIENYLSKTNWNHSVFDVPLHYNLYNASRSGGNYDMRQIFNGTVVQRHPTHAVTFVDNHDSQPEEALESFVEEWFKPLAYALTLTRDQGYPSVFYGDYYGIPTHGVPAMKSKIDPILEARQKYAYGTQRDYLDHPDVIGWTREGDGVHADSGLATLMSDGPGGSKWMEVGKNNAGEVWYDITGNQTNTVTINKDGWGQFHVSGGSVSIYVQQ

SEQ ID NO: 26318 - protein, 483 aa, Bacillus licheniformis
HHNQTNGTMMQYFEWYLPNDGNHWHRLRSDASNLKDKGITAVWIPPAWKGASQNDVGYGAYDLYDLGEFNQKGTVRTKYGTRNQLQAAVTALKSNGIQVYGDVVMNHKGGADATEWVRAVEVNPSNRNQEVSGDYTIEAWTKFDFPGRGNTHSNFKWRWWHFDGVDWDQSRQLQNKIYKFRGKGWDWEVDTENGNYDYLMYADYDMDHPEVVNELRNWGVWYTNTLGLDGFRIDAVKHIKYSFTRDWLTHVRNTTGKNMFAVAEFWKNDIGAIENYLSKTNWNHSVFDVPLHYNLYNASRSGGNYDMRQIFNGTVVQRHPTHAVTFVDNHDSQPEEALESFVEEWFKPLAYALTLTRDQGYPSVFYGDYYGIPTHGVPAMKSKIDPILEARQKYAYGTQRDYLDHPDVIGWTREGDGVHADSGLATLMSDGPGGSKWMEVGKNNAGEVWYDITGNQTNTVTINKDGWGQFHVSGGSVSIYVQQ

SEQ ID NO: 26319 - protein, 483 aa, Bacillus licheniformis
HHNQTNGTMMQYFEWYLPNDGNHWNRLRSDASNLKDKGITAVWIPPAWKGASQNDVGYGAYDLYDLGEFNQKGTVRTKYGTRNQLQAAVTALKSNGIQVYGDVVMNHKGGADATEWVRAVEVNPSNRNQEVSGDYTIEAWTKFDFPGRGNTHSNFKWRWYHFDGVDWDQSRQLQNKIYKFRDKEWDWEVDEENGNYDYLMYADYDMDHPEVVNELRNWGVWYTNTLGLDGFRIDAVKHIKYSFTRDWLEHVRNTTGKNMFAVAEFWKNDIGAIENYLSKTNWNHSVFDVPLHYNLYNASRSGGNYDMRQIFNGTVVQRHPTHAVTFVDNHDSQPEEALESFVEEWFKPLAYALTLTRDQGYPSVFYGDYYGIPTHGVPAMKSKIDPILEARQKYAYGTQRDYMDHPDVIGWTREGDGVHADSGLATLMSDGPGGSKWMEVGKNNAGEVWYDITGNQTNTVTINKDGWGQFHVSGGSVSIYVQQ

SEQ ID NO: 26320 - protein, 483 aa, Bacillus licheniformis
HHNGTNGTMMQYFEWYLPNDGNHWNRLRSDASNLKDKGITAVWIPPAWKGASQNDVGYGAYDLYDLGEFNQKGTVRTKYGTRNQLQAAVTALKSNGIQVYGDVVMNHKGGADATEWVRAVEVNPSNRNQEVSGDYTIEAWTKFDFPGRGNTHSNFKWRWDHFDGVDWDQSRQLQNRIYKFRGKEWDWEVDTENGNYDYLMYADIDMDHPEVVNELRNWGVWYTDTLGLDGFRIDAVKHIKYSFTRDWLTHVRNTTGKNMFAVAEFWKNDIGAIENYLSKTNWNHSVFDVPLHYNLYNASRSGGNYDMRQIFKGTVVQRHPTHAVTFVDNHDSQPEEALESFVEEWFKPLAYALTLTRDQGYPSVFYGDYYGIPTHGVPAMKSKIDPILEARQKYAYGTQRDYLDHPDVIGWTREGDGVHADSGLATLMSDGPGGSKWMEVGKNNAGEVWYDITGNQTDEVTINKDGWGQFHVSGGSVSIYVQQ

SEQ ID NO: 26321 - protein, 483 aa, Bacillus licheniformis
HHNGTNGTMMQYFEWYLPNDGNHWHRLRSDASNLKDKGITAVWIPPAWKGASQNDVGYGAYDLYDLGEFNQKGTVRTKYGTRNQLQAAVTALKSNGIQVWGDVVMNHKGGADATEWVRAVEVNPSNRNQEVSGDYTIEAWTKFDFPGRGNTHSNFKWRWYHFDGVDWDQSRQLQNKIYKFRGKEWDWEVDTENGNYDYLMYADYDMDHPEVVNELRNWGVWYTNTLGLDGFRIDAVKHIKYSFTRDWLTHVRNTTGKNMFAVAEFWKNDIGAIENYLSNTNWNHSVFDVPLHYNLYNASRSGGNYDMRQIFNGTVVQRHPTHAVTFVDNHDSQPEEALESFVEEWFKPLAYALTLTRDQGYPSVFYGDYYGIPTHGVPAMKSKIDPILEARQKYAYGTQRDYLDHPDVIGWTREGDGVHADSGLATLMSDGPGGSKWMEVGKNNAGEVWYDITGNQTNTVTINKDGWGQFHVSGGSVSIYVQQ

SEQ ID NO: 26322 - protein, 483 aa, Bacillus licheniformis
HHNGTNGTMMQYFEWYLPNDGNHWHRLRSDASNLKDKGITAVWIPPAWKGASQNDVGYGAYDLYDLGEFNQKGTVRTKYGTRNQLQAAVTALKSNGIQVYGDVVMNHKGGADATEWVRAVEVNPSNRNQEVSGDYTIEAWTKFDFPGRGNTHSNFKWRWWHFDGVDWDQSRQLQNKIYKFRGKEWDWEVDTENGNYDYLMYADIDMDHPEVVNELRNWGVWYTNTLGLDGFRIDAVKHIKYSFTRDWLTHVRNTTGKNMFAVAEFWKNDIGAIENYLSKTNWNHSVFDVPLHYNLYNASRSGGNYDMRQIFNGTVVQRHPTHGVTFVDNHDSQPEEALESFVEEWFKPLAYALTLTRDQGYPSVFYGDYYGIPTHGVPAMKSKIDPILEARQKYAYGTQRDYMDHPDVIGWTREGDGVHADSGLATLMSDGPGGSKWMEVGKNNAGEVWYDITGNQTNTVTINKDGWGQFHVSGGSVSIYVQQ

SEQ ID NO: 26323 - protein, 483 aa, Bacillus licheniformis
HHNQTNGTMMQYFEWYLPNDGNHWNRLRSDASNLKDKGITAVWIPPAWKGASQNDVGYGAYDLYDLGEFNQKGTVRTKYGTRNQLQAAVTALKSNGIQVYGDVVMNHKGGADATEWVRAVEVNPSNRNQEVSGDYTIEAWTKFDFPGRGNTHSNFKWRWYHFDGVDWDQSRQLQNKIYKFFGKEWDWEVDEENGNYDYLMYADYDMDHPEVVNELRNWGVWYTNTLGLDGFRIDAVKHIKYSFTRDWLEHVRNTTGKNMFAVAEFWKNDIGAIENYLSKTNWNHSVFDVPLHYNLYNASRSGGNYDMRQIFNGTVVQRHPTHAVTFVDNHDSQPEEALESFVEEWFKPLAYALTLTRDQGYPSVFYGDYYGIPTHGVPAMKSKIDPILEARQKYAYGTQRDYMDHPDVIGWTREGDGVHADSGLATLMSDGPGGSKWMEVGKNNAGEVWYDITGNQTNTVTINKDGWGQFHVSGGSVSIYVQQ

SEQ ID NO: 26324 - protein, 483 aa, Bacillus licheniformis
HHNQTNGTMMQYFEWYLPNDGNHWNRLRSDASNLKDKGITAVWIPPAWKGASQNDVGYGAYDLYDLGEFNQKGTVRTKYGTRNQLQAAVTALKSNGIQVYGDVVMNHKGGADATEWVRAVEVNPSNRNQEVSGDYTIEAWTKFDFPGRGNTHSNFKWRWYHFDGVDWDQSRQLQNKIYKFNGKEWDWEVDEENGNYDYLMYADYDMDHPEVVNELRNWGVWYTNTLGLDGFRIDAVKHIKYSFTRDWLEHVRNTTGKNMFAVAEFWKNDIGAIENYLSKTNWNHSVFDVPLHYNLYNASRSGGNYDMRQIFNGTVVQRHPTHAVTFVDNHDSQPEEALESFVEEWFKPLAYALTLTRDQGYPSVFYGDYYGIPTHGVPAMKSKIDPILEARQKYAYGTQRDYMDHPDVIGWTREGDGVHADSGLATLMSDGPGGSKWMEVGKNNAGEVWYDITGNQTNTVTINKDGWGQFHVSGGSVSIYVQQ

SEQ ID NO: 26325 - protein, 483 aa, Bacillus licheniformis
HHNGTNGTMMQYFEWYLPNDGNHWHRLRSDASNLKDKGITAVWIPPAWKGASQNDVGYGAYDLYDLGEFNQKGTVRTKYGTRNQLQAAVTALKSNGIQVWGDVVMNHKGGADATEWVRAVEVNPSNRNQEVSGDYTIEAWTKFDFPGRGNTHSNFKWRWYHFDGVDWDQSRQLQNKIYKFRGKEWDWEVDEENGNYDYLMYADYDMDHPEVVNELRNWGVWYTNTLGLDGFRIDAVKHIKYSFTRDWLTHVRNTTQKNMFAVAEFWKNDIGAIENYLSKTNWNHSVFDVPLHYNLYNASRSGGNYDMRQIFNGTVVQRHPTHAVTFVDNHDSQPEEALESFVEEWFKPLAYALTLTRDQGYPSVFYGDYYGIPTHGVPAMKSKIDPILEARQKYAYGTQRDYLDHPDVIGWTREGDGVHADSGLATLMSDGPGGSKWMEVGKNNAGEVWYDITGNQTNTVTINKDGWGQFRVSGGSVSIYVQQ

SEQ ID NO: 26326 - protein, 483 aa, Bacillus licheniformis
HHNQTNGTMMQYFEWYLPNDGNHWNRLRSDASNLKDKGITAVWIPPAWKGASQNDVGYGAYDLYDLGEFNQKGTVRTKYGTRNQLQAAVTALKSNGIQVYGDVVMNHKGGADATEWVRAVEVNPSNRNQEVSGDYTIEAWTKFDFPGRGNTHSNFKWRWYHFDGVDWDQSRQLQNKIYKFRGKEWDWEVDEENGNYDYLMYADYDMDHPEVVNELRNWGVWYTNTLGLDGFRIDAVKHIKYSFTRDWLEHVRNTTGKNMFAVAEFWKNDIGAIENYLSKTNWNHSVFDVPLHYNLYNASRSGGNYDMRQIFNGTVVQRHPTHAVTFVDNHDSQPEEALESFVEEWFKPLAYALTLTRDQGEPSVFYGDYYGIPTHGVPAMKSKIDPILEARQKYAYGTQRDYMDHPDVIGWTREGDGVHADSGLATLMSDGPGGSKWMEVGKNNAGEVWYDITGNQTNTVTINKDGWGQFHVSGGSVSIYVQQ

SEQ ID NO: 26327 - protein, 483 aa, Bacillus licheniformis
HHNGTNGTMMQYFEWYLPNDGNHWHRLRSDASNLKDKGITAVWIPPAWKGASQNDVGYGAYDLYDLGEFNQKGTVRTKYGTRNQLQAAVTALKSNGIQVYGDVVMNHKGGADATEWVRAVEVNPSNRNQEVSGDYTIEAWTKFDFPGRGNTHSNFKWRWYHFDGVDWDQSRQLQNKIYKFRGKEWDWEVDTENGNYDYLMYADYDMDHPEVVNELRNWGVWYTNTLGLDGFRIDAVKHIKYSFTRDWLEHVRNTTGKNMFAVAEFWKNDIGAIRNYLSKTNWNHSVFDVPLHYNLYNASRSGGNYDMRQIFNGTVVQRHPTHAVTFVDNHDSQPEEALESFVEEWFKPLAYALTLTRDQGYPSVFYGDYYGIPTHGVPAMKSKIDPILEARQKYAYGTQRDYMDHPDVIGWTREGDGVHADSGLATLMSDGPGGSKWMEVGKNNAGEVWYDITGNQTNTVTINKDGWGQFHVSGGSVSIYVQQ

SEQ ID NO: 26328 - protein, 483 aa, Bacillus licheniformis
HHNGTNGTMMQYFEWYLPNDGNHWHRLRSDASNLKDKGITAVWIPPAWKGASQNDVGYGAYDLYDLGEFNQKGTVRTKYGTRNQLQAAVTALKSNGIQVYGDVVMNHKGGADATEWVRAVEVNPSNRNQEVSGDTTIEAWTKFDFPGRGNTHSNFKWRWYHFDGVDWDQSRQLQNKIYKFRGKEWDWEVDEENGNYDYLMYADYDMDHPEVVNELRNWGVWYTNTLGLDGFRIDAVKHIKYSFTRDWLTHVRNTTQKNMFAVAEFWKNDIGAIENYLSKTNWNHSVFDVPLHYNLYNASRSGGNYDMRQIFNGTVVQRHPTHAVTFVDNHDSQPEEALESFVEEWFKPLAYALTLTRDQGYPSVFYGDYYGIPTHGVPAMKSKIDPILEARQKYAYGTQRDYLDHPDVIGWTREGDGVHADSGLATLMSDGPGGSKWMEVGKNNAGEVWYDITGNQTNTVTINKDGWGQFHVSGGSVSIYVQQ

SEQ ID NO: 26329 - protein, 483 aa, Bacillus licheniformis
HHNGTNGTMMQYFEWYLPNDGNHWHRLRSDASNLKDKGITAVWIPPAWKGASQNDVGYGAYDLYDLGEFNQKGTVRTKYGTRNQLQAAVTALKSNGIQVWGDVVMNHKGGADATEWVRAVEVNPSNRNQEVSGDYTIEAWTKFDFPGRGNTHSNFKWRWYHFDGVDWDQSRQLQNKIYKFRGKEWDWEVDEENGNYDYLMYADYDMDHPEVVNELRNWGVWYTNTLGLDGFRIDAVKHIKYSFTRDWLTHVRNTTGKNMFAVAEFWKNDIGAIENYLSKTNWNHSVFDVPLHYNLYNASRSGGNYDMRQIFNGTVVQRHPTHAVTFVDNHDSQPEEALESFVEEWFKPLAYALTLTRDQGEPSVFYGDYYGIPTHGVPAMKSKIDPILEARQKYAYGTQRDYLDHPDVIGWTREGDGVHADSGLATLMSDGPGGSKWMEVGKNNAGEVWYDITGNQTNTVTINKDGWGQFHVSGGSVSIYVQQ

SEQ ID NO: 26330 - protein, 483 aa, Bacillus subtilis
HHNGTNGTMMQYFEWYLPNDGNHWNRLNSDASNLKSKGITAVWIPPAWKGASQNDVGYGAYDLYDLGEFNQKGTVRTKYGTRSQLQAAVTSLKNNGIQVYGDVVMNHKGGADATEMVRAVEVNPNNRNQEVTGEYTIEAWTRFDFPGRGNTHSSFKWRWYHFDGVDWDQSRRLNNRIYKFRGKAWDWEVDTENGNYDYLMYADIDMDHPEVVNELRNWGVWYTNTLGLDGFRIDAVKHIKYSFTRDWINHVRSATGKNMFAVAEFWKNDLGAIENYLQKTNWNHSVFDVPLHYNLYNASKSGGNYDMRNIFNGTVVQRHPSHAVTFVDNHDSQPEEALESFVEEWFKPLAYALTLTREQGYPSVFYGDYYGIPTHGVPAMRSKIDPILEARQKYAYGTQRDYLDHPDVIGWTREGDGVHADSGLATLMSDGPGGSKWMEVGKNNAGEVWYDITGNQTNTVTINKDGWGQFHVSGGSVSIYVQQ

SEQ ID NO: 26331 - protein, 483 aa, Bacillus licheniformis
HHNGTNGTMMQYFEWYLPNDGNHWHRLRSDASNLKDKGITAVWIPPAWKGASQNDVGYGAYDLYDLGEFNQKGTVRTKYGTRNQLQAAVTALKSNGIQVYGDVVMNHKGGADATEWVRAVEVNPSNRNQEVSGDYTIEAWTKFDFPGRGNTHSNFKWRWYHFDGVDWDQSRQLQNKIYKFRGKEWDWEVDEENGNYDYLMYADYDMDHPEVVNELRNWGVWYTNTLGLDGFRIDAVKHIKYSFTRDWLEHVRNTTGKNMFAVAEFWKNDIGAIRNYLSKTNWNHSVFDVPLHYNLYNASRSGGNYDMRQIFNGTVVQRHPTHAVTFVDNHDSQPEEALESFVEEWFKPLAYALTLTRDQGYPSVFYGDYYGIPTHGVPAMKSKIDPILEARQKYAYGTQRDYMDHPDVIGWTREGDGVHADSGLATLMSDGPGGSKWMEVGKNNAGEVWYDITGNQTNTVTINKDGWGQFHVSGGSVSIYVQQ

SEQ ID NO: 26332 - protein, 483 aa, Bacillus licheniformis
HHNQTNGTMMQYFEWYLPNDGNHWNRLRSDASNLKDKGITAVWIPPAWKGASQNDVGYGAYDLYDLGEFNQKGTVRTKYGTRNQLQAAVTALKSNGIQVYGDVVMNHKGGADATEWVRAVEVNPSNRNQEVSGDYTIEAWTKFDFPGRGNTHSNFKWRWWHFDGVDWDQSRQLQNKIYKFRGKGWDWEVDTENGNYDYLMYADYDMDHPEVVNELRNWGVWYTNTLGLDGFRIDAVKHIKYSFTRDWLEHVRNTTGKNMFAVAEFWKNDIGAIENYLSKTNWNHSVFDVPLHYNLYNASRSGGNYDMRQIFNGTVVQRHPTHGVTFVDNHDSQPEEALESFVEEWFKPLAYALTLTRDQGYPSVFYGDYYGIPTHGVPAMKSKIDPILEARQKYAYGTQRDYMDHPDVIGWTREGDGVHADSGLATLMSDGPGGSKWMEVGKNNAGEVWYDITGNQTGTVTINKDGWGQFHVSGGSVSIYVQQ

SEQ ID NO: 26333 - protein, 483 aa, Bacillus licheniformis
HHNQTNGTMMQYFEWYLPNDGNHWNRLRSDASNLKDKGITAVWIPPAWKGASQNDVGYGAYDLYDLGEFNQKGTVRTKYGTRNQLQAAVTALKSNGIQVYGDVVMNHKGGADATEWVRAVEVNPSNRNQEVSGDYTIEAWTKFDFPGRGNTHSNFKWRWYHFDGVDWDQSRQLQNKIYKFRGKEWDWEVDEENGNYDYLMYADYDMDHPEVVNELRNWGVWYTNTLGLDGFRIDAVKHIKYSFTRDWLEHVRNTTQKNMFAVAEFWKNDIGAIENYLSKTNWNHSVFDVPLHYNLYNASRSGGNYDMRQIFNGTVVQRHPTHAVTFVDNHDSQPEEALESFVEEWFKPLAYALTLTRDQGYPSVFYGDYYGIPTHGVPAMKSKIDPILEARQKYAYGTQRDYMDHPDVIGWTREGDGVHADSGLATLMSDGPGGSKWMEVGKNNAGEVWYDITGNQTNTVTINKDGWGQFHVSGGSVSIYVQQ

SEQ ID NO: 26334 - protein, 483 aa, Bacillus licheniformis
HHNQTNGTMMQYFEWYLPNDGNHWHRLRSDASNLKDKGITAVWIPPAWKGASQNDVGYGAYDLYDLGEFNQKGTVRTKYGTRNQLQAAVTALKSNGIQVYGDVVMNHKGGADATEWVRAVEVNPSNRNQEVSGDYTIEAWTKFDFPGRGNTHSNFKWRWYHFDGVDWDQSRQLQNKIYKFRGKEWDWEVDTENGNYDYLMYADIDMDHPEVVNELRNWGVWYTNTLGLDGFRIDAVKHIKYSFTRDWLEHVRNTTGKNMFAVAEFWKNDIGAIENYLSKTNWNHSVFDVPLHYNLYNASRSGGNYDMRQIFNGTVVQRHPTHAVTFVDNHDSQPEEALESFVEEWFKPLAYALTLTRDQGYPSVFYGDYYGIPTHGVPAMKSKIDPILEARQKYAYGTQRDYLDHPDVIGWTREGDGVHADSGLATLMSDGPGGSKWMEVGKNNAGEVWYDITGNQTNTVTINKDGWGQFHVSGGSVSIYVQQ

SEQ ID NO: 26335 - protein, 483 aa, Bacillus sp. 707
HHNGTNGTLMQYFEWYAPNDGQHWNRLRSDAENLAQKGITAVWIPPAWKGASQNDVGYGAYDLYDLGEFNQKGTVRTKYGTKAQLKSAVTSLKNNGIQVYGDVVMNHKGGADATETVTAVEVNPSNRNQETSGEYNIQAWTRFDFPGRGNTHSSFKWRWYHFDGTDWDQSRRLNNRIYKFDGKAWDWPVSSENGNYDYLMYADIDMDHPEVVNELRNWGVWYTNTLGLDGFRIDAVKHIKYSFTRDWINHVRSATGKNMFAVAEFWKNDLGAIENYLQKTNWNHSVFDVPLHYNLYNASKSGGNYDMRNIFNGTVVQRHPSHAVTFVDNHDSQPEEALESFVEEWFKPLAYALTLTREQGYPSVFYGDYYGIPTHGVPAMRSKIDPILEARQKYAYGKQNDYLDHHNIIGWTREGDSTKANSGLATIMSDGPGGSKWMNVGKNNAGQVWSDITGNRTGTVTINADGWGQFFVNGGSVSIWVNK

SEQ ID NO: 26336 - protein, 483 aa, Bacillus licheniformis
HHNQTNGTMMQYFEWYLPNDGNHWNRLRSDASNLKDKGITAVWIPPAWKGASQNDVGYGAYDLYDLGEFNQKGTVRTKYGTRNQLQAAVTALKSNGIQVYGDVVMNHKGGADATEWVRAVEVNPSNRNQEVSGDYTIEAWTKFDFPGRGNTHSNFKWRWWHFDGVDWDQSRQLQNKIYKFRGKEWDWEVDTENGNYDYLMYADIDMDHPEVVNELRNWGVWYTNTLGLDGFRIDAVKHIKYSFTRDWLTHVRNTTGKNMFAVAEFWKNDIGAIRNYLSKTNWNHSVFDVPLHYNLYNASRSGGNYDMRQIFNGTVVQRHPTHAVTFVDNHDSQPEEALESFVEEWFKPLAYALTLTRDQGYPSVFYGDYYGIPTHGVPAMKSKIDPILEARQKYAYGTQRDYMDHPDVIGWTREGDGVHADSGLATLMSDGPGGSKWMEVGKNNAGEVWYDITGNQTNTVTINKDGWGQFHVSGGSVSIYVQQ

SEQ ID NO: 26337 - protein, 483 aa, Bacillus licheniformis
HHNQTNWTMMQYFEWYLPNDGNHWNRLRSDASNLKDKGITAVWIPPAWKGASQNDVGYGAYDLYDLGEFNQKGTVRTKYGTRNQLQAAVTALKSNGIQVYGDVVMNHKGGADATEWVRAVEVNPSNRNQEVSGDYTIEAWTKFDFPGRGNTHSNFKWRWYHFDGVDWDQSRQLQNKIYKFRGKEWDWEVDEENGNYDYLMYADYDMDHPEVVNELRNWGVWYTNTLGLDGFRIDAVKHIKYSFTRDWLEHVRNTTGKNMFAVAEFWKNDIGAIENYLSKTNWNHSVFDVPLHYNLYNASRSGGNYDMRQIFNGTVVQRHPTHAVTFVDNHDSQPEEALESFVEEWFKPLAYALTLTRDQGYPSVFYGDYYGIPTHGVPAMKSKIDPILEARQKYAYGTQRDYMDHPDVIGWTREGDGVHADSGLATLMSDGPGGSKWMEVGKNNAGEVWYDITGNQTNTVTINKDGWGQFHVSGGSVSIYVQQ

SEQ ID NO: 26338 - protein, 483 aa, Bacillus licheniformis
HHNGTNGTMMQYFEWYLPNDGNHWHRLRSDASNLKDKGITAVWIPPAWKGASQNDVGYGAYDLYDLGEFNQKGTVRTKYGTRNQLQAAVTALKSNGIQVWGDVVMNHKGGADATEWVRAVEVNPSNRNQEVSGDYTIEAWTKFDFPGRGNTHSNFKWRWYHFDGVDWDQSRQLQNKIYKFRGKEWDWEVDTENGNYDYLMYADYDMDHPEVVNELRNWGVWYTNTLGLDGFRIDAVKHIKYSFTRDWLTHVRNTTGKNMFAVAEFWKNDIGAIENYLSKTNWNHSVFDVPLHYNLYNASRSGGNYDMRQIFNGTVVQRHPTHAVTFVDNHDSQPEEALESFVEEWFKPLAYALTLTRDQGRPSVFYGDYYGIPTHGVPAMKSKIDPILEARQKYAYGTQRDYLDHPDVIGWTREGDGVHADSGLATLMSDGPGGSKWMEVGKNNAGEVWYDITGNQTNTVTINKDGWGQFHVSGGSVSIYVQQ

SEQ ID NO: 26339 - protein, 483 aa, Bacillus licheniformis
HHNQTNGTMMQYFEWYLPNDGNHWHRLRSDASNLKDKGITAVWIPPAWKGASQNDVGYGAYDLYDLGEFNQKGTVRTKYGTRNQLQAAVTALKSNGIQVYGDVVMNHKGGADATEWVRAVEVNPSNRNQEVSGDYTIEAWTKFDFPGRGNTHSNFKWRWWHFDGVDWDQSRQLQNRIYKFRGKEWDWEVDTENGNYDYLMYADYDMDHPEVVNELRNWGVWYTNTLGLDGFRIDAVKHIKYSFTRDWLEHVRNTTGKNMFAVAEFWKNDIGAIENYLSKTNWNHSVFDVPLHYNLYNASRSGGNYDMRQIFNGTVVQRHPTHAVTFVDNHDSQPEEALESFVEEWFKPLAYALTLTRDQGYPSVFYGDYYGIPTHGVPAMKSKIDPILEARQKYAYGTQRDYLDHPDVIGWTREGDGVHADSGLATLMSDGPGGSKWMEVGKNNAGEVWYDITGNQTNTVTINKDGWGQFHVSGGSVSIYVQQ

SEQ ID NO: 26340 - protein, 483 aa, Bacillus licheniformis
HHNQTNGTMMQYFEWYLPNDGNHWHRLRSDASNLKDKGITAVWIPPAWKGASQNDVGYGAYDLYDLGEFNQKGTVRTKYGTRNQLQAAVTALKSNGIQVYGDVVMNHKGGADATEWVRAVEVNPSNRNQEVSGDYTIEAWTKFDFPGRGNTHSNFKWRWWHFDGVDWDQSRQLQNKIYKFRGKGWDWEVDTENGNYDYLMYADYDMDHPEVVNELRNWGVWYTNTLGLDGFRIDAVKHIKYSFTRDWLTHVRNTTGKNMFAVAEFWKNDIGAIENYLSKTNWNHSVFDVPLHYNLYNASRSGGNYDMRQIFNGTVVQRHPTHAVTFVDNHDSQPEEALESFVEEWFKPLAYALTLTRDQGYPSVFYGDYYGIPTHGVPAMKSKIDPILEARQKYAYGTQRDYMDHPDVIGWTREGDGVHADSGLATLMSDGPGGSKWMEVGKNNAGEVWYDITGNQTNTVTINKDGWGQFHVSGGSVSIYVQQ

SEQ ID NO: 26341 - protein, 483 aa, Bacillus licheniformis
HHNQTNGTMMQYFEWYLPNDGNHWNRLRSDASNLKDKGITAVWIPPAWKGASQNDVGYGAYDLYDLGEFNQKGTVRTKYGTRNQLQAAVTALKSNGIQVYGDVVMNHKGGADATEWVRAVEVNPSNRNQEVSGDTTIEAWTKFDFPGRGNTHSNFKWRWYHFDGVDWDQSRQLQNKIYKFRGKEWDWEVDEENGNYDYLMYADYDMDHPEVVNELRNWGVWYTNTLGLDGFRIDAVKHIKYSFTRDWLEHVRNTTGKNMFAVAEFWKNDIGAIENYLSKTNWNHSVFDVPLHYNLYNASRSGGNYDMRQIFNGTVVQRHPTHAVTFVDNHDSQPEEALESFVEEWFKPLAYALTLTRDQGYPSVFYGDYYGIPTHGVPAMKSKIDPILEARQKYAYGTQRDYMDHPDVIGWTREGDGVHADSGLATLMSDGPGGSKWMEVGKNNAGEVWYDITGNQTNTVTINKDGWGQFHVSGGSVSIYVQQ

SEQ ID NO: 26342 - protein, 483 aa, Bacillus licheniformis
HHNQTNGTMMQYFEWYLPNDGNHWHRLRSDASNLKDKGITAVWIPPAWKGASQNDVGYGAYDLYDLGEFNQKGTVRTKYGTRNQLQAAVTALKSNGIQVYGDVVMNHKGGADATEWVRAVEVNPSNRNQEVSGDYTIEAWTKFDFPGRGNTHSNFKWRWYHFDGVDWDQSRQLQNKIYKFRGKEWDWEVDTENGNYDYLMYADYDMDHPEVVNELRNWGVWYTNTLGLDGFRIDAVKHIKYSFTRDWLEHVRNTTGKNMFAVAEFWKNDIGAIENYLSKTNWNHSVFDVPLHYNLYNASRSGGNYDMRQIFNGTVVQRHPTHAVTFVDNHDSQPEEALESFVEEWFKPLAYALTLTRDQGYPSVFYGDYYGIPTHGVPAMKSKIDPILEARQKYAYGTQRDYMDHPDVIGWTREGDGVHADSGLATLMSDGPGGSKWMEVGKNNAGEVWYDITGNQTNTVTINKDGWGQFHVSGGSVSIYVQQ

SEQ ID NO: 26343 - protein, 483 aa, Bacillus licheniformis
HHNGTNGTMMQYFEWYLPNDGNHWHRLRSDASNLKDKGITAVWIPPAWKGASQNDVGYGAYDLYDLGEFNQKGTVRTKYGTRNQLQAAVTALKSNGIQVYGDVVMNHKGGADATEWVRAVEVNPSNRNQEVSGDYTIEAWTKFDFPGRGNTHSNFKWRWWHFDGVDWDQSRQLQNRIYKFRGKEWDWEVDTENGNYDYLMYADIDMDHPEVVNELRNWGVWYTNTLGLDGFRIDAVKHIKYSFTRDWLEHVRNTTGKNMFAVAEFWKNDIGAIRNYLSKTNWNHSVFDVPLHYNLYNASRSGGNYDMRQIFNGTVVQRHPTHAVTFVDNHDSQPEEALESFVEEWFKPLAYALTLTRDQGYPSVFYGDYYGIPTHGVPAMKSKIDPILEARQKYAYGTQRDYMDHPDVIGWTREGDGVHADSGLATLMSDGPGGSKWMEVGKNNAGEVWYDITGNQTNTVTINKDGWGQFHVSGGSVSIYVQQ

SEQ ID NO: 26344 - protein, 483 aa, Bacillus licheniformis
HHEGTNGTMMQYFEWYLPNDGNHWHRLRSDASNLKDKGITAVWIPPAWKGASQNDVGYGAYDLYDLGEFNQKGTVRTKYGTRNQLQAAVTALKSNGIQVWGDVVMNHKGGADATEWVRAVEVNPSNRNQEVSGDYTIEAWTKFDFPGRGNTHSNFKWRWYHFDGVDWDQSRQLQNKIYKFRGKEWDWEVDTENGNYDYLMYADYDMDHPEVVNELRNWGVWYTNTLGLDGFRIDAVKHIKYSFTRDWLTHVRNTTGKNMFAVAEFWKNDIGAIENYLSKTNWNHSVFDVPLHYNLYNASRSGGNYDMRQIFNGTVVQRHPTHAVTFVDNHDSQPEEALESFVEEWFKPLAYALTLTRDQGYPSVFYGDYYGIPTHGVPAMKSKIDPILEARQKYAYGTQRDYLDHPDVIGWTREGDGVHADSGLATLMSDGPGGSKWMEVGKNNAGEVWYDITGNQTNTVTINKDGWGQFHVSGGSVSIYVQQ

SEQ ID NO: 26345 - protein, 483 aa, Bacillus sonorensis L12
LNGTLMQYFEWNLPNDGQHWKRLQNDAGYLSDIGITAVWIPPAYKGTSQADVGYGPYDLYDLGEFLQKGTVRTKYGMKTELQSAVGSLHSQNIQVYGDVVLNHKAGADLTEDVTAVEVNPGNRNQEISGEYRIKAWTGFNFPGRGSTYSDFKWHWYHFDGTDWDESRKLNRIYKFRGDGKAWDWEVSSENGNYDYLMYADVDYDHPDVVAEMKRWGTWYAKELQLDGFRLDAVKHIKFSFLSDWLKAVRQSTGKEMFTVAEYWQNNLGEIENYLQKTDFQHSVFDVPLHFNLQAASSHGGSYDMRNLLNGTVVSKHPLKAVTFVDNHDTQPGQSLESTVQTWFKPLAYAFILTREAGYPQVFYGDMYGTKGPTSREIPSLKSKLEPILKARKYFAYGTQHDYFDHPDAIGWTREGDQSVAASGLAALITDGPGGSKRMYVGRQHAGETWHDITGNRSDSVVINSDGWGEFYVNGGSVSIYVQR

SEQ ID NO: 26346 - protein, 483 aa, Synthetic construct
SVPVNGTMMQYFEWYLPDDGTLWTKVANNAQSLANLGITALWLPPAYKGTSSSDVGYGVYDLYDLGEFNQKGTVRTKYGTKTQYIQAIQAAHTAGMQVYADVVFNHKAGADYTENVTAVEVNPSNRNQETSGEYNIQAWTGFNFPGRGTTYSNFKWQWFHFDGTDWDQSRSLSRIFKFRGTGKAWDWEVSSENGNYDYLMYADIDMDHPEVVSELKNWGKWYVTTTNIDGFRLDAVKHIKYSFFPDWLSYVRTQTQKPLFAVGEFWSYDISKLHNYITKTNGSMSLFDAPLHNNFYIASKSGGYFDMRTLLNNTLMKDQPTLAVTLVDNHDTEPGQSLQSWVEPWFKPLAYAFILTRQEGYPCVFYGDYYGIPKYNIPALKSKLDPLLIARRDYAYGTQHDYIDSADIIGWTREGVAEKANSGLAALITDGPGGSKWMYVGKQHAGKTFYDLTGNRSDTVTINADGWGEFKVNGGSVSIWVPK

SEQ ID NO: 26347 - protein, 511 aa, Bacillus sp. TS-23
APINETMMQYFEWDLPNDGTLWTKVKNEAANLSSLGITALWLPPAWKGTSQSDVGYGAYDLYDLGEFNQKGTIRTKYGTKTQYIQAIQAAKAAGMQVYADVVFNHKAGADGTEFVDAVEVDPSNRNQETSGTYQIQAWTKFDFPGRGNTYSSFKWRWYHFDGTDWDESRKLNRIYKFSTKAWDWEVDTENGNYDYLMFADYDMDHPEVVTELKNWGTWYVNTTNIDGFRLDAVKHIKYSFFPDWLTYVRNQTGKNLFAVGEFWSYDVNKLHNYITKTNGSMSLFDAPLHNNFYTASKSSGYFDMRYLLNNTLMKDQPSLAVTLVDNHDTQPGQSLQSWVEPWFKPLAYAFILTRQEGYPCVFYGDYYGIPKYNIPGLKSKIDPLLIARRDYAYGTQRDYIDHQDIIGWTREGIDTKPNSGLAALITDGPGGSKWMYVGKKHAGKVFYDLTGNRSDTVTINADGWGEFKVNGGSVSIWVAKTSNVTFTVNNATTTSGQNVYVVANIPELGNW

SEQ ID NO: 26348 - protein, 511 aa, Bacillus sp. TS-23
APINETMMQYFEWDLPNDGTLWTKVKNEAANLSSLGITALWLPPAWKGTSQSDVGYGAYDLYDLGEFNQKGTIRTKYGTKTQYIQAIQAAKAAGMQVYADVVFNHKAGADGTEFVDAVEVDPSNRNQETSGTYQIQAWTKFDFPGRGNTYSSFKWRWYHFDGTDWDESRKLNRIYKFTGKAWDWEVDTENGNYDYLMFADYDMDHPEVVTELKNWGTWYVNTTNIDGFRLDAVKHIKYSFFPDWLTYVRNQTGKNLFAVGEFWSYDVNKLHNYITKTNGSMSLFDAPLHNNFYTASKSSGYFDMRYLLNNTLMKDQPSLAVTLVDNHDTQPGQSLQSWVEPWFKPLAYAFILTRQEGYPCVFYGDYYGIPKYNIPGLKSKIDPLLEARRDYAYGTQRDYIDHQDIIGWTREGIDTKPNSGLAALITDGPGGSKWMYVGKKHAGKVFYDLTGNRSDTVTINADGWGEFKVNGGSVSIWVAKTSNVTFTVNNATTTSGQNVYVVANIPELGNW

SEQ ID NO: 26349 - protein, 511 aa, Bacillus sp. TS-23
APINETMMQYFEWDLPNDGTLWTKVKNEAANLSSLGITALWLPPAWKGTSQSDVGYGAYDLYDLGEFNQKGTIRTKYGTKTQYIQAIQAAKAAGMQVYADVVFNHKAGADGTEFVDAVEVDPSNRNQETSGTYQIQAWTKFDFPGRGNTYSSFKWRWYHFDGTDWDESRKLNRIYKFSGKAWDWEVDTENGNYDYLMFADYDMDHPEVVTELKNWGTWYVNTTNIDGFRLDAVKHIKYSFFPDWLTYVRNQTGKNLFAVGEFWSYDVNKLHNYITKTNGSMSLFDAPLHNNFYTASKSSGYFDMRYLLNNTLMKDQPSLAVTLVDNHDTQPGQSLQSWVEPWFKPLAYAFILTRQEGYPCVFYGDYYGIPKYNIPGLKSKIDPLLEARRDYAYGTQRDYIDHQDIIGWTREGIDTKPNSGLAALITDGPGGSKWMYVGKKHAGKVFYDLTGNRSDTVTINADGWGEFKVNGGSVSIWVAKTSNVTFTVNNATTTSGQNVYVVANIPELGNW

SEQ ID NO: 26350 - protein, 511 aa, Bacillus sp. TS-23
APINETMMQYFEWDLPNDGTLWTKVKNEAANLSSLGITALWLPPAWKGTSQSDVGYGAYDLYDLGEFNQKGTIRTKYGTKTQYIQAIQAAKAAGMQVYADVVFNHKAGADGTEFVDAVEVDPSNRNQETSGTYQIQAWTKFDFPGRGNTYSSFKWRWYHFDGTDWDESRKLNRIYKFRSKAWDWEVDTENGNYDYLMFADYDMDHPEVVTELKNWGTWYVNTTNIDGFRLDAVKHIKYSFFPDWLTYVRNQTGKNLFAVGEFWSYDVNKLHNYITKTNGSMSLFDAPLHNNFYTASKSSGYFDMRYLLNNTLMKDQPSLAVTLVDNHDTQPGQSLQSWVEPWFKPLAYAFILTRQEGYPCVFYGDYYGIPKYNIPGLKSKIDPLLEARRDYAYGTQRDYIDHQDIIGWTREGIDTKPNSGLAALITDGPGGSKWMYVGKKHAGKVFYDLTGNRSDTVTINADGWGEFKVNGGSVSIWVAKTSNVTFTVNNATTTSGQNVYVVANIPELGNW

SEQ ID NO: 26351 - protein, 480 aa, Bacillus sp.
APINETMMQYFEWDLPNDGTLWNRLHNNAQNLKNAGITALWLPPAYKGTSQSDVGYGVYDLYDLGEFNQKGTIRTKYGTKTQYIQAIQAAKAAGMQVYADVVFNHKAGADQTEFVDAVEVDPSNRNQETSGTYQIQAWTKFDFPGRGNTYSSFKWRWYHFDGTDWDESRKLNRIYKFRGKAWDWEVDTENGNYDYLMFADLDMDHPEVVTELKNWGTWYVNTTNIDGFRLDAVKHIKFSFMRDWLTYVRNQTGKNLFAVGEFWSYDVNKLHNYITKTNGSMSLFDAPLHNNFYTASKSSGYFDMRYLLNNTLMKDQPSLAVTLVDNHDTQPGQSLQSWVEPWFKPLAYAFILTRQEGYPCVFYGDYYGIPKYNIPGLKSKIDPLLIARRDYAYGTQRDYIDHQDIIGWTREGIDTKPNSGLAALITDGPGGSKWMYVGKKHAGKVFYDLTGNRSDTVTINADGWGEFKVNGGSVSIWVAK

SEQ ID NO: 26352 - protein, 480 aa, Bacillus sp.
APINETMMQYFEWDLPNDGTLWTKVKNEAANLSSLGITALWLPPAYKGTSQSDVGYGVYDLYDLGEFNQKGTIRTKYGTKTQYIQAIQAAKAAGMQVYADVVFNHKAGADQTEFVDAVEVDPSNRNQEVSGTYQIEAWTKFDFPGRGNTYSSFKWRWYHFDGTDWDESRKLNRIYKFRGKAWDWEVDTENGNYDYLMFADLDMDHPEVVTELKNWGTWYVNTTNIDGFRLDAVKHIKFSFMRDWLTYVRNQTGKNLFAVGEFWSYDVNKLHNYITKTNGSMSLFDAPLHNNFYTASKSSGYFDMRNLLNGTLVQRHPSHAVTLVDNHDTQPGQSLQSWVEPWFKPLAYAFILTRQEGYPCVFYGDYYGIPKYNIPGLKSKIDPLLIARRDYAYGTQRDYIDHQDIIGWTREGIDTKPNSGLAALITDGPGGSKWMYVGKKHAGKVFYDLTGNRSDTVTINADGWGEFKVNGGSVSIWVAK

SEQ ID NO: 26353 - protein, 480 aa, Bacillus sp.
APINETMMQYFEWDLPNDGTLWTKVKNEAANLSSLGITALWLPPAYKGTSQSDVGYGVYDLYDLGEFNQKGTIRTKYGTKTQYIQAIQAAKAAGMQVYADVVFNHKAGADQTEFVDAVEVDPSNRNQEVSGTYQIEAWTKFDFPGRGNTYSSFKWRWYHFDGTDWDESRKLNRIYKFRGKAWDWEVDTENGNYDYLMFADLDMDHPEVVTELKNWGTWYVNTTNIDGFRLDAVKHIKFSFMRDWLTYVRNQTGKNLFAVGEFWSYDVNKLHNYITKTNGSMSLFDAPLHNNFYTASKSSGYFDMRYLLNGTLVQRHPSHAVTLVDNHDTQPGQSLQSWVEPWFKPLAYAFILTRQEGYPCVFYGDYYGIPKYNIPGLKSKIDPLLIARRDYAYGTQRDYIDHQDIIGWTREGIDTKPNSGLAALITDGPGGSKWMYVGKKHAGKVFYDLTGNRSDTVTINADGWGEFKVNGGSVSIWVAK

SEQ ID NO: 26354 - protein, 480 aa, Bacillus sp.
APINETMMQYFEWDLPNDGTLWNRLHNNAQNLKNAGITALWLPPAYKGTSQSDVGYGVYDLYDLGEFNQKGTIRTKYGTKTQYIQAIQAAKAAGMQVYADVVFNHKAGADGTEFVDAVEVDPSNRNQEVSGTYQIEAWTKFDFPGRGNTYSSFKWRWYHFDGTDWDESRKLNRIYKFRGKAWDWEVDTENGNYDYLMFADLDMDHPEVVTELKNWGTWYVNTTNIDGFRLDAVKHIKFSFMRDWLTYVRNQTGKNLFAVGEFWSYDVNKLHNYITKTNGSMSLFDAPLHNNFYTASKSSGYFDMRYLLNNTLMKDQPSLAVTLVDNHDTQPGQSLQSWVEPWFKPLAYAFILTRQEGYPCVFYGDYYGIPKYNIPGLKSKIDPLLIARRDYAYGTQRDYIDHQDIIGWTREGIDTKPNSGLAALITDGPGGSKWMYVGKKHAGKVFYDLTGNRSDTVTINADGWGEFKVNGGSVSIWVAK

SEQ ID NO: 26355 - protein, 480 aa, Bacillus sp.
APINETMMQYFEWDLPNDGTLWTKVKNEAANLSSLGITALWLPPAYKGTSQSDVGYGVYDLYDLGEFNQKGTIRTKYGTKTQLERAIRSLKANGIQVYADVVFNHKAGADGTEFVDAVEVDPSNRNQEVSGTYQIEAWTKFDFPGRGNTYSSFKWRWYHFDGTDWDESRKLNRIYKFRGKAWDWEVDTENGNYDYLMFADLDMDHPEVVTELKNWGTWYVNTTNIDGFRLDAVKHIKFSFMRDWLTYVRNQTGKNLFAVGEFWSYDVNKLHNYITKTNGSMSLFDAPLHNNFYTASKSSGYFDMRYLLNNTLMKDQPSLAVTLVDNHDTQPGQSLQSWVEPWFKPLAYAFILTRQEGYPCVFYGDYYGIPKYNIPGLKSKIDPLLIARRDYAYGTQRDYIDHQDIIGWTREGIDTKPNSGLAALITDGPGGSKWMYVGKKHAGKVFYDLTGNRSDTVTINADGWGEFKVNGGSVSIWVAK

SEQ ID NO: 26356 - protein, 480 aa, Bacillus sp.
APINETMMQYFEWDLPNDGTLWTKVKNEAANLSSLGITALWLPPAYKGTSQSDVGYGVYDLYDLGEFNQKGTIRTKYGTKTQYIQAIQAAKAAGMQVYADVVFNHKAGADQTEFVDAVEVDPSNRNQEVSGTYQIEAWTKFDFPGRGNTYSSFKWRWYHFDGTDWDESRKLNRIYKFRGKAWDWEVDTENGNYDYLMFADLDMDHPEVVTELKNWGTWYVNTTNIDGFRLDAVKHIKFSFMRDWLTYVRNQTGKNLFAVGEFWSYDVNKLHNYITKTNGSMSLFDAPLHNNFYTASKSSGYFDMRYLLNNTLMKDQPSLAVTLVDNHDTQPGEALESFVQGWFKPLAYAFILTRQEGYPCVFYGDYYGIPSDGVPGLKSKIDPLLIARRDYAYGTQRDYIDHQDIIGWTREGIDTKPNSGLAALITDGPGGSKWMYVGKKHAGKVFYDLTGNRSDTVTINADGWGEFKVNGGSVSIWVAK

SEQ ID NO: 26357 - protein, 482 aa, Synthetic construct
APVNGTMMQYFEWDLPNDGTLWTKVKNEAANLSSLGITALWLPPAYKGTSQSDVGYGVYDLYDLGEFNQKGTVRTKYGTKDQYIQAIQAAKAAGMQVYADVVFNHKAGADYTENVTAVEVNPSNRNQETSGEYNIQAWTGFNFPGRGTTYSNFKWQWFHFDGTDWDQSRSLSRIFKFRGTGKAWDWEVSSENGNYDYLMYADIDMDHPEVVTELKNWGKWYVNTTNVDGFRLDAVKHIKYSFFPDWLASVRSQTGKNLFAVGEFWSYDVNKLHNYITKTNGTMSLFDAPLHNNFYTASKSSGYFDMRYLLNNTLMKDQPVLAVTLVDNHDTQPGQSLQSWVEPWFKPLAYAFILTRQEGYPCVFYGDYYGIPKYNIPGLKSKIDPLLIARRDYAYGTQRDYIDHQDIIGWTREGIDSKPNSGLAALITDGPGGSKWMYVGKKHAGKVFYDLTGNRSDTVTINADGWGEFKVNGGSVSIWVAK

SEQ ID NO: 26358 - protein, 483 aa, Synthetic construct
APVNGTMMQYFEWDLPNDGTLWTKVKNEASSLSALGITALWLPPAYKGTSQADVGYGVYDLYDLGEFNQKGTIRTKYGTKTQYLQAIQAAKSAGMQVYADVVFNHKGGADATENVLAVEVNPNNRNQEISGDYTIEAWTKFDFPGRGNTYSDFKWRWYHFDGVDWDQSRQFQNRIYKFRGDGKAWDWEVDSENGNYDYLMYADVDMDHPEVVAELKNWGKWYVNTTNVDGFRLDAVKHIKYSFFPDWLSYVRNQTGKNLFAVGEFWGYDVNKLHNYITKTNGAMSLFDAPLHNNFYIASKSSGYFDMRYLLNNTLMKDQPALAVTLVDNHDTQPGQSLQSWVEPWFKPLAYAFILTRQEGYPCVFYGDYYGIPKYNIPGLKSKIDPLLIARRDYAYGTQRDYIDHQDIIGWTREGIDAKPNSGLAALITDGPGGSKWMYVGKRHAGKVFYDLTGNRSDTVTINADGWGEFKVNGGSVSIWVAK

SEQ ID NO: 26359 - protein, 483 aa, Synthetic construct
APVNGTMMQYFEWDLPNDGTLWTKVKNEASSLSALGITALWLPPAYKGTSQADVGYGVYDLYDLGEFNQKGTIRTKYGTKTQYLQAIQAAKSAGMQVYADVVFNHKGGADATEMVRAVEVNPNNRNQEVSGEYTIEAWTKFDFPGRGNTHSNFKWRWYHFDGVDWDQSRKLNNRIYKFRGDGKGWDWEVDTENGNYDYLMYADIDMDHPEVVAELKNWGKWYVNTTNVDGFRLDAVKHIKYSFFPDWLSYVRNQTGKNLFAVGEFWGYDVNKLHNYITKTNGAMSLFDAPLHNNFYIASKSSGYFDMRYLLNNTLMKDQPALAVTLVDNHDTQPGQSLQSWVEPWFKPLAYAFILTRQEGYPCVFYGDYYGIPKYNIPGLKSKIDPLLIARRDYAYGTQRDYIDHQDIIGWTREGIDAKPNSGLAALITDGPGGSKWMYVGKRHAGKVFYDLTGNRSDTVTINADGWGEFKVNGGSVSIWVAK

SEQ ID NO: 26360 - protein, 483 aa, Bacillus licheniformis
HHNGTNGTMMQYFEWYLPNDGNHWHRLRSDASNLKDKGITAVWIPPAWKGASQNDVGYGAYDLYDLGEFNQKGTVRTKYGTRNQLQAAVTALKSNGIQVWGDVVMNHKGGADATEWVRAVEVNPSNRNQEVSGDYTIEAWTKFDFPGRGNTHSNFKWRWYHFDGVDWDQSRQLQNKIYKFRGKEWDWEVDTENGNYDYLMYADYDMDHPEVVNELRNWGVWYTNTLGLDGFRIDAVKHIKYSFTRDWLTHVRNTTGKNMFAVAEFWKNDIGAIENYLSNTNWNHSVFDVPLHYNLYNASRSGGNYDMRQIFNGTVVQRHPTHAVTFVDNHDSQPEEALESFVEEWFKPLAYALTLTRDQGEPSVFYGDYYGIPTHGVPAMKSKIDPILEARQKYAYGTQRDYLDHPDVIGWTREGDGVHADSGLATLMSDGPGGSKWMEVGKNNAGEVWYDITGNQTNTVTINKDGWGQFHVSGGSVSIYVQQ

SEQ ID NO: 26361 - protein, 485 aa, Bacillus sp.
HHNGTNGTMMQYFEWYLPNDGNHWNRLRSDASNLKDKGISAVWIPPAWKGASQNDVGYGAYDLYDLGEFNQKGTIRTKYGTRNQLQAAVNALKSNGIQVYGDVVMNHKGGADATEMVKAVEVNPNNRNQEVSGEYTIEAWTKFDFPGRGNTHSNFKWRWYHFDGVDWDQSRKLNNRIYKFRGDGKGWDWEVDTEFGNYDYLMYADIDMDHPEVVNELRNWGVWYTNTLGLDGFRIDAVKHIKYSFTRDWINHVRSATGKNMFAVAEFWKNDLGAIENYLNKTNWNHSVFDVPLHYNLYNASKSGGNYDMRQIFNGTVVQKHPMHAVTFVDNHDSQPEEALESFVEEWFKPLAYALTLTREQGYPSVFYGDYYGIPTHGVPAMKSKIDPILEARQKYAYGRQHDYFDHHDIVGWTREGDSSVANSGLAALITDGPGGAKRMYVGRQNAGETWHDITGNRSEPVVINSEGWGEFHVNGGSVSIYVQR

SEQ ID NO: 26362 - protein, 483 aa, Bacillus licheniformis
HHNGTNGTMMQYFEWYLPNDGNHWHRLRSDASNLKDKGITAVWIPPAWKGASQNDVGYGAYDLYDLGEFNQKGTVRTKYGTRNQLQAAVTALKSNGIQVWGDVVMNHKGGADATEWVRAVEVNPSNRNQEVSGDTTIEAWTKFDFPGRGNTHSNFKWRWYHFDGVDWDQSRQLQNKIYKFQGKEWDWEVDEENGNYDYLMYADYDMDHPEVVNELRNWGVWYTNTLGLDGFRIDAVKHIKYSFTRDWLTHVRNTTGKNMFAVAEFWKNDIGAIENYLSKTNWNHSVFDVPLHYNLYNASRSGGNYDMRQIFNGTVVQRHPTHAVTFVDNHDSQPEEALESFVEEWFKPLAYALTLTRDQGYPSVFYGDYYGIPTHGVPAMKSKIDPILEARQKYAYGTQRDYLDHPDVIGWTREGDGVHADSGLATLMSDGPGGSKWMEVGKNNAGEVWYDITGNQTNTVTINKDGWGQFHVSGGSVSIYVQQ

SEQ ID NO: 26363 - protein, 483 aa, Bacillus licheniformis
HHNQTNGTMMQYFEWYLPNDGNHWHRLRSDASNLKDKGITAVWIPPAWKGASQNDVGYGAYDLYDLGEFNQKGTVRTKYGTRNQLQAAVTALKSNGIQVYGDVVMNHKGGADATEWVRAVEVNPSNRNQEVSGDYTIEAWTKFDFPGRGNTHSNFKWRWWHFDGVDWDQSRQLQNKIYKFRGKEWDWEVDTENGNYDYLMYADIDMDHPEVVNELRNWGVWYTNTLGLDGFRIDAVKHIKYSFTRDWLTHVRNTTGKNMFAVAEFWKNDIGAIRNYLSKTNWNHSVFDVPLHYNLYNASRSGGNYDMRQIFNGTVVQRHPTHAVTFVDNHDSQPEEALESFVEEWFKPLAYALTLTRDQGYPSVFYGDYYGIPTHGVPAMKSKIDPILEARQKYAYGTQRDYMDHPDVIGWTREGDGVHADSGLATLMSDGPGGSKWMEVGKNNAGEVWYDITGNQTNTVTINKDGWGQFHVSGGSVSIYVQQ

SEQ ID NO: 26364 - protein, 483 aa, Bacillus licheniformis
HHNQTNGTMMQYFEWYLPNDGNHWNRLRSDASNLKDKGITAVWIPPAWKGASQNDVGYGAYDLYDLGEFNQKGTVRTKYGTRNQLQAAVTALKSNGIQVWGDVVMNHKGGADATEWVRAVEVNPSNRNQEVSGDTTIEAWTKFDFPGRGNTHSNFKWRWYHFDGVDWDQSRQLQNKIYKFRGKEWDWEVDEENGNYDYLMYADYDMDHPEVVNELRNWGVWYTNTLGLDGFRIDAVKHIKYSFTRDWLEHVRNTTGKNMFAVAEFWKNDIGAIENYLSKTNWNHSVFDVPLHYNLYNASRSGGNYDMRQIFNGTVVQRHPTHAVTFVDNHDSQPEEALESFVEEWFKPLAYALTLTRDQGYPSVFYGDYYGIPTHGVPAMKSKIDPILEARQKYAYGTQRDYMDHPDVIGWTREGDGVHADSGLATLMSDGPGGSKWMEVGKNNAGEVWYDITGNQTNTVTINKDGWGQFHVSGGSVSIYVQQ

SEQ ID NO: 26365 - protein, 483 aa, Bacillus sp. 707
HHNGTNGTMMQYFEWYLPNDGNHWNRLNSDASNLKSKGITAVWIPPAWKGASQNDVGYGAYDLYDLGEFNQKGTVRTKYGTRSQLQAAVTSLKNNGIQVYGDVVMNHKGGADATEMVRAVEVNPNNRNQEVTGEYTIEAWTRFDFPGRGNTHSSFKWRWYHFDGVDWDQSRRLNNRIYKFRGKAWDWEVDTENGNYDYLMYADIDMDHPEVVNELRNWGVWYTNTLGLDGFRIDAVKHIKYSFTRDWINHVRSATGKNMFAVAEFWKNDLGAIENYLQKTNWNHSVFDVPLHYNLYNASKSGGNYDMRNIFNGTVVQRHPSHAVTFVDNHDSQPEEALESFVEEWFKPLAYALTLTREQGYPSVFYGDYYGIPTHGVPAMRSKIDPILEARQKYAYGTQHDYLDNQDVIGWTREGDSAHAGSGLATVMSDGPGGSKTMYVGTAHAGQVFKDITGNRTDTVTINSAGNGTFPCNGGSVSIWVKQ

SEQ ID NO: 26366 - protein, 483 aa, Bacillus licheniformis
HHNQTNGTMMQYFEWYLPNDGNHWNRLRSDASNLKDKGITAVWIPPAWKGASQNDVGYGAYDLYDLGEFNQKGTVRTKYGTRNQLQAAVTALKSNGIQVYGDVVMNHKGGADATEWVRAVEVNPSNRNQEVSGDYTIEAWTKFDFPGRGNTHSNFKWRWYHFDGVDWDQSRQLQNKIYKFRGKEWDWEVDEENGNYDYLMYADYDMDHPEVVNELRNWGVWYTNTLGLDGFRIDAVKHIKYSFTRDWLEHVRNTTQKNMFAVAEFWKNDIGAIENYLSKTNWNHSVFDVPLHYNLYNASRSGGNYDMRQIFNGTVVQRHPTHAVTFVDNHDSQPEEALESFVEEWFKPLAYALTLTRDQGEPSVFYGDYYGIPTHGVPAMKSKIDPILEARQKYAYGTQRDYMDHPDVIGWTREGDGVHADSGLATLMSDGPGGSKWMEVGKNNAGEVWYDITGNQTNTVTINKDGWGQFHVSGGSVSIYVQQ

SEQ ID NO: 26367 - protein, 483 aa, Bacillus licheniformis
HHNGTNGTMMQYFEWYLPNDGNHWHRLRSDASNLKDKGITAVWIPPAWKGASQNDVGYGAYDLYDLGEFNQKGTVRTKYGTRNQLQAAVTALKSNGIQVWGDVVMNHKGGADATEWVRAVEVNPSNRNQEVSGDYTIEAWTKFDFPGRGNTHSNFKWRWYHFDGVDWDQSRQLQNKIYKFRGKEWDWEVDTENGNYDYLMYADYDMDHPEVVNELRNWGVWYTNTLGLDGFRIDAVKHIKYSFTRDWLTHVRNTTQKNMFAVAEFWKNDIGAIENYLSNTNWNHSVFDVPLHYNLYNASRSGGNYDMRQIFNGTVVQRHPTHAVTFVDNHDSQPEEALESFVEEWFKPLAYALTLTRDQGYPSVFYGDYYGIPTHGVPAMKSKIDPILEARQKYAYGTQRDYLDHPDVIGWTREGDGVHADSGLATLMSDGPGGSKWMEVGKNNAGEVWYDITGNQTNTVTINKDGWGQFHVSGGSVSIYVQQ

SEQ ID NO: 26368 - protein, 483 aa, Bacillus licheniformis
HHNGTNGTMMQYFEWYLPNDGNHWHRLRSDASNLKDKGITAVWIPPAWKGASQNDVGYGAYDLYDLGEFNQKGTVRTKYGTRNQLQAAVTALKSNGIQVWGDVVMNHKGGADATEWVRAVEVNPSNRNQEVSGDTTIEAWTKFDFPGRGNTHSNFKWRWYHFDGVDWDQSRQLQNKIYKFRGKEWDWEVDEENGNYDYLMYADYDMDHPEVVNELRNWGVWYTNTLGLDGFRIDAVKHIKYSFTRDWLTHVRNTTGKNMFAVAEFWKNDIGAIENYLSKTNWNHSVFDVPLHYNLYNASRSGGNYDMRQIFNGTVVQRHPTHAVTFVDNHDSQPEEALESFVEEWFKPLAYALTLTRDQGEPSVFYGDYYGIPTHGVPAMKSKIDPILEARQKYAYGTQRDYLDHPDVIGWTREGDGVHADSGLATLMSDGPGGSKWMEVGKNNAGEVWYDITGNQTNTVTINKDGWGQFHVSGGSVSIYVQQ

SEQ ID NO: 26369 - protein, 483 aa, Bacillus licheniformis
HHNQTNGTMMQYFEWYLPNDGNHWNRLRSDASNLKDKGITAVWIPPAWKGASQNDVGYGAYDLYDLGEFNQKGTVRTKYGTRNQLQAAVTALKSNGIQVYGDVVMNHKGGADATEWVRAVEVNPSNRNQEVSGDTTIEAWTKFDFPGRGNTHSNFKWRWYHFDGVDWDQSRQLQNKIYKFRGKEWDWEVDEENGNYDYLMYADYDMDHPEVVNELRNWGVWYTNTLGLDGFRIDAVKHIKYSFTRDWLEHVRNTTGKNMFAVAEFWKNDIGAIENYLSNTNWNHSVFDVPLHYNLYNASRSGGNYDMRQIFNGTVVQRHPTHAVTFVDNHDSQPEEALESFVEEWFKPLAYALTLTRDQGYPSVFYGDYYGIPTHGVPAMKSKIDPILEARQKYAYGTQRDYMDHPDVIGWTREGDGVHADSGLATLMSDGPGGSKWMEVGKNNAGEVWYDITGNQTNTVTINKDGWGQFHVSGGSVSIYVQQ

SEQ ID NO: 26370 - protein, 483 aa, Bacillus licheniformis
HHNGTNGTMMQYFEWYLPNDGNHWHRLRSDASNLKDKGITAVWIPPAWKGASQNDVGYGAYDLYDLGEFNQKGTVRTKYGTRNQLQAAVTALKSNGIQVWGDVVMNHKGGADATEWVRAVEVNPSNRNQEVSGDYTIEAWTKFDFPGRGNTHSNFKWRWYHFDGVDWDQSRQLQNKIYKFRGKEWDWEVDTENGNYDYLMYADYDMDHPEVVNELRNWGVWYTNTLGLDGFRIDAVKHIKYSFTRDWLTHVRNTTQKNMFAVAEFWKNDIGAIENYLSKTNWNHSVFDVPLHYNLYNASRSGGNYDMRQIFNGTVVQRHPTHAVTFVDNHDSQPEEALESFVEEWFKPLAYALTLTRDQGEPSVFYGDYYGIPTHGVPAMKSKIDPILEARQKYAYGTQRDYLDHPDVIGWTREGDGVHADSGLATLMSDGPGGSKWMEVGKNNAGEVWYDITGNQTNTVTINKDGWGQFHVSGGSVSIYVQQ

SEQ ID NO: 26371 - protein, 483 aa, Bacillus licheniformis
HHNGTNGTMMQYFEWYLPNDGNHWHRLRSDASNLKDKGITAVWIPPAWKGASQNDVGYGAYDLYDLGEFNQKGTVRTKYGTRNQLQAAVTALKSNGIQVWGDVVMNHKGGADATEWVRAVEVNPSNRNQEVSGDYTIEAWTKFDFPGRGNTHSNFKWRWYHFDGVDWDQSRQLQNKIYKFRGKEWDWEVDEENGNYDYLMYADYDMDHPEVVNELRNWGVWYTNTLGLDGFRIDAVKHIKYSFTRDWLTHVRNTTQKNMFAVAEFWKNDIGAIENYLSKTNWNHSVFDVPLHYNLYNASRSGGNYDMRQIFNGTVVQRHPTHAVTFVDNHDSQPEEALESFVEEWFKPLAYALTLTRDQGEPSVFYGDYYGIPTHGVPAMKSKIDPILEARQKYAYGTQRDYLDHPDVIGWTREGDGVHADSGLATLMSDGPGGSKWMEVGKNNAGEVWYDITGNQTNTVTINKDGWGQFHVSGGSVSIYVQQ

SEQ ID NO: 26372 - protein, 483 aa, Bacillus licheniformis
HHNGTNGTMMQYFEWYLPNDGNHWHRLRSDASNLKDKGITAVWIPPAWKGASQNDVGYGAYDLYDLGEFNQKGTVRTKYGTRNQLQAAVTALKSNGIQVYGDVVMNHKGGADATEWVRAVEVDPSNRNQEVSGDYTIEAWTKFDFPGRGNTHSNFKWRWYHFDGVDWDQSRQLQNKIYKFRGKEWDWEVDTENGNYDYLMYADYDMDHPEVVNELRNWGVWYTNTLGLDGFRIDAVKHIKYSFTRDWLTHVRNTTQKNMFAVAEFWKNDIGAIENYLSKTNWNHSVFDVPLHYNLYNASRSGGNYDMRQIFNGTVVQRHPTHAVTFVDNHDSQPEEALESFVEEWFKPLAYALTLTRDQGEPSVFYGDYYGIPTHGVPAMKSKIDPILEARQKYAYGTQRDYLDHPDVIGWTREGDGVHADSGLATLMSDGPGGSKWMEVGKNNAGEVWYDITGNQTNTVTINKDGWGQFHVSGGSVSIYVQQ

SEQ ID NO: 26373 - protein, 483 aa, Bacillus licheniformis
HHNGTNGTMMQYFEWYLPNDGNHWHRLRSDASNLKDKGITAVWIPPAWKGASQNDVGYGAYDLYDLGEFNQKGTVRTKYGTRNQLQAAVTALKSNGIQVWGDVVMNHKGGADATEWVRAVEVNPSNRNQEVSGDTTIEAWTKFDFPGRGNTHSNFKWRWYHFDGVDWDQSRQLQNKIYKFRGKEWDWEVDTENGNYDYLMYADYDMDHPEVVNELRNWGVWYTNTLGLDGFRIDAVKHIKYSFTRDWLTHVRNTTGKNMFAVAEFWKNDIGAIENYLSNTNWNHSVFDVPLHYNLYNASRSGGNYDMRQIFNGTVVQRHPTHAVTFVDNHDSQPEEALESFVEEWFKPLAYALTLTRDQGYPSVFYGDYYGIPTHGVPAMKSKIDPILEARQKYAYGTQRDYLDHPDVIGWTREGDGVHADSGLATLMSDGPGGSKWMEVGKNNAGEVWYDITGNQTNTVTINKDGWGQFHVSGGSVSIYVQQ

SEQ ID NO: 26374 - protein, 483 aa, Bacillus licheniformis
HHNGTNGTMMQYFEWYLPNDGNHWHRLRSDASNLKDKGITAVWIPPAWKGASQNDVGYGAYDLYDLGEFNQKGTVRTKYGTRNQLQAAVTALKSNGIQVYGDVVMNHKGGADATEWVRAVEVNPSNRNQEVSGDYTIEAWTKFDFPGRGNTHSNFKWRWWHFDGVDWDQSRQLQNKIYKFRGKGWDWEVDTENGNYDYLMYADYDMDHPEVVNELRNWGVWYTNTLGLDGFRIDAVKHIKYSFTRDWLTHVRNTTGKNMFAVAEFWKNDIGAIRNYLSKTNWNHSVFDVPLHYNLYNASRSGGNYDMRQIFNGTVVQRHPTHGVTFVDNHDSQPEEALESFVEEWFKPLAYALTLTRDQGYPSVFYGDYYGIPTHGVPAMKSKIDPILEARQKYAYGTQRDYMDHPDVIGWTREGDGVHADSGLATLMSDGPGGSKWMEVGKNNAGEVWYDITGNQTNTVTINKDGWGQFHVSGGSVSIYVQQ

SEQ ID NO: 26375 - protein, 483 aa, Bacillus licheniformis
HHNQTNGTMMQYFEWYLPNDGNHWNRLRSDASNLKDKGITAVWIPPAWKGASQNDVGYGAYDLYDLGEFNQKGTVRTKYGTRNQLQAAVTALKSNGIQVWGDVVMNHKGGADATEWVRAVEVNPSNRNQEVSGDYTIEAWTKFDFPGRGNTHSNFKWRWYHFDGVDWDQSRQLQNKIYKFRGKEWDWEVDEENGNYDYLMYADYDMDHPEVVNELRNWGVWYTNTLGLDGFRIDAVKHIKYSFTRDWLEHVRNTTQKNMFAVAEFWKNDIGAIENYLSKTNWNHSVFDVPLHYNLYNASRSGGNYDMRQIFNGTVVQRHPTHAVTFVDNHDSQPEEALESFVEEWFKPLAYALTLTRDQGYPSVFYGDYYGIPTHGVPAMKSKIDPILEARQKYAYGTQRDYMDHPDVIGWTREGDGVHADSGLATLMSDGPGGSKWMEVGKNNAGEVWYDITGNQTNTVTINKDGWGQFHVSGGSVSIYVQQ

SEQ ID NO: 26376 - protein, 483 aa, Bacillus licheniformis
HHNQTNGTMMQYFEWYLPNDGNHWHRLRSDASNLKDKGITAVWIPPAWKGASQNDVGYGAYDLYDLGEFNQKGTVRTKYGTRNQLQAAVTALKSNGIQVYGDVVMNHKGGADATEWVRAVEVNPSNRNQEVSGDYTIEAWTKFDFPGRGNTHSNFKWRWWHFDGVDWDRSRQLQNRIYKFRGKEWDWEVDTENGNYDYLMYADYDMDHPEVVNELRNWGVWYTNTLGLDGFRIDAVKHIKYSFTRDWLTHVRNTTGKNMFAVAEFWKNDIGAIRNYLSKTNWNHSVFDVPLHYNLYNASRSGGNYDMRQIFNGTVVQRHPTHAVTFVDNHDSQPEEALESFVEEWFKPLAYALTLTRDQGYPSVFYGDYYGIPTHGVPAMKSKIDPILEARQKYAYGTQRDYLDHPDVIGWTREGDGVHADSGLATLMSDGPGGSKWMEVGKNNAGEVWYDITGNQTNTVTINKDGWGQFHVSGGSVSIYVQQ

SEQ ID NO: 26377 - protein, 483 aa, Bacillus licheniformis
HHNGTNGTMMQYFEWYLPNDGNHWHRLRSDASNLKDKGITAVWIPPAWKGASQNDVGYGAYDLYDLGEFNQKGTVRTKYGTRNQLQAAVTALKSNGIQVYGDVVMNHKGGADATEWVRAVEVNPSNRNQEVSGDTTIEAWTKFDFPGRGNTHSNFKWRWYHFDGVDWDQSRQLQNKIYKFRGKEWDWEVDTENGNYDYLMYADYDMDHPEVVNELRNWGVWYTNTLGLDGFRIDAVKHIKYSFTRDWLTHVRNTTQKNMFAVAEFWKNDIGAIENYLSKTNWNHSVFDVPLHYNLYNASRSGGNYDMRQIFNGTVVQRHPTHAVTFVDNHDSQPEEALESFVEEWFKPLAYALTLTRDQGEPSVFYGDYYGIPTHGVPAMKSKIDPILEARQKYAYGTQRDYLDHPDVIGWTREGDGVHADSGLATLMSDGPGGSKWMEVGKNNAGEVWYDITGNQTNTVTINKDGWGQFHVSGGSVSIYVQQ

SEQ ID NO: 26378 - protein, 483 aa, Bacillus licheniformis
HHNQTNGTMMQYFEWYLPNDGNHWNRLRSDASNLKDKGITAVWIPPAWKGASQNDVGYGAYDLYDLGEFNQKGTVRTKYGTRNQLQAAVTALKSNGIQVYGDVVMNHKGGADATEWVRAVEVNPSNRNQEVSGDTTIEAWTKFDFPGRGNTHSNFKWRWYHFDGVDWDQSRQLQNKIYKFRGKEWDWEVDEENGNYDYLMYADYDMDHPEVVNELRNWGVWYTNTLGLDGFRIDAVKHIKYSFTRDWLEHVRNTTQKNMFAVAEFWKNDIGAIENYLSKTNWNHSVFDVPLHYNLYNASRSGGNYDMRQIFNGTVVQRHPTHAVTFVDNHDSQPEEALESFVEEWFKPLAYALTLTRDQGYPSVFYGDYYGIPTHGVPAMKSKIDPILEARQKYAYGTQRDYMDHPDVIGWTREGDGVHADSGLATLMSDGPGGSKWMEVGKNNAGEVWYDITGNQTNTVTINKDGWGQFHVSGGSVSIYVQQ

SEQ ID NO: 26379 - protein, 483 aa, Bacillus licheniformis
HHNQTNGTMMQYFEWYLPNDGNHWNRLRSDASNLKDKGITAVWIPPAWKGASQNDVGYGAYDLYDLGEFNQKGTVRTKYGTRNQLQAAVTALKSNGIQVWGDVVMNHKGGADATEWVRAVEVNPSNRNQEVSGDYTIEAWTKFDFPGRGNTHSNFKWRWYHFDGVDWDQSRQLQNKIYKFRGKEWDWEVDEENGNYDYLMYADYDMDHPEVVNELRNWGVWYTNTLGLDGFRIDAVKHIKYSFTRDWLEHVRNTTGKNMFAVAEFWKNDIGAIENYLSNTNWNHSVFDVPLHYNLYNASRSGGNYDMRQIFNGTVVQRHPTHAVTFVDNHDSQPEEALESFVEEWFKPLAYALTLTRDQGYPSVFYGDYYGIPTHGVPAMKSKIDPILEARQKYAYGTQRDYMDHPDVIGWTREGDGVHADSGLATLMSDGPGGSKWMEVGKNNAGEVWYDITGNQTNTVTINKDGWGQFHVSGGSVSIYVQQ

SEQ ID NO: 26380 - protein, 483 aa, Bacillus licheniformis
HHNQTNGTMMQYFEWYLPNDGNHWNRLRSDASNLKDKGITAVWIPPAWKGASQNDVGYGAYDLYDLGEFNQKGTVRTKYGTRNQLQAAVTALKSNGIQVYGDVVMNHKGGADATEWVRAVEVNPSNRNQEVSGDYTIEAWTKFDFPGRGNTHSNFKWRWYHFDGVDWDQSRQLQNKIYKFQGKEWDWEVDEENGNYDYLMYADYDMDHPEVVNELRNWGVWYTNTLGLDGFRIDAVKHIKYSFTRDWLEHVRNTTQKNMFAVAEFWKNDIGAIENYLSKTNWNHSVFDVPLHYNLYNASRSGGNYDMRQIFNGTVVQRHPTHAVTFVDNHDSQPEEALESFVEEWFKPLAYALTLTRDQGYPSVFYGDYYGIPTHGVPAMKSKIDPILEARQKYAYGTQRDYMDHPDVIGWTREGDGVHADSGLATLMSDGPGGSKWMEVGKNNAGEVWYDITGNQTNTVTINKDGWGQFHVSGGSVSIYVQQ

SEQ ID NO: 26381 - protein, 483 aa, Bacillus licheniformis
HHNQTNGTMMQYFEWYLPNDGNHWHRLRSDASNLKDKGITAVWIPPAWKGASQNDVGYGAYDLYDLGEFNQKGTVRTKYGTRNQLQAAVTALKSNGIQVYGDVVMNHKGGADATEWVRAVEVNPSNRNQEVSGDYTIEAWTKFDFPGRGNTHSNFKWRWYHFDGVDWDQSRQLQNKIYKFRGKGWDWEVDTENGNYDYLMYADYDMDHPEVVNELRNWGVWYTNTLGLDGFRIDAVKHIKYSFTRDWLEHVRNTTGKNMFAVAEFWKNDIGAIRNYLSKTNWNHSVFDVPLHYNLYNASRSGGNYDMRQIFNGTVVQRHPTHAVTFVDNHDSQPEEALESFVEEWFKPLAYALTLTRDQGYPSVFYGDYYGIPTHGVPAMKSKIDPILEARQKYAYGTQRDYMDHPDVIGWTREGDGVHADSGLATLMSDGPGGSKWMEVGKNNAGEVWYDITGNQTNTVTINKDGWGQFHVSGGSVSIYVQQ

SEQ ID NO: 26382 - protein, 483 aa, Bacillus licheniformis
HHNQTNGTMMQYFEWYLPNDGNHWNRLRSDASNLKDKGITAVWIPPAWKGASQNDVGYGAYDLYDLGEFNQKGTVRTKYGTRNQLQAAVTALKSNGIQVYGDVVMNHKGGADATEWVRAVEVNPSNRNQEVSGDYTIEAWTKFDFPGRGNTHSNFKWRWYHFDGVDWDQSRQLQNKIYKFRGKEWDWEVDEENGNYDYLMYADYDMDHPEVVNELRNWGVWYTNTLGLDGFRIDAVKHIKYSFTRDWLEHVRNTTGKNMFAVAEFWKNDIGAIENYLSNTNWNHSVFDVPLHYNLYNASRSGGNYDMRQIFNGTVVQRHPTHAVTFVDNHDSQPEEALESFVEEWFKPLAYALTLTRDQGHPSVFYGDYYGIPTHGVPAMKSKIDPILEARQKYAYGTQRDYMDHPDVIGWTREGDGVHADSGLATLMSDGPGGSKWMEVGKNNAGEVWYDITGNQTNTVTINKDGWGQFHVSGGSVSIYVQQ

SEQ ID NO: 26383 - protein, 483 aa, Bacillus licheniformis
HHNQTNGTMMQYFEWYLPNDGNHWHRLRSDASNLKDKGITAVWIPPAWKGASQNDVGYGAYDLYDLGEFNQKGTVRTKYGTRNQLQAAVTALKSNGIQVYGDVVMNHKGGADATEWVRAVEVNPSNRNQEVSGDYTIEAWTKFDFPGRGNTHSNFKWRWYHFDGVDWDQSRQLQNKIYKFRGKEWDWEVDTENGNYDYLMYADYDMDHPEVVNELRNWGVWYTNTLGLDGFRIDAVKHIKYSFTRDWLEHVRNTTGKNMFAVAEFWKNDIGAIRNYLSKTNWNHSVFDVPLHYNLYNASRSGGNYDMRQIFNGTVVQRHPTHAVTFVDNHDSQPEEALESFVEEWFKPLAYALTLTRDQGYPSVFYGDYYGIPTHGVPAMKSKIDPILEARQKYAYGTQRDYMDHPDVIGWTREGDGVHADSGLATLMSDGPGGSKWMEVGKNNAGEVWYDITGNQTNTVTINKDGWGQFHVSGGSVSIYVQQ

SEQ ID NO: 26384 - protein, 483 aa, Bacillus licheniformis
HHNQTNGTMMQYFEWYLPNDGNHWNRLRSDASNLKDKGITAVWIPPAWKGASQNDVGYGAYDLYDLGEFNQKGTVRTKYGTRNQLQAAVTALKSNGIQVYGDVVMNHKGGADATEWVRAVEVNPSNRNQEVSGDTTIEAWTKFDFPGRGNTHSNFKWRWYHFDGVDWDQSRQLQNKIYKFRGKEWDWEVDEENGNYDYLMYADYDMDHPEVVNELRNWGVWYTNTLGLDGFRIDAVKHIKYSFTRDWLEHVRNTTGKNMFAVAEFWKNDIGAIENYLSKTNWNHSVFDVPLHYNLYNASRSGGNYDMRQIFNGTVVQRHPTHAVTFVDNHDSQPEEALESFVEEWFKPLAYALTLTRDQGEPSVFYGDYYGIPTHGVPAMKSKIDPILEARQKYAYGTQRDYMDHPDVIGWTREGDGVHADSGLATLMSDGPGGSKWMEVGKNNAGEVWYDITGNQTNTVTINKDGWGQFHVSGGSVSIYVQQ

SEQ ID NO: 26385 - protein, 483 aa, Bacillus licheniformis
HHNQTNGTMMQYFEWYLPNDGNHWHRLRSDASNLKDKGITAVWIPPAWKGASQNDVGYGAYDLYDLGEFNQKGTVRTKYGTRNQLQAAVTALKSNGIQVYGDVVMNHKGGADATEWVRAVEVNPSNRNQEVSGDYTIEAWTKFDFPGRGNTHSNFKWRWWHFDGVDWDQSRQLQNRIYKFRGKEWDWEVDTENGNYDYLMYADYDMDHPEVVNELRNWGVWYTNTLGLDGFRIDAVKHIKYSFTRDWLEHVRNTTGKNMFAVAEFWKNDIGAIRNYLSKTNWNHSVFDVPLHYNLYNASRSGGNYDMRQIFNGTVVQRHPTHAVTFVDNHDSQPEEALESFVEEWFKPLAYALTLTRDQGYPSVFYGDYYGIPTHGVPAMKSKIDPILEARQKYAYGTQRDYMDHPDVIGWTREGDGVHADSGLATLMSDGPGGSKWMEVGKNNAGEVWYDITGNQTNTVTINKDGWGQFHVSGGSVSIYVQQ

SEQ ID NO: 26386 - protein, 483 aa, Bacillus licheniformis
HHNGTNGTMMQYFEWYLPNDGNHWHRLRSDASNLKDKGITAVWIPPAWKGASQNDVGYGAYDLYDLGEFNQKGTVRTKYGTRNQLQAAVTALKSNGIQVYGDVVMNHKGGADATEWVRAVEVNPSNRNQEVSGDYTIEAWTKFDFPGRGNTHSNFKWRWWHFDGVDWDQSRQLQNRIYKFRGKEWDWEVDTENGNYDYLMYADYDMDHPEVVNELRNWGVWYTNTLGLDGFRIDAVKHIKYSFTRDWLEHVRNTTGKNMFAVAEFWKNDIGAIRNYLSKTNWNHSVFDVPLHYNLYNASRSGGNYDMRQIFNGTVVQRHPTHGVTFVDNHDSQPEEALESFVEEWFKPLAYALTLTRDQGYPSVFYGDYYGIPTHGVPAMKSKIDPILEARQKYAYGTQRDYMDHPDVIGWTREGDGVHADSGLATLMSDGPGGSKWMEVGKNNAGEVWYDITGNQTNTVTINKDGWGQFHVSGGSVSIYVQQ

SEQ ID NO: 26387 - protein, 483 aa, Bacillus licheniformis
HHNQTNGTMMQYFEWYLPNDGNHWHRLRSDASNLKDKGITAVWIPPAWKGASQNDVGYGAYDLYDLGEFNQKGTVRTKYGTRNQLQAAVTALKSNGIQVYGDVVMNHKGGADATEWVRAVEVNPSNRNQEVSGDYTIEAWTKFDFPGRGNTHSNFKWRWWHFDGVDWDQSRQLQNKIYKFRGKEWDWEVDTENGNYDYLMYADIDMDHPEVVNELRNWGVWYTNTLGLDGFRIDAVKHIKYSFTRDWLEHVRNTTGKNMFAVAEFWKNDIGAIENYLSKTNWNHSVFDVPLHYNLYNASRSGGNYDMRQIFNGTVVQRHPTHAVTFVDNHDSQPEEALESFVEEWFKPLAYALTLTRDQGYPSVFYGDYYGIPTHGVPAMKSKIDPILEARQKYAYGTQRDYMDHPDVIGWTREGDGVHADSGLATLMSDGPGGSKWMEVGKNNAGEVWYDITGNQTNTVTINKDGWGQFHVSGGSVSIYVQQ

SEQ ID NO: 26388 - protein, 483 aa, Bacillus licheniformis
HHNGTNGTMMQYFEWYLPNDGNHWHRLRSDASNLKDKGITAVWIPPAWKGASQNDVGYGAYDLYDLGEFNQKGTVRTKYGTRNQLQAAVTALKSNGIQVYGDVVMNHKGGADATEWVRAVEVNPSNRNQEVSGDTTIEAWTKFDFPGRGNTHSNFKWRWYHFDGVDWDQSRQLQNKIYKFRGKEWDWEVDTENGNYDYLMYADYDMDHPEVVNELRNWGVWYTNTLGLDGFRIDAVKHIKYSFTRDWLTHVRNTTGKNMFAVAEFWKNDIGAIENYLSNTNWNHSVFDVPLHYNLYNASRSGGNYDMRQIFNGTVVQRHPTHAVTFVDNHDSQPEEALESFVEEWFKPLAYALTLTRDQGEPSVFYGDYYGIPTHGVPAMKSKIDPILEARQKYAYGTQRDYLDHPDVIGWTREGDGVHADSGLATLMSDGPGGSKWMEVGKNNAGEVWYDITGNQTNTVTINKDGWGQFHVSGGSVSIYVQQ

SEQ ID NO: 26389 - protein, 483 aa, Bacillus licheniformis
HHNQTNGTMMQYFEWYLPNDGNHWHRLRSDASNLKDKGITAVWIPPAWKGASQNDVGYGAYDLYDLGEFNQKGTVRTKYGTRNQLQAAVTALKSNGIQVYGDVVMNHKGGADATEWVRAVEVNPSNRNQEVSGDYTIEAWTKFDFPGRGNTHSNFKWRWWHFDGVDWDQSRQLQNKIYKFRGKEWDWEVDTENGNYDYLMYADYDMDHPEVVNELRNWGVWYTNTLGLDGFRIDAVKHIKYSFTRDWLTHVRNTTGKNMFAVAEFWKNDIGAIRNYLSKTNWNHSVFDVPLHYNLYNASRSGGNYDMRQIFNGTVVQRHPTHAVTFVDNHDSQPEEALESFVEEWFKPLAYALTLTRDQGYPSVFYGDYYGIPTHGVPAMKSKIDPILEARQKYAYGTQRDYLDHPDVIGWTREGDGVHADSGLATLMSDGPGGSKWMEVGKNNAGEVWYDITGNQTNTVTINKDGWGQFHVSGGSVSIYVQQ

SEQ ID NO: 26390 - protein, 483 aa, Bacillus licheniformis
HHNQTNGTMMQYFEWYLPNDGNHWNRLRSDASNLKDKGITAVWIPPAWKGASQNDVGYGAYDLYDLGEFNQKGTVRTKYGTRNQLQAAVTALKSNGIQVYGDVVMNHKGGADATEWVRAVEVNPSNRNQEVSGDYTIEAWTKFDFPGRGNTHSNFKWRWYHFDGVDWDQSRQLQNKIYKFQGKEWDWEVDEENGNYDYLMYADYDMDHPEVVNELRNWGVWYTNTLGLDGFRIDAVKHIKYSFTRDWLEHVRNTTGKNMFAVAEFWKNDIGAIENYLSKTNWNHSVFDVPLHYNLYNASRSGGNYDMRQIFNGTVVQRHPTHAVTFVDNHDSQPEEALESFVEEWFKPLAYALTLTRDQGHPSVFYGDYYGIPTHGVPAMKSKIDPILEARQKYAYGTQRDYMDHPDVIGWTREGDGVHADSGLATLMSDGPGGSKWMEVGKNNAGEVWYDITGNQTNTVTINKDGWGQFHVSGGSVSIYVQQ

SEQ ID NO: 26391 - protein, 483 aa, Bacillus licheniformis
HHNQTNGTMMQYFEWYLPNDGNHWNRLRSDASNLKDKGITAVWIPPAWKGASQNDVGYGAYDLYDLGEFNQKGTVRTKYGTRNQLQAAVTALKSNGIQVYGDVVMNHKGGADATEWVRAVEVNPSNRNQEVSGDYTIEAWTKFDFPGRGNTHSNFKWRWYHFDGVDWDQSRQLQNKIYKFQGKEWDWEVDEENGNYDYLMYADYDMDHPEVVNELRNWGVWYTNTLGLDGFRIDAVKHIKYSFTRDWLEHVRNTTGKNMFAVAEFWKNDIGAIENYLSNTNWNHSVFDVPLHYNLYNASRSGGNYDMRQIFNGTVVQRHPTHAVTFVDNHDSQPEEALESFVEEWFKPLAYALTLTRDQGYPSVFYGDYYGIPTHGVPAMKSKIDPILEARQKYAYGTQRDYMDHPDVIGWTREGDGVHADSGLATLMSDGPGGSKWMEVGKNNAGEVWYDITGNQTNTVTINKDGWGQFHVSGGSVSIYVQQ

SEQ ID NO: 26392 - protein, 483 aa, unidentified
HHNGTNGTMMQYFEWYLPNDGNHWNRLRSDASNLKDKGISAVWIPPAWKGASQNDVGYGAYDLYDLGEFNQKGTIRTKYGTRNQLQAAVNALKSNGIQVYGDVVMNHKGGADATEMVKAVEVNPNNRNQEVSGEYTIEAWTKFDFPGRGNTHSNFKWRWYHFDGVDWDQSRKLNNRIYKFRGKGWDWEVDTEFGNYDYLMYADIDMDHPEVVNELRNWGVWYTNTLGLDGFRIDAVKHIKYSFTRDWINHVRSATGKNMFAVAEFWKNDLGAIENYLNKTNWNHSVFDVPLHYNLYNASKSGGNYDMRQIFNGTVVQKHPMHAVTFVDNHDSQPEEALESFVEEWFKPLAYALTLTREQGYPSVFYGDYYGIPTHGVPAMKSKIDPILEARQKYAYGRQHDYFDHHDIVGWTREGDSSVANSGLAALITDGPGGAKRMYVGRQNAGETWHDITGNRSEPVVINSEGWGEFHVNGGSVSIYVQR

SEQ ID NO: 26393 - protein, 483 aa, Bacillus licheniformis
HHNQTNGTMMQYFEWYLPNDGNHWNRLRSDASNLKDKGITAVWIPPAWKGASQNDVGYGAYDLYDLGEFNQKGTVRTKYGTRNQLQAAVTALKSNGIQVYGDVVMNHKGGADATEWVRAVEVNPSNRNQEVSGDYTIEAWTKFDFPGRGNTHSNFKWRWYHFDGVDWDQSRQLQNKIYKFQGKEWDWEVDEENGNYDYLMYADYDMDHPEVVNELRNWGVWYTNTLGLDGFRIDAVKHIKYSFTRDWLEHVRNTTGKNMFAVAEFWKNDIGAIENYLSKTNWNHSVFDVPLHYNLYNASRSGGNYDMRQIFNGTVVQRHPTHAVTFVDNHDSQPEEALESFVEEWFKPLAYALTLTRDQGEPSVFYGDYYGIPTHGVPAMKSKIDPILEARQKYAYGTQRDYMDHPDVIGWTREGDGVHADSGLATLMSDGPGGSKWMEVGKNNAGEVWYDITGNQTNTVTINKDGWGQFHVSGGSVSIYVQQ

SEQ ID NO: 26394 - protein, 483 aa, Bacillus licheniformis
HHNQTNGTMMQYFEWYLPNDGNHWNRLRSDASNLKDKGITAVWIPPAWKGASQNDVGYGAYDLYDLGEFNQKGTVRTKYGTRNQLQAAVTALKSNGIQVWGDVVMNHKGGADATEWVRAVEVNPSNRNQEVSGDYTIEAWTKFDFPGRGNTHSNFKWRWYHFDGVDWDQSRQLQNKIYKFRGKEWDWEVDEENGNYDYLMYADYDMDHPEVVNELRNWGVWYTNTLGLDGFRIDAVKHIKYSFTRDWLEHVRNTTGKNMFAVAEFWKNDIGAIENYLSKTNWNHSVFDVPLHYNLYNASRSGGNYDMRQIFNGTVVQRHPTHAVTFVDNHDSQPEEALESFVEEWFKPLAYALTLTRDQGEPSVFYGDYYGIPTHGVPAMKSKIDPILEARQKYAYGTQRDYMDHPDVIGWTREGDGVHADSGLATLMSDGPGGSKWMEVGKNNAGEVWYDITGNQTNTVTINKDGWGQFHVSGGSVSIYVQQ

SEQ ID NO: 26395 - protein, 483 aa, Bacillus licheniformis
HHNGTNGTMMQYFEWYLPNDGNHWHRLRSDASNLKDKGITAVWIPPAWKGASQNDVGYGAYDLYDLGEFNQKGTVRTKYGTRNQLQAAVTALKSNGIQVYGDVVMNHKGGADATEWVRAVEVNPSNRNQEVSGDTTIEAWTKFDFPGRGNTHSNFKWRWYHFDGVDWDQSRQLQNKIYKFRGKEWDWEVDTENGNYDYLMYADYDMDHPEVVNELRNWGVWYTNTLGLDGFRIDAVKHIKYSFTRDWLTHVRNTTQKNMFAVAEFWKNDIGAIENYLSNTNWNHSVFDVPLHYNLYNASRSGGNYDMRQIFNGTVVQRHPTHAVTFVDNHDSQPEEALESFVEEWFKPLAYALTLTRDQGYPSVFYGDYYGIPTHGVPAMKSKIDPILEARQKYAYGTQRDYLDHPDVIGWTREGDGVHADSGLATLMSDGPGGSKWMEVGKNNAGEVWYDITGNQTNTVTINKDGWGQFHVSGGSVSIYVQQ

SEQ ID NO: 26396 - protein, 483 aa, Bacillus licheniformis
HHNQTNGTMMQYFEWYLPNDGNHWNRLRSDASNLKDKGITAVWIPPAWKGASQNDVGYGAYDLYDLGEFNQKGTVRTKYGTRNQLQAAVTALKSNGIQVYGDVVMNHKGGADATEWVRAVEVNPSNRNQEVSGDYTIEAWTKFDFPGRGNTHSNFKWRWYHFDGVDWDQSRQLQNKIYKFRGKEWDWEVDEENGNYDYLMYADYDMDHPEVVNELRNWGVWYTNTLGLDGFRIDAVKHIKYSFTRDWLEHVRNTTQKNMFAVAEFWKNDIGAIENYLSNTNWNHSVFDVPLHYNLYNASRSGGNYDMRQIFNGTVVQRHPTHAVTFVDNHDSQPEEALESFVEEWFKPLAYALTLTRDQGYPSVFYGDYYGIPTHGVPAMKSKIDPILEARQKYAYGTQRDYMDHPDVIGWTREGDGVHADSGLATLMSDGPGGSKWMEVGKNNAGEVWYDITGNQTNTVTINKDGWGQFHVSGGSVSIYVQQ

SEQ ID NO: 26397 - protein, 483 aa, Bacillus licheniformis
HHNQTNGTMMQYFEWYLPNDGNHWHRLRSDASNLKDKGITAVWIPPAWKGASQNDVGYGAYDLYDLGEFNQKGTVRTKYGTRNQLQAAVTALKSNGIQVYGDVVMNHKGGADATEWVRAVEVNPSNRNQEVSGDYTIEAWTKFDFPGRGNTHSNFKWRWWHFDGVDWDQSRQLQNKIYKFRGKEWDWEVDTENGNYDYLMYADYDMDHPEVVNELRNWGVWYTNTLGLDGFRIDAVKHIKYSFTRDWLEHVRNTTGKNMFAVAEFWKNDIGAIENYLSKTNWNHSVFDVPLHYNLYNASRSGGNYDMRQIFNGTVVQRHPTHAVTFVDNHDSQPEEALESFVEEWFKPLAYALTLTRDQGYPSVFYGDYYGIPTHGVPAMKSKIDPILEARQKYAYGTQRDYMDHPDVIGWTREGDGVHADSGLATLMSDGPGGSKWMEVGKNNAGEVWYDITGNQTNTVTINKDGWGQFHVSGGSVSIYVQQ

SEQ ID NO: 26398 - protein, 483 aa, Bacillus licheniformis
HHNQTNGTMMQYFEWYLPNDGNHWNRLRSDASNLKDKGITAVWIPPAWKGASQNDVGYGAYDLYDLGEFNQKGTVRTKYGTRNQLQAAVTALKSNGIQVWGDVVMNHKGGADATEWVRAVEVNPSNRNQEVSGDYTIEAWTKFDFPGRGNTHSNFKWRWYHFDGVDWDQSRQLQNKIYKFRGKEWDWEVDEENGNYDYLMYADYDMDHPEVVNELRNWGVWYTNTLGLDGFRIDAVKHIKYSFTRDWLEHVRNTTGKNMFAVAEFWKNDIGAIENYLSKTNWNHSVFDVPLHYNLYNASRSGGNYDMRQIFNGTVVQRHPTHAVTFVDNHDSQPEEALESFVEEWFKPLAYALTLTRDQGHPSVFYGDYYGIPTHGVPAMKSKIDPILEARQKYAYGTQRDYMDHPDVIGWTREGDGVHADSGLATLMSDGPGGSKWMEVGKNNAGEVWYDITGNQTNTVTINKDGWGQFHVSGGSVSIYVQQ

SEQ ID NO: 26399 - protein, 483 aa, Bacillus licheniformis
HHNGTNGTMMQYFEWYLPNDGNHWHRLRSDASNLKDKGITAVWIPPAWKGASQNDVGYGAYDLYDLGEFNQKGTVRTKYGTRNQLQAAVTALKSNGIQVYGDVVMNHKGGADATEWVRAVEVNPSNRNQEVSGDYTIEAWTKFDFPGRGNTHSNFKWRWWHFDGVDWDQSRQLQNKIYKFRGKEWDWEVDTENGNYDYLMYADIDMDHPEVVNELRNWGVWYTNTLGLDGFRIDAVKHIKYSFTRDWLEHVRNTTGKNMFAVAEFWKNDIGAIRNYLSKTNWNHSVFDVPLHYNLYNASRSGGNYDMRQIFNGTVVQRHPTHAVTFVDNHDSQPEEALESFVEEWFKPLAYALTLTRDQGYPSVFYGDYYGIPTHGVPAMKSKIDPILEARQKYAYGTQRDYLDHPDVIGWTREGDGVHADSGLATLMSDGPGGSKWMEVGKNNAGEVWYDITGNQTNTVTINKDGWGQFHVSGGSVSIYVQQ

SEQ ID NO: 26400 - protein, 483 aa, Bacillus licheniformis
HHNGTNGTMMQYFEWYLPNDGNHWHRLRSDASNLKDKGITAVWIPPAWKGASQNDVGYGAYDLYDLGEFNQKGTVRTKYGTRNQLQAAVTALKSNGIQVWGDVVMNHKGGADATEWVRAVEVNPSNRNQEVSGDYTIEAWTKFDFPGRGNTHSNFKWRWYHFDGVDWDQSRQLQNKIYKFQGKEWDWEVDTENGNYDYLMYADYDMDHPEVVNELRNWGVWYTNTLGLDGFRIDAVKHIKYSFTRDWLTHVRNTTGKNMFAVAEFWKNDIGAIENYLSKTNWNHSVFDVPLHYNLYNASRSGGNYDMRQIFNGTVVQRHPTHAVTFVDNHDSQPEEALESFVEEWFKPLAYALTLTRDQGEPSVFYGDYYGIPTHGVPAMKSKIDPILEARQKYAYGTQRDYLDHPDVIGWTREGDGVHADSGLATLMSDGPGGSKWMEVGKNNAGEVWYDITGNQTNTVTINKDGWGQFHVSGGSVSIYVQQ

SEQ ID NO: 26401 - protein, 483 aa, Bacillus licheniformis
HHNQTNGTMMQYFEWYLPNDGNHWNRLRSDASNLKDKGITAVWIPPAWKGASQNDVGYGAYDLYDLGEFNQKGTVRTKYGTRNQLQAAVTALKSNGIQVYGDVVMNHKGGADATEWVRAVEVNPSNRNQEVSGDTTIEAWTKFDFPGRGNTHSNFKWRWYHFDGVDWDQSRQLQNKIYKFRGKEWDWEVDEENGNYDYLMYADYDMDHPEVVNELRNWGVWYTNTLGLDGFRIDAVKHIKYSFTRDWLEHVRNTTGKNMFAVAEFWKNDIGAIENYLSKTNWNHSVFDVPLHYNLYNASRSGGNYDMRQIFNGTVVQRHPTHAVTFVDNHDSQPEEALESFVEEWFKPLAYALTLTRDQGHPSVFYGDYYGIPTHGVPAMKSKIDPILEARQKYAYGTQRDYMDHPDVIGWTREGDGVHADSGLATLMSDGPGGSKWMEVGKNNAGEVWYDITGNQTNTVTINKDGWGQFHVSGGSVSIYVQQ

SEQ ID NO: 26402 - protein, 483 aa, Bacillus licheniformis
HHNGTNGTMMQYFEWYLPNDGNHWHRLRSDASNLKDKGITAVWIPPAWKGASQNDVGYGAYDLYDLGEFNQKGTVRTKYGTRNQLQAAVTALKSNGIQVWGDVVMNHKGGADATEWVRAVEVNPSNRNQEVSGDTTIEAWTKFDFPGRGNTHSNFKWRWYHFDGVDWDQSRQLQNKIYKFQGKEWDWEVDTENGNYDYLMYADYDMDHPEVVNELRNWGVWYTNTLGLDGFRIDAVKHIKYSFTRDWLTHVRNTTGKNMFAVAEFWKNDIGAIENYLSKTNWNHSVFDVPLHYNLYNASRSGGNYDMRQIFNGTVVQRHPTHAVTFVDNHDSQPEEALESFVEEWFKPLAYALTLTRDQGYPSVFYGDYYGIPTHGVPAMKSKIDPILEARQKYAYGTQRDYLDHPDVIGWTREGDGVHADSGLATLMSDGPGGSKWMEVGKNNAGEVWYDITGNQTNTVTINKDGWGQFHVSGGSVSIYVQQ

SEQ ID NO: 26403 - protein, 483 aa, Bacillus licheniformis
HHNQTNGTMMQYFEWYLPNDGNHWHRLRSDASNLKDKGITAVWIPPAWKGASQNDVGYGAYDLYDLGEFNQKGTVRTKYGTRNQLQAAVTALKSNGIQVYGDVVMNHKGGADATEWVRAVEVNPSNRNQEVSGDYTIEAWTKFDFPGRGNTHSNFKWRWWHFDGVDWDQSRQLQNKIYKFRGKEWDWEVDTENGNYDYLMYADYDMDHPEVVNELRNWGVWYTNTLGLDGFRIDAVKHIKYSFTRDWLEHVRNTTGKNMFAVAEFWKNDIGAIENYLSKTNWNHSVFDVPLHYNLYNASRSGGNYDMRQIFNGTVVQRHPTHAVTFVDNHDSQPEEALESFVEEWFKPLAYALTLTRDQGYPSVFYGDYYGIPTHGVPAMKSKIDPILEARQKYAYGTQRDYLDHPDVIGWTREGDGVHADSGLATLMSDGPGGSKWMEVGKNNAGEVWYDITGNQTNTVTINKDGWGQFHVSGGSVSIYVQQ

SEQ ID NO: 26404 - protein, 483 aa, Bacillus licheniformis
HHNGTNGTMMQYFEWYLPNDGNHWHRLRSDASNLKDKGITAVWIPPAWKGASQNDVGYGAYDLYDLGEFNQKGTVRTKYGTRNQLQAAVTALKSNGIQVYGDVVMNHKGGADATEWVRAVEVNPSNRNQEVSGDTTIEAWTKFDFPGRGNTHSNFKWRWYHFDGVDWDQSRQLQNKIYKFQGKEWDWEVDTENGNYDYLMYADYDMDHPEVVNELRNWGVWYTNTLGLDGFRIDAVKHIKYSFTRDWLTHVRNTTQKNMFAVAEFWKNDIGAIENYLSKTNWNHSVFDVPLHYNLYNASRSGGNYDMRQIFNGTVVQRHPTHAVTFVDNHDSQPEEALESFVEEWFKPLAYALTLTRDQGYPSVFYGDYYGIPTHGVPAMKSKIDPILEARQKYAYGTQRDYLDHPDVIGWTREGDGVHADSGLATLMSDGPGGSKWMEVGKNNAGEVWYDITGNQTNTVTINKDGWGQFHVSGGSVSIYVQQ

SEQ ID NO: 26405 - protein, 483 aa, Bacillus licheniformis
HHNGTNGTMMQYFEWYLPNDGNHWHRLRSDASNLKDKGITAVWIPPAWKGASQNDVGYGAYDLYDLGEFNQKGTVRTKYGTRNQLQAAVTALKSNGIQVWGDVVMNHKGGADATEWVRAVEVNPSNRNQEVSGDYTIEAWTKFDFPGRGNTHSNFKWRWYHFDGVDWDQSRQLQNKIYKFRGKEWDWEVDEENGNYDYLMYADYDMDHPEVVNELRNWGVWYTNTLGLDGFRIDAVKHIKYSFTRDWLTHVRNTTQKNMFAVAEFWKNDIGAIENYLSNTNWNHSVFDVPLHYNLYNASRSGGNYDMRQIFNGTVVQRHPTHAVTFVDNHDSQPEEALESFVEEWFKPLAYALTLTRDQGYPSVFYGDYYGIPTHGVPAMKSKIDPILEARQKYAYGTQRDYLDHPDVIGWTREGDGVHADSGLATLMSDGPGGSKWMEVGKNNAGEVWYDITGNQTNTVTINKDGWGQFHVSGGSVSIYVQQ

SEQ ID NO: 26406 - protein, 483 aa, Bacillus licheniformis
HHNGTNGTMMQYFEWYLPNDGNHWHRLRSDASNLKDKGITAVWIPPAWKGASQNDVGYGAYDLYDLGEFNQKGTVRTKYGTRNQLQAAVTALKSNGIQVYGDVVMNHKGGADATEWVRAVEVNPSNRNQEVSGDYTIEAWTKFDFPGRGNTHSNFKWRWYHFDGVDWDQSRQLQNKIYKFRGKEWDWEVDTENGNYDYLMYADYDMDHPEVVNELRNWGVWYTNTLGLDGFRIDAVKHIKYSFTRDWLTHVRNTTQKNMFAVAEFWKNDIGAIENYLSNTNWNHSVFDVPLHYNLYNASRSGGNYDMRQIFNGTVVQRHPTHAVTFVDNHDSQPEEALESFVEEWFKPLAYALTLTRDQGEPSVFYGDYYGIPTHGVPAMKSKIDPILEARQKYAYGTQRDYLDHPDVIGWTREGDGVHADSGLATLMSDGPGGSKWMEVGKNNAGEVWYDITGNQTNTVTINKDGWGQFHVSGGSVSIYVQQ

SEQ ID NO: 26407 - protein, 483 aa, Bacillus licheniformis
HHNGTNGTMMQYFEWYLPNDGNHWHRLRSDASNLKDKGITAVWIPPAWKGASQNDVGYGAYDLYDLGEFNQKGTVRTKYGTRNQLQAAVTALKSNGIQVYGDVVMNHKGGADATEWVRAVEVNPSNRNQEVSGDYTIEAWTKFDFPGRGNTHSNFKWRWWHFDGVDWDQSRQLQNKIYKFRGKGWDWEVDTENGNYDYLMYADYDMDHPEVVNELRNWGVWYTNTLGLDGFRIDAVKHIKYSFTRDWLEHVRNTTGKNMFAVAEFWKNDIGAIENYLSKTNWNHSVFDVPLHYNLYNASRSGGNYDMRQIFNGTVVQRHPTHGVTFVDNHDSQPEEALESFVEEWFKPLAYALTLTRDQGYPSVFYGDYYGIPTHGVPAMKSKIDPILEARQKYAYGTQRDYMDHPDVIGWTREGDGVHADSGLATLMSDGPGGSKWMEVGKNNAGEVWYDITGNQTNTVTINKDGWGQFHVSGGSVSIYVQQ

SEQ ID NO: 26408 - protein, 485 aa, Bacillus sp.
HHNGTNGTMMQYFEWYLPNDGNHWNRLNSDASNLKSKGITAVWIPPAWKGASQNDVGYGAYDLYDLGEFNQKGTVRTKYGTRSQLQAAVTSLKNNGIQVYGDVVMNHKGGADATEMVRAVEVNPNNRNQEVTGEYTIEAWTRFDFPGRGNTHSSFKWRWYHFDGVDWDQSRRLNNRIYKFRGHGKAWDWEVDTENGNYDYLMYADIDMDHPEVVNELRNWGVWYTNTLGLDGFRIDAVKHIKYSFTRDWINHVRSATGKNMFAVAEFWKNDLGAIENYLQKTNWNHSVFDVPLHYNLYNASKSGGNYDMRNIFNGTVVQRHPSHAVTFVDNHDSQPEEALESFVEEWFKPLAYALTLTREQGYPSVFYGDYYGIPTHGVPAMRSKIDPILEARQKYAYGTQHDYLDNQDVIGWTREGDSAHAGSGLATVMSDGPGGSKTMYVGTAHAGQVFKDITGNRTDTVTINSAGNGTFPCNGGSVSIWVKQ

SEQ ID NO: 26409 - protein, 483 aa, Bacillus licheniformis
HHNQTNGTMMQYFEWYLPNDGNHWNRLRSDASNLKDKGITAVWIPPAWKGASQNDVGYGAYDLYDLGEFNQKGTVRTKYGTRNQLQAAVTALKSNGIQVWGDVVMNHKGGADATEWVRAVEVNPSNRNQEVSGDYTIEAWTKFDFPGRGNTHSNFKWRWYHFDGVDWDQSRQLQNKIYKFQGKEWDWEVDEENGNYDYLMYADYDMDHPEVVNELRNWGVWYTNTLGLDGFRIDAVKHIKYSFTRDWLEHVRNTTGKNMFAVAEFWKNDIGAIENYLSKTNWNHSVFDVPLHYNLYNASRSGGNYDMRQIFNGTVVQRHPTHAVTFVDNHDSQPEEALESFVEEWFKPLAYALTLTRDQGYPSVFYGDYYGIPTHGVPAMKSKIDPILEARQKYAYGTQRDYMDHPDVIGWTREGDGVHADSGLATLMSDGPGGSKWMEVGKNNAGEVWYDITGNQTNTVTINKDGWGQFHVSGGSVSIYVQQ

SEQ ID NO: 26410 - protein, 483 aa, Bacillus licheniformis
HHNGTNGTMMQYFEWYLPNDGNHWHRLRSDASNLKDKGITAVWIPPAWKGASQNDVGYGAYDLYDLGEFNQKGTVRTKYGTRNQLQAAVTALKSNGIQVWGDVVMNHKGGADATEWVRAVEVNPSNRNQEVSGDTTIEAWTKFDFPGRGNTHSNFKWRWYHFDGVDWDQSRQLQNKIYKFRGKEWDWEVDTENGNYDYLMYADYDMDHPEVVNELRNWGVWYTNTLGLDGFRIDAVKHIKYSFTRDWLTHVRNTTQKNMFAVAEFWKNDIGAIENYLSKTNWNHSVFDVPLHYNLYNASRSGGNYDMRQIFNGTVVQRHPTHAVTFVDNHDSQPEEALESFVEEWFKPLAYALTLTRDQGYPSVFYGDYYGIPTHGVPAMKSKIDPILEARQKYAYGTQRDYLDHPDVIGWTREGDGVHADSGLATLMSDGPGGSKWMEVGKNNAGEVWYDITGNQTNTVTINKDGWGQFHVSGGSVSIYVQQ

SEQ ID NO: 26411 - protein, 483 aa, Bacillus licheniformis
HHNQTNGTMMQYFEWYLPNDGNHWNRLRSDASNLKDKGITAVWIPPAWKGASQNDVGYGAYDLYDLGEFNQKGTVRTKYGTRNQLQAAVTALKSNGIQVYGDVVMNHKGGADATEWVRAVEVNPSNRNQEVSGDYTIEAWTKFDFPGRGNTHSNFKWRWYHFDGVDWDQSRQLQNKIYKFRGKEWDWEVDEENGNYDYLMYADYDMDHPEVVNELRNWGVWYTNTLGLDGFRIDAVKHIKYSFTRDWLEHVRNTTGKNMFAVAEFWKNDIGAIENYLSNTNWNHSVFDVPLHYNLYNASRSGGNYDMRQIFNGTVVQRHPTHAVTFVDNHDSQPEEALESFVEEWFKPLAYALTLTRDQGEPSVFYGDYYGIPTHGVPAMKSKIDPILEARQKYAYGTQRDYMDHPDVIGWTREGDGVHADSGLATLMSDGPGGSKWMEVGKNNAGEVWYDITGNQTNTVTINKDGWGQFHVSGGSVSIYVQQ

SEQ ID NO: 26412 - protein, 483 aa, Bacillus licheniformis
HHNGTNGTMMQYFEWYLPNDGNHWHRLRSDASNLKDKGITAVWIPPAWKGASQNDVGYGAYDLYDLGEFNQKGTVRTKYGTRNQLQAAVTALKSNGIQVWGDVVMNHKGGADATEWVRAVEVNPSNRNQEVSGDYTIEAWTKFDFPGRGNTHSNFKWRWYHFDGVDWDQSRQLQNKIYKFQGKEWDWEVDEENGNYDYLMYADYDMDHPEVVNELRNWGVWYTNTLGLDGFRIDAVKHIKYSFTRDWLTHVRNTTGKNMFAVAEFWKNDIGAIENYLSKTNWNHSVFDVPLHYNLYNASRSGGNYDMRQIFNGTVVQRHPTHAVTFVDNHDSQPEEALESFVEEWFKPLAYALTLTRDQGEPSVFYGDYYGIPTHGVPAMKSKIDPILEARQKYAYGTQRDYLDHPDVIGWTREGDGVHADSGLATLMSDGPGGSKWMEVGKNNAGEVWYDITGNQTNTVTINKDGWGQFHVSGGSVSIYVQQ

SEQ ID NO: 26413 - protein, 483 aa, Bacillus licheniformis
HHNGTNGTMMQYFEWYLPNDGNHWHRLRSDASNLKDKGITAVWIPPAWKGASQNDVGYGAYDLYDLGEFNQKGTVRTKYGTRNQLQAAVTALKSNGIQVWGDVVMNHKGGADATEWVRAVEVNPSNRNQEVSGDTTIEAWTKFDFPGRGNTHSNFKWRWYHFDGVDWDQSRQLQNKIYKFRGKEWDWEVDTENGNYDYLMYADYDMDHPEVVNELRNWGVWYTNTLGLDGFRIDAVKHIKYSFTRDWLTHVRNTTGKNMFAVAEFWKNDIGAIENYLSKTNWNHSVFDVPLHYNLYNASRSGGNYDMRQIFNGTVVQRHPTHAVTFVDNHDSQPEEALESFVEEWFKPLAYALTLTRDQGEPSVFYGDYYGIPTHGVPAMKSKIDPILEARQKYAYGTQRDYLDHPDVIGWTREGDGVHADSGLATLMSDGPGGSKWMEVGKNNAGEVWYDITGNQTNTVTINKDGWGQFHVSGGSVSIYVQQ

SEQ ID NO: 26414 - protein, 483 aa, Bacillus licheniformis
HHNQTNGTMMQYFEWYLPNDGNHWNRLRSDASNLKDKGITAVWIPPAWKGASQNDVGYGAYDLYDLGEFNQKGTVRTKYGTRNQLQAAVTALKSNGIQVYGDVVMNHKGGADATEWVRAVEVNPSNRNQEVSGDYTIEAWTKFDFPGRGNTHSNFKWRWWHFDGVDWDQSRQLQNKIYKFRGKEWDWEVDTENGNYDYLMYADIDMDHPEVVNELRNWGVWYTNTLGLDGFRIDAVKHIKYSFTRDWLEHVRNTTGKNMFAVAEFWKNDIGAIRNYLSKTNWNHSVFDVPLHYNLYNASRSGGNYDMRQIFNGTVVQRHPTHAVTFVDNHDSQPEEALESFVEEWFKPLAYALTLTRDQGYPSVFYGDYYGIPTHGVPAMKSKIDPILEARQKYAYGTQRDYMDHPDVIGWTREGDGVHADSGLATLMSDGPGGSKWMEVGKNNAGEVWYDITGNQTNTVTINKDGWGQFHVSGGSVSIYVQQ

SEQ ID NO: 26415 - protein, 520 aa, unidentified
KKSFPWILSLLLLFSFIAPFSIQTEKVRAGSVPVNGTMMQYFEWYLPDDGTLWTKVANNAQSLANLGITALWLPPAYKGTSSSDVGYGVYDLYDLGEFNQKGTVRTKYGTKTQYIQAIQAAHTAGMRVYADVVFNHKAGADGTELVDAVEVNPSDRNQEISGTYQIQAWTKFDFPGRGNTYSSFKWRWYHFDGTDWDESRKLNRIYKFRGTGKAWDWEVDTENGNYDYLMYADLDMDHPEVVSELKNWGKWYVTTTNIDGFRLDAVKHIKYSFFPDWLSYVRTQTQKPLFAVGEFWSYDISKLHNYITKTNGSMSLFDAPLHNNFYIASKSSGYFDMRTLLNNTLMKDQPTLAVTLVDNHDTEPGQSLQSWVEPWFKPLAYAFILTRQEGYPCVFYGDYYGIPKYNIPALKSKLDPLLIARRDYAYGTQHDYIDSADIIGWTREGVAEKANSGLAALITDGPGGSKWMYVGKQHAGKTFYDLTGNRSDTVTINADGWGEFKVNGGSVSIWVPKISTTSQI

SEQ ID NO: 26416 - protein, 520 aa, Unidentified
KKIFPWILSLLLLFSFIAPFSIQTEKVRAGSVPVNGTMMQYFEWYLPDDGTLWTKVANNAQSLANLGITALWLPPAYKGTSSSDVGYGVYDLYDLGEFNQKGTVRTKYGTKTQYIQAIQAAHTAGMQVYADVVFNHKAGADGTELVDAVEVNPSDRNQEISGTYQIQAWTKFDFPGRGNTYSSFKWRWYHFDGTDWDESRKLNRIYKFRGTGKAWDWEVDTENGNYDYLMYADLDMDHPEVVSELKNWGKWYVITTNIDGFRLDAVKHIKYSFFPDWLSYLRTQTQKPLFAVGEFWSYDINKLHNYITKTNGSMSLFDAPLHNNFYIASKSGGYFDMRTLLNNTLMKEQPTLSVTLVDNHDTEPGQSLQSWVEPWFKPLAYAFILTRQEGYPCVFYGDYYGIPKYNIPALKSKLDPLLIARRDYAYGTQHDYIDNADIIGWTREGVAEKANSGLAALITDGPGGSKWMYVGKQHAGKTFYDLTGNRSDTVTINADGWGEFKVNGGSVSIWVPKTSTTSQI

SEQ ID NO: 26417 - protein, 520 aa, unidentified
KKIFPWIVSLLLLFSFIAPFSIQTEKVRAGSVPVNGTMMQYFEWYLPDDGTLWTKVANNAQSLANLGITALWLPPAYKGTSSSDVGYGVYDLYDLGEFNQKGTVRTKYGTKTQYIQAIQAAHTAGMQVYADVVFNHKAGADGTELVDAVEVNPSDRNQEISGTYQIQAWTKFDFPGRGNTYSSFKWRWYHFDGTDWDESRKLNRIYKFRGTGKAWDWEVDTENGNYDYLMYADLDMDHPEVVSELKNWGKWYVTTTNIDGFRLDAVKHIKYSFFPDWLSYVRTQTQKPLFAVGEFWSYDINKLHNYITKTNGSMSLFDAPLHNNFYIASKSGGYFDMRTLLNNTLMKDQPTLSVTLVDNHDTEPGQSLQSWVEPWFKPLAYAFILTRQEGYPCIFYGDYYGIPKYNIPALKSKLDPLLIARRDYAYGTQHDYIDNADIIGWTREGVAEKANSGLAALITDGPGGSKWMYVGKQHAGKTFYDLTGNRSDTVTINADGWGEFKVNGGSVSIWVPKTSTTSQI

SEQ ID NO: 26418 - protein, 518 aa, Bacillus sp.
AXXNGTMMQYFEWYLPNDGQHWXRLXNDAXNLSSXGITALWIPPAYKGTSQSDVGYGAYDLYDLGEFNQKGTVRTKYGTKAQLXXAIXALHAXGIQVYGDVVMNHKGGADGTEXVXAVEVNPSDRNQEISGXYXIXAWTKFDFPGRGNTYSXFKWRWYHFDGVDWDESRKLNNRIYKFRGXGKAWDWEVDTENGNYDYLMYADIDMDHPEVVXELKNWGXWYXNTLNLDGFRLDAVKHIKFSFXXDWLSHVRSXTGKXLFTVGEYWXXDIGALENYLXKTNWXMSLFDVPLHYNFYXASKSGGAYDMRXLLXGTLVXXHPXXAVTFVDNHDTQPGQALESWVDXWFKPLAYAFILTREXGYPXVFYGDYYGIPQYNXXEIPSLKSKIDPLLXARRXYAYGTQHDYLDHXDIIGWTREGXTSKPNSGLAALITDGPGGSKWMYVGKQXAGXVWYDLTGNRSDTVTINSDGWGEFXVNGGSVSVWVXRKTTVSTIARPITTRPWTGEFVRWTEPRLVAWP

SEQ ID NO: 26419 - protein, 511 aa, Bacillus sp. TS-23
APINETMMQYFEWDLPNDGTLWTKVKNEAANLSSLGITALWLPPAWKGTSQSDVGYGAYDLYDLGEFNQKGTIRTKYGTKTQYIQAIQAAKAAGMQVYADVVFNHKAGADGTEFVDAVEVDPSNRNQETSGTYQIQAWTKFDFPGRGNTYSSFKWRWYHFDGTDWDESRKLNRIYKFSTKAWDWEVDTENGNYDYLMFADYDMDHPEVVTELKNWGTWYVNTTNIDGFRLDAVKHIKYSFFPDWLTYVRNQTGKNLFAVGEFWSYDVNKLHNYITKTNGSMSLFDAPLHNNFYTASKSSGYFDMRYLLNNTLMKDQPSLAVTLVDNHDTQPGQSLQSWVEPWFKPLAYAFILTRQEGYPCVFYGDYYGIPKYNIPGLKSKIDPLLEARRDYAYGTQRDYIDHQDIIGWTREGIDTKPNSGLAALITDGPGGSKWMYVGKKHAGKVFYDLTGNRSDTVTINADGWGEFKVNGGSVSIWVAKTSNVTFTVNNATTTSGQNVYVVANIPELGNW

SEQ ID NO: 26420 - protein, 509 aa, unidentified
YSIIATLVISFFTPFSTAQANTAPVNGTMMQYFEWDLPNDGTLWTKVKNEATNLSSLGITALWLPPAYKGTSQSDVGYGVYDLYDLGEFNQKGTIRTKYGTKAQYIQAIQAAKAAGMQVYADVVFNHKAGADGTEFVDAVEVNPSNRNQETSGTYQIQAWTKFDFPGRGNTYSSFKWRWYHFDGTDWDESRKLNRIYKFRGTGKAWDWEVDTENGNYDYLMFADLDMDHPEVVTELKNWGKWYVNTTNVDGFRLDAVKHIKYSFFPDWLTYVRNQTGKNLFAVGEFWSYDVNKLHNYITKTNGSMSLFDAPLHNNFYIASKSSGYFDMRYLLNNTLMKDQPSLAVTLVDNHDTQPGQSLQSWVEAWFKPLAYAFILTRQEGYPCVFYGDYYGIPKYNIPGLKSKIDPLLIARRDYAYGTQRDYIDHQDIIGWTREGIDAKPNSGLAALITDGPGGSKWMYVGKKHAGKVFYDLTGNRSDTVTINADGWGEFKVNGGSVSIWVAKTSNVT

SEQ ID NO: 26421 - protein, 484 aa, Synthetic construct
SVPVNGTMMQYFEWYLPDDGTLWTKVANNAQSLANLGITALWLPPAYKGTSSSDVGYGVYDLYDLGEFNQKGTVRTKYGTKTQYIQAIQAAHTAGMQVYADVVFNHRMGADATETISAVEVNPSNRNQVTSGAYNISAWTDFEFPGRGNTYSSFKWHSYYFDGVDWDQSRQLSGKIYQIQGTGKAWDWEVDSENGNYDYLMGADIDMDHPEVVSELKNWGKWYVTTTNIDGFRLDAVKHIKYSFFPDWLSYVRTQTQKPLFAVGEFWSYDISKLHNYITKTNGSMSLFDAPLHNNFYIASKSGGYFDMRTLLNNTLMKDQPTLAVTLVDNHDTEPGQSLQSWVEPWFKPLAYAFILTRQEGYPCVFYGDYYGIPKYNIPALKSKLDPLLIARRDYAYGTQHDYIDSADIIGWTREGVAEKANSGLAALITDGPGGSKWMYVGKQHAGKTFYDLTGNRSDTVTINADGWGEFKVNGGSVSIWVPK

SEQ ID NO: 26422 - protein, 480 aa, Bacillus sp.
APINETMMQYFEWDLPNDGTLWTKVKNEAANLSSLGITALWLPPAYKGTSQSDVGYGVYDLYDLGEFNQKGTIRTKYGTKTQLERAIRSLKANGIQVYADVVFNHKAGADGTEFVDAVEVDPSNRNQEVSGTYQIEAWTKFDFPGRGNTYSSFKWRWYHFDGTDWDESRKLNRIYKFRGKAWDWEVDTENGNYDYLMFADLDMDHPEVVTELKNWGTWYVNTTNIDGFRLDAVKHIKFSFMRDWLGHVRGQTGKNLFAVGEFWSYDVNKLHNYITKTNGSMSLFDAPLHNNFYTASKSSGYFDMRYLLNNTLMKDQPSLAVTLVDNHDTQPGQSLQSWVEPWFKPLAYAFILTRQEGYPCVFYGDYYGIPKYNIPGLKSKIDPLLIARRDYAYGTQRDYIDHQDIIGWTREGIDTKPNSGLAALITDGPGGSKWMYVGKKHAGKVFYDLTGNRSDTVTINADGWGEFKVNGGSVSIWVAK

SEQ ID NO: 26423 - protein, 480 aa, Bacillus sp.
APINETMMQYFEWDLPNDGTLWNRLHNNAQNLKNAGITALWLPPAYKGTSQSDVGYGVYDLYDLGEFNQKGTIRTKYGTKTQYIQAIQAAKAAGMQVYADVVFNHKAGADQTEFVDAVEVDPSNRNQEVSGTYQIEAWTKFDFPGRGNTYSSFKWRWYHFDGTDWDESRKLNRIYKFRGKAWDWEVDTENGNYDYLMFADLDMDHPEVVTELKNWGTWYVNTTNIDGFRLDAVKHIKFSFMRDWLTYVRNQTGKNLFAVGEFWSYDVNKLHNYITKTNGSMSLFDAPLHNNFYTASKSSGYFDMRYLLNNTLMKDQPSLAVTLVDNHDTQPGQSLQSWVEPWFKPLAYAFILTRQEGYPCVFYGDYYGIPKYNIPGLKSKIDPLLIARRDYAYGTQRDYIDHQDIIGWTREGIDTKPNSGLAALITDGPGGSKWMYVGKKHAGKVFYDLTGNRSDTVTINADGWGEFKVNGGSVSIWVAK

SEQ ID NO: 26424 - protein, 480 aa, Geobacillus stearothermophilus
NGTLMQYFEWYTPNDGQHWKRLQNDSAYLAEHGITAVWIPPAYKGTSQADVGYGAYDLYDLGEFHQKGTVRTKYGTKGELQSAIKSLHSRDINVYGDVVINHKGGADATEDVTAVEVDPADRNRVISGEYLIKAWTHFHFPGRGSTYSDFKWHWYHFDGTDWDESRKLNRIYKFQGKAWDWEVDTENGNYDYLMYADIDYDHPDVVAEIKRWGTWYANELQLDGFRLDAVKHIKFSFFPDWLSYVRSQTGKPLFTVGEYWSYDINKLHNYITKTNGTMSLFDAPLHNKFYTASKSGGAFDMRTLMTNTLMKDQPTLAVTFVDNHDTEPGQALQSWVDPWFKPLAYAFILTRQEGYPCVFYGDYYGIPQYNIPSLKSKIDPLLIARRDYAYGTQHDYLDHSDIIGWTREGVTEKPGSGLAALITDGPGGSKWMYVGKQHAGKVFYDLTGNRSDTVTINSDGWGEFKVNGGSVSVWVPRKTT

SEQ ID NO: 26425 - protein, 482 aa, Synthetic construct
APVNGTMMQYFEWDLPNDGTLWTKVKNEAANLSSLGITALWLPPAYKGTSQSDVGYGVYDLYDLGEFNQKGTIRTKYGTKTQYIQAIQAAKAAGMQVYADVVFNHKAGADATEDVTAVEVNPANRNQETSEEYQIKAWTDFRFPGRGNTYSDFKWHWYHFDGADWDESRKISRIFKFRGEGKAWDWEVSSENGNYDYLMYADVDMDHPEVVAELKNWGKWYVNTTNVDGFRLDAVKHIKYSFFPDWLSYVRNQTGKNLFAVGEFWSYDVNKLHNYITKTNGTMSLFDAPLHNNFYIASKSSGYFDMRYLLNNTLMKDQPALAVTLVDNHDTQPGQSLQSWVEPWFKPLAYAFILTRQEGYPCVFYGDYYGIPKYNIPGLKSKIDPLLIARRDYAYGTQRDYIDHPDIIGWTREGIDAKPNSGLAALITDGPGGSKWMYVGKKHAGKVFYDLTGNRSDTVTINADGWGQFKVNGGSVSIWVAK

SEQ ID NO: 26426 - protein, 483 aa, Synthetic construct
APVNGTMMQYFEWDLPNDGTLWTKVKNEAANLSSLGITALWLPPAYKGTSQSDVGYGVYDLYDLGEFNQKGTVRTKYGTKDQYIQAIQAAKAAGMQVYADVVFNHRMGADATETISAVEVNPSNRNQVTSGAYNISAWTDFEFPGRGNTYSSFKWHSYYFDGVDWDQSRQLSGKIYQIQGTGKAWDWEVDSENGNYDYLMGADIDMDHPEVVTELKNWGKWYVNTTNVDGFRLDAVKHIKYSFFPDWLASVRSQTGKNLFAVGEFWSYDVNKLHNYITKTNGTMSLFDAPLHNNFYTASKSSGYFDMRYLLNNTLMKDQPVLAVTLVDNHDTQPGQSLQSWVEPWFKPLAYAFILTRQEGYPCVFYGDYYGIPKYNIPGLKSKIDPLLIARRDYAYGTQRDYIDHQDIIGWTREGIDSKPNSGLAALITDGPGGSKWMYVGKKHAGKVFYDLTGNRSDTVTINADGWGEFKVNGGSVSIWVAK

SEQ ID NO: 26427 - protein, 532 aa, unidentified
YAIVATLIISFLTPFSTAQANTAPVNGTMMQYFEWDLPNDGTLWTKVKNEATNLSSLGITALWLPPAYKGTSQSDVGYGVYDLYDLGEFNQKGTIRTKYGTKTQYIQAIQTAQAAGMQVYADVVFNHKAGADSTEFVDAVEVNPSNRNQETSGTYQIQAWTKFDFPGRGNTYSSFKWRWYHFDGTDWDESRKLNRIYKFRGTGKAWDWEVDTENGNYDYLMFADLDMDHPEVVTELKNWGTWYVNTTNIDGFRLDAVKHIKYSFFPDWLTYVRNQTGKNLFAVGEFWSYDVNKLHNYITKTNGSMSLFDAPLHNNFYTASKSSGYFDMRYLLNNTLMKDQPSLAVTLVDNHDTQPGQSLQSWVEPWFKQLAYAFILTRQEGYPCVFYGDYYGIPKYNIPGLKSKIDPLLIARRDYAYGTQRDYIDHQDIIGWTREGIDAKPNSGLAALITDGPGGSKWMYVGKKHAGKVFYDLTGNRSDTVTINADGWGEFKVNGGSVSIWVAKTSNVTFTVNNATTTSGQNVYVVGNIPEL

SEQ ID NO: 26428 - protein, 532 aa, Synthetic construct
YSIIATLVISFFTPFSTAQANTAPVNGTMMQYFEWDLPNDGTLWTKVKNEATNLSSLGITALWLPPAYKGTSQSDVGYGVYDLYDLGEFNQKGTIRTKYGTKAQYIQAIQAAKAAGMQVYADVVFNHKAGADGTEFVDAVEVNPSNRNQETSGTYQIQAWTKFDFPGRGNTYSSFKWRWYHFDGTDWDESRKLNRIYKFRGTGKAWDWEVDTENGNYDYLMFADLDMDHPEVVTELKNWGKWYVNTTNVDGFRLDAVKHIKYSFFPDWLTYVRNQTGKNLFAVGEFWSYDVNKLHNYITKTNGSMSLFDAPLHNNFYIASKSSGYFDMRYLLNNTLMKDQPSLAVTLVDNHDTQPGQSLQSWVEAWFKPLAYAFILTRQEGYPCVFYGDYYGIPKYNIPGLKSKIDPLLIARRDYAYGTQRDYIDHQDIIGWTREGIDAKPNSGLAALITDGPGGSKWMYVGKKHAGKVFYDLTGNRSDTVTINADGWGEFKVNGGSVSIWVAKTSNVTFTVNNATTTSGQNVYVVGNIPEL

SEQ ID NO: 26429 - protein, 483 aa, Bacillus licheniformis
HHNGTNGTMMQYFEWYLPNDGNHWHRLRSDASNLKDKGITAVWIPPAWKGASQNDVGYGAYDLYDLGEFNQKGTVRTKYGTRNQLQAAVTALKSNGIQVWGDVVMNHKGGADATEWVRAVEVNPSNRNQEVSGDTTIEAWTKFDFPGRGNTHSNFKWRWYHFDGVDWDQSRQLQNKIYKFQGKEWDWEVDEENGNYDYLMYADYDMDHPEVVNELRNWGVWYTNTLGLDGFRIDAVKHIKYSFTRDWLTHVRNTTQKNMFAVAEFWKNDIGAIENYLSKTNWNHSVFDVPLHYNLYNASRSGGNYDMRQIFNGTVVQRHPTHAVTFVDNHDSQPEEALESFVEEWFKPLAYALTLTRDQGYPSVFYGDYYGIPTHGVPAMKSKIDPILEARQKYAYGTQRDYLDHPDVIGWTREGDGVHADSGLATLMSDGPGGSKWMEVGKNNAGEVWYDITGNQTNTVTINKDGWGQFHVSGGSVSIYVQQ

SEQ ID NO: 26430 - protein, 483 aa, Bacillus licheniformis
HHNGTNGTMMQYFEWYLPNDGNHWHRLRSDASNLKDKGITAVWIPPAWKGASQNDVGYGAYDLYDLGEFNQKGTVRTKYGTRNQLQAAVTALKSNGIQVYGDVVMNHKGGADATEWVRAVEVNPSNRNQEVSGDTTIEAWTKFDFPGRGNTHSNFKWRWYHFDGVDWDQSRQLQNKIYKFQGKEWDWEVDEENGNYDYLMYADYDMDHPEVVNELRNWGVWYTNTLGLDGFRIDAVKHIKYSFTRDWLTHVRNTTQKNMFAVAEFWKNDIGAIENYLSNTNWNHSVFDVPLHYNLYNASRSGGNYDMRQIFNGTVVQRHPTHAVTFVDNHDSQPEEALESFVEEWFKPLAYALTLTRDQGYPSVFYGDYYGIPTHGVPAMKSKIDPILEARQKYAYGTQRDYLDHPDVIGWTREGDGVHADSGLATLMSDGPGGSKWMEVGKNNAGEVWYDITGNQTNTVTINKDGWGQFHVSGGSVSIYVQQ

SEQ ID NO: 26431 - protein, 483 aa, Bacillus licheniformis
HHNGTNGTMMQYFEWYLPNDGNHWHRLRSDASNLKDKGITAVWIPPAWKGASQNDVGYGAYDLYDLGEFNQKGTVRTKYGTRNQLQAAVTALKSNGIQVWGDVVMNHKGGADATEWVRAVEVNPSNRNQEVSGDTTIEAWTKFDFPGRGNTHSNFKWRWYHFDGVDWDQSRQLQNKIYKFRGKEWDWEVDEENGNYDYLMYADYDMDHPEVVNELRNWGVWYTNTLGLDGFRIDAVKHIKYSFTRDWLTHVRNTTQKNMFAVAEFWKNDIGAIENYLSKTNWNHSVFDVPLHYNLYNASRSGGNYDMRQIFNGTVVQRHPTHAVTFVDNHDSQPEEALESFVEEWFKPLAYALTLTRDQGEPSVFYGDYYGIPTHGVPAMKSKIDPILEARQKYAYGTQRDYLDHPDVIGWTREGDGVHADSGLATLMSDGPGGSKWMEVGKNNAGEVWYDITGNQTNTVTINKDGWGQFHVSGGSVSIYVQQ

SEQ ID NO: 26432 - protein, 483 aa, Bacillus licheniformis
HHNGTNGTMMQYFEWYLPNDGNHWHRLRSDASNLKDKGITAVWIPPAWKGASQNDVGYGAYDLYDLGEFNQKGTVRTKYGTRNQLQAAVTALKSNGIQVWGDVVMNHKGGADATEWVRAVEVNPSNRNQEVSGDTTIEAWTKFDFPGRGNTHSNFKWRWYHFDGVDWDQSRQLQNKIYKFRGKEWDWEVDTENGNYDYLMYADYDMDHPEVVNELRNWGVWYTNTLGLDGFRIDAVKHIKYSFTRDWLTHVRNTTGKNMFAVAEFWKNDIGAIENYLSNTNWNHSVFDVPLHYNLYNASRSGGNYDMRQIFNGTVVQRHPTHAVTFVDNHDSQPEEALESFVEEWFKPLAYALTLTRDQGEPSVFYGDYYGIPTHGVPAMKSKIDPILEARQKYAYGTQRDYLDHPDVIGWTREGDGVHADSGLATLMSDGPGGSKWMEVGKNNAGEVWYDITGNQTNTVTINKDGWGQFHVSGGSVSIYVQQ

SEQ ID NO: 26433 - protein, 483 aa, Bacillus licheniformis
HHNGTNGTMMQYFEWYLPNDGNHWHRLRSDASNLKDKGITAVWIPPAWKGASQNDVGYGAYDLYDLGEFNQKGTVRTKYGTRNQLQAAVTALKSNGIQVWGDVVMNHKGGADATEWVRAVEVNPSNRNQEVSGDTTIEAWTKFDFPGRGNTHSNFKWRWYHFDGVDWDQSRQLQNKIYKFQGKEWDWEVDEENGNYDYLMYADYDMDHPEVVNELRNWGVWYTNTLGLDGFRIDAVKHIKYSFTRDWLTHVRNTTGKNMFAVAEFWKNDIGAIENYLSKTNWNHSVFDVPLHYNLYNASRSGGNYDMRQIFNGTVVQRHPTHAVTFVDNHDSQPEEALESFVEEWFKPLAYALTLTRDQGEPSVFYGDYYGIPTHGVPAMKSKIDPILEARQKYAYGTQRDYLDHPDVIGWTREGDGVHADSGLATLMSDGPGGSKWMEVGKNNAGEVWYDITGNQTNTVTINKDGWGQFHVSGGSVSIYVQQ

SEQ ID NO: 26434 - protein, 483 aa, Bacillus licheniformis
HHNQTNGTMMQYFEWYLPNDGNHWHRLRSDASNLKDKGITAVWIPPAWKGASQNDVGYGAYDLYDLGEFNQKGTVRTKYGTRNQLQAAVTALKSNGIQVYGDVVMNHKGGADATEWVRAVEVNPSNRNQEVSGDYTIEAWTKFDFPGRGNTHSNFKWRWWHFDGVDWDQSRQLQNKIYKFRGKEWDWEVDTENGNYDYLMYADIDMDHPEVVNELRNWGVWYTNTLGLDGFRIDAVKHIKYSFTRDWLEHVRNTTGKNMFAVAEFWKNDIGAIRNYLSKTNWNHSVFDVPLHYNLYNASRSGGNYDMRQIFNGTVVQRHPTHAVTFVDNHDSQPEEALESFVEEWFKPLAYALTLTRDQGYPSVFYGDYYGIPTHGVPAMKSKIDPILEARQKYAYGTQRDYMDHPDVIGWTREGDGVHADSGLATLMSDGPGGSKWMEVGKNNAGEVWYDITGNQTNTVTINKDGWGQFHVSGGSVSIYVQQ

SEQ ID NO: 26435 - protein, 483 aa, Bacillus licheniformis
HHNQTNGTMMQYFEWYLPNDGNHWNRLRSDASNLKDKGITAVWIPPAWKGASQNDVGYGAYDLYDLGEFNQKGTVRTKYGTRNQLQAAVTALKSNGIQVWGDVVMNHKGGADATEWVRAVEVNPSNRNQEVSGDTTIEAWTKFDFPGRGNTHSNFKWRWYHFDGVDWDQSRQLQNKIYKFQGKEWDWEVDEENGNYDYLMYADYDMDHPEVVNELRNWGVWYTNTLGLDGFRIDAVKHIKYSFTRDWLEHVRNTTGKNMFAVAEFWKNDIGAIENYLSKTNWNHSVFDVPLHYNLYNASRSGGNYDMRQIFNGTVVQRHPTHAVTFVDNHDSQPEEALESFVEEWFKPLAYALTLTRDQGYPSVFYGDYYGIPTHGVPAMKSKIDPILEARQKYAYGTQRDYMDHPDVIGWTREGDGVHADSGLATLMSDGPGGSKWMEVGKNNAGEVWYDITGNQTNTVTINKDGWGQFHVSGGSVSIYVQQ

SEQ ID NO: 26436 - protein, 483 aa, Bacillus licheniformis
HHNQTNGTMMQYFEWYLPNDGNHWNRLRSDASNLKDKGITAVWIPPAWKGASQNDVGYGAYDLYDLGEFNQKGTVRTKYGTRNQLQAAVTALKSNGIQVWGDVVMNHKGGADATEWVRAVEVNPSNRNQEVSGDYTIEAWTKFDFPGRGNTHSNFKWRWYHFDGVDWDQSRQLQNKIYKFQGKEWDWEVDEENGNYDYLMYADYDMDHPEVVNELRNWGVWYTNTLGLDGFRIDAVKHIKYSFTRDWLEHVRNTTQKNMFAVAEFWKNDIGAIENYLSKTNWNHSVFDVPLHYNLYNASRSGGNYDMRQIFNGTVVQRHPTHAVTFVDNHDSQPEEALESFVEEWFKPLAYALTLTRDQGYPSVFYGDYYGIPTHGVPAMKSKIDPILEARQKYAYGTQRDYMDHPDVIGWTREGDGVHADSGLATLMSDGPGGSKWMEVGKNNAGEVWYDITGNQTNTVTINKDGWGQFHVSGGSVSIYVQQ

SEQ ID NO: 26437 - protein, 483 aa, Bacillus licheniformis
HHNQTNGTMMQYFEWYLPNDGNHWNRLRSDASNLKDKGITAVWIPPAWKGASQNDVGYGAYDLYDLGEFNQKGTVRTKYGTRNQLQAAVTALKSNGIQVYGDVVMNHKGGADATEWVRAVEVNPSNRNQEVSGDYTIEAWTKFDFPGRGNTHSNFKWRWYHFDGVDWDQSRQLQNKIYKFQGKEWDWEVDEENGNYDYLMYADYDMDHPEVVNELRNWGVWYTNTLGLDGFRIDAVKHIKYSFTRDWLEHVRNTTGKNMFAVAEFWKNDIGAIENYLSNTNWNHSVFDVPLHYNLYNASRSGGNYDMRQIFNGTVVQRHPTHAVTFVDNHDSQPEEALESFVEEWFKPLAYALTLTRDQGEPSVFYGDYYGIPTHGVPAMKSKIDPILEARQKYAYGTQRDYMDHPDVIGWTREGDGVHADSGLATLMSDGPGGSKWMEVGKNNAGEVWYDITGNQTNTVTINKDGWGQFHVSGGSVSIYVQQ

SEQ ID NO: 26438 - protein, 483 aa, Alicyclobacillus
HHNGTNGTMMQYFEWYLPNDGNHWNRLNSDASNLKSKGITAVWIPPAWKGASQNDVGYGAYDLYDLGEFNQKGTVRTKYGTRSQLQAAVTSLKNNGIQVYGDVVMNHKGGADATEMVRAVEVNPNNRNQEVTGEYTIEAWTRFDFPGRGNTHSSFKWRWYHFDGVDWDQSRRLNNRIYKFRGKAWDWEVDTENGNYDYLMYADIDMDHPEVVNELRNWGVWYTNTLGLDGFRIDAVKHIKYSFTRDWINHVRSATGKNMFAVAEFWKNDLGAIENYLQKTNWNHSVFDVPLHYNLYNASKSGGNYDMRNIFNGTVVQRHPSHAVTFVDNHDSQPEEALESFVEEWFKPLAYALTLTREQGYPSVFYGDYYGIPTHGVPAMRSKIDPILEARQKYAYGTQHDYLDNQDIIGWTREGDSAHAGSGLATVMSDGAGGSKTMYVGTKNAGEVFYDITGNRSDTVTINSAGNGTFPCNGGSVSIWVKK

SEQ ID NO: 26439 - protein, 483 aa, Bacillus licheniformis
HHNQTNGTMMQYFEWYLPNDGNHWNRLRSDASNLKDKGITAVWIPPAWKGASQNDVGYGAYDLYDLGEFNQKGTVRTKYGTRNQLQAAVTALKSNGIQVWGDVVMNHKGGADATEWVRAVEVNPSNRNQEVSGDYTIEAWTKFDFPGRGNTHSNFKWRWYHFDGVDWDQSRQLQNKIYKFRGKEWDWEVDEENGNYDYLMYADYDMDHPEVVNELRNWGVWYTNTLGLDGFRIDAVKHIKYSFTRDWLEHVRNTTQKNMFAVAEFWKNDIGAIENYLSKTNWNHSVFDVPLHYNLYNASRSGGNYDMRQIFNGTVVQRHPTHAVTFVDNHDSQPEEALESFVEEWFKPLAYALTLTRDQGEPSVFYGDYYGIPTHGVPAMKSKIDPILEARQKYAYGTQRDYMDHPDVIGWTREGDGVHADSGLATLMSDGPGGSKWMEVGKNNAGEVWYDITGNQTNTVTINKDGWGQFHVSGGSVSIYVQQ

SEQ ID NO: 26440 - protein, 483 aa, Bacillus licheniformis
HHNQTNGTMMQYFEWYLPNDGNHWNRLRSDASNLKDKGITAVWIPPAWKGASQNDVGYGAYDLYDLGEFNQKGTVRTKYGTRNQLQAAVTALKSNGIQVWGDVVMNHKGGADATEWVRAVEVNPSNRNQEVSGDTTIEAWTKFDFPGRGNTHSNFKWRWYHFDGVDWDQSRQLQNKIYKFRGKEWDWEVDEENGNYDYLMYADYDMDHPEVVNELRNWGVWYTNTLGLDGFRIDAVKHIKYSFTRDWLEHVRNTTGKNMFAVAEFWKNDIGAIENYLSKTNWNHSVFDVPLHYNLYNASRSGGNYDMRQIFNGTVVQRHPTHAVTFVDNHDSQPEEALESFVEEWFKPLAYALTLTRDQGEPSVFYGDYYGIPTHGVPAMKSKIDPILEARQKYAYGTQRDYMDHPDVIGWTREGDGVHADSGLATLMSDGPGGSKWMEVGKNNAGEVWYDITGNQTNTVTINKDGWGQFHVSGGSVSIYVQQ

SEQ ID NO: 26441 - protein, 483 aa, Bacillus licheniformis
HHNQTNGTMMQYFEWYLPNDGNHWNRLRSDASNLKDKGITAVWIPPAWKGASQNDVGYGAYDLYDLGEFNQKGTVRTKYGTRNQLQAAVTALKSNGIQVYGDVVMNHKGGADATEWVRAVEVNPSNRNQEVSGDYTIEAWTKFDFPGRGNTHSNFKWRWYHFDGVDWDQSRQLQNKIYKFQGKEWDWEVDEENGNYDYLMYADYDMDHPEVVNELRNWGVWYTNTLGLDGFRIDAVKHIKYSFTRDWLEHVRNTTQKNMFAVAEFWKNDIGAIENYLSNTNWNHSVFDVPLHYNLYNASRSGGNYDMRQIFNGTVVQRHPTHAVTFVDNHDSQPEEALESFVEEWFKPLAYALTLTRDQGYPSVFYGDYYGIPTHGVPAMKSKIDPILEARQKYAYGTQRDYMDHPDVIGWTREGDGVHADSGLATLMSDGPGGSKWMEVGKNNAGEVWYDITGNQTNTVTINKDGWGQFHVSGGSVSIYVQQ

SEQ ID NO: 26442 - protein, 483 aa, Bacillus licheniformis
HHNQTNGTMMQYFEWYLPNDGNHWNRLRSDASNLKDKGITAVWIPPAWKGASQNDVGYGAYDLYDLGEFNQKGTVRTKYGTRNQLQAAVTALKSNGIQVWGDVVMNHKGGADATEWVRAVEVNPSNRNQEVSGDYTIEAWTKFDFPGRGNTHSNFKWRWYHFDGVDWDQSRQLQNKIYKFRGKEWDWEVDEENGNYDYLMYADYDMDHPEVVNELRNWGVWYTNTLGLDGFRIDAVKHIKYSFTRDWLEHVRNTTGKNMFAVAEFWKNDIGAIENYLSNTNWNHSVFDVPLHYNLYNASRSGGNYDMRQIFNGTVVQRHPTHAVTFVDNHDSQPEEALESFVEEWFKPLAYALTLTRDQGHPSVFYGDYYGIPTHGVPAMKSKIDPILEARQKYAYGTQRDYMDHPDVIGWTREGDGVHADSGLATLMSDGPGGSKWMEVGKNNAGEVWYDITGNQTNTVTINKDGWGQFHVSGGSVSIYVQQ

SEQ ID NO: 26443 - protein, 483 aa, Bacillus licheniformis
HHNQTNGTMMQYFEWYLPNDGNHWNRLRSDASNLKDKGITAVWIPPAWKGASQNDVGYGAYDLYDLGEFNQKGTVRTKYGTRNQLQAAVTALKSNGIQVWGDVVMNHKGGADATEWVRAVEVNPSNRNQEVSGDYTIEAWTKFDFPGRGNTHSNFKWRWYHFDGVDWDQSRQLQNKIYKFRGKEWDWEVDEENGNYDYLMYADYDMDHPEVVNELRNWGVWYTNTLGLDGFRIDAVKHIKYSFTRDWLEHVRNTTGKNMFAVAEFWKNDIGAIENYLSNTNWNHSVFDVPLHYNLYNASRSGGNYDMRQIFNGTVVQRHPTHAVTFVDNHDSQPEEALESFVEEWFKPLAYALTLTRDQGEPSVFYGDYYGIPTHGVPAMKSKIDPILEARQKYAYGTQRDYMDHPDVIGWTREGDGVHADSGLATLMSDGPGGSKWMEVGKNNAGEVWYDITGNQTNTVTINKDGWGQFHVSGGSVSIYVQQ

SEQ ID NO: 26444 - protein, 483 aa, Bacillus licheniformis
HHNGTNGTMMQYFEWYLPNDGNHWHRLRSDASNLKDKGITAVWIPPAWKGASQNDVGYGAYDLYDLGEFNQKGTVRTKYGTRNQLQAAVTALKSNGIQVYGDVVMNHKGGADATEWVRAVEVNPSNRNQEVSGDYTIEAWTKFDFPGRGNTHSNFKWRWWHFDGVDWDQSRQLQNKIYKFRGKEWDWEVDTENGNYDYLMYADYDMDHPEVVNELRNWGVWYTNTLGLDGFRIDAVKHIKYSFTRDWLEHVRNTTGKNMFAVAEFWKNDIGAIRNYLSKTNWNHSVFDVPLHYNLYNASRSGGNYDMRQIFNGTVVQRHPTHGVTFVDNHDSQPEEALESFVEEWFKPLAYALTLTRDQGYPSVFYGDYYGIPTHGVPAMKSKIDPILEARQKYAYGTQRDYLDHPDVIGWTREGDGVHADSGLATLMSDGPGGSKWMEVGKNNAGEVWYDITGNQTNTVTINKDGWGQFHVSGGSVSIYVQQ

SEQ ID NO: 26445 - protein, 483 aa, Bacillus licheniformis
HHNGTNGTMMQYFEWYLPNDGNHWHRLRSDASNLKDKGITAVWIPPAWKGASQNDVGYGAYDLYDLGEFNQKGTVRTKYGTRNQLQAAVTALKSNGIQVWGDVVMNHKGGADATEWVRAVEVNPSNRNQEVSGDYTIEAWTKFDFPGRGNTHSNFKWRWYHFDGVDWDQSRQLQNKIYKFRGKEWDWEVDTENGNYDYLMYADYDMDHPEVVNELRNWGVWYTNTLGLDGFRIDAVKHIKYSFTRDWLTHVRNTTQKNMFAVAEFWKNDIGAIENYLSNTNWNHSVFDVPLHYNLYNASRSGGNYDMRQIFNGTVVQRHPTHAVTFVDNHDSQPEEALESFVEEWFKPLAYALTLTRDQGEPSVFYGDYYGIPTHGVPAMKSKIDPILEARQKYAYGTQRDYLDHPDVIGWTREGDGVHADSGLATLMSDGPGGSKWMEVGKNNAGEVWYDITGNQTNTVTINKDGWGQFHVSGGSVSIYVQQ

SEQ ID NO: 26446 - protein, 483 aa, Bacillus licheniformis
HHNGTNGTMMQYFEWYLPNDGNHWHRLRSDASNLKDKGITAVWIPPAWKGASQNDVGYGAYDLYDLGEFNQKGTVRTKYGTRNQLQAAVTALKSNGIQVWGDVVMNHKGGADATEWVRAVEVNPSNRNQEVSGDYTIEAWTKFDFPGRGNTHSNFKWRWYHFDGVDWDQSRQLQNKIYKFQGKEWDWEVDEENGNYDYLMYADYDMDHPEVVNELRNWGVWYTNTLGLDGFRIDAVKHIKYSFTRDWLTHVRNTTQKNMFAVAEFWKNDIGAIENYLSKTNWNHSVFDVPLHYNLYNASRSGGNYDMRQIFNGTVVQRHPTHAVTFVDNHDSQPEEALESFVEEWFKPLAYALTLTRDQGEPSVFYGDYYGIPTHGVPAMKSKIDPILEARQKYAYGTQRDYLDHPDVIGWTREGDGVHADSGLATLMSDGPGGSKWMEVGKNNAGEVWYDITGNQTNTVTINKDGWGQFHVSGGSVSIYVQQ

SEQ ID NO: 26447 - protein, 483 aa, Bacillus licheniformis
HHNQTNGTMMQYFEWYLPNDGNHWNRLRSDASNLKDKGITAVWIPPAWKGASQNDVGYGAYDLYDLGEFNQKGTVRTKYGTRNQLQAAVTALKSNGIQVWGDVVMNHKGGADATEWVRAVEVNPSNRNQEVSGDTTIEAWTKFDFPGRGNTHSNFKWRWYHFDGVDWDQSRQLQNKIYKFRGKEWDWEVDEENGNYDYLMYADYDMDHPEVVNELRNWGVWYTNTLGLDGFRIDAVKHIKYSFTRDWLEHVRNTTGKNMFAVAEFWKNDIGAIENYLSNTNWNHSVFDVPLHYNLYNASRSGGNYDMRQIFNGTVVQRHPTHAVTFVDNHDSQPEEALESFVEEWFKPLAYALTLTRDQGYPSVFYGDYYGIPTHGVPAMKSKIDPILEARQKYAYGTQRDYMDHPDVIGWTREGDGVHADSGLATLMSDGPGGSKWMEVGKNNAGEVWYDITGNQTNTVTINKDGWGQFHVSGGSVSIYVQQ

SEQ ID NO: 26448 - protein, 483 aa, Bacillus licheniformis
HHNGTNGTMMQYFEWYLPNDGNHWHRLRSDASNLKDKGITAVWIPPAWKGASQNDVGYGAYDLYDLGEFNQKGTVRTKYGTRNQLQAAVTALKSNGIQVYGDVVMNHKGGADATEWVRAVEVNPSNRNQEVSGDTTIEAWTKFDFPGRGNTHSNFKWRWYHFDGVDWDQSRQLQNKIYKFRGKEWDWEVDTENGNYDYLMYADYDMDHPEVVNELRNWGVWYTNTLGLDGFRIDAVKHIKYSFTRDWLTHVRNTTGKNMFAVAEFWKNDIGAIENYLSNTNWNHSVFDVPLHYNLYNASRSGGNYDMRQIFNGTVVQRHPTHAVTFVDNHDSQPEEALESFVEEWFKPLAYALTLTRDQGEPSVFYGDYYGIPTHGVPAMKSKIDPILEARQKYAYGTQRDYLDHPDVIGWTRESDGVHADSGLATLMSDGPGGSKWMEVGKNNAGEVWYDITGNQTNTVTINKDGWGQFHVSGGSVSIYVQQ

SEQ ID NO: 26449 - protein, 483 aa, Bacillus licheniformis
HHNGTNGTMMQYFEWYLPNDGNHWHRLRSDASNLKDKGITAVWIPPAWKGASQNDVGYGAYDLYDLGEFNQKGTVRTKYGTRNQLQAAVTALKSNGIQVWGDVVMNHKGGADATEWVRAVEVNPSNRNQEVSGDYTIEAWTKFDFPGRGNTHSNFKWRWYHFDGVDWDQSRQLQNKIYKFQGKEWDWEVDEENGNYDYLMYADYDMDHPEVVNELRNWGVWYTNTLGLDGFRIDAVKHIKYSFTRDWLTHVRNTTGKNMFAVAEFWKNDIGAIENYLSNTNWNHSVFDVPLHYNLYNASRSGGNYDMRQIFNGTVVQRHPTHAVTFVDNHDSQPEEALESFVEEWFKPLAYALTLTRDQGEPSVFYGDYYGIPTHGVPAMKSKIDPILEARQKYAYGTQRDYLDHPDVIGWTREGDGVHADSGLATLMSDGPGGSKWMEVGKNNAGEVWYDITGNQTNTVTINKDGWGQFHVSGGSVSIYVQQ

SEQ ID NO: 26450 - protein, 483 aa, Bacillus licheniformis
HHNGTNGTMMQYFEWYLPNDGNHWHRLRSDASNLKDKGITAVWIPPAWKGASQNDVGYGAYDLYDLGEFNQKGTVRTKYGTRNQLQAAVTALKSNGIQVWGDVVMNHKGGADATEWVRAVEVNPSNRNQEVSGDCTIEAWTKFDFPGRGNTHSNFKWRWYHFDGVDWDQSRQLQNKIYKFRGKEWDWEVDTENGNYDYLMYADYDMDHPEVVNELRNWGVWYTNTLGLDGFRIDAVKHIKYSFTRDWLTHVRNTTQKNMFAVAEFWKNDIGAIENYLSKTNWNHSVFDVPLHYNLYNASRSGGNYDMRQIFNGTVVQRHPTHAVTFVDNHDSQPEEALESFVEEWFKPLAYALTLTRDQGEPSVFYGDYYGIPTHGVPAMKSKIDPILEARQKYAYGTQRDYLDHPDVIGWTREGDGVHADSGLATLMSDGPGGSKWMEVGKNNAGEVWYDITGNQTNTVTINKDGWGQFHVSGGSVSIYVQQ

SEQ ID NO: 26451 - protein, 483 aa, Bacillus licheniformis
HHNQTNGTMMQYFEWYLPNDGNHWNRLRSDASNLKDKGITAVWIPPAWKGASQNDVGYGAYDLYDLGEFNQKGTVRTKYGTRNQLQAAVTALKSNGIQVWGDVVMNHKGGADATEWVRAVEVNPSNRNQEVSGDTTIEAWTKFDFPGRGNTHSNFKWRWYHFDGVDWDQSRQLQNKIYKFRGKEWDWEVDEENGNYDYLMYADYDMDHPEVVNELRNWGVWYTNTLGLDGFRIDAVKHIKYSFTRDWLEHVRNTTGKNMFAVAEFWKNDIGAIENYLSKTNWNHSVFDVPLHYNLYNASRSGGNYDMRQIFNGTVVQRHPTHAVTFVDNHDSQPEEALESFVEEWFKPLAYALTLTRDQGHPSVFYGDYYGIPTHGVPAMKSKIDPILEARQKYAYGTQRDYMDHPDVIGWTREGDGVHADSGLATLMSDGPGGSKWMEVGKNNAGEVWYDITGNQTNTVTINKDGWGQFHVSGGSVSIYVQQ

SEQ ID NO: 26452 - protein, 483 aa, Bacillus licheniformis
HHNQTNGTMMQYFEWYLPNDGNHWNRLRSDASNLKDKGITAVWIPPAWKGASQNDVGYGAYDLYDLGEFNQKGTVRTKYGTRNQLQAAVTALKSNGIQVYGDVVMNHKGGADATEWVRAVEVNPSNRNQEVSGDTTIEAWTKFDFPGRGNTHSNFKWRWYHFDGVDWDQSRQLQNKIYKFQGKEWDWEVDEENGNYDYLMYADYDMDHPEVVNELRNWGVWYTNTLGLDGFRIDAVKHIKYSFTRDWLEHVRNTTQKNMFAVAEFWKNDIGAIENYLSKTNWNHSVFDVPLHYNLYNASRSGGNYDMRQIFNGTVVQRHPTHAVTFVDNHDSQPEEALESFVEEWFKPLAYALTLTRDQGYPSVFYGDYYGIPTHGVPAMKSKIDPILEARQKYAYGTQRDYMDHPDVIGWTREGDGVHADSGLATLMSDGPGGSKWMEVGKNNAGEVWYDITGNQTNTVTINKDGWGQFHVSGGSVSIYVQQ

SEQ ID NO: 26453 - protein, 483 aa, Bacillus licheniformis
HHNQTNGTMMQYFEWYLPNDGNHWNRLRSDASNLKDKGITAVWIPPAWKGASQNDVGYGAYDLYDLGEFNQKGTVRTKYGTRNQLQAAVTALKSNGIQVYGDVVMNHKGGADATEWVRAVEVNPSNRNQEVSGDTTIEAWTKFDFPGRGNTHSNFKWRWYHFDGVDWDQSRQLQNKIYKFRGKEWDWEVDEENGNYDYLMYADYDMDHPEVVNELRNWGVWYTNTLGLDGFRIDAVKHIKYSFTRDWLEHVRNTTQKNMFAVAEFWKNDIGAIENYLSNTNWNHSVFDVPLHYNLYNASRSGGNYDMRQIFNGTVVQRHPTHAVTFVDNHDSQPEEALESFVEEWFKPLAYALTLTRDQGYPSVFYGDYYGIPTHGVPAMKSKIDPILEARQKYAYGTQRDYMDHPDVIGWTREGDGVHADSGLATLMSDGPGGSKWMEVGKNNAGEVWYDITGNQTNTVTINKDGWGQFHVSGGSVSIYVQQ

SEQ ID NO: 26454 - protein, 483 aa, Bacillus licheniformis
HHNQTNGAMMQYFEWYLPNDGNHWNRLRSDASNLKDKGITAVWIPPAWKGASQNDVGYGAYDLYDLGEFNQKGTVRTKYGTRNQLQAAVTALKSNGIQVYGDVVMNHKGGADATEWVRAVEVNPSNRNQEVSGDTTIEAWTKFDFPGRGNTHSNFKWRWYHFDGVDWDQSRQLQNKIYKFRGKEWDWEVDEENGNYDYLMYADYDMDHPEVVNELRNWGVWYTNTLGLDGFRIDAVKHIKYSFTRDWLEHVRNTTQKNMFAVAEFWKNDIGAIENYLSKTNWNHSVFDVPLHYNLYNASRSGGNYDMRQIFNGTVVQRHPTHAVTFVDNHDSQPEEALESFVEEWFKPLAYALTLTRDQGYPSVFYGDYYGIPTHGVPAMKSKIDPILEARQKYAYGTQRDYMDHPDVIGWTREGDGVHADSGLATLMSDGPGGSKWMEVGKNNAGEVWYDITGNQTNTVTINKDGWGQFHVSGGSVSIYVQQ

SEQ ID NO: 26455 - protein, 483 aa, Bacillus licheniformis
HHNGTNGTMMQYFEWYLPNDGNHWHRLRSDASNLKDKGITAVWIPPAWKGASQNDVGYGAYDLYDLGEFNQKGTVRTKYGTRNQLQAAVTALKSNGIQVWGDVVMNHKGGADATEWVRAVEVNPSNRNQEVSGDTTIEAWTKFDFPGRGNTHSNFKWRWYHFDGVDWDQSRQLQNKIYKFRGKEWDWEVDTENGNYDYLMYADYDMDHPEVVNELRNWGVWYTNTLGLDGFRIDAVKHIKYSFTRDWLTHVRNTTQKNMFAVAEFWKNDIGAIENYLSNTNWNHSVFDVPLHYNLYNASRSGGNYDMRQIFNGTVVQRHPTHAVTFVDNHDSQPEEALESFVEEWFKPLAYALTLTRDQGYPSVFYGDYYGIPTHGVPAMKSKIDPILEARQKYAYGTQRDYLDHPDVIGWTREGDGVHADSGLATLMSDGPGGSKWMEVGKNNAGEVWYDITGNQTNTVTINKDGWGQFHVSGGSVSIYVQQ

SEQ ID NO: 26456 - protein, 483 aa, Bacillus licheniformis
HHNQTNGTMMQYFEWYLPNDGNHWNRLRSDASNLKDKGITAVWIPPAWKGASQNDVGYGAYDLYDLGEFNQKGTVRTKYGTRNQLQAAVTALKSNGIQVYGDVVMNHKGGADATEWVRAVEVNPSNRNQEVSGDTTIEAWTKFDFPGRGNTHSNFKWRWYHFDGVDWDQSRQLQNKIYKFRGKEWDWEVDEENGNYDYLMYADYDMDHPEVVNELRNWGVWYTNTLGLDGFRIDAVKHIKYSFTRDWLEHVRNTTQKNMFAVAEFWKNDIGAIENYLSKTNWNHSVFDVPLHYNLYNASRSGGNYDMRQIFNGTVVQRHPTHAVTFVDNHDSQPEEALESFVEEWFKPLAYALTLTRDQGHPSVFYGDYYGIPTHGVPAMKSKIDPILEARQKYAYGTQRDYMDHPDVIGWTREGDGVHADSGLATLMSDGPGGSKWMEVGKNNAGEVWYDITGNQTNTVTINKDGWGQFHVSGGSVSIYVQQ

SEQ ID NO: 26457 - protein, 483 aa, Bacillus licheniformis
HHNQTNGTMMQYFEWYLPNDGNHWNRLRSDASNLKDKGITAVWIPPAWKGASQNDVGYGAYDLYDLGEFNQKGTVRTKYGTRNQLQAAVTALKSNGIQVWGDVVMNHKGGADATEWVRAVEVNPSNRNQEVSGDYTIEAWTKFDFPGRGNTHSNFKWRWYHFDGVDWDQSRQLQNKIYKFRGKEWDWEVDEENGNYDYLMYADYDMDHPEVVNELRNWGVWYTNTLGLDGFRIDAVKHIKYSFTRDWLEHVRNTTQKNMFAVAEFWKNDIGAIENYLSNTNWNHSVFDVPLHYNLYNASRSGGNYDMRQIFNGTVVQRHPTHAVTFVDNHDSQPEEALESFVEEWFKPLAYALTLTRDQGYPSVFYGDYYGIPTHGVPAMKSKIDPILEARQKYAYGTQRDYMDHPDVIGWTREGDGVHADSGLATLMSDGPGGSKWMEVGKNNAGEVWYDITGNQTNTVTINKDGWGQFHVSGGSVSIYVQQ

SEQ ID NO: 26458 - protein, 483 aa, Bacillus licheniformis
HHNGTNGTMMQYFEWYLPNDGNHWHRLRSDASNLKDKGITAVWIPPAWKGASQNDVGYGAYDLYDLGEFNQKGTVRTKYGTRNQLQAAVTALKSNGIQVWGDVVMNHKGGADATEWVRAVEVNPSNRNQEVSGDYTIEAWTKFDFPGRGNTHSNFKWRWYHFDGVDWDQSRQLQNKIYKFQGKEWDWEVDTENGNYDYLMYADYDMDHPEVVNELRNWGVWYTNTLGLDGFRIDAVKHIKYSFTRDWLTHVRNTTGKNMFAVAEFWKNDIGAIENYLSNTNWNHSVFDVPLHYNLYNASRSGGNYDMRQIFNGTVVQRHPTHAVTFVDNHDSQPEEALESFVEEWFKPLAYALTLTRDQGEPSVFYGDYYGIPTHGVPAMKSKIDPILEARQKYAYGTQRDYLDHPDVIGWTREGDGVHADSGLATLMSDGPGGSKWMEVGKNNAGEVWYDITGNQTNTVTINKDGWGQFHVSGGSVSIYVQQ

SEQ ID NO: 26459 - protein, 483 aa, Bacillus licheniformis
HHNQTNGTMMQYFEWYLPNDGNHWNRLRSDASNLKDKGITAVWIPPAWKGASQNDVGYGAYDLYDLGEFNQKGTVRTKYGTRNQLQAAVTALKSNGIQVWGDVVMNHKGGADATEWVRAVEVNPSNRNQEVSGDTTIEAWTKFDFPGRGNTHSNFKWRWYHFDGVDWDQSRQLQNKIYKFRGKEWDWEVDEENGNYDYLMYADYDMDHPEVVNELRNWGVWYTNTLGLDGFRIDAVKHIKYSFTRDWLEHVRNTTQKNMFAVAEFWKNDIGAIENYLSKTNWNHSVFDVPLHYNLYNASRSGGNYDMRQIFNGTVVQRHPTHAVTFVDNHDSQPEEALESFVEEWFKPLAYALTLTRDQGYPSVFYGDYYGIPTHGVPAMKSKIDPILEARQKYAYGTQRDYMDHPDVIGWTREGDGVHADSGLATLMSDGPGGSKWMEVGKNNAGEVWYDITGNQTNTVTINKDGWGQFHVSGGSVSIYVQQ

SEQ ID NO: 26460 - protein, 483 aa, Bacillus licheniformis
HHNGTNGTMMQYFEWYLPNDGNHWHRLRSDASNLKDKGITAVWIPPAWKGASQNDVGYGAYDLYDLGEFNQKGTVRTKYGTRNQLQAAVTALKSNGIQVWGDVVMNHKGGADATEWVRAVEVNPSNRNQEVSGDYTIEAWTKFDFPGRGNTHSNFKWRWYHFDGVDWDQSRQLQNKIYKFRGKEWDWEVDEENGNYDYLMYADYDMDHPEVVNELRNWGVWYTNTLGLDGFRIDAVKHIKYSFTRDWLTHVRNTTQKNMFAVAEFWKNDIGAIENYLSNTNWNHSVFDVPLHYNLYNASRSGGNYDMRQIFNGTVVQRHPTHAVTFVDNHDSQPEEALESFVEEWFKPLAYALTLTRDQGEPSVFYGDYYGIPTHGVPAMKSKIDPILEARQKYAYGTQRDYLDHPDVIGWTREGDGVHADSGLATLMSDGPGGSKWMEVGKNNAGEVWYDITGNQTNTVTINKDGWGQFHVSGGSVSIYVQQ

SEQ ID NO: 26461 - protein, 483 aa, Bacillus licheniformis
HHNGTNGTMMQYFEWYLPNDGNHWHRLRSDASNLKDKGITAVWIPPAWKGASQNDVGYGAYDLYDLGEFNQKGTVRTKYGTRNQLQAAVTALKSNGIQVWGDVVMNHKGGADATEWVRAVEVNPSNRNQEVSGDYTIEAWTKFDFPGRGNTHSNFKWRWYHFDGVDWDQSRQLQNKIYKFQGKEWDWEVDEENGNYDYLMYADYDMDHPEVVNELRNWGVWYTNTLGLDGFRIDAVKHIKYSFTRDWLTHVRNTTQKNMFAVAEFWKNDIGAIENYLSNTNWNHSVFDVPLHYNLYNASRSGGNYDMRQIFNGTVVQRHPTHAVTFVDNHDSQPEEALESFVEEWFKPLAYALTLTRDQGYPSVFYGDYYGIPTHGVPAMKSKIDPILEARQKYAYGTQRDYLDHPDVIGWTREGDGVHADSGLATLMSDGPGGSKWMEVGKNNAGEVWYDITGNQTNTVTINKDGWGQFHVSGGSVSIYVQQ

SEQ ID NO: 26462 - protein, 483 aa, Bacillus licheniformis
HHNQTNGTMMQYFEWYLPNDGNHWNRLRSDASNLKDKGITAVWIPPAWKGASQNDVGYGAYDLYDLGEFNQKGTVRTKYGTRNQLQAAVTALKSNGIQVWGDVVMNHKGGADATEWVRAVEVNPSNRNQEVSGDYTIEAWTKFDFPGRGNTHSNFKWRWYHFDGVDWDQSRQLQNKIYKFRGKEWDWEVDEENGNYDYLMYADYDMDHPEVVNELRNWGVWYTNTLGLDGFRIDAVKHIKYSFTRDWLEHVRNTTQKNMFAVAEFWKNDIGAIENYLSKTNWNHSVFDVPLHYNLYNASRSGGNYDMRQIFNGTVVQRHPTHAVTFVDNHDSQPEEALESFVEEWFKPLAYALTLTRDQGHPSVFYGDYYGIPTHGVPAMKSKIDPILEARQKYAYGTQRDYMDHPDVIGWTREGDGVHADSGLATLMSDGPGGSKWMEVGKNNAGEVWYDITGNQTNTVTINKDGWGQFHVSGGSVSIYVQQ

SEQ ID NO: 26463 - protein, 483 aa, Bacillus licheniformis
HHNGTNGTMMQYFEWYLPNDGNHWHRLRSDASNLKDKGITAVWIPPAWKGASQNDVGYGAYDLYDLGEFNQKGTVRTKYGTRNQLQAAVTALKSNGIQVYGDVVMNHKGGADATEWVRAVEVNPSNRNQEVSGDTTIEAWTKFDFPGRGNTHSNFKWRWYHFDGVDWDQSRQLQNKIYKFQGKEWDWEVDTENGNYDYLMYADYDMDHPEVVNELRNWGVWYTNTLGLDGFRIDAVKHIKYSFTRDWLTHVRNTTQKNMFAVAEFWKNDIGAIENYLSKTNWNHSVFDVPLHYNLYNASRSGGNYDMRQIFNGTVVQRHPTHAVTFVDNHDSQPEEALESFVEEWFKPLAYALTLTRDQGEPSVFYGDYYGIPTHGVPAMKSKIDPILEARQKYAYGTQRDYLDHPDVIGWTREGDGVHADSGLATLMSDGPGGSKWMEVGKNNAGEVWYDITGNQTNTVTINKDGWGQFHVSGGSVSIYVQQ

SEQ ID NO: 26464 - protein, 483 aa, Bacillus licheniformis
HHNQTNGTMMQYFEWYLPNDGNHWNRLRSDASNLKDKGITAVWIPPAWKGASQNDVGYGAYDLYDLGEFNQKGTVRTKYGTRNQLQAAVTALKSNGIQVWGDVVMNHKGGADATEWVRAVEVNPSNRNQEVSGDYTIEAWTKFDFPGRGNTHSNFKWRWYHFDGVDWDQSRQLQNKIYKFQGKEWDWEVDEENGNYDYLMYADYDMDHPEVVNELRNWGVWYTNTLGLDGFRIDAVKHIKYSFTRDWLEHVRNTTGKNMFAVAEFWKNDIGAIENYLSNTNWNHSVFDVPLHYNLYNASRSGGNYDMRQIFNGTVVQRHPTHAVTFVDNHDSQPEEALESFVEEWFKPLAYALTLTRDQGYPSVFYGDYYGIPTHGVPAMKSKIDPILEARQKYAYGTQRDYMDHPDVIGWTREGDGVHADSGLATLMSDGPGGSKWMEVGKNNAGEVWYDITGNQTNTVTINKDGWGQFHVSGGSVSIYVQQ

SEQ ID NO: 26465 - protein, 483 aa, Bacillus licheniformis
HHNQTNGTMMQYFEWYLPNDGNHWNRLRSDASNLKDKGITAVWIPPAWKGASQNDVGYGAYDLYDLGEFNQKGTVRTKYGTRNQLQAAVTALKSNGIQVYGDVVMNHKGGADATEWVRAVEVNPSNRNQEVSGDYTIEAWTKFDFPGRGNTHSNFKWRWYHFDGVDWDQSRQLQNKIYKFRGKEWDWEVDEENGNYDYLMYADYDMDHPEVVNELRNWGVWYTNTLGLDGFRIDAVKHIKYSFTRDWLEHVRNTTQKNMFAVAEFWKNDIGAIENYLSNTNWNHSVFDVPLHYNLYNASRSGGNYDMRQIFNGTVVQRHPTHAVTFVDNHDSQPEEALESFVEEWFKPLAYALTLTRDQGHPSVFYGDYYGIPTHGVPAMKSKIDPILEARQKYAYGTQRDYMDHPDVIGWTREGDGVHADSGLATLMSDGPGGSKWMEVGKNNAGEVWYDITGNQTNTVTINKDGWGQFHVSGGSVSIYVQQ

SEQ ID NO: 26466 - protein, 483 aa, Bacillus licheniformis
HHNGTNGTMMQYFEWYLPNDGNHWHRLRSDASNLKDKGITAVWIPPAWKGASQNDVGYGAYDLYDLGEFNQKGTVRTKYGTRNQLQAAVTALKSNGIQVWGDVVMNHKGGADATEWVRAVEVNPSNRNQEVSGDTTIEAWTKFDFPGRGNTHSNFKWRWYHFDGVDWDQSRQLQNKIYKFRGKEWDWEVDTENGNYDYLMYADYDMDHPEVVNELRNWGVWYTNTLGLDGFRIDAVKHIKYSFTRDWLTHVRNTTQKNMFAVAEFWKNDIGAIENYLSKTNWNHSVFDVPLHYNLYNASRSGGNYDMRQIFNGTVVQRHPTHAVTFVDNHDSQPEEALESFVEEWFKPLAYALTLTRDQGEPSVFYGDYYGIPTHGVPAMKSKIDPILEARQKYAYGTQRDYLDHPDVIGWTREGDGVHADSGLATLMSDGPGGSKWMEVGKNNAGEVWYDITGNQTNTVTINKDGWGQFHVSGGSVSIYVQQ

SEQ ID NO: 26467 - protein, 483 aa, Bacillus licheniformis
HHNQTNGTMMQYFEWYLPNDGNHWNRLRSDASNLKDKGITAVWIPPAWKGASQNDVGYGAYDLYDLGEFNQKGTVRTKYGTRNQLQAAVTALKSNGIQVWGDVVMNHKGGADATEWVRAVEVNPSNRNQEVSGDYTIEAWTKFDFPGRGNTHSNFKWRWYHFDGVDWDQSRQLQNKIYKFQGKEWDWEVDEENGNYDYLMYADYDMDHPEVVNELRNWGVWYTNTLGLDGFRIDAVKHIKYSFTRDWLEHVRNTTGKNMFAVAEFWKNDIGAIENYLSKTNWNHSVFDVPLHYNLYNASRSGGNYDMRQIFNGTVVQRHPTHAVTFVDNHDSQPEEALESFVEEWFKPLAYALTLTRDQGHPSVFYGDYYGIPTHGVPAMKSKIDPILEARQKYAYGTQRDYMDHPDVIGWTREGDGVHADSGLATLMSDGPGGSKWMEVGKNNAGEVWYDITGNQTNTVTINKDGWGQFHVSGGSVSIYVQQ

SEQ ID NO: 26468 - protein, 483 aa, Bacillus licheniformis
HHNGTNGTMMQYFEWYLPNDGNHWHRLRSDASNLKDKGITAVWIPPAWKGASQNDVGYGAYDLYDLGEFNQKGTVRTKYGTRNQLQAAVTALKSNGIQVYGDVVMNHKGGADATEWVRAVEVNPSNRNQEVSGDTTIEAWTKFDFPGRGNTHSNFKWRWYHFDGVDWDQSRQLQNKIYKFRGKEWDWEVDTENGNYDYLMYADYDMDHPEVVNELRNWGVWYTNTLGLDGFRIDAVKHIKYSFTRDWLTHVRNTTQKNMFAVAEFWKNDIGAIENYLSNTNWNHSVFDVPLHYNLYNASRSGGNYDMRQIFNGTVVQRHPTHAVTFVDNHDSQPEEALESFVEEWFKPLAYALTLTRDQGEPSVFYGDYYGIPTHGVPAMKSKIDPILEARQKYAYGTQRDYLDHPDVIGWTREGDGVHADSGLATLMSDGPGGSKWMEVGKNNAGEVWYDITGNQTNTVTINKDGWGQFHVSGGSVSIYVQQ

SEQ ID NO: 26469 - protein, 509 aa, Synthetic construct
YAIVATLIISFLTPFSTAQANTAPVNGTMMQYFEWDLPNDGTLWTKVKNEASSLSSLGITALWLPPAYKGTSQGDVGYGVYDLYDLGEFNQKGTIRTKYGTKTQYLQAIQAAKSAGMQVYADVVFNHKAGADSTEWVDAVEVNPSNRNQETSGTYQIQAWTKFDFPDRGNTYSSFKWRWYHFDGTDWDESRKLNRIYKFRGTGKAWDWEVDTENGNYDYLMFADLDMDHPEVVTELKNWGTWYVNTTNVDGFRLDAVKHIKYSFFPDWLTYVRSQTQKNLFAVGEFWSYDVNKLHNYITKTSGTMSLFDAPLHNNFYTASKSSGYFDMRYLLNNTLMKDQPSLAVTLVDNHDTQPGQSLQSWVEPWFKPLAYAFILTRQEGYPCVFYGDYYGIPKYNIPGLKSKIDPLLIARRDYAYGTQRDYIDHQDIIGWTREGIDSKPNSGLAALITDGPGGSKWMYVGKKHAGKVFYDLTGNRSDTVTINADGWGEFKVNGGSVSIWVAKTSQVT

SEQ ID NO: 26470 - protein, 509 aa, unidentified
YAIVATLIIYFLTPFSTAQANTAPVNGTMMQYFEWDLPNDGTLWTKVKNEASSLSSLGITALWLPPAYKGTSQGDVGYGVYDLYDLGEFNQKGTIRTKYGTKTQYLQAIQAAKSAGMQVYADVVFNHKAGADSTEWVDAVEVNPSNRNQETSGTYQIQAWTKFDFPGRGNTYSSFKWRWYHFDGTDWDESRKLNRIYKFRGTGKAWDWEVDTENGNYDYLMFADLDMDHPEVVTELKNWGTWYVNTTNVDGFRLDAVKHIKYSFFPDWLTHVRSQTRKNLFAVGEFWSYDVNKLHNYITKTSGTMSLFDAPLHNNFYTASKSSGYFDMRYLLNNTLMKDQPSLAVTLVDNHDTQPGQSLQSWVEPWFKPLAYAFILTRQEGYPCVFYGDYYGIPKYNIPGLKSKIDPLLIARRDYAYGTQRDYIDHQDIIGWTREGIDSKPNSGLAALITDGPGGSKWMYVGKKHAGKVFYDLTGNRSDTVTINADGWGEFKVNGGSVSIWVAKTSQVT

SEQ ID NO: 26471 - protein, 509 aa, unidentified
YAIVATLIISFLTPFSTAQANTAPVNGTMMQYFEWDLPNDGTLWTKVKNEATNLSSLGITALWLPPAYKGTSQSDVGYGVYDLYDLGEFNQKGTIRTKYGTKTQYIQAIQTAQAAGMQVYADVVFNHKAGADSTEFVDAVEVNPSNRNQETSGTYQIQAWTKFDFPGRGNTYSSFKWRWYHFDGTDWDESRKLNRIYKFRGTGKAWDWEVDTENGNYDYLMFADLDMDHPEVVTELKNWGTWYVNTTNIDGFRLDAVKHIKYSFFPDWLTYVRNQTGKNLFAVGEFWSYDVNKLHNYITKTNGSMSLFDAPLHNNFYTASKSSGYFDMRYLLNNTLMKDQPSLAVTLVDNHDTQPGQSLQSWVEPWFKQLAYAFILTRQEGYPCVFYGDYYGIPKYNIPGLKSKIDPLLIARRDYAYGTQRDYIDHQDIIGWTREGIDAKPNSGLAALITDGPGGSKWMYVGKKHAGKVFYDLTGNRSDTVTINADGWGEFKVNGGSVSIWVAKTSNVT

SEQ ID NO: 26472 - protein, 480 aa, Synthetic construct
APVNGTMMQYFEWDLPNDGTLWTKVKNEASSLSALGITALWLPPAYKGTSQADVGYGVYDLYDLGEFNQKGTIRTKYGTKTQYLQAIQAAKSAGMQVYADVVFNHKGGADATEDVTAVEVDPADRNRVISGEHLIKAWTHFHFPGRGSTYSDFKWHWYHFDGTDWDESRKLNRIYKFQGKAWDWEVSNEFGNYDYLMYADIDMDHPEVVAELKNWGKWYVNTTNVDGFRLDAVKHIKYSFFPDWLSYVRNQTGKNLFAVGEFWGYDVNKLHNYITKTNGAMSLFDAPLHNNFYIASKSSGYFDMRYLLNNTLMKDQPALAVTLVDNHDTQPGQSLQSWVEPWFKPLAYAFILTRQEGYPCVFYGDYYGIPKYNIPGLKSKIDPLLIARRDYAYGTQRDYIDHQDIIGWTREGIDAKPNSGLAALITDGPGGSKWMYVGKRHAGKVFYDLTGNRSDTVTINADGWGEFKVNGGSVSIWVAK

SEQ ID NO: 26473 - protein, 480 aa, Bacillus sp.
APINETMMQYFEWDLPNDGTLWTKVKNEAANLSSLGITALWLPPAYKGTSQSDVGYGVYDLYDLGEFNQKGTIRTKYGTKTQYIQAIQAAKAAGMQVYADVVFNHKAGADGTEFVDAVEVDPSNRNQEVSGTYQIEAWTKFDFPGRGNTYSSFKWRWYHFDGTDWDESRKLNRIYKFRGKAWDWEVDTENGNYDYLMFADLDMDHPEVVTELKNWGTWYVNTTNIDGFRLDAVKHIKFSFMRDWLTYVRNQTGKNLFAVGEFWSYDVNKLHNYITKTNGSMSLFDAPLHNNFYTASKSSGYFDMRNLLNGTLVQRHPSHAVTLVDNHDTQPGQSLQSWVEPWFKPLAYAFILTRQEGYPCVFYGDYYGIPSDGVPGLKSKIDPLLIARRDYAYGTQRDYIDHQDIIGWTREGIDTKPNSGLAALITDGPGGSKWMYVGKKHAGKVFYDLTGNRSDTVTINADGWGEFKVNGGSVSIWVAK

SEQ ID NO: 26474 - protein, 480 aa, Geobacillus stearothermophilus
NGTLMQYFEWYTPNDGQHWKRLQNDSAYLAEHGITAVWIPPAYKGTSQADVGYGAYDLYDLGEFHQKGTVRTKYGTKGELQSAIKSLHSRDINVYGDVVINHKGGADATEDVTAVEVDPADRNRVISGEYLIKAWTHFHFPGRGSTYSDFKWHWYHFDGTDWDESRKLNRIYKFQGKAWDWEVSSENGNYDYLMYADIDYDHPDVVAEIKRWGTWYANELQLDGFRLDAVKHIKFSFFPDWLSYVRSQTGKPLFTVGEYWSYDINKLHNYITKTNGTMSLFDAPLHNKFYTASKSGGAFDMRTLMTNTLMKDQPTLAVTFVDNHDTEPGQALQSWVDPWFKPLAYAFILTRQEGYPCVFYGDYYGIPQYNIPSLKSKIDPLLIARRDYAYGTQHDYLDHSDIIGWTREGVTEKPGSGLAALITDGPGGSKWMYVGKQHAGKVFYDLTGNRSDTVTINSDGWGEFKVNGGSVSVWVPRKTT

SEQ ID NO: 26475 - protein, 482 aa, Synthetic construct
APVNGTMMQYFEWDLPNDGTLWTKVKNEAANLSSLGITALWLPPAYKGTSQSDVGYGVYDLYDLGEFNQKGTIRTKYGTKTQYIQAIQAAKAAGMQVYADVVFNHKAGADYTENVTAVEVNPSNRNQETSGEYNIQAWTGFNFPGRGTTYSNFKWQWFHFDGTDWDQSRSLSRIFKFRGTGKAWDWEVSSENGNYDYLMYADIDMDHPEVVAELKNWGKWYVNTTNVDGFRLDAVKHIKYSFFPDWLSYVRNQTGKNLFAVGEFWSYDVNKLHNYITKTNGTMSLFDAPLHNNFYIASKSSGYFDMRYLLNNTLMKDQPALAVTLVDNHDTQPGQSLQSWVEPWFKPLAYAFILTRQEGYPCVFYGDYYGIPKYNIPGLKSKIDPLLIARRDYAYGTQRDYIDHPDIIGWTREGIDAKPNSGLAALITDGPGGSKWMYVGKKHAGKVFYDLTGNRSDTVTINADGWGQFKVNGGSVSIWVAK

SEQ ID NO: 26476 - protein, 482 aa, Synthetic construct
APVNGTMMQYFEWDLPNDGTLWTKVKNEATNLFSLGITALWLPPAYKGTSQSDVGYGVYDLYDLGEFNQKGTIRTKYGTKTQYIQAIQAAKAAGMQVYADVVFNHKAGADATEDVTAVEVNPANRNQETSEEYQIKAWTDFRFPGRGNTYSDFKWHWYHFDGADWDESRKISRIFKFRGEGKAWDWEVSSENGNYDYLMYADVDMDHPEVVTELKNWGTWYVNTTNIDGFRLDAVKHIKYSFFPDWLTYVRNQTGKNLFAVGEFWSYDVNKLHNYITKTNGSMSLFDAPLHNNFYTASKSSGYFDMRYLLNNTLMKDQPSLAVTLVDNHDTQPGQSLQSWVEPWFKPLAYAFILTRQEGYPCVFYGDYYGIPKYNIPGLKSKIDPLLIARRDYAYGTQRDYIDHQDIIGWTREGIDTKPNSGLAALITDGPGGSKWMYVGKKHAGKVFYDLTGNRSDTVTINADGWGEFKVNGGSVSIWVAK

SEQ ID NO: 26477 - protein, 482 aa, Synthetic construct
APINETMMQYFEWDLPNDGTLWTKVKNEAANLSSLGITALWLPPAYKGTSQSDVGYGVYDLYDLGEFNQKGTIRTKYGTKTQYIQAIQAAKAAGMQVYADVVFNHKAGADATEDVTAVEVNPANRNQETSEEYQIKAWTDFRFPGRGNTYSDFKWHWYHFDGADWDESRKISRIFKFRGEGKAWDWEVSSENGNYDYLMYADVDMDHPEVVTELKNWGTWYVNTTNIDGFRLDAVKHIKYSFFPDWLTYVRNQTGKNLFAVGEFWSYDVNKLHNYITKTNGSMSLFDAPLHNNFYTASKSSGYFDMRYLLNNTLMKDQPSLAVTLVDNHDTQPGQSLQSWVEPWFKPLAYAFILTRQEGYPCVFYGDYYGIPKYNIPGLKSKIDPLLIARRDYAYGTQRDYIDHQDIIGWTREGIDTKPNSGLAALITDGPGGSKWMYVGKKHAGKVFYDLTGNRSDTVTINADGWGEFKVNGGSVSIWVAK

SEQ ID NO: 26478 - protein, 483 aa, Synthetic construct
APVNGTMMQYFEWDLPNDGTLWTKVKNEASSLSALGITALWLPPAYKGTSQADVGYGVYDLYDLGEFNQKGTIRTKYGTKTQYLQAIQAAKSAGMQVYADVVFNHKGGADATEMVRAVEVNPNNRNQEVTGEYTIEAWTRFDFPGRGNTHSSFKWRWYHFDGVDWDQSRRLNNRIYKFRGHGKAWDWEVDTENGNYDYLMYADIDMDHPEVVAELKNWGKWYVNTTNVDGFRLDAVKHIKYSFFPDWLSYVRNQTGKNLFAVGEFWGYDVNKLHNYITKTNGAMSLFDAPLHNNFYIASKSSGYFDMRYLLNNTLMKDQPALAVTLVDNHDTQPGQSLQSWVEPWFKPLAYAFILTRQEGYPCVFYGDYYGIPKYNIPGLKSKIDPLLIARRDYAYGTQRDYIDHQDIIGWTREGIDAKPNSGLAALITDGPGGSKWMYVGKRHAGKVFYDLTGNRSDTVTINADGWGEFKVNGGSVSIWVAK

SEQ ID NO: 26479 - protein, 483 aa, Synthetic construct
APVNGTMMQYFEWDLPNDGTLWTKVKNEASSLSALGITALWLPPAYKGTSQADVGYGVYDLYDLGEFNQKGTIRTKYGTKTQYLQAIQAAKSAGMQVYADVVFNHKGGADFTERVQAVEVNPQNRNQEVSGTYQIEAWTGFNFPGRGNQHSSFKWRWYHFDGTDWDQSRQLANRIYKFRGDGKAWDWEVDTENGNYDYLMYADVDMDHPEVVAELKNWGKWYVNTTNVDGFRLDAVKHIKYSFFPDWLSYVRNQTGKNLFAVGEFWGYDVNKLHNYITKTNGAMSLFDAPLHNNFYIASKSSGYFDMRYLLNNTLMKDQPALAVTLVDNHDTQPGQSLQSWVEPWFKPLAYAFILTRQEGYPCVFYGDYYGIPKYNIPGLKSKIDPLLIARRDYAYGTQRDYIDHQDIIGWTREGIDAKPNSGLAALITDGPGGSKWMYVGKRHAGKVFYDLTGNRSDTVTINADGWGEFKVNGGSVSIWVAK

SEQ ID NO: 26480 - protein, 535 aa, unidentified
YAIVATLIISFLTPFSTAQANTAPVNGTMMQYFEWDLPNDGTLWTKVKNEASSLSSLGITALWLPPAYKGTSQGDVGYGVYDLYDLGEFNQKGTIRTKYGTKTQYLQAIQAAKSAGMQVYADVVFNHKAGADSTEWVDAVEVNPSNRNQETSGTYQIQAWTKFDFPDRGNTYSSFKWRWYHFDGTDWDESRKLNRIYKFRGTGKAWDWEVDTENGNYDYLMFADLDMDHPEVVTELKNWGTWYVNTTNVDGFRLDAVKHIKYSFFPDWLTYVRSQTQKNLFAVGEFWSYDVNKLHNYITKTSGTMSLFDAPLHNNFYTASKSSGYFDMRYLLNNTLMKDQPSLAVTLVDNHDTQPGQSLQSWVEPWFKPLAYAFILTRQEGYPCVFYGDYYGIPKYNIPGLKSKIDPLLIARRDYAYGTQRDYIDHQDIIGWTREGIDSKPNSGLAALITDGPGGSKWMYVGKKHAGKVFYDLTGNRSDTVTINADGWGEFKVNGGSVSIWVAKTSQVTFTVNNATTTSGQNVYVVGNIPELGNW

SEQ ID NO: 26481 - protein, 535 aa, unidentified
YAIVATLIIYFLTPFSTAQANTAPVNGTMMQYFEWDLPNDGTLWTKVKNEASSLSSLGITALWLPPAYKGTSQGDVGYGVYDLYDLGEFNQKGTIRTKYGTKTQYLQAIQAAKSAGMQVYADVVFNHKAGADSTEWVDAVEVNPSNRNQETSGTYQIQAWTKFDFPGRGNTYSSFKWRWYHFDGTDWDESRKLNRIYKFRGTGKAWDWEVDTENGNYDYLMFADLDMDHPEVVTELKNWGTWYVNTTNVDGFRLDAVKHIKYSFFPDWLTHVRSQTRKNLFAVGEFWSYDVNKLHNYITKTSGTMSLFDAPLHNNFYTASKSSGYFDMRYLLNNTLMKDQPSLAVTLVDNHDTQPGQSLQSWVEPWFKPLAYAFILTRQEGYPCVFYGDYYGIPKYNIPGLKSKIDPLLIARRDYAYGTQRDYIDHQDIIGWTREGIDSKPNSGLAALITDGPGGSKWMYVGKKHAGKVFYDLTGNRSDTVTINADGWGEFKVNGGSVSIWVAKTSQVTFTVNNATTISGQNVYVVGNIPELGNW

SEQ ID NO: 26482 - protein, 483 aa, Bacillus licheniformis
HHNGTNGTMMQYFEWYLPNDGNHWHRLRSDASNLKDKGITAVWIPPAWKGASQNDVGYGAYDLYDLGEFNQKGTVRTKYGTRNQLQAAVTALKSNGIQVWGDVVMNHKGGADATEWVRAVEVNPSNRNQEVSGDTTIEAWTKFDFPGRGNTHSNFKWRWYHFDGVDWDQSRQLQNKIYKFQGKEWDWEVDTENGNYDYLMYADYDMDHPEVVNELRNWGVWYTNTLGLDGFRIDAVKHIKYSFTRDWLTHVRNTTQKNMFAVAEFWKNDIGAIENYLSNTNWNHSVFDVPLHYNLYNASRSGGNYDMRQIFNGTVVQRHPTHAVTFVDNHDSQPEEALESFVEEWFKPLAYALTLTRDQGYPSVFYGDYYGIPTHGVPAMKSKIDPILEARQKYAYGTQRDYLDHPDVIGWTREGDGVHADSGLATLMSDGPGGSKWMEVGKNNAGEVWYDITGNQTNTVTINKDGWGQFHVSGGSVSIYVQQ

SEQ ID NO: 26483 - protein, 483 aa, Bacillus licheniformis
HHNQTNGTMMQYFEWYLPNDGNHWNRLRSDASNLKDKGITAVWIPPAWKGASQNDVGYGAYDLYDLGEFNQKGTVRTKYGTRNQLQAAVTALKSNGIQVYGDVVMNHKGGADATEWVRAVEVNPSNRNQEVSGDTTIEAWTKFDFPGRGNTHSNFKWRWYHFDGVDWDQSRQLQNKIYKFQGKEWDWEVDEENGNYDYLMYADYDMDHPEVVNELRNWGVWYTNTLGLDGFRIDAVKHIKYSFTRDWLEHVRNTTQKNMFAVAEFWKNDIGAIENYLSKTNWNHSVFDVPLHYNLYNASRSGGNYDMRQIFNGTVVQRHPTHAVTFVDNHDSQPEEALESFVEEWFKPLAYALTLTRDQGHPSVFYGDYYGIPTHGVPAMKSKIDPILEARQKYAYGTQRDYMDHPDVIGWTREGDGVHADSGLATLMSDGPGGSKWMEVGKNNAGEVWYDITGNQTNTVTINKDGWGQFHVSGGSVSIYVQQ

SEQ ID NO: 26484 - protein, 483 aa, Bacillus licheniformis
HHNQTNGTMMQYFEWYLPNDGNHWNRLRSDASNLKDKGITAVWIPPAWKGASQNDVGYGAYDLYDLGEFNQKGTVRTKYGTRNQLQAAVTALKSNGIQVWGDVVMNHKGGADATEWVRAVEVNPSNRNQEVSGDYTIEAWTKFDFPGRGNTHSNFKWRWYHFDGVDWDQSRQLQNKIYKFRGKEWDWEVDEENGNYDYLMYADYDMDHPEVVNELRNWGVWYTNTLGLDGFRIDAVKHIKYSFTRDWLEHVRNTTQKNMFAVAEFWKNDVGAIENYLSNTNWNHSVFDVPLHYNLYNASRSGGNYDMRQIFNGTVVQRHPTHAVTFVDNHDSQPEEALESFVEEWFKPLAYALTLTRDQGHPSVFYGDYYGIPTHGVPAMKSKIDPILEARQKYAYGTQRDYMDHPDVIGWTREGDGVHADSGLATLMSDGPGGSKWMEVGKNNAGEVWYDITGNQTNTVTINKDGWGQFHVSGGSVSIYVQQ

SEQ ID NO: 26485 - protein, 483 aa, Bacillus licheniformis
HHNQTNGTMMQYFEWYLPNDGNHWNRLRSDASNLKDKGITAVWIPPAWKGASQNDVGYGAYDLYDLGEFNQKGTVRTKYGTRNQLQAAVTALKSNGIQVWGDVVMNHKGGADATEWVRAVEVNPSNRNQEVSGDTTIEAWTKFDFPGRGNTHSNFKWRWYHFDGVDWDQSRQLQNKIYKFQGKEWDWEVDEENGNYDYLMYADYDMDHPEVVNELRNWGVWYTNTLGLDGFRIDAVKHIKYSFTRDWLEHVRNTTGKNMFAVAEFWKNDIGAIENYLSKTNWNHSVFDVPLHYNLYNASRSGGNYDMRQIFNGTVVQRHPTHAVTFVDNHDSQPEEALESFVEEWFKPLAYALTLTRDQGHPSVFYGDYYGIPTHGVPAMKSKIDPILEARQKYAYGTQRDYMDHPDVIGWTREGDGVHADSGLATLMSDGPGGSKWMEVGKNNAGEVWYDITGNQTNTVTINKDGWGQFHVSGGSVSIYVQQ

SEQ ID NO: 26486 - protein, 483 aa, Bacillus licheniformis
HHNQTNGTMMQYFEWYLPNDGNHWNRLRSDASNLKDKGITAVWIPPAWKGASQNDVGYGAYDLYDLGEFNQKGTVRTKYGTRNQLQAAVTALKSNGIQVYGDVVMNHKGGADATEWVRAVEVNPSNRNQEVSGDTTIEAWTKFDFPGRGNTHSNFKWRWYHFDGVDWDQSRQLQNKIYKFQGKEWDWEVDEENGNYDYLMYADYDMDHPEVVNELRNWGVWYTNTLGLDGFRIDAVKHIKYSFTRDWLEHVRNTTGKNMFAVAEFWKNDIGAIENYLSNTNWNHSVFDVPLHYNLYNASRSGGNYDMRQIFNGTVVQRHPTHAVTFVDNHDSQPEEALESFVEEWFKPLAYALTLTRDQGHPSVFYGDYYGIPTHGVPAMKSKIDPILEARQKYAYGTQRDYMDHPDVIGWTREGDGVHADSGLATLMSDGPGGSKWMEVGKNNAGEVWYDITGNQTNTVTINKDGWGQFHVSGGSVSIYVQQ

SEQ ID NO: 26487 - protein, 483 aa, Bacillus licheniformis
HHNQTNGTMMQYFEWYLPNDGNHWNRLRSDASNLKDKGITAVWIPPAWKGASQNDVGYGAYDLYDLGEFNQKGTVRTKYGTRNQLQAAVTALKSNGIQVYGDVVMNHKGGADATEWVRAVEVNPSNRNQEVSGDYTIEAWTKFDFPGRGNTHSNFKWRWYHFDGVDWDQSRQLQNKIYKFQGKEWDWEVDEENGNYDYLMYADYDMDHPEVVNELRNWGVWYTNTLGLDGFRIDAVKHIKYSFTRDWLEHVRNTTQKNMFAVAEFWKNDIGAIENYLSNTNWNHSVFDVPLHYNLYNASRSGGNYDMRQIFNGTVVQRHPTHAVTFVDNHDSQPEEALESFVEEWFKPLAYALTLTRDQGHPSVFYGDYYGIPTHGVPAMKSKIDPILEARQKYAYGTQRDYMDHPDVIGWTREGDGVHADSGLATLMSDGPGGSKWMEVGKNNAGEVWYDITGNQTNTVTINKDGWGQFHVSGGSVSIYVQQ

SEQ ID NO: 26488 - protein, 483 aa, Bacillus licheniformis
HHNQTNGTMMQYFEWYLPNDGNHWNRLRSDASNLKDKGITAVWIPPAWKGASQNDVGYGAYDLYDLGEFNQKGTVRTKYGTRNQLQAAVTALKSNGIQVWGDVVMNHKGGADATEWVRAVEVNPSNRNQEVSGDYTIEAWTKFDFPGRGNTHSNFKWRWYHFDGVDWDQSRQLQNKIYKFQGKEWDWEVDEENGNYDYLMYADYDMDHPEVVNELRNWGVWYTNTLGLDGFRIDAVKHIKYSFTRDWLEHVRNTTQKNMFAVAEFWKNDIGAIENYLSKTNWNHSVFDVPLHYNLYNASRSGGNYDMRQIFNGTVVQRHPTHAVTFVDNHDSQPEEALESFVEEWFKPLAYALTLTRDQGHPSVFYGDYYGIPTHGVPAMKSKIDPILEARQKYAYGTQRDYMDHPDVIGWTREGDGVHADSGLATLMSDGPGGSKWMEVGKNNAGEVWYDITGNQTNTVTINKDGWGQFHVSGGSVSIYVQQ

SEQ ID NO: 26489 - protein, 483 aa, Bacillus licheniformis
HHNGTNGTMMQYFEWYLPNDGNHWHRLRSDASNLKDKGITAVWIPPAWKGASQNDVGYGAYDLYDLGEFNQKGTVRTKYGTRNQLQAAVTALKSNGIQVWGDVVMNHKGGADATEWVRAVEVNPSNRNQEVSGDYTIEAWTKFDFPGRGNTHSNFKWRWYHFDGVDWDQSRQLQDKIYKFQGKEWDWEVDTENGNYDYLMYADYDMDHPEVVNELRNWGVWYTNTLGLDGFRIDAVKHIKYSFTRDWLTHVRNTTGKNMFAVAEFWKNDIGAIENYLSNTNWNHSVFDVPLHYNLYNASRSGGNYDMRQIFNGTVVQRHPTHAVTFVDNHDSQPEEALESFVEEWFKPLAYALTLTRDQGEPSVFYGDYYGIPTHGVPAMKSKIDPILEARQKYAYGTQRDYLDHPDVIGWTREGDGVHADSGLATLMSDGPGGSKWMEVGKNNAGEVWYDITGNQTNTVTINKDGWGQFHVSGGSVSIYVQQ

SEQ ID NO: 26490 - protein, 483 aa, Bacillus licheniformis
HHNGTNGTMMQYFEWYLPNDGNHWHRLRSDASNLKDKGITAVWIPPAWKGASQNDVGYGAYDLYDLGEFNQKGTVRTKYGTRNQLQAAVTALKSNGIQVWGDVVMNHKGGADATEWVRAVEVNPSNRNQEVSGDTTIEAWTKFDFPGRGNTHSNFKWRWYHFDGVDWDQSRQLQNKIYKFQGKEWDWEVDEENGNYDYLMYADYDMDHPEVVNELRNWGVWYTNTLGLDGFRIDAVKHIKYSFTRDWLTHVRNTTQKNMFAVAEFWKNDIGAIENYLSKTNWNHSVFDVPLHYNLYNASRSGGNYDMRQIFNGTVVQRHPTHAVTFVDNHDSQPEEALESFVEEWFKPLAYALTLTRDQGEPSVFYGDYYGIPTHGVPAMKSKIDPILEARQKYAYGTQRDYLDHPDVIGWTREGDGVHADSGLATLMSDGPGGSKWMEVGKNNAGEVWYDITGNQTNTVTINKDGWGQFHVSGGSVSIYVQQ

SEQ ID NO: 26491 - protein, 483 aa, Bacillus licheniformis
HHNQTNGTMMQYFEWYLPNDGNHWNRLRSDASNLKDKGITAVWIPPAWKGASQNDVGYGAYDLYDLGEFNQKGTVRTKYGTRNQLQAAVTALKSNGIQVYGDVVMNHKGGADATEWVRAVEVNPSNRNQEVSGDTTIEAWTKFDFPGRGNTHSNFKWRWYHFDGVDWDQSRQLQNKIYKFRGKEWDWEVDEENGNYDYLMYADYDMDHPEVVNELRNWGVWYTNTLGLDGFRIDAVKHIKYSFTRDWLEHVRNTTQKNMFAVAEFWKNDIGAIENYLSNTNWNHSVFDVPLHYNLYNASRSGGNYDMRQIFNGTVVQRHPTHAVTFVDNHDSQPEEALESFVEEWFKPLAYALTLTRDQGEPSVFYGDYYGIPTHGVPAMKSKIDPILEARQKYAYGTQRDYMDHPDVIGWTREGDGVHADSGLATLMSDGPGGSKWMEVGKNNAGEVWYDITGNQTNTVTINKDGWGQFHVSGGSVSIYVQQ

SEQ ID NO: 26492 - protein, 483 aa, Bacillus licheniformis
HHNQTNGTMMQYFEWYLPNDGNHWNRLRSDASNLKDKGITAVWIPPAWKGASQNDVGYGAYDLYDLGEFNQKGTVRTKYGTRNQLQAAVTALKSNGIQVWGDVVMNHKGGADATEWVRAVEVNPSNRNQEVSGDYTIEAWTKFDFPGRGNTHSNFKWRWYHFDGVDWDQSRQLQNKIYKFQGKEWDWEVDEENGNYDYLMYADYDMDHPEVVNELRNWGVWYTNTLGLDGFRIDAVKHIKYSFTRDWLEHVRNTTQKNMFAVAEFWKNDIGAIENYLSKTNWNHSVFDVPLHYNLYNASRSGGNYDMRQIFNGTVVQRHPTHAVTFVDNHDSQPEEALESFVEEWFKPLAYALTLTRDQGEPSVFYGDYYGIPTHGVPAMKSKIDPILEARQKYAYGTQRDYMDHPDVIGWTREGDGVHADSGLATLMSDGPGGSKWMEVGKNNAGEVWYDITGNQTNTVTINKDGWGQFHVSGGSVSIYVQQ

SEQ ID NO: 26493 - protein, 483 aa, Bacillus licheniformis
HHNQTNGTMMQYFEWYLPNDGNHWNRLRSDASNLKDKGITAVWIPPAWKGASQNDVGYGAYDLYDLGEFNQKGTVRTKYGTRNQLQAAVTALKSNGIQVWGDVVMNHKGGADATEWVRAVEVNPSNRNQEVSGDTTIEAWTKFDFPGRGNTHSNFKWRWYHFDGVDWDQSRQLQNKIYKFRGKEWDWEVDEENGNYDYLMYADYDMDHPEVVNELRNWGVWYTNTLGLDGFRIDAVKHIKYSFTRDWLEHVRNTTQKNMFAVAEFWKNDIGAIENYLSKTNWNHSVFDVPLHYNLYNASRSGGNYDMRQIFNGTVVQRHPTHAVTFVDNHDSQPEEALESFVEEWFKPLAYALTLTRDQGEPSVFYGDYYGIPTHGVPAMKSKIDPILEARQKYAYGTQRDYMDHPDVIGWTREGDGVHADSGLATLMSDGPGGSKWMEVGKNNAGEVWYDITGNQTNTVTINKDGWGQFHVSGGSVSIYVQQ

SEQ ID NO: 26494 - protein, 483 aa, Bacillus licheniformis
HHNQTNGTMMQYFEWYLPNDGNHWNRLRSDASNLKDKGITAVWIPPAWKGASQNDVGYGAYDLYDLGEFNQKGTVRTKYGTRNQLQAAVTALKSNGIQVWGDVVMNHKGGADATEWVRAVEVNPSNRNQEVSGDTTIEAWTKFDFPGRGNTHSNFKWRWYHFDGVDWDQSRQLQNKIYKFRGKEWDWEVDEENGNYDYLMYADYDMDHPEVVNELRNWGVWYTNTLGLDGFRIDAVKHIKYSFTRDWLEHVRNTTQKNMFAVAEFWKNDIGAIENYLSKTNWNHSVFDVPLHYNLYNASRSGGNYDMRQIFNGTVVQRHPTHAVTFVDNHDSQPEEALESFVEEWFKPLAYALTLTRDQGHPSVFYGDYYGIPTHGVPAMKSKIDPILEARQKYAYGTQRDYMDHPDVIGWTREGDGVHADSGLATLMSDGPGGSKWMEVGKNNAGEVWYDITGNQTNTVTINKDGWGQFHVSGGSVSIYVQQ

SEQ ID NO: 26495 - protein, 483 aa, Synthetic construct
HHNGTNGTMMQYFEWYLPNDGNHWNRLNSDASNLKSKGITAVWIPPAWKGASQNDVGYGAYDLYDLGEFNQKGTVRTKYGTRSQLQAAVTSLKNNGIQVYGDVVMNHKGGADATEMVRAVEVNPNNRNQEVTGEYTIEAWTRFDFPGRGNTHSSFKWRWYHFDGVDWDQSRRLNNRIYKFRGKAWDWEVDTENGNYDYLMYADIDMDHPEVVNELRNWGVWYTNTLGLDGFRIDAVKHIKYSFTRDWINHVRSATGKNMFAVAEFWKNDLGAIENYLQKTNWNHSVFDVPLHYNLYNASKSGGNYDMRNIFNGTVVQRHPSHAVTFVDNHDSQPEEALESFVEEWFKPLAYALTLTREQGYPSVFYGDYYGIPTHGVPAMRSKIDPILEARQKYAYGAQHDYFDHHDIVGWTREGDSSVANSGLAALITDGPGGAKRMYVGRQNAGETWHDITGNRSEPVVINSEGWGEFHVNGGSVSIYVQR

SEQ ID NO: 26496 - protein, 483 aa, Bacillus licheniformis
HHNQTNGTMMQYFEWYLPNDGNHWNRLRSDASNLKDKGITAVWIPPAWKGASQNDVGYGAYDLYDLGEFNQKGTVRTKYGTRNQLQAAVTALKSNGIQVWGDVVMNHKGGADATEWVRAVEVNPSNRNQEVSGDYTIEAWTKFDFPGRGNTHSNFKWRWYHFDGVDWDQSRQLQNKIYKFQGKEWDWEVDEENGNYDYLMYADYDMDHPEVVNELRNWGVWYTNTLGLDGFRIDAVKHIKYSFTRDWLEHVRNTTQKNMFAVAEFWKNDIGAIENYLSNTNWNHSVFDVPLHYNLYNASRSGGNYDMRQIFNGTVVQRHPTHAVTFVDNHDSQPEEALESFVEEWFKPLAYALTLTRDQGYPSVFYGDYYGIPTHGVPAMKSKIDPILEARQKYAYGTQRDYMDHPDVIGWTREGDGVHADSGLATLMSDGPGGSKWMEVGKNNAGEVWYDITGNQTNTVTINKDGWGQFHVSGGSVSIYVQQ

SEQ ID NO: 26497 - protein, 483 aa, Bacillus licheniformis
HHNQTNGTMMQYFEWYLPNDGNHWNRLRSDASNLKDKGITAVWIPPAWKGASQNDVGYGAYDLYDLGEFNQKGTVRTKYGTRNQLQAAVTALKSNGIQVWGDVVMNHKGGADATEWVRAVEVNPSNRNQEVSGDTTIEAWTKFDFPGRGNTHSNFKWRWYHFDGVDWDQSRQLQNKIYKFQGKEWDWEVDEENGNYDYLMYADYDMDHPEVVNELRNWGVWYTNTLGLDGFRIDAVKHIKYSFTRDWLEHVRNTTGKNMFAVAEFWKNDIGAIENYLSKTNWNHSVFDVPLHYNLYNASRSGGNYDMRQIFNGTVVQRHPTHAVTFVDNHDSQPEEALESFVEEWFKPLAYALTLTRDQGEPSVFYGDYYGIPTHGVPAMKSKIDPILEARQKYAYGTQRDYMDHPDVIGWTREGDGVHADSGLATLMSDGPGGSKWMEVGKNNAGEVWYDITGNQTNTVTINKDGWGQFHVSGGSVSIYVQQ

SEQ ID NO: 26498 - protein, 485 aa, Bacillus sp.
HHNGTNGTMMQYFEWYLPNDGNHWNRLNSDASNLKSKGITAVWIPPAWKGASQNDVGYGAYDLYDLGEFNQKGTVRTKYGTRSQLQAAVTSLKNNGIQVYGDVVMNHKGGADATEMVRAVEVNPNNRNQEVTGEYTIEAWTRFDFPGRGNTHSSFKWRWYHFDGVDWDQSRRLNNRIYKFRGHGKAWDWEVDTENGNYDYLMYADIDMDHPEVVNELRNWGVWYTNTLGLDGFRIDAVKHIKYSFTRDWINHVRSATGKNMFAVAEFWKNDLGAIENYLQKTNWNHSVFDVPLHYNLYNASKSGGNYDMRNIFNGTVVQRHPSHAVTFVDNHDSQPEEALESFVEEWFKPLAYALTLTREQGYPSVFYGDYYGIPTHGVPAMRSKIDPILEARQKYAYGAQHDYFDHHDIVGWTREGDSSVANSGLAALITDGPGGAKRMYVGRQNAGETWHDITGNRSEPVVINSEGWGEFHVNGGSVSIYVQR

SEQ ID NO: 26499 - protein, 483 aa, Bacillus licheniformis
HHNGTNGTMMQYFEWYLPNDGNHWHRLRSDASNLKDKGITAVWIPPAWKGASQNDVGYGAYDLYDLGEFNQKGTVRTKYGTRNQLQAAVTALKSNGIQVWGDVVMNHKGGADATEWVRAVEVNPSNRNQEVSGDTTIEAWTKFDFPGRGNTHSNFKWRWYHFDGVDWDQSRQLQNKIYKFRGKEWDWEVDTENGNYDYLMYADYDMDHPEVVNELRNWGVWYTNTLGLDGFRIDAVKHIKYSFTRDWLTHVRNTTQKNMFAVAEFWKNDIGAIENYLSNTNWNHSVFDVPLHYNLYNASRSGGNYDMRQIFNGTVVQRHPTHAVTFVDNHDSQPEEALESFVEEWFKPLAYALTLTRDQGEPSVFYGDYYGIPTHGVPAMKSKIDPILEARQKYAYGTQRDYLDHPDVIGWTREGDGVHADSGLATLMSDGPGGSKWMEVGKNNAGEVWYDITGNQTNTVTINKDGWGQFHVSGGSVSIYVQQ

SEQ ID NO: 26500 - protein, 483 aa, Bacillus licheniformis
HHNQTNGTMMQYFEWYLPNDGNHWNRLRSDASNLKDKGITAVWIPPAWKGASQNDVGYGAYDLYDLGEFNQKGTVRTKYGTRNQLQAAVTALKSNGIQVWGDVVMNHKGGADATEWVRAVEVNPSNRNQEVSGDYTIEAWTKFDFPGRGNTHSNFKWRWYHFDGVDWDQSRQLQNKIYKFRGKEWDWEVDEENGNYDYLMYADYDMDHPEVVNELRNWGVWYTNTLGLDGFRIDAVKHIKYSFTRDWLEHVRNTTQKNMFAVAEFWKNDIGAIENYLSNTNWNHSVFDVPLHYNLYNASRSGGNYDMRQIFNGTVVQRHPTHAVTFVDNHDSQPEEALESFVEEWFKPLAYALTLTRDQGEPSVFYGDYYGIPTHGVPAMKSKIDPILEARQKYAYGTQRDYMDHPDVIGWTREGDGVHADSGLATLMSDGPGGSKWMEVGKNNAGEVWYDITGNQTNTVTINKDGWGQFHVSGGSVSIYVQQ

SEQ ID NO: 26501 - protein, 483 aa, Bacillus licheniformis
HHNQTNGTMMQYFEWYLPNDGNHWNRLRSDASNLKDKGITAVWIPPAWKGASQNDVGYGAYDLYDLGEFNQKGTVRTKYGTRNQLQAAVTALKSNGIQVWGDVVMNHKGGADATEWVRAVEVNPSNRNQEVSGDTTIEAWTKFDFPGRGNTHSNFKWRWYHFDGVDWDQSRQLQNKIYKFQGKEWDWEVDEENGNYDYLMYADYDMDHPEVVNELRNWGVWYTNTLGLDGFRIDAVKHIKYSFTRDWLEHVRNTTQKNMFAVAEFWKNDIGAIENYLSKTNWNHSVFDVPLHYNLYNASRSGGNYDMRQIFNGTVVQRHPTHAVTFVDNHDSQPEEALESFVEEWFKPLAYALTLTRDQGYPSVFYGDYYGIPTHGVPAMKSKIDPILEARQKYAYGTQRDYMDHPDVIGWTREGDGVHADSGLATLMSDGPGGSKWMEVGKNNAGEVWYDITGNQTNTVTINKDGWGQFHVSGGSVSIYVQQ

SEQ ID NO: 26502 - protein, 483 aa, Bacillus licheniformis
HHNQTNGTMMQYFEWYLPNDGNHWNRLRSDASNLKDKGITAVWIPPAWKGASQNDVGYGAYDLYDLGEFNQKGTVRTKYGTRNQLQAAVTALKSNGIQVWGDVVMNHKGGADATEWVRAVEVNPSNRNQEVSGDYTIEAWTKFDFPGRGNTHSNFKWRWYHFDGVDWDQSRQLQNKIYKFQGKEWDWEVDEENGNYDYLMYADYDMDHPEVVNELRNWGVWYTNTLGLDGFRIDAVKHIKYSFTRDWLEHVRNTTGKNMFAVAEFWKNDIGAIENYLSNTNWNHSVFDVPLHYNLYNASRSGGNYDMRQIFNGTVVQRHPTHAVTFVDNHDSQPEEALESFVEEWFKPLAYALTLTRDQGHPSVFYGDYYGIPTHGVPAMKSKIDPILEARQKYAYGTQRDYMDHPDVIGWTREGDGVHADSGLATLMSDGPGGSKWMEVGKNNAGEVWYDITGNQTNTVTINKDGWGQFHVSGGSVSIYVQQ

SEQ ID NO: 26503 - protein, 483 aa, Bacillus licheniformis
HHNQTNGTMMQYFEWYLPNDGNHWNRLRSDASNLKDKGITAVWIPPAWKGASQNDVGYGAYDLYDLGEFNQKGTVRTKYGTRNQLQAAVTALKSNGIQVYGDVVMNHKGGADATEWVRAVEVNPSNRNQEVSGDTTIEAWTKFDFPGRGNTHSNFKWRWYHFDGVDWDQSRQLQNKIYKFQGKEWDWEVDEENGNYDYLMYADYDMDHPEVVNELRNWGVWYTNTLGLDGFRIDAVKHIKYSFTRDWLEHVRNTTQKNMFAVAEFWKNDIGAIENYLSNTNWNHSVFDVPLHYNLYNASRSGGNYDMRQIFNGTVVQRHPTHAVTFVDNHDSQPEEALESFVEEWFKPLAYALTLTRDQGYPSVFYGDYYGIPTHGVPAMKSKIDPILEARQKYAYGTQRDYMDHPDVIGWTREGDGVHADSGLATLMSDGPGGSKWMEVGKNNAGEVWYDITGNQTNTVTINKDGWGQFHVSGGSVSIYVQQ

SEQ ID NO: 26504 - protein, 483 aa, Bacillus licheniformis
HHNQTNGTMMQYFEWYLPNDGNHWNRLRSDASNLKDKGITAVWIPPAWKGASQNDVGYGAYDLYDLGEFNQKGTVRTKYGTRNQLQAAVTALKSNGIQVWGDVVMNHKGGADATEWVRAVEVNPSNRNQEVSGDYTIEAWTKFDFPGRGNTHSNFKWRWYHFDGVDWDQSRQLQNKIYKFRGKEWDWEVDEENGNYDYLMYADYDMDHPEVVNELRNWGVWYTNTLGLDGFRIDAVKHIKYSFTRDWLEHVRNTTQKNMFAVAEFWKNDIGAIENYLSNTNWNHSVFDVPLHYNLYNASRSGGNYDMRQIFNGTVVQRHPTHAVTFVDNHDSQPEEALESFVEEWFKPLAYALTLTRDQGHPSVFYGDYYGIPTHGVPAMKSKIDPILEARQKYAYGTQRDYMDHPDVIGWTREGDGVHADSGLATLMSDGPGGSKWMEVGKNNAGEVWYDITGNQTNTVTINKDGWGQFHVSGGSVSIYVQQ

SEQ ID NO: 26505 - protein, 483 aa, Bacillus licheniformis
HHNQTNGTMMQYFEWYLPNDGNHWNRLRSDASNLKDKGITAVWIPPAWKGASQNDVGYGAYDLYDLGEFNQKGTVRTKYGTRNQLQAAVTALKSNGIQVWGDVVMNHKGGADATEWVRAVEVNPSNRNQEVSGDTTIEAWTKFDFPGRGNTHSNFKWRWYHFDGVDWDQSRQLQNKIYKFRGKEWDWEVDEENGNYDYLMYADYDMDHPEVVNELRNWGVWYTNTLGLDGFRIDAVKHIKYSFTRDWLEHVRNTTQKNMFAVAEFWKNDIGAIENYLSNTNWNHSVFDVPLHYNLYNASRSGGNYDMRQIFNGTVVQRHPTHAVTFVDNHDSQPEEALESFVEEWFKPLAYALTLTRDQGYPSVFYGDYYGIPTHGVPAMKSKIDPILEARQKYAYGTQRDYMDHPDVIGWTREGDGVHADSGLATLMSDGPGGSKWMEVGKNNAGEVWYDITGNQTNTVTINKDGWGQFHVSGGSVSIYVQQ

SEQ ID NO: 26506 - protein, 483 aa, Bacillus licheniformis
HHNQTNGTMMQYFEWYLPNDGNHWNRLRSDASNLKDKGITAVWIPPAWKGASQNDVGYGAYDLYDLGEFNQKGTVRTKYGTRNQLQAAVTALKSNGIQVWGDVVMNHKGGADATEWVRAVEVNPSNRNQEVSGDYTIEAWTKFDFPGRGNTHSNFKWRWYHFDGVDWDQSRQLQNKIYKFQGKEWDWEVDEENGNYDYLMYADYDMDHPEVVNELRNWGVWYTNTLGLDGFRIDAVKHIKYSFTRDWLEHVQNTTGKNMFAVAEFWKNDIGAIENYLSKTNWNHSVFDVPLHYNLYNASRSGGNYDMRQIFNGTVVQRHPTHAVTFVDNHDSQPEEALESFVEEWFKPLAYALTLTRDQGHPSVFYGDYYGIPTHGVPAMKSKIDPILEARQKYAYGTQRDYMDHPDVIGWTREGDGVHADSGLATLMSDGPGGSKWMEVGKNNAGEVWYDITGNQTNTVTINKDGWGQFHVSGGSVSIYVQQ

SEQ ID NO: 26507 - protein, 483 aa, Bacillus licheniformis
HHNGTNGTMMQYFEWYLPNDGNHWHRLRSDASNLKDKGITAVWIPPAWKGASQNDVGYGAYDLYDLGEFNQKGTVRTKYGTRNQLQAAVTALKSNGIQVWGDVVMNHKGGADATEWVRAVEVNPSNRNQEVSGDTTIEAWTKFDFPGRGNTHSNFKWRWYHFDGVDWDQSRQLQNKIYKFQGKEWDWEVDTENGNYDYLMYADYDMDHPEVVNELRNWGVWYTNTLGLDGFRIDAVKHIKYSFTRDWLTHVRNTTGKNMFAVAEFWKNDIGAIENYLSNTNWNHSVFDVPLHYNLYNASRSGGNYDMRQIFNGTVVQRHPTHAVTFVDNHDSQPEEALESFVEEWFKPLAYALTLTRDQGEPSVFYGDYYGIPTHGVPAMKSKIDPILEARQKYAYGTQRDYLDHPDVIGWTREGDGVHADSGLATLMSDGPGGSKWMEVGKNNAGEVWYDITGNQTNTVTINKDGWGQFHVSGGSVSIYVQQ

SEQ ID NO: 26508 - protein, 483 aa, Bacillus sonorensis
LNGTLMQYFEWNLPNDGQHWKRLQNDAGYLSDIGITAVWIPPAYKGTSQADVGYGPYDLYDLGEFLQKGTVRTKYGMKTELQSAVGSLHSQNIQVYGDVVLNHKAGADLTEDVTAVEVNPGNRNQEISGEYRIKAWTGFNFPGRGSTYSDFKWHWYHFDGTDWDESRKLNRIYKFRGDGKAWDWEVSSENGNYDYLMYADVDYDHPDVVAEMKRWGTWYAKELQLDGFRLDAVKHIKFQFFPDWLSYVRSQTGKEMFTVAEYWQNNLGEIENYLQKTDFQHSVFDVPLHFNLQAASSHGGSYDMRNLLNGTVVSKHPLKAVTFVDNHDTQPGQSLESTVQTWFKPLAYAFILTREAGYPQVFYGDMYGTKGPTSREIPSLKSKCEPILKARKYYAYGTQHDYFDHPDAIGWTREGDQSVAASGLAALITDGPGGSKRMYVGRQHAGETWHDITGNRSDSVVINSDGWGEFYVNGGSVSIYVQR

SEQ ID NO: 26509 - protein, 480 aa, Bacillus sp.
APINETMMQYFEWDLPNDGTLWTKVKNEAANLSSLGITALWLPPAYKGTSQSDVGYGVYDLYDLGEFNQKGTIRTKYGTKTQYIQAIQAAKAAGMQVYADVVFNHKAGADQTEFVDAVEVDPSNRNQEVSGTYQIEAWTKFDFPGRGNTYSSFKWRWYHFDGTDWDESRKLNRIYKFRGKAWDWEVDTENGNYDYLMFADLDMDHPEVVTELKNWGTWYVNTTNIDGFRLDAVKHIKFSFMRDWLTYVRNQTGKNLFAVGEFWSYDVNKLHNYITKTNGSMSLFDAPLHNNFYTASKSSGYFDMRNLLNGTLVQRHPSHAVTLVDNHDTQPGQSLQSWVEPWFKPLAYAFILTRQEGYPCVFYGDYYGIPSDGVPGLKSKIDPLLIARRDYAYGTQRDYIDHQDIIGWTREGIDTKPNSGLAALITDGPGGSKWMYVGKKHAGKVFYDLTGNRSDTVTINADGWGEFKVNGGSVSIWVAK

SEQ ID NO: 26510 - protein, 480 aa, Bacillus sp.
APINETMMQYFEWDLPNDGTLWNRLHNNAQNLKNAGITALWLPPAYKGTSQSDVGYGVYDLYDLGEFNQKGTIRTKYGTKTQYIQAIQAAKAAGMQVYADVVFNHKAGADQTEFVDAVEVDPSNRNQEVSGTYQIEAWTKFDFPGRGNTYSSFKWRWYHFDGTDWDESRKLNRIYKFRGKAWDWEVDTENGNYDYLMFADLDMDHPEVVTELKNWGTWYVNTTNIDGFRLDAVKHIKYSFFPDWLTYVRNQTGKNLFAVGEFWSYDVNKLHNYITKTNGSMSLFDAPLHNNFYTASKSSGYFDMRYLLNNTLMKDQPSLAVTLVDNHDTQPGEALESFVQGWFKPLAYAFILTRQEGYPCVFYGDYYGIPKYNIPGLKSKIDPLLIARRDYAYGTQRDYIDHQDIIGWTREGIDTKPNSGLAALITDGPGGSKWMYVGKKHAGKVFYDLTGNRSDTVTINADGWGEFKVNGGSVSIWVAK

SEQ ID NO: 26511 - protein, 480 aa, Bacillus sp.
APINETMMQYFEWDLPNDGTLWTKVKNEAANLSSLGITALWLPPAYKGTSQSDVGYGVYDLYDLGEFNQKGTIRTKYGTKTQLERAIRSLKANGIQVYADVVFNHKAGADGTEFVDAVEVDPSNRNQEVSGTYQIEAWTKFDFPGRGNTYSSFKWRWYHFDGTDWDESRKLNRIYKFRGKAWDWEVDTENGNYDYLMFADLDMDHPEVVTELKNWGTWYVNTTNIDGFRLDAVKHIKFSFMRDWLTYVRNQTGKNLFAVGEFWSYDVNKLHNYITKTNGSMSLFDAPLHNNFYTASKSSGYFDMRYLLNNTLMKDQPSLAVTLVDNHDTQPGEALESFVQGWFKPLAYAFILTRQEGYPCVFYGDYYGIPKYNIPGLKSKIDPLLIARRDYAYGTQRDYIDHQDIIGWTREGIDTKPNSGLAALITDGPGGSKWMYVGKKHAGKVFYDLTGNRSDTVTINADGWGEFKVNGGSVSIWVAK

SEQ ID NO: 26512 - protein, 480 aa, Bacillus sp.
APINETMMQYFEWDLPNDGTLWNRLHNNAQNLKNAGITALWLPPAYKGTSQSDVGYGVYDLYDLGEFNQKGTIRTKYGTKTQYIQAIQAAKAAGMQVYADVVFNHKAGADGTEFVDAVEVDPSNRNQEVSGTYQIEAWTKFDFPGRGNTYSSFKWRWYHFDGTDWDESRKLNRIYKFRGKAWDWEVDTENGNYDYLMFADLDMDHPEVVTELKNWGTWYVNTTNIDGFRLDAVKHIKFSFMRDWLTYVRNQTGKNLFAVGEFWSYDVNKLHNYITKTNGSMSLFDAPLHNNFYTASKSSGYFDMRYLLNNTLMKDQPSLAVTLVDNHDTQPGEALESFVQGWFKPLAYAFILTRQEGYPCVFYGDYYGIPKYNIPGLKSKIDPLLIARRDYAYGTQRDYIDHQDIIGWTREGIDTKPNSGLAALITDGPGGSKWMYVGKKHAGKVFYDLTGNRSDTVTINADGWGEFKVNGGSVSIWVAK

SEQ ID NO: 26513 - protein, 480 aa, Bacillus sp.
APINETMMQYFEWDLPNDGTLWTKVKNEAANLSSLGITALWLPPAYKGTSQSDVGYGVYDLYDLGEFNQKGTIRTKYGTKTQYIQAIQAAKAAGMQVYADVVFNHKAGADQTEFVDAVEVDPSNRNQEVSGTYQIEAWTKFDFPGRGNTYSSFKWRWYHFDGTDWDESRKLNRIYKFRGKAWDWEVDTENGNYDYLMFADLDMDHPEVVTELKNWGTWYVNTTNIDGFRLDAVKHIKYSFFPDWLTYVRNQTGKNLFAVGEFWKNDLGALENYITKTNGSMSLFDAPLHNNFYTASKSSGYFDMRNLLNGTLVQRHPSHAVTLVDNHDTQPGQSLQSWVEPWFKPLAYAFILTRQEGYPCVFYGDYYGIPKYNIPGLKSKIDPLLIARRDYAYGTQRDYIDHQDIIGWTREGIDTKPNSGLAALITDGPGGSKWMYVGKKHAGKVFYDLTGNRSDTVTINADGWGEFKVNGGSVSIWVAK

SEQ ID NO: 26514 - protein, 480 aa, Bacillus sp.
APINETMMQYFEWDLPNDGTLWTKVKNEAANLSSLGITALWLPPAYKGTSQSDVGYGVYDLYDLGEFNQKGTIRTKYGTKTQLERAIRSLKANGIQVYADVVFNHKAGADGTEFVDAVEVDPSNRNQEVSGTYQIEAWTKFDFPGRGNTYSSFKWRWYHFDGTDWDESRKLNRIYKFRGKAWDWEVDTENGNYDYLMFADLDMDHPEVVTELKNWGTWYVNTTNIDGFRLDAVKHIKFSFMRDWLTYVRNQTGKNLFAVGEFWSYDVNKLHNYITKTNGSMSLFDAPLHNNFYTASKSSGYFDMRYLLNNTLMKDQPSLAVTLVDNHDTQPGQSLQSWVEPWFKPLAYAFILTRQEGYPCVFYGDYYGIPSDGVPGLKSKIDPLLIARRDYAYGTQRDYIDHQDIIGWTREGIDTKPNSGLAALITDGPGGSKWMYVGKKHAGKVFYDLTGNRSDTVTINADGWGEFKVNGGSVSIWVAK

SEQ ID NO: 26515 - protein, 480 aa, Bacillus sp.
APINETMMQYFEWDLPNDGTLWTKVKNEAANLSSLGITALWLPPAYKGTSQSDVGYGVYDLYDLGEFNQKGTIRTKYGTKTQLERAIRSLKANGIQVYADVVFNHKAGADGTEFVDAVEVDPSNRNQEVSGTYQIEAWTKFDFPGRGNTYSSFKWRWYHFDGTDWDESRKLNRIYKFRGKAWDWEVDTENGNYDYLMFADLDMDHPEVVTELKNWGTWYVNTTNIDGFRLDAVKHIKYSFFPDWLGHVRGQTGKNLFAVGEFWSYDVNKLHNYITKTNGSMSLFDAPLHNNFYTASKSSGYFDMRYLLNNTLMKDQPSLAVTLVDNHDTQPGEALESFVQGWFKPLAYAFILTRQEGYPCVFYGDYYGIPKYNIPGLKSKIDPLLIARRDYAYGTQRDYIDHQDIIGWTREGIDTKPNSGLAALITDGPGGSKWMYVGKKHAGKVFYDLTGNRSDTVTINADGWGEFKVNGGSVSIWVAK

SEQ ID NO: 26516 - protein, 480 aa, Bacillus sp.
APINETMMQYFEWDLPNDGTLWTKVKNEAANLSSLGITALWLPPAYKGTSQSDVGYGVYDLYDLGEFNQKGTIRTKYGTKTQYIQAIQAAKAAGMQVYADVVFNHKAGADQTEFVDAVEVDPSNRNQEVSGTYQIEAWTKFDFPGRGNTYSSFKWRWYHFDGTDWDESRKLNRIYKFRGKAWDWEVDTENGNYDYLMFADLDMDHPEVVTELKNWGTWYVNTTNIDGFRLDAVKHIKFSFMRDWLTYVRNQTGKNLFAVGEFWSYDVNKLHNYITKTNGSMSLFDAPLHNNFYTASKSSGYFDMRNLLNGTLVQRHPSHAVTLVDNHDTQPGEALESFVQGWFKPLAYAFILTRQEGYPCVFYGDYYGIPKYNIPGLKSKIDPLLIARRDYAYGTQRDYIDHQDIIGWTREGIDTKPNSGLAALITDGPGGSKWMYVGKKHAGKVFYDLTGNRSDTVTINADGWGEFKVNGGSVSIWVAK

SEQ ID NO: 26517 - protein, 482 aa, Synthetic construct
APINETMMQYFEWDLPNDGTLWTKVKNEAANLSSLGITALWLPPAYKGTSQSDVGYGVYDLYDLGEFNQKGTIRTKYGTKTQYIQAIQAAKAAGMQVYADVVFNHKAGADYTENVTAVEVNPSNRNQETSGEYNIQAWTGFNFPGRGTTYSNFKWQWFHFDGTDWDQSRSLSRIFKFRGTGKAWDWEVSSENGNYDYLMYADIDMDHPEVVTELKNWGTWYVNTTNIDGFRLDAVKHIKYSFFPDWLTYVRNQTGKNLFAVGEFWSYDVNKLHNYITKTNGSMSLFDAPLHNNFYTASKSSGYFDMRYLLNNTLMKDQPSLAVTLVDNHDTQPGQSLQSWVEPWFKPLAYAFILTRQEGYPCVFYGDYYGIPKYNIPGLKSKIDPLLIARRDYAYGTQRDYIDHQDIIGWTREGIDTKPNSGLAALITDGPGGSKWMYVGKKHAGKVFYDLTGNRSDTVTINADGWGEFKVNGGSVSIWVAK

SEQ ID NO: 26518 - protein, 482 aa, Synthetic construct
APVNGTMMQYFEWDLPNDGTLWTKVKNEATNLFSLGITALWLPPAYKGTSQSDVGYGVYDLYDLGEFNQKGTIRTKYGTKTQYIQAIQAAKAAGMQVYADVVFNHKAGADYTENVTAVEVNPSNRNQETSGEYNIQAWTGFNFPGRGTTYSNFKWQWFHFDGTDWDQSRSLSRIFKFRGTGKAWDWEVSSENGNYDYLMYADIDMDHPEVVTELKNWGTWYVNTTNIDGFRLDAVKHIKYSFFPDWLTYVRNQTGKNLFAVGEFWSYDVNKLHNYITKTNGSMSLFDAPLHNNFYTASKSSGYFDMRYLLNNTLMKDQPSLAVTLVDNHDTQPGQSLQSWVEPWFKPLAYAFILTRQEGYPCVFYGDYYGIPKYNIPGLKSKIDPLLIARRDYAYGTQRDYIDHQDIIGWTREGIDTKPNSGLAALITDGPGGSKWMYVGKKHAGKVFYDLTGNRSDTVTINADGWGEFKVNGGSVSIWVAK

SEQ ID NO: 26519 - protein, 483 aa, Synthetic construct
APVNGTMMQYFEWDLPNDGTLWTKVKNEAANLSSLGITALWLPPAYKGTSQSDVGYGVYDLYDLGEFNQKGTIRTKYGTKTQYIQAIQAAKAAGMQVYADVVFNHRMGADATETISAVEVNPSNRNQVTSGAYNISAWTDFEFPGRGNTYSSFKWHSYYFDGVDWDQSRQLSGKIYQIQGTGKAWDWEVDSENGNYDYLMGADIDMDHPEVVAELKNWGKWYVNTTNVDGFRLDAVKHIKYSFFPDWLSYVRNQTGKNLFAVGEFWSYDVNKLHNYITKTNGTMSLFDAPLHNNFYIASKSSGYFDMRYLLNNTLMKDQPALAVTLVDNHDTQPGQSLQSWVEPWFKPLAYAFILTRQEGYPCVFYGDYYGIPKYNIPGLKSKIDPLLIARRDYAYGTQRDYIDHPDIIGWTREGIDAKPNSGLAALITDGPGGSKWMYVGKKHAGKVFYDLTGNRSDTVTINADGWGQFKVNGGSVSIWVAK

SEQ ID NO: 26520 - protein, 483 aa, Bacillus licheniformis
HHNQTNGTMMQYFEWYLPNDGNHWNRLRSDASNLKDKGITAVWIPPAWKGASQNDVGYGAYDLYDLGEFNQKGTVRTKYGTRNQLQAAVTALKSNGIQVWGDVVMNHKGGADATEWVRAVEVNPSNRNQEVSGDTTIEAWTKFDFPGRGNTHSNFKWRWYHFDGVDWDQSRQLQNKIYKFQGKEWDWEVDEENGNYDYLMYADYDMDHPEVVNELRNWGVWYTNTLGLDGFRIDAVKHIKYSFTRDWLEHVRNTTQKNMFAVAEFWKNDIGAIENYLSKTNWNHSVFDVPLHYNLYNASRSGGNYDMRQIFNGTVVQRHPTHAVTFVDNHDSQPEEALESFVEEWFKPLAYALTLTRDQGEPSVFYGDYYGIPTHGVPAMKSKIDPILEARQKYAYGTQRDYMDHPDVIGWTREGDGVHADSGLATLMSDGPGGSKWMEVGKNNAGEVWYDITGNQTNTVTINKDGWGQFHVSGGSVSIYVQQ

SEQ ID NO: 26521 - protein, 483 aa, Bacillus sp.
HHNGTNGTMMQYFEWYLPNDGNHWNRLNSDASNLKSKGITAVWIPPAWKATSQNDVGYGAYDLYDLGEFNQKGTVRTKYGTRSQLQAAVTSLKNNGIQVYGDVVMNHKGGADATEMVRAVEVNPNNRNQEVTGEYTIEAWTRFDFPGRGNTHSSFKWRWYHFDGVDWDQSRQFQNRIYKFRGKAWDWEVDTEFGNYDYLMYADYDMDHPEVVNELRNWGVWYTNTLGLDGFRIDAVKHIKYSFTRDWINHVRSATGKNMFAVAEFWKNDLGAIENYLQKTNWNHSVFDVPLHYNLYNASKSGGNYDMRNIFNGTVVQRHPSHAVTFVDNHDSQPEEALESFVEEWFKPLAYALTLTREQGYPSVFYGDYYGIPTHGVPAMRSKIDPILEARQKYAYGPQHDYLDHPDVIGWTREGDSSHPKSGLATLITDGPGGSKRMYAGLKNAGETWYDITGNRSDTVKIGSDGWGEFHVNDGSVSIYVQK

SEQ ID NO: 26522 - protein, 483 aa, Bacillus licheniformis
HHNQTNGTMMQYFEWYLPNDGNHWNRLRSDASNLKDKGITAVWIPPAWKGASQNDVGYGAYDLYDLGEFNQKGTVRTKYGTRNQLQAAVTALKSNGIQVWGDVVMNHKGGADATEWVRAVEVNPSNRNQEVSGDTTIEAWTKFDFPGRGNTHSNFKWRWYHFDGVDWDQSRQLQNKIYKFRGKEWDWEVDEENGNYDYLMYADYDMDHPEVVNELRNWGVWYTNTLGLDGFRIDAVKHIKYSFTRDWLEHVRNTTQKNMFAVAEFWKNDIGAIENYLSNTNWNHSVFDVPLHYNLYNASRSGGNYDMRQIFNGTVVQRHPTHAVTFVDNHDSQPEEALESFVEEWFKPLAYALTLTRDQGHPSVFYGDYYGIPTHGVPAMKSKIDPILEARQKYAYGTQRDYMDHPDVIGWTREGDGVHADSGLATLMSDGPGGSKWMEVGKNNAGEVWYDITGNQTNTVTINKDGWGQFHVSGGSVSIYVQQ

SEQ ID NO: 26523 - protein, 483 aa, Bacillus licheniformis
HHNQTNGTMMQYFEWYLPNDGNHWNRLRSDASNLKDKGITAVWIPPAWKGASQNDVGYGAYDLYDLGEFNQKGTVRTKYGTRNQLQAAVTALKSNGIQVWGDVVMNHKGGADATEWVRAVEVNPSNRNQEVSGDTTIEAWTKFDFPGRGNTHSNFKWRWYHFDGVDWDQSRQLQNKIYKFQGKEWDWEVDEENGNYDYLMYADYDMDHPEVVNELRNWGVWYTNTLGLDGFRIDAVKHIKYSFTRDWLEHVRNTTGKNMFAVAEFWKNDIGAIENYLSNTNWNHSVFDVPLHYNLYNASRSGGNYDMRQIFNGTVVQRHPTHAVTFVDNHDSQPEEALESFVEEWFKPLAYALTLTRDQGHPSVFYGDYYGIPTHGVPAMKSKIDPILEARQKYAYGTQRDYMDHPDVIGWTREGDGVHADSGLATLMSDGPGGSKWMEVGKNNAGEVWYDITGNQTNTVTINKDGWGQFHVSGGSVSIYVQQ

SEQ ID NO: 26524 - protein, 483 aa, Synthetic construct
HHNGTNGTMMQYFEWYLPNDGNHWNRLNSDASNLKSKGITAVWIPPAWKGASQNDVGYGAYDLYDLGEFNQKGTVRTKYGTRSQLQAAVTSLKNNGIQVYGDVVMNHKGGADATEMVRAVEVNPNNRNQEVTGEYTIEAWTRFDFPGRGNTHSSFKWRWYHFDGVDWDQSRQFQNRIYKFRGKAWDWEVDTENGNYDYLMYADIDMDHPETVNELRNWGVWYTNTLGLDGFRIDAVKHIKYSFTRDWINHVRSATGKNMFAVAEFWKNDLGAIENYLQKTNWNHSVFDVPLHYNLYNASKSGGNYDMRNIFNGTVVQRHPSHAVTFVDNHDSQPEEALESFVEEWFKPLAYALTLTREQGYPSVFYGDYYGIPTHGVPAMRSKIDPILEARQKYAYGPQHDYLDHPDVIGWTREGDSSHPKSGLATLITDGPGGSKRMYAGLKNAGETWYDITGNRSDTVKIGSDGWGEFHVNDGSVSIYVQK

SEQ ID NO: 26525 - protein, 483 aa, Bacillus licheniformis
HHNGTNGTMMQYFEWYLPNDGNHWHRLRSDASNLKDKGITAVWIPPAWKGASQNDVGYGAYDLYDLGEFNQKGTVRTKYGTRNQLQAAVTALKSNGIQVWGDVVMNHKGGADATEWVRAVEVNPSNRNQEVSGDTTIEAWTKFDFPGRGNTHSNFKWRWYHFDGVDWDQSRQLQNKIYKFQGKEWDWEVDTENGNYDYLMYADYDMDHPEVVNELRNWGVWYTNTLGLDGFRIDAVKHIKYSFTRDWLTHVRNTTQKNMFAVAEFWKNDIGAIENYLSNTNWNHSVFDVPLHYNLYNASRSGGNYDMRQIFNGTVVQRHPTHAVTFVDNHDSQPEEALESFVEEWFKPLAYALTLTRDQGEPSVFYGDYYGIPTHGVPAMKSKIDPILEARQKYAYGTQRDYLDHPDVIGWTREGDGVHADSGLATLMSDGPGGSKWMEVGKNNAGEVWYDITGNQTNTVTINKDGWGQFHVSGGSVSIYVQQ

SEQ ID NO: 26526 - protein, 485 aa, Synthetic construct
HHNGTNGTMMQYFEWYLPNDGNHWNRLNSDASNLKSKGITAVWIPPAWKGASQNDVGYGAYDLYDLGEFNQKGTVRTKYGTRSQLQAAVTSLKNNGIQVYGDVVMNHKGGADATEMVRAVEVNPNNRNQEVTGEYTIEAWTRFDFPGRGNTHSSFKWRWYHFDGVDWDQSRRFQNRIYKFRGHGKAWDWEVDTENGNYDYLMYADIDMDHPEVVNELRNWGVWYTNTLGLDGFRIDAVKHIKYSFTRDWINHVRSATGKNMFAVAEFWKNDLGAIENYLQKTNWNHSVFDVPLHYNLYNASKSGGNYDMRNIFNGTVVQRHPSHAVTFVDNHDSQPEEALESFVEEWFKPLAYALTLTREQGYPSVFYGDYYGIPTHGVPAMRSKIDPILEARQKYAYGPQHDYLDHPDVIGWTREGDSSHPKSGLATLITDGPGGSKRMYAGLKNAGETWYDITGNRSDTVKIGSDGWGEFHVNDGSVSIYVQK

SEQ ID NO: 26527 - protein, 483 aa, Bacillus licheniformis
HHNQTNGTMMQYFEWYLPNDGNHWNRLRSDASNLKDKGITAVWIPPAWKGASQNDVGYGAYDLYDLGEFNQKGTVRTKYGTRNQLQAAVTALKSNGIQVWGDVVMNHKGGADATEWVRAVEVNPSNRNQEVSGDTTIEAWTKFDFPGRGNTHSNFKWRWYHFDGVDWDQSRQLQNKIYKFQGKEWDWEVDEENGNYDYLMYADYDMDHPEVVNELRNWGVWYTNTLGLDGFRIDAVKHIKYSFTRDWLEHVRNTTQKNMFAVAEFWKNDIGAIENYLSNTNWNHSVFDVPLHYNLYNASRSGGNYDMRQIFNGTVVQRHPTHAVTFVDNHDSQPEEALESFVEEWFKPLAYALTLTRDQGYPSVFYGDYYGIPTHGVPAMKSKIDPILEARQKYAYGTQRDYMDHPDVIGWTREGDGVHADSGLATLMSDGPGGSKWMEVGKNNAGEVWYDITGNQTNTVTINKDGWGQFHVSGGSVSIYVQQ

SEQ ID NO: 26528 - protein, 485 aa, Bacillus sp.
HHNGTNGTMMQYFEWYLPNDGNHWNRLNSDASNLKSKGITAVWIPPAWKATSQNDVGYGAYDLYDLGEFNQKGTVRTKYGTRSQLQAAVTSLKNNGIQVYGDVVMNHKGGADATEMVRAVEVNPNNRNQEVTGEYTIEAWTRFDFPGRGNTHSSFKWRWYHFDGVDWDQSRQFQNRIYKFRGHGKAWDWEVDTEFGNYDYLMYADYDMDHPEVVNELRNWGVWYTNTLGLDGFRIDAVKHIKYSFTRDWINHVRSATGKNMFAVAEFWKNDLGAIENYLQKTNWNHSVFDVPLHYNLYNASKSGGNYDMRNIFNGTVVQRHPSHAVTFVDNHDSQPEEALESFVEEWFKPLAYALTLTREQGYPSVFYGDYYGIPTHGVPAMRSKIDPILEARQKYAYGPQHDYLDHPDVIGWTREGDSSHPKSGLATLITDGPGGSKRMYAGLKNAGETWYDITGNRSDTVKIGSDGWGEFHVNDGSVSIYVQK

SEQ ID NO: 26529 - protein, 483 aa, Bacillus sp.
HHNGTNGTMMQYFEWYLPNDGNHWNRLNSDASNLKSKGITAVWIPPAWKGASQNDVGYGAYDLYDLGEFNQKGTVRTKYGTRSQLQAAVTSLKNNGIQVYGDVVMNHKGGADATEMVRAVEVNPNNRNQEVTGEYTIEAWTRFDFPGRGNTHSSFKWRWYHFDGVDWDQSRRFQNRIYKFRGKAWDWEVDTENGNYDYLMYADIDMDHPEVVNELRNWGVWYTNTLGLDGFRIDAVKHIKYSFTRDWINHVRSATGKNMFAVAEFWKNDLGAIENYLQKTNWNHSVFDVPLHYNLYNASKSGGNYDMRNIFNGTVVQRHPSHAVTFVDNHDSQPEEALESFVEEWFKPLAYALTLTREQGYPSVFYGDYYGIPTHGVPAMRSKIDPILEARQKYAYGPQHDYLDHPDVIGWTREGDSSHPKSGLATLITDGPGGSKRMYAGLKNAGETWYDITGNRSDTVKIGSDGWGEFHVNDGSVSIYVQK

SEQ ID NO: 26530 - protein, 483 aa, Bacillus licheniformis
HHNQTNGTMMQYFEWYLPNDGNHWNRLRSDASNLKDKGITAVWIPPAWKGASQNDVGYGAYDLYDLGEFNQKGTVRTKYGTRNQLQAAVTALKSNGIQVWGDVVMNHKGGADATEWVRAVEVNPSNRNQEVSGDYTIEAWTKFDFPGRGNTHSNFKWRWYHFDGVDWDQSRQLQNKIYKFQGKEWDWEVDEENGNYDYLMYADYDMDHPEVVNELRNWGVWYTNTLGLDGFRIDAVKHIKYSFTRDWLEHVRNTTQKNMFAVAEFWKNDIGAIENYLSNTNWNHSVFDVPLHYNLYNASRSGGNYDMRQIFNGTVVQRHPTHAVTFVDNHDSQPEEALESFVEEWFKPLAYALTLTRDQGEPSVFYGDYYGIPTHGVPAMKSKIDPILEARQKYAYGTQRDYMDHPDVIGWTREGDGVHADSGLATLMSDGPGGSKWMEVGKNNAGEVWYDITGNQTNTVTINKDGWGQFHVSGGSVSIYVQQ

SEQ ID NO: 26531 - protein, 483 aa, Cytophaga sp.
HHNGTNGTMMQYFEWYLPNDGNHWNRLNSDASNLKSKGITAVWIPPAWKGASQNDVGYGAYDLYDLGEFNQKGTVRTKYGTRSQLQAAVTSLKNNGIQVYGDVVMNHKGGADATEMVRAVEVNPNNRNQEVTGEYTIEAWTRFDFPGRGNTHSSFKWRWYHFDGVDWDQSRRLNNRIYKFRGKAWDWEVDTENGNYDYLMYADIDMDHPEVVNELRNWGVWYTNTLGLDGFRIDAVKHIKYSFTRDWINHVRSATGKNMFAVAEFWKNDLGAIENYLQKTNWNHSVFDVPLHYNLYNASKSGGNYDMRNIFNGTVVQRHPSHAVTFVDNHDSQPEEALESFVEEWFKPLAYALTLTREQGYPSVFYGDYYGIPTHGVPAMRSKIDPILEARQKYAYGTQHDYIDNPDIIGWTREGDSTKAKSGLATIITDGAGGSKRMYVGTSNAGETWYDLTGNRSDTVTIGSDGYATFPVNGGSVSVWVQK

SEQ ID NO: 26532 - protein, 483 aa, Cytophaga sp.
HHNGTNGTMMQYFEWYLPNDGNHWNRLNSDASNLKSKGITAVWIPPAWKGASQNDVGYGAYDLYDLGEFNQKGTVRTKYGTRSQLQAAVTSLKNNGIQVYGDVVMNHKGGADATEMVRAVEVNPNNRNQEVTGEYTIEAWTRFDFPGRGNTHSSFKWRWYHFDGVDWDQSRRLNNRIYKFRGKAWDWEVDTENGNYDYLMYADIDMDHPEVVNELRNWGVWYTNTLGLDGFRIDAVKHIKYSFTRDWINHVRSATGKNMFAVAEFWKNDLGAIENYLQKTNWNHSVFDVPLHYNLYNASKSGGNYDMRNIFNGTVVQRHPSHAVTFVDNHDSQPEEALESFVEEWFKPLAYALTLTREQGYPSVFYGDYYGIPTHGVPAMRSKIDPILEARQKYAYGTQRDYIDNPDVIGWTREGNTSHPKSGLATVITDGPGGSKTMYVGTSNAGEIWYDLTGNRTDKITIGSDGYAEFHVNGGSVSIWVQQ

SEQ ID NO: 26533 - protein, 483 aa, Bacillus licheniformis
HHNQTNGTMMQYFEWYLPNDGNHWNRLRSDASNLKDKGITAVWIPPAWKGASQNDVGYGAYDLYDLGEFNQKGTVRTKYGTRNQLQAAVTALKSNGIQVWGDVVMNHKGGADATEWVRAVEVNPSNRNQEVSGDTTIEAWTKFDFPGRGNTHSNFKWRWYHFDGVDWDQSRQLQNKIYKFQGKEWDWEVDEENGNYDYLMYADYDMDHPEVVNELRNWGVWYTNTLGLDGFRIDAVKHIKYSFTRDWLEHVRNTTQKNMFAVAEFWKNDIGAIENYLSKTNWNHSVFDVPLHYNLYNASRSGGNYDMRQIFNGTVVQRHPTHAVTFVDNHDSQPEEALESFVEEWFKPLAYALTLTRDQGHPSVFYGDYYGIPTHGVPAMKSKIDPILEARQKYAYGTQRDYMDHPDVIGWTREGDGVHADSGLATLMSDGPGGSKWMEVGKNNAGEVWYDITGNQTNTVTINKDGWGQFHVSGGSVSIYVQQ

SEQ ID NO: 26534 - protein, 481 aa, Bacillus licheniformis
VNGTLMQYFEWYTPNDGQHWKRLQNDAEHLSDIGITAVWIPPAYKGTSQADVGYGAYDLYDLGEFHQKGTVRTKYGTKGELQSAIKSLHSRDINVYGDVVINHKGGADATEDVTAVEVDPADRNRVISGEHRIKAWTHFHFPGRGSTYSDFKWHWYHFDGTDWDESRKLNRIYKFQGKAWDWEVSNENGNYDYLMYADIDYDHPDVAAEIKRWGTWYANELQLDGFRLDAVKHIKFSFLRDWVNHVREKTGKEMFTVAEYWQNDLGALENYLNKTNFNHSVFDVPLHYQFHAASTQGGGYDMRKLLNSTVVSKHPLKAVTFVDNHDTQPGQSLESTVQTWFKPLAYAFILTRESGYPQVFYGDMYGTKGDSQREIPALKHKIEPILKARKQYAYGAQHDYFDHHDIVGWTREGDSSVANSGLAALITDGPGGAKRMYVGRQNAGETWHDITGNRSEPVVINSEGWGEFHVNGGSVSIYVQR

SEQ ID NO: 26535 - protein, 481 aa, unidentified
VNGTLMQYFEWYTPNDGQHWKRLQNDAEHLSDIGITAVWIPPAYKGTSQADVGYGAYDLYDLGEFHQKGTVRTKYGTKGELQSAIKSLHSRDINVYGDVVINHKGGADATEDVTAVEVDPADRNRVISGEHLIKAWTHFHFPGRGSTYSDFKWHWYHFDGTDWDESRKLNRIYKFQGKAWDWEVSNENGNYDYLMYADIDYDHPDVAAEIKRWGTWYANELQLDGFRLDAVKHIKFSFLRDWVNHVREKTGKEMFTVAEYWQNDLGALENYLNKTNFNHSVFDVPLHYQFHAASTQGGGYDMRKLLNGTVVSKHPLKSVTFVDNHDTQPGQSLESTVQTWFKPLAYAFILTRESGYPQVFYGDMYGTKGDSQREIPALKHKIEPILKARKQYAYGAQHDYFDHHDIVGWTREGDSSVANSGLAALITDGPGGAKRMYVGRQNAGETWHDITGNRSEPVVINSEGWGEFHVNGGSVSIYVQR

SEQ ID NO: 26536 - protein, 482 aa, Bacillus licheniformis
VNGTLMQYFEWYTPNDGQHWKRLQNDAEHLSDIGITAAVWIPPAYKGTSQADVGYGAYDLYDLGEFHQKGTVRTKYGTKGELQSAIKSLHSRDINVYGDVVINHKGGADATEDVTAVEVDPADRNRVISGEHLIKAWTHFHFPGRGSTYSDFKWHWYHFDGTDWDESRKLNRIYKFQGKAWDWEVSNENGNYDYLMYADIDYDHPDVAAEIKRWGTWYANELQLDGFRLDAVKHIKFSFLRDWVNHVREKTGKEMFTVAEYWQNDLGALENYLNKTNFNHSVFDVPLHYQFHAASTQGGGYDMRKLLNGTVVSKHPLKSVTFVDNHDTQPGQSLESTVQTWFKPLAYAFILTRESGYPQVFYGDMYGTKGDSQREIPALKHKIEPILKARKQYAYGAQHDYFDHHDIVGWTREGDSSVANSGLAALITDGPGGAKRMYVGRQNAGETWHDITGNRSEPVVINSEGWGEFHVNGGSVSIYVQR

SEQ ID NO: 26537 - protein, 480 aa, Bacillus sp.
APINETMMQYFEWDLPNDGTLWNRLHNNAQNLKNAGITALWLPPAYKGTSQSDVGYGVYDLYDLGEFNQKGTIRTKYGTKTQYIQAIQAAKAAGMQVYADVVFNHKAGADQTEFVDAVEVDPSNRNQEVSGTYQIEAWTKFDFPGRGNTYSSFKWRWYHFDGTDWDESRKLNRIYKFRGKAWDWEVDTENGNYDYLMFADLDMDHPEVVTELKNWGTWYVNTTNIDGFRLDAVKHIKFSFMRDWLTYVRNQTGKNLFAVGEFWSYDVNKLHNYITKTNGSMSLFDAPLHNNFYTASKSSGYFDMRYLLNNTLMKDQPSLAVTLVDNHDTQPGQSLQSWVEPWFKPLAYAFILTRQEGYPCVFYGDYYGIPSDGVPGLKSKIDPLLIARRDYAYGTQRDYIDHQDIIGWTREGIDTKPNSGLAALITDGPGGSKWMYVGKKHAGKVFYDLTGNRSDTVTINADGWGEFKVNGGSVSIWVAK

SEQ ID NO: 26538 - protein, 480 aa, Bacillus sp.
APINETMMQYFEWDLPNDGTLWTKVKNEAANLSSLGITALWLPPAYKGTSQSDVGYGVYDLYDLGEFNQKGTIRTKYGTKTQYIQAIQAAKAAGMQVYADVVFNHKAGADQTEFVDAVEVDPSNRNQEVSGTYQIEAWTKFDFPGRGNTYSSFKWRWYHFDGTDWDESRKLNRIYKFRGKAWDWEVDTENGNYDYLMFADLDMDHPEVVTELKNWGTWYVNTTNIDGFRLDAVKHIKFSFMRDWLTYVRNQTGKNLFAVGEFWKNDLGALENYITKTNGSMSLFDAPLHNNFYTASKSSGYFDMRNLLNGTLVQRHPSHAVTLVDNHDTQPGQSLQSWVEPWFKPLAYAFILTRQEGYPCVFYGDYYGIPKYNIPGLKSKIDPLLIARRDYAYGTQRDYIDHQDIIGWTREGIDTKPNSGLAALITDGPGGSKWMYVGKKHAGKVFYDLTGNRSDTVTINADGWGEFKVNGGSVSIWVAK

SEQ ID NO: 26539 - protein, 483 aa, Synthetic construct
APINETMMQYFEWDLPNDGTLWTKVKNEAANLSSLGITALWLPPAYKGTSQSDVGYGVYDLYDLGEFNQKGTIRTKYGTKTQYIQAIQAAKAAGMQVYADVVFNHRMGADATETISAVEVNPSNRNQVTSGAYNISAWTDFEFPGRGNTYSSFKWHSYYFDGVDWDQSRQLSGKIYQIQGTGKAWDWEVDSENGNYDYLMGADIDMDHPEVVTELKNWGTWYVNTTNIDGFRLDAVKHIKYSFFPDWLTYVRNQTGKNLFAVGEFWSYDVNKLHNYITKTNGSMSLFDAPLHNNFYTASKSSGYFDMRYLLNNTLMKDQPSLAVTLVDNHDTQPGQSLQSWVEPWFKPLAYAFILTRQEGYPCVFYGDYYGIPKYNIPGLKSKIDPLLIARRDYAYGTQRDYIDHQDIIGWTREGIDTKPNSGLAALITDGPGGSKWMYVGKKHAGKVFYDLTGNRSDTVTINADGWGEFKVNGGSVSIWVAK

SEQ ID NO: 26540 - protein, 483 aa, Synthetic construct
APVNGTMMQYFEWDLPNDGTLWTKVKNEATNLFSLGITALWLPPAYKGTSQSDVGYGVYDLYDLGEFNQKGTIRTKYGTKTQYIQAIQAAKAAGMQVYADVVFNHRMGADATETISAVEVNPSNRNQVTSGAYNISAWTDFEFPGRGNTYSSFKWHSYYFDGVDWDQSRQLSGKIYQIQGTGKAWDWEVDSENGNYDYLMGADIDMDHPEVVTELKNWGTWYVNTTNIDGFRLDAVKHIKYSFFPDWLTYVRNQTGKNLFAVGEFWSYDVNKLHNYITKTNGSMSLFDAPLHNNFYTASKSSGYFDMRYLLNNTLMKDQPSLAVTLVDNHDTQPGQSLQSWVEPWFKPLAYAFILTRQEGYPCVFYGDYYGIPKYNIPGLKSKIDPLLIARRDYAYGTQRDYIDHQDIIGWTREGIDTKPNSGLAALITDGPGGSKWMYVGKKHAGKVFYDLTGNRSDTVTINADGWGEFKVNGGSVSIWVAK

SEQ ID NO: 26541 - protein, 485 aa, Bacillus sp.
HHNGTNGTMMQYFEWYLPNDGNHWNRLNSDASNLKSKGITAVWIPPAWKGASQNDVGYGAYDLYDLGEFNQKGTVRTKYGTRSQLQAAVTSLKNNGIQVYGDVVMNHKGGADATEMVRAVEVNPNNRNQEVTGEYTIEAWTRFDFPGRGNTHSSFKWRWYHFDGVDWDQSRRFQNRIYKFRGHGKAWDWEVDTEFGNYDYLMYADYDMDHPEVVNELRNWGVWYTNTLGLDGFRIDAVKHIKYSFTRDWINHVRSATGKNMFAVAEFWKNDLGAIENYLQKTNWNHSVFDVPLHYNLYNASKSGGNYDMRNIFNGTVVQRHPSHAVTFVDNHDSQPEEALESFVEEWFKPLAYALTLTREQGYPSVFYGDYYGIPTHGVPAMRSKIDPILEARQKYAYGPQHDYLDHPDVIGWTREGDSSHPKSGLATLITDGPGGSKRMYAGLKNAGETWYDITGNRSDTVKIGSDGWGEFHVNDGSVSIYVQK

SEQ ID NO: 26542 - protein, 485 aa, Bacillus sp.
HHNGTNGTMMQYFEWYLPNDGNHWNRLNSDASNLKSKGITAVWIPPAWKATSQNDVGYGAYDLYDLGEFNQKGTVRTKYGTRSQLQAAVTSLKNNGIQVYGDVVMNHKGGADATEMVRAVEVNPNNRNQEVTGEYTIEAWTRFDFPGRGNTHSSFKWRWYHFDGVDWDQSRQLQNRIYKFRGHGKAWDWEVDTEFGNYDYLMYADYDMDHPEVVNELRNWGVWYTNTLGLDGFRIDAVKHIKYSFTRDWINHVRSATGKNMFAVAEFWKNDLGAIENYLQKTNWNHSVFDVPLHYNLYNASKSGGNYDMRNIFNGTVVQRHPSHAVTFVDNHDSQPEEALESFVEEWFKPLAYALTLTREQGYPSVFYGDYYGIPTHGVPAMRSKIDPILEARQKYAYGPQHDYLDHPDVIGWTREGDSSHPKSGLATLITDGPGGSKRMYAGLKNAGETWYDITGNRSDTVKIGSDGWGEFHVNDGSVSIYVQK

SEQ ID NO: 26543 - protein, 485 aa, Bacillus sp.
HHNGTNGTMMQYFEWYLPNDGNHWNRLNSDASNLKSKGITAVWIPPAWKGASQNDVGYGAYDLYDLGEFNQKGTVRTKYGTRSQLQAAVTSLKNNGIQVYGDVVMNHKGGADATEMVRAVEVNPNNRNQEVTGEYTIEAWTRFDFPGRGNTHSSFKWRWYHFDGVDWDQSRQTQNRIYKFRGHGKAWDWEVDTEFGNYDYLMYADYDMDHPEVVNELRNWGVWYTNTLGLDGFRIDAVKHIKYSFTRDWINHVRSATGKNMFAVAEFWKNDLGAIENYLQKTNWNHSVFDVPLHYNLYNASKSGGNYDMRNIFNGTVVQRHPSHAVTFVDNHDSQPEEALESFVEEWFKPLAYALTLTREQGYPSVFYGDYYGIPTHGVPAMRSKIDPILEARQKYAYGPQHDYLDHPDVIGWTREGDSSHPKSGLATLITDGPGGSKRMYAGLKNAGETWYDITGNRSDTVKIGSDGWGEFHVNDGSVSIYVQK

SEQ ID NO: 26544 - protein, 485 aa, Bacillus sp.
HHNGTNGTMMQYFEWYLPNDGNHWNRLNSDASNLKSKGITAVWIPPAWKGASQNDVGYGAYDLYDLGEFNQKGTVRTKYGTRSQLQAAVTSLKNNGIQVYGDVVMNHKGGADATEMVRAVEVNPNNRNQEVTGEYTIEAWTRFDFPGRGNTHSSFKWRWYHFDGVDWDQSRNFQNRIYKFRGHGKAWDWEVDTEFGNYDYLMYADYDMDHPEVVNELRNWGVWYTNTLGLDGFRIDAVKHIKYSFTRDWINHVRSATGKNMFAVAEFWKNDLGAIENYLQKTNWNHSVFDVPLHYNLYNASKSGGNYDMRNIFNGTVVQRHPSHAVTFVDNHDSQPEEALESFVEEWFKPLAYALTLTREQGYPSVFYGDYYGIPTHGVPAMRSKIDPILEARQKYAYGPQHDYLDHPDVIGWTREGDSSHPKSGLATLITDGPGGSKRMYAGLKNAGETWYDITGNRSDTVKIGSDGWGEFHVNDGSVSIYVQK

SEQ ID NO: 26545 - protein, 485 aa, Synthetic construct
HHNGTNGTMMQYFEWYLPNDGNHWNRLNSDASNLKSKGITAVWIPPAWKGASQNDVGYGAYDLYDLGEFNQKGTVRTKYGTRSQLQAAVTSLKNNGIQVYGDVVMNHKGGADATEMVRAVEVNPNNRNQEVTGEYTIEAWTRFDFPGRGNTHSSFKWRWYHFDGVDWDQSRRLNNRIYKFRGHGKAWDWEVDTENGNYDYLMYADIDMDHPEVVNELRRWGVWYTNTLGLDGFRIDAVKHIKYSFTRDWINHVRSATGKNMFAVAEFWKNDLGAIENYLQKTNWNHSVFDVPLHYNLYNASKSGGNYDMRNIFNGTVVQRHPSHAVTFVDNHDSQPEEALESFVEEWFKPLAYALTLTREQGYPSVFYGDYYGIPTHGVPAMRSKIDPILEARQKYAYGPQHDYLDHPDVIGWTREGDSSHPKSGLATLITDGPGGSKRMYAGLKNAGETWYDITGNRSDTVKIGSDGWGEFHVNDGSVSIYVQK

SEQ ID NO: 26546 - protein, 485 aa, Synthetic construct
HHNGTNGTMMQYFEWYLPNDGNHWNRLNSDASNLKSKGITAVWIPPAWKGASQNDVGYGAYDLYDLGEFNQKGTVRTKYGTRSQLQAAVTSLKNNGIQVYGDVVMNHKGGADATEMVRAVEVNPNNRNQEVTGEYTIEAWTRFDFPGRGNTHSSFKWRWYHFDGVDWDQSRRLNNRIYKFRGHGKAWDWEVDTENGNYDYLMYADIDMDHPEVVNELRNWGVWYTNTLGLDGFRIDAVKHIKYSFTRDWINHVRSATGKNMFAVAEFWKNDLGAIENYLQKTNWNHSVFDVPLHYNLYNASKSGGNYDMRNIFNGTVVQRHPSHAVTFVDNHDSQPEEALESFVEEWFKPLAYALTLTREQGYPSVFYGDYYGIPTHGVPAMRSKIDPILEARQKYAYGPQHDYLDHPDVIGWTREGDSSHPKSGLATLITDGPGGSKRMYAGLKNAGETWHDITGNRSDTVKIGSDGWGEFHVNDGSVSIYVQK

SEQ ID NO: 26547 - protein, 483 aa, Bacillus sp.
HHNGTNGTMMQYFEWYLPNDGNHWNRLNSDASNLKSKGITAVWIPPAWKGTSQNDVGYGAYDLYDLGEFNQKGTVRTKYGTRSQLQAAVTSLKNNGIQVYGDVVMNHKGGADATEMVRAVEVNPNNRNQEVTGEYTIEAWTRFDFPGRGNTHSSFKWRWYHFDGVDWDQSRRFQNRIYKFRGKAWDWEVDTEFGNYDYLMYVDYDMDHPEVVNELRNWGVWYTNTLGLDGFRIDAVKHIKYSFTRDWINHVRSATGKNMFAVAEFWKNDLGAIENYLQKTNWNHSVFDVPLHYNLYNASKSGGNYDMRNIFNGTVVQRHPSHAVTFVDNHDSQPEEALESFVEEWFKPLAYALTLTREQGYPSVFYGDYYGIPTHGVPAMRSKIDPILEARQKYAYGPQHDYLDHPDVIGWTREGDSSHPKSGLATLITDGPGGSKRMYAGLKNAGETWYDITGNRSDTVKIGSDGWGEFHVNDGSVSIYVQK

SEQ ID NO: 26548 - protein, 485 aa, Synthetic construct
HHNGTNGTMMQYFEWYLPNDGNHWNRLNSDASNLKSKGITAVWIPPAWKGASQNDVGYGAYDLYDLGEFNQKGTVRTKYGTRSQLQAAVTSLKNNGIQVYGDVVMNHKGGADATEMVRAVEVNPNNRNQEVTGEYTIEAWTRFDFPGRGNTHSSFKWRWYHFDGVDWDQSRRLNNRIYKFRGHGKAWDWEVDTENGNYDYLMYADIDMDHPEVVNELRNWGVWYTNTLGLDGFRIDAVKHIKYSFTRDWINHVRSATGKNMFAVAEFWKNDLGAIENYLQKTNWNHSVFDVPLHYNLYNASKSGGNYDMRNILNGTVVQRHPSHAVTFVDNHDSQPEEALESFVEEWFKPLAYALTLTREQGYPSVFYGDYYGIPTHGVPAMRSKIDPILEARQKYAYGPQHDYLDHPDVIGWTREGDSSHPKSGLATLITDGPGGSKRMYAGLKNAGETWYDITGNRSDTVKIGSDGWGEFHVNDGSVSIYVQK

SEQ ID NO: 26549 - protein, 485 aa, Synthetic construct
HHNGTNGTMMQYFEWYLPNDGNHWNRLNSDASNLKSKGITAVWIPPAWKGASQNDVGYGAYDLYDLGEFNQKGTVRTKYGTRSQLQAAVTSLKNNGIQVYGDVVMNHKGGADATEMVRAVEVNPNNRNQEVTGEYTIEAWTRFDFPGRGNTHSSFKWRWYHFDGVDWDQSRRLNNRIYKFRGHGKAWDWEVDTENGNYDYLMYADIDMDHPEVVNELRNWGVWYTNTLGLDGFRIDAVKHIKYSFTRDWINHVRSATGKNMFAVAEFWKNDLGAIENYLQKTNWNHSVFDVPLHYNLYNASKSGGNYDMRNIFNGTVVQRHPSHAVTFVDNHDSQPEEALESFVEEWFKPLAYALTLTREQGYPSVFYGDYYGIPTHGVPAMRSKIDPILEARQKYAYGPQHDYLDHPDVIGWTREGDSSHPKSGLATLITDGPGGSKRMYAGLKNAGETWYDITGNRSDTVKIGSDGWGEFHVNDGSVSIYVKK

SEQ ID NO: 26550 - protein, 483 aa, Bacillus sp.
HHNGTNGTMMQYFEWYLPNDGNHWNRLNSDASNLKSKGITAVWIPPAWKGTSQNDVGYGAYDLYDLGEFNQKGTVRTKYGTRSQLQAAVTSLKNNGIQVYGDVVMNHKGGADATEMVRAVEVNPNNRNQEVTGEYTIEAWTRFDFPGRGNTHSSFKWRWYHFDGVDWDQSRRFNNRIYKFRGKAWDWEVDTEFGNYDYLMYADYDMDHPEVVNELRNWGVWYTNTLGLDGFRIDAVKHIKYSFTRDWINHVRSATGKNMFAVAEFWKNDLGAIENYLQKTNWNHSVFDVPLHYNLYNASKSGGNYDMRNIFNGTVVQRHPSHAVTFVDNHDSQPEEALESFVEEWFKPLAYALTLTREQGYPSVFYGDYYGIPTHGVPAMRSKIDPILEARQKYAYGPQHDYLDHPDVIGWTREGDSSHPKSGLATLITDGPGGSKRMYAGLKNAGETWYDITGNRSDTVKIGSDGWGEFHVNDGSVSIYVQK

SEQ ID NO: 26551 - protein, 483 aa, Synthetic construct
HHNGTNGTMMQYFEWYLPNDGNHWNRLNSDASNLKSKGITAVWIPPAWKGASQNDVGYGAYDLYDLGEFNQKGTVRTKYGTRSQLQAAVTSLKNNGIQVYGDVVMNHKGGADATEMVRAVEVNPNNRNQEVTGEYTIEAWTRFDFPGRGNTHSSFKWRWYHFDGVDWDQSRQFQNRIYKFRGKAWDWEVDTEFGNYDYLMYADIDMDHPESVNELRNWGVWYTNTLGLDGFRIDAVKHIKYSFTRDWINHVRSATGKNMFAVAEFWKNDLGAIENYLQKTNWNHSVFDVPLHYNLYNASKSGGNYDMRNIFNGTVVQRHPSHAVTFVDNHDSQPEEALESFVEEWFKPLAYALTLTREQGYPSVFYGDYYGIPTHGVPAMRSKIDPILEARQKYAYGPQHDYLDHPDVIGWTREGDSSHPKSGLATLITDGPGGSKRMYAGLKNAGETWYDITGNRSDTVKIGSDGWGEFHVNDGSVSIYVQK

SEQ ID NO: 26552 - protein, 485 aa, Bacillus sp.
HHNGTNGTMMQYFEWYLPNDGNHWNRLNSDASNLKSKGITAVWIPPAWKGVSQNDVGYGAYDLYDLGEFNQKGTVRTKYGTRSQLQAAVTSLKNNGIQVYGDVVMNHKGGADATEMVRAVEVNPNNRNQEVTGEYTIEAWTRFDFPGRGNTHSSFKWRWYHFDGVDWDQSRRFQNRIYKFRGHGKAWDWEVDTEFGNYDYLMYADYDMDHPEVVNELRNWGVWYTNTLGLDGFRIDAVKHIKYSFTRDWINHVRSATGKNMFAVAEFWKNDLGAIENYLQKTNWNHSVFDVPLHYNLYNASKSGGNYDMRNIFNGTVVQRHPSHAVTFVDNHDSQPEEALESFVEEWFKPLAYALTLTREQGYPSVFYGDYYGIPTHGVPAMRSKIDPILEARQKYAYGPQHDYLDHPDVIGWTREGDSSHPKSGLATLITDGPGGSKRMYAGLKNAGETWYDITGNRSDTVKIGSDGWGEFHVNDGSVSIYVQK

SEQ ID NO: 26553 - protein, 485 aa, Bacillus sp.
HHNGTNGTMMQYFEWYLPNDGNHWNRLNSDASNLKSKGITAVWIPPAWKGASQNDVGYGAYDLYDLGEFNQKGTVRTKYGTRSQLQAAVTSLKNNGIQVYGDVVMNHKGGADATEMVRAVEVNPNNRNQEVTGEYTIEAWTRFDFPGRGNTHSSFKWRWYHFDGVDWDQSRRLNNRIYKFRGHGKAWDWEVDTEFGNYDYLMYADYDMDHPEVVNELRNWGVWYTNTLGLDGFRIDAVKHIKYSFTRDWINHVRSATGKNMFAVAEFWKNDLGAIENYLQKTNWNHSVFDVPLHYNLYNASNSGGNYDMRNIFNGTVVQRHPSHAVTFVDNHDSQPEEALESFVEEWFKPLAYALTLTREQGYPSVFYGDYYGIPTHGVPAMRSKIDPILEARQKYAYGPQHDYLDHPDVIGWTREGDSSHPKSGLATLITDGPGGSKRMYAGLKNAGETWYDITGNRSDTVKIGSDGWGEFHVNGGSVSIYVQK

SEQ ID NO: 26554 - protein, 485 aa, Bacillus sp.
HHNGTNGTMMQYFEWYLPNDGNHWNRLNSDASNLKSKGITAVWIPPAWKAASQNDVGYGAYDLYDLGEFNQKGTVRTKYGTRSQLQAAVTSLKNNGIQVYGDVVMNHKGGADATEMVRAVEVNPNNRNQEVTGEYTIEAWTRFDFPGRGNTHSSFKWRWYHFDGVDWDQSRQFQNRIYKFRGHGKAWDWEVDTEFGNYDYLMYADYDMDHPEVVNELRNWGVWYTNTLGLDGFRIDAVKHIKYSFTRDWINHVRSATGKNMFAVAEFWKNDLGAIENYLQKTNWNHSVFDVPLHYNLYNASKSGGNYDMRNIFNGTVVQRHPSHAVTFVDNHDSQPEEALESFVEEWFKPLAYALTLTREQGYPSVFYGDYYGIPTHGVPAMRSKIDPILEARQKYAYGPQHDYLDHPDVIGWTREGDSSHPKSGLATLITDGPGGSKRMYAGLKNAGETWYDITGNRSDTVKIGSDGWGEFHVNDGSVSIYVQK

SEQ ID NO: 26555 - protein, 483 aa, Synthetic construct
HHNGTNGTMMQYFEWYLPNDGNHWNRLNSDASNLKSKGITAVWIPPAWKGASQNDVGYGAYDLYDLGEFNQKGTVRTKYGTRSQLQAAVTSLKNNGIQVYGDVVMNHKGGADATEMVRAVEVNPNNRNQEVTGEYTIEAWTRFDFPGRGNTHSSFKWRWYHFDGVDWDQSRRLNNRIYKFRGKAWDWEVDTENGNYDYLMYADIDMDHPEVVNELRNWGVWYTNTLGLDGFRIDAVKHIKYSFTRDWINHVRSATGKNMFAVAEFWKNDLGAIENYLQKTNWNHSVFDVPLHYNLYNASKSGGNYDMRNIFNGTVVQRHPSHAVTFVDNHDSQPEEALESFVEEWFKPLAYALTLTREQGYPSVFYGDYYGIPTHGVPAMRSKIDPILEARQKYAYGPQHDYLDHPDVIGWTREGDSSHPKSGLATLITDGPGGSKRMYAGLKNAGETWYDITGNRSDTVKIGSDGWGEFHVNDGSVSIWVQK

SEQ ID NO: 26556 - protein, 485 aa, Synthetic construct
HHNGTNGTMMQYFEWYLPNDGNHWNRLNSDASNLKSKGITAVWIPPAWKGASQNDVGYGAYDLYDLGEFNQKGTVRTKYGTRSQLQAAVTSLKNNGIQVYGDVVMNHKGGADATEMVRAVEVNPNNRNQEVTGEYTIEAWTRFDFPGRGNTHSSFKWRWYHFDGVDWDQSRRLNNRIYKFRGHGKAWDWEVDTENGNYDYLMYADIDMDHPEVVNELRNWGVWYTNTLGLDGFRIDAVKHIKYSFTRDWINHVRSATGKNMFAVAEFWKNDLGAIENYLQKTNWNHSVFDVPLHYNLYNASKSGGNYDMRNIFNGTVVQRHPSHAVTFVDNHDSQPEEALESFVQEWFKPLAYALTLTREQGYPSVFYGDYYGIPTHGVPAMRSKIDPILEARQKYAYGPQHDYLDHPDVIGWTREGDSSHPKSGLATLITDGPGGSKRMYAGLKNAGETWYDITGNRSDTVKIGSDGWGEFHVNDGSVSIYVQK

SEQ ID NO: 26557 - protein, 485 aa, Bacillus sp.
HHNGTNGTMMQYFEWYLPNDGNHWNRLNSDASNLKSKGITAVWIPPAWKGASQNDVGYGAYDLYDLGEFNQKGTVRTKYGTRSQLQAAVTSLKNNGIQVYGDVVMNHKGGADATEMVRAVEVNPNNRNQEVTGEYTIEAWTRFDFPGRGNTHSSFKWRWYHFDGVDWDQSRQLQNRIYKFRGHGKAWDWEVDTEFGNYDYLMYADYDMDHPEVVNELRNWGVWYTNTLGLDGFRIDAVKHIKYSFTRDWINHVRSATGKNMFAVAEFWKNDLGAIENYLQKTNWNHSVFDVPLHYNLYNASKSGGNYDMRNIFNGTVVQRHPSHAVTFVDNHDSQPEEALESFVEEWFKPLAYALTLTREQGYPSVFYGDYYGIPTHGVPAMRSKIDPILEARQKYAYGPQHDYLDHPDVIGWTREGDSSHPKSGLATLITDGPGGSKRMYAGLKNAGETWYDITGNRSDTVKIGSDGWGEFHVNDGSVSIYVQK

SEQ ID NO: 26558 - protein, 485 aa, Bacillus sp.
HHNGTNGTMMQYFEWYLPNDGNHWNRLNSDASNLKSKGITAVWIPPAWKGTSQNDVGYGAYDLYDLGEFNQKGTVRTKYGTRSQLQAAVTSLKNNGIQVYGDVVMNHKGGADATEMVRAVEVNPNNRNQEVTGEYTIEAWTRFDFPGRGNTHSSFKWRWYHFDGVDWDQSRQTNNRIYKFRGHGKAWDWEVDTEFGNYDYLMYADYDMDHPEVVNELRNWGVWYTNTLGLDGFRIDAVKHIKYSFTRDWINHVRSATGKNMFAVAEFWKNDLGAIENYLQKTNWNHSVFDVPLHYNLYNASKSGGNYDMRNIFNGTVVQRHPSHAVTFVDNHDSQPEEALESFVEEWFKPLAYALTLTREQGYPSVFYGDYYGIPTHGVPAMRSKIDPILEARQKYAYGPQHDYLDHPDVIGWTREGDSSHPKSGLATLITDGPGGSKRMYAGLKNAGETWYDITGNRSDTVKIGSDGWGEFHVNDGSVSIYVQK

SEQ ID NO: 26559 - protein, 485 aa, Bacillus sp.
HHNGTNGTMMQYFEWYLPNDGNHWNRLNSDASNLKSKGITAVWIPPAWKGASQNDVGYGAYDLYDLGEFNQKGTVRTKYGTRSQLQAAVTSLKNNGIQVYGDVVMNHKGGADATEMVRAVEVNPNNRNQEVTGEYTIEAWTRFDFPGRGNTHSSFKWRWYHFDGVDWDQSREFQNRIYKFRGHGKAWDWEVDTEFGNYDYLMYADYDMDHPEVVNELRNWGVWYTNTLGLDGFRIDAVKHIKYSFTRDWINHVRSATGKNMFAVAEFWKNDLGAIENYLQKTNWNHSVFDVPLHYNLYNASKSGGNYDMRNIFNGTVVQRHPSHAVTFVDNHDSQPEEALESFVEEWFKPLAYALTLTREQGYPSVFYGDYYGIPTHGVPAMRSKIDPILEARQKYAYGPQHDYLDHPDVIGWTREGDSSHPKSGLATLITDGPGGSKRMYAGLKNAGETWYDITGNRSDTVKIGSDGWGEFHVNDGSVSIYVQK

SEQ ID NO: 26560 - protein, 485 aa, Synthetic construct
HHNGTNGTMMQYFEWYLPNDGNHWNRLNSDASNLKSKGITAVWIPPAWKGASQNDVGYGAYDLYDLGEFNQKGTVRTKYGTRSQLQAAVTSLKNNGIQVYGDVVMNHKGGADATEMVRAVEVNPNNRNQEITGEYTIEAWTRFDFPGRGNTHSSFKWRWYHFDGVDWDQSRRLNNRIYKFRGHGKAWDWEVDTENGNYDYLMYADIDMDHPEVVNELRNWGVWYTNTLGLDGFRIDAVKHIKYSFTRDWINHVRSATGKNMFAVAEFWKNDLGAIENYLQKTNWNHSVFDVPLHYNLYNASKSGGNYDMRNIFNGTVVQRHPSHAVTFVDNHDSQPEEALESFVEEWFKPLAYALTLTREQGYPSVFYGDYYGIPTHGVPAMRSKIDPILEARQKYAYGPQHDYLDHPDVIGWTREGDSSHPKSGLATLITDGPGGSKRMYAGLKNAGETWYDITGNRSDTVKIGSDGWGEFHVNDGSVSIYVQK

SEQ ID NO: 26561 - protein, 485 aa, Synthetic construct
HHNGTNGTMMQYFEWYLPNDGNHWNRLNSDASNLKSKGITAVWIPPAWKGASQNDVGYGAYDLYDLGEFNQKGTVRTKYGTRSQLQAAVTSLKNNGIQVYGDVVMNHKGGADATEMVRAVEVNPNNRNQEVTGEYTIEAWTRFDFPGRGNTHSSFKWRWYHFDGVDWDQSRRLNNRIYKFRGHGKAWDWEVDTENGNYDYLMYADIDMDHPEVVNELRNWGVWYTNTLGLDGFRIDAVKHIKYSFTRDWINHVRSATGKNMFAVAEFWKNDLGAIENYLQKTNWNHSVFDVPLHYNLYNASKSGGNYDMRNIFNGTVVQRHPSHAVTFVDNHDSQPEEALESFVEEWFKPLAYALTLTREQGYPSVFYGDYYGIPTHGVPAMRSKIDPILEARQKYAYGPQHDYLDHPDVIGWTREGDSTHPKSGLATLITDGPGGSKRMYAGLKNAGETWYDITGNRSDTVKIGSDGWGEFHVNDGSVSIYVQK

SEQ ID NO: 26562 - protein, 485 aa, Synthetic construct
HHNGTNGTMMQYFEWYLPNDGNHWNRLNSDASNLKSKGITAVWIPPAWKGASQNDVGYGAYDLYDLGEFNQKGTVRTKYGTRSQLQAAVTSLKNNGIQVYGDVVMNHKGGADATEMVRAVEVNPNNRNQEVTGEYTIEAWTRFDFPGRGNTHSSFKWRWYHFDGVDWDQSRRLNNRIYKFRGHGKAWDWEVDTENGNYDYLMYADIDMDHPEVVNELRNWGVWYTNTLGLDGFRIDAVKHIKYSFTRDWINHVRSATGKNMFAVAEFWKNDLGAIENYLQKTNWNHSVFDVPLHYNLYNASKSGGNYDMRNIFNGTVVQRHPSHAVTFVDNHDSQPEEALESFVEEWFKPLAYALTLTREQGYPSVFYGDYYGIPTHGVPAMRSKIDPILEARQKYAYGPQHDYLDHPDVIGWTREGDSSHPKSGLATLITDGPGGSKRMYAGLKNAGETWYDITGNRSDTVTIGSDGWGEFHVNDGSVSIYVQK

SEQ ID NO: 26563 - protein, 483 aa, Bacillus sp.
HHNGTNGTMMQYFEWYLPNDGNHWNRLNSDASNLKSKGITAVWIPPAWKGASQNDVGYGAYDLYDLGEFNQKGTVRTKYGTRSQLQAAVTSLKNNGIQVYGDVVMNHKGGADATEMVRAVEVNPNNRNQEVTGEYTIEAWTRFDFPGRGNTHSSFKWRWYHFDGVDWDQSRQFNNRIYKFRGKAWDWEVDTEFGNYDYLMYADYDMDHPEVVNELRNWGVWYTNTLGLDGFRIDAVKHIKYSFTRDWINHVRSATGKNMFAVAEFWKNDLGAIENYLQKTNWNHSVFDVPLHYNLYNASKSGGNYDMRNIFNGTVVQRHPSHAVTFVDNHDSQPEEALESFVEEWFKPLAYALTLTREQGYPSVFYGDYYGIPTHGVPAMRSKIDPILEARQKYAYGPQHDYLDHPDVIGWTREGDSSHPKSGLATLITDGPGGSKRMYAGLKNAGETWYDITGNRSDTVKIGSDGWGEFHVNDGSVSIYVQK

SEQ ID NO: 26564 - protein, 485 aa, Synthetic construct
HHNGTNGTMMQYFEWYLPNDGNHWNRLNSDASNLKSKGITAIWIPPAWKGASQNDVGYGAYDLYDLGEFNQKGTVRTKYGTRSQLQAAVTSLKNNGIQVYGDVVMNHKGGADATEMVRAVEVNPNNRNQEVTGEYTIEAWTRFDFPGRGNTHSSFKWRWYHFDGVDWDQSRRLNNRIYKFRGHGKAWDWEVDTENGNYDYLMYADIDMDHPEVVNELRNWGVWYTNTLGLDGFRIDAVKHIKYSFTRDWINHVRSATGKNMFAVAEFWKNDLGAIENYLQKTNWNHSVFDVPLHYNLYNASKSGGNYDMRNIFNGTVVQRHPSHAVTFVDNHDSQPEEALESFVEEWFKPLAYALTLTREQGYPSVFYGDYYGIPTHGVPAMRSKIDPILEARQKYAYGPQHDYLDHPDVIGWTREGDSSHPKSGLATLITDGPGGSKRMYAGLKNAGETWYDITGNRSDTVKIGSDGWGEFHVNDGSVSIYVQK

SEQ ID NO: 26565 - protein, 485 aa, Synthetic construct
HHNGTNGTMMQYFEWYLPNDGNHWNRLNSDASNLKSKGITAVWIPPAWKGASQNDVGYGAYDLYDLGEFNQKGTVRTKYGTRSQLQAAVTSLKNNGIQVYGDVVMNHKGGADATEMVRAVEVNPNNRNQEVTGEYTIEAWTRFDFPGRGNTHSSFKWRWYHFDGVDWDQSRRLNNRIYKFRGHGKAWDWEVDTENGNYDYLMYADIDMDHPEVVNELRNWGVWYTNTLGLDGFRIDAVKHIKYSFTRDWINHVRSATGKNMFAVAEFWKNDLGAIENYLQKTNWNHSVFDVPLHYNLYNASKSGGNYDMRNLFNGTVVQRHPSHAVTFVDNHDSQPEEALESFVEEWFKPLAYALTLTREQGYPSVFYGDYYGIPTHGVPAMRSKIDPILEARQKYAYGPQHDYLDHPDVIGWTREGDSSHPKSGLATLITDGPGGSKRMYAGLKNAGETWYDITGNRSDTVKIGSDGWGEFHVNDGSVSIYVQK

SEQ ID NO: 26566 - protein, 483 aa, Synthetic construct
HHNGTNGTMMQYFEWYLPNDGNHWNRLNSDASNLKSKGITAVWIPPAWKGASQNDVGYGAYDLYDLGEFNQKGTVRTKYGTRSQLQAAVTSLKNNGIQVYGDVVMNHKGGADATEMVRAVEVNPNNRNQEVTGEYTIEAWTRFDFPGRGNTHSSFKWRWYHFDGVDWDQSRRLSNRIYKFRGKAWDWEVDTENGNYDYLMYADIDMDHPEVVNELRNWGVWYTNTLGLDGFRIDAVKHIKYSFTRDWINHVRSATGKNMFAVAEFWKNDLGAIENYLQKTNWNHSVFDVPLHYNLYNASKSGGNYDMRKLLNGTVVSKHPSKAVTFVDNHDTQPEEALESFVQPWFKPLAYAFILTRESGYPSVFYGDMYGIPTHGVPAMKHKIEPILKARKQYAYGAQHDYLDHHDIVGWTREGDSSHPNSGLATLITDGPGGAKRMYVGRQNAGETWHDITGNRSEPVVINSEGWGEFHVNKGSVSIYVQR

SEQ ID NO: 26567 - protein, 485 aa, Synthetic construct
HHNGTNGTMMQYFEWYLPNDGNHWNRLNSDASNLKSKGITAVWIPPAWKGASQNDVGYGAYDLYDLGEFNQKGTVRTKYGTRSQLQAAITSLKNNGIQVYGDVVMNHKGGADATEMVRAVEVNPNNRNQEVTGEYTIEAWTRFDFPGRGNTHSSFKWRWYHFDGVDWDQSRRLNNRIYKFRGHGKAWDWEVDTENGNYDYLMYADIDMDHPEVVNELRNWGVWYTNTLGLDGFRIDAVKHIKYSFTRDWINHVRSATGKNMFAVAEFWKNDLGAIENYLQKTNWNHSVFDVPLHYNLYNASKSGGNYDMRNIFNGTVVQRHPSHAVTFVDNHDSQPEEALESFVEEWFKPLAYALTLTREQGYPSVFYGDYYGIPTHGVPAMRSKIDPILEARQKYAYGPQHDYLDHPDVIGWTREGDSSHPKSGLATLITDGPGGSKRMYAGLKNAGETWYDITGNRSDTVKIGSDGWGEFHVNDGSVSIYVQK

SEQ ID NO: 26568 - protein, 485 aa, Synthetic construct
HHNGTNGTMMQYFEWYLPNDGNHWNRLNSDASNLKSKGITAVWIPPAWKGASQNDVGYGAYDLYDLGEFNQKGTVRTKYGTRSQLQAAVTSLKNNGIQVYGDVVMNHKGGADATEMVRAVEVNPNNRNQEVTGEYTIEAWTRFDFPGRGNTHSSFKWRWYHFDGVDWDQSRRLNNRIYKFRGHGKAWDWEVDTENGNYDYLMYADIDMDHPEVVNELRNWGVWYTNTLGLDGFRIDAVKHIKYSFTRDWINHVRSATGKNMFAVAEFWKNDLGAIENYLQKTNWNHSVFDVPLHYNLYNASKSGGNYDMRNIFNGTVVQRHPSHAVTFVDNHDSQPEEALESFVEEWFKPLAYALTLTREQGYPSVFYGDYYGIPTHGVPAMKSKIDPILEARQKYAYGPQHDYLDHPDVIGWTREGDSSHPKSGLATLITDGPGGSKRMYAGLKNAGETWYDITGNRSDTVKIGSDGWGEFHVNDGSVSIYVQK

SEQ ID NO: 26569 - protein, 483 aa, Bacillus sp.
HHNGTNGTMMQYFEWYLPNDGNHWNRLNSDASNLKSKGITAVWIPPAWKGASQNDVGYGAYDLYDLGEFNQKGTVRTKYGTRSQLQAAVTSLKNNGIQVYGDVVMNHKGGADATEMVRAVEVNPNNRNQEVTGEYTIEAWTRFDFPGRGNTHSSFKWRWYHFDGVDWDQSRQFTNRIYKFRGKAWDWEVDTEFGNYDYLMYADYDMDHPEVVNELRNWGVWYTNTLGLDGFRIDAVKHIKYSFTRDWINHVRSATGKNMFAVAEFWKNDLGAIENYLQKTNWNHSVFDVPLHYNLYNASKSGGNYDMRNIFNGTVVQRHPSHAVTFVDNHDSQPEEALESFVEEWFKPLAYALTLTREQGYPSVFYGDYYGIPTHGVPAMRSKIDPILEARQKYAYGPQHDYLDHPDVIGWTREGDSSHPKSGLATLITDGPGGSKRMYAGLKNAGETWYDITGNRSDTVKIGSDGWGEFHVNDGSVSIYVQK

SEQ ID NO: 26570 - protein, 485 aa, Synthetic construct
HHNGTNGTMMQYFEWYLPNDGNHWNRLNSDASNLKSKGITAVWIPPAWKGASQNDVGYGAYDLYDLGEFNQKGTVRTKYGTRSQLQAAVTSLKNNGIQVYGDVVMNHKGGADATEMVRAVEVNPNNRNQEVTGEYTIEAWTRFDFPGRGNTHSSFKWRWYHFDGVDWDQSRRLNNRIYKFRGHGKAWDWEVDTENGNYDYLMYADIDMDHPEVVNELRNWGVWYTNTLGLDGFRIDAVKHIKYSFTRDWINHVRSATGKEMFAVAEFWKNDLGAIENYLQKTNWNHSVFDVPLHYNLYNASKSGGNYDMRNIFNGTVVQRHPSHAVTFVDNHDSQPEEALESFVEEWFKPLAYALTLTREQGYPSVFYGDYYGIPTHGVPAMRSKIDPILEARQKYAYGPQHDYLDHPDVIGWTREGDSSHPKSGLATLITDGPGGSKRMYAGLKNAGETWYDITGNRSDTVKIGSDGWGEFHVNDGSVSIYVQK

SEQ ID NO: 26571 - protein, 485 aa, Synthetic construct
HHNGTNGTMMQYFEWYLPNDGNHWNRLNSDASNLKSKGITAVWIPPAWKGASQNDVGYGAYDLYDLGEFNQKGTVRTKYGTRSQLQAAVTSLKNNGIQVYGDVVMNHKGGADATEMVRAVEVNPNNRNQEVTGEYTIEAWTRFDFPGRGNTHSDFKWRWYHFDGVDWDQSRRLNNRIYKFRGHGKAWDWEVDTENGNYDYLMYADIDMDHPEVVNELRNWGVWYTNTLGLDGFRIDAVKHIKYSFTRDWINHVRSATGKNMFAVAEFWKNDLGAIENYLQKTNWNHSVFDVPLHYNLYNASKSGGNYDMRNIFNGTVVQRHPSHAVTFVDNHDSQPEEALESFVEEWFKPLAYALTLTREQGYPSVFYGDYYGIPTHGVPAMRSKIDPILEARQKYAYGPQHDYLDHPDVIGWTREGDSSHPKSGLATLITDGPGGSKRMYAGLKNAGETWYDITGNRSDTVKIGSDGWGEFHVNDGSVSIYVQK

SEQ ID NO: 26572 - protein, 483 aa, Bacillus sp.
HHNGTNGTMMQYFEWYLPNDGNHWNRLNSDASNLKSKGITAVWIPPAWKAASQNDVGYGAYDLYDLGEFNQKGTVRTKYGTRSQLQAAVTSLKNNGIQVYGDVVMNHKGGADATEMVRAVEVNPNNRNQEVTGEYTIEAWTRFDFPGRGNTHSSFKWRWYHFDGVDWDQSRQFQNRIYKFRGKAWDWEVDTEFGNYDYLMYADYDMDHPEVVNELRNWGVWYTNTLGLDGFRIDAVKHIKYSFTRDWINHVRSATGKNMFAVAEFWKNDLGAIENYLQKTNWNHSVFDVPLHYNLYNASKSGGNYDMRNIFNGTVVQRHPSHAVTFVDNHDSQPEEALESFVEEWFKPLAYALTLTREQGYPSVFYGDYYGIPTHGVPAMRSKIDPILEARQKYAYGPQHDYLDHPDVIGWTREGDSSHPKSGLATLITDGPGGSKRMYAGLKNAGETWYDITGNRSDTVKIGSDGWGEFHVNDGSVSIYVQK

SEQ ID NO: 26573 - protein, 485 aa, Synthetic construct
HHNGTNGTMMQYFEWYLPNDGNHWNRLNSDASNLKSKGITAVWIPPAWKGASQNDVGYGAYDLYDLGEFNQKGTVRTKYGTRSQLQAAVTSLKNNGIQVYGDVVMNHKGGADATEMVRAVEVNPNNRNQEVTGEYTIEAWTRFDFPGRGNTHSSFKWRWYHFDGVDWDQSRRLNNRIYKFRGHGKAWDWEVDTENGNYDYLMYADIDMDHPEVVNELRNWGVWYTNTLGLDGFRIDAVKHIKYSFTRDWINHVRSATGKNMFAVAEFWKNDLGAIENYLQKTNWNHSVFDVPLHYNLYNASKSGGNYDMRNIFNGTVVQRHPSHAVTFVDNHDSQPEEALESFVEEWFKPLAYALTLTREQGYPSVFYGDYYGIPTHGVPAMRSKIDPILEARQKYAYGPQHDYLDHPDVIGWTREGDSSHPKSGLATLITDGPGGSKRMYAGLKNAGETWYDITGNRSDTVKIGSDGWAEFHVNDGSVSIYVQK

SEQ ID NO: 26574 - protein, 485 aa, Synthetic construct
HHNGTNGTMMQYFEWYLPNDGNHWNRLNSDASNLKSKGITAVWIPPAWKGTSQNDVGYGAYDLYDLGEFNQKGTVRTKYGTRSQLQAAVTSLKNNGIQVYGDVVMNHKGGADATEMVRAVEVNPNNRNQEVTGEYTIEAWTRFDFPGRGNTHSSFKWRWYHFDGVDWDQSRRLNNRIYKFRGHGKAWDWEVDTENGNYDYLMYADIDMDHPEVVNELRNWGVWYTNTLGLDGFRIDAVKHIKYSFTRDWINHVRSATGKNMFAVAEFWKNDLGAIENYLQKTNWNHSVFDVPLHYNLYNASKSGGNYDMRNIFNGTVVQRHPSHAVTFVDNHDSQPEEALESFVEEWFKPLAYALTLTREQGYPSVFYGDYYGIPTHGVPAMRSKIDPILEARQKYAYGPQHDYLDHPDVIGWTREGDSSHPKSGLATLITDGPGGSKRMYAGLKNAGETWYDITGNRSDTVKIGSDGWGEFHVNDGSVSIYVQK

SEQ ID NO: 26575 - protein, 485 aa, Synthetic construct
HHNGTNGTMMQYFEWYLPNDGNHWNRLNSDASNLKSKGITAVWIPPAWKGASQNDVGYGAYDLYDLGEFNQKGTVRTKYGTRSQLQAAVTSLKNNGIQVYGDVVMNHKGGADATEMVRAVEVNPNNRNQEVTGEYTIEAWTRFDFPGRGNTHSSFKWRWYHFDGVDWDQSRRLNNRIYKFRGHGKAWDWEVDTENGNYDYLMYADIDMDHPEVVNELRNWGVWYTNTLGLDGFRIDAVKHIKYSFTRDWINHVRSATGKNMFAVAEFWKNDLGAIENYLQKTNWNHSVFDVPLHYNLYNASKSGGNYDMRNIFNGTVVQRHPSHAVTFVDNHDSQPGEALESFVEEWFKPLAYALTLTREQGYPSVFYGDYYGIPTHGVPAMRSKIDPILEARQKYAYGPQHDYLDHPDVIGWTREGDSSHPKSGLATLITDGPGGSKRMYAGLKNAGETWYDITGNRSDTVKIGSDGWGEFHVNDGSVSIYVQK

SEQ ID NO: 26576 - protein, 483 aa, Bacillus sp.
HHNGTNGTMMQYFEWYLPNDGNHWNRLNSDASNLKSKGITAVWIPPAWKGTSQNDVGYGAYDLYDLGEFNQKGTVRTKYGTRSQLQAAVTSLKNNGIQVYGDVVMNHKGGADATEMVRAVEVNPNNRNQEVTGEYTIEAWTRFDFPGRGNTHSSFKWRWYHFDGVDWDQSRQLNNRIYKFRGKAWDWEVDTEFGNYDYLMYADYDMDHPEVVNELRNWGVWYTNTLGLDGFRIDAVKHIKYSFTRDWINHVRSATGKNMFAVAEFWKNDLGAIENYLQKTNWNHSVFDVPLHYNLYNASKSGGNYDMRNIFNGTVVQRHPSHAVTFVDNHDSQPEEALESFVEEWFKPLAYALTLTREQGYPSVFYGDYYGIPTHGVPAMRSKIDPILEARQKYAYGPQHDYLDHPDVIGWTREGDSSHPKSGLATLITDGPGGSKRMYAGLKNAGETWYDITGNRSDTVKIGSDGWGEFHVNDGSVSIYVQK

SEQ ID NO: 26577 - protein, 485 aa, Synthetic construct
HHNGTNGTMMQYFEWYLPNDGNHWNRLNSDASNLKSKGITAVWIPPAWKGASQNDVGYGAYDLYDLGEFNQKGTVRTKYGTRSQLQAAVTSLKNNGIQVYGDVVMNHKGGADATEMVRAVEVNPNNRNQEVTGEYTIEAWTRFDFPGRGNTHSSFKWRWYHFDGVDWDQSRRLNNRIYKFRGHGKAWDWEVDTENGNYDYLMYADIDMDHPEVVNELRNWGVWYTNTLGLDGFRIDAVKHIKYSFTRDWINHVRSATGKNMFAVAEFWKNDLGAIENYLQKTNWNHSVFDVPLHYNLYNASKSGGNYDMRKIFNGTVVQRHPSHAVTFVDNHDSQPEEALESFVEEWFKPLAYALTLTREQGYPSVFYGDYYGIPTHGVPAMRSKIDPILEARQKYAYGPQHDYLDHPDVIGWTREGDSSHPKSGLATLITDGPGGSKRMYAGLKNAGETWYDITGNRSDTVKIGSDGWGEFHVNDGSVSIYVQK

SEQ ID NO: 26578 - protein, 485 aa, Bacillus sp.
HHNGTNGTMMQYFEWYLPNDGNHWNRLNSDASNLKSKGITAVWIPPAWKGTSQNDVGYGAYDLYDLGEFNQKGTVRTKYGTRSQLQAAVTSLKNNGIQVYGDVVMNHKGGADATEMVRAVEVNPNNRNQEVTGEYTIEAWTRFDFPGRGNTHSSFKWRWYHFDGVDWDQSRRFQNRIYKFRGHGKAWDWEVDTEFGNYDYLMYVDYDMDHPEVVNELRNWGVWYTNTLGLDGFRIDAVKHIKYSFTRDWINHVRSATGKNMFAVAEFWKNDLGAIENYLQKTNWNHSVFDVPLHYNLYNASKSGGNYDMRNIFNGTVVQRHPSHAVTFVDNHDSQPEEALESFVEEWFKPLAYALTLTREQGYPSVFYGDYYGIPTHGVPAMRSKIDPILEARQKYAYGPQHDYLDHPDVIGWTREGDSSHPKSGLATLITDGPGGSKRMYAGLKNAGETWYDITGNRSDTVKIGSDGWGEFHVNDGSVSIYVQK

SEQ ID NO: 26579 - protein, 485 aa, Synthetic construct
HHNGTNGTMMQYFEWYLPNDGNHWNRLNSDASNLKSKGITAVWIPPAWKGASQNDVGYGAYDLYDLGEFNQKGTVRTKYGTRSQLQAAVTALKNNGIQVYGDVVMNHKGGADATEMVRAVEVNPNNRNQEVTGEYTIEAWTRFDFPGRGNTHSSFKWRWYHFDGVDWDQSRRLNNRIYKFRGHGKAWDWEVDTENGNYDYLMYADIDMDHPEVVNELRNWGVWYTNTLGLDGFRIDAVKHIKYSFTRDWINHVRSATGKNMFAVAEFWKNDLGAIENYLQKTNWNHSVFDVPLHYNLYNASKSGGNYDMRNIFNGTVVQRHPSHAVTFVDNHDSQPEEALESFVEEWFKPLAYALTLTREQGYPSVFYGDYYGIPTHGVPAMRSKIDPILEARQKYAYGPQHDYLDHPDVIGWTREGDSSHPKSGLATLITDGPGGSKRMYAGLKNAGETWYDITGNRSDTVKIGSDGWGEFHVNDGSVSIYVQK

SEQ ID NO: 26580 - protein, 485 aa, Synthetic construct
HHNGTNGTMMQYFEWYLPNDGNHWNRLNSDASNLKSKGITAVWIPPAWKGASQNDVGYGAYDLYDLGEFNQKGTVRTKYGTRSQLQAAVTSLKNNGIQVYGDVVMNHKGGADATEMVRAVEVNPNNRNQEVTGEYTIEAWTRFDFPGRGNTHSSFKWRWYHFDGVDWDQSRRLNNRIYKFRGHGKAWDWEVDTENGNYDYLMYADIDMDHPEVVNELRNWGVWYTNTLGLDGFRIDAVKHIKYSFTRDWINHVRSATGKNMFAVAEFWKNDLGAIENYLQKTNWNHSVFDVPLHYNLYNASKSGGNYDMRNIFNGTVVQRHPSHAVTFVDNHDSQPEEALESFVEEWFKPLAYALTLTREQGYPSVFYGDYYGIPTHGVPAMRSKIDPILEARQKYAYGTQHDYLDHPDVIGWTREGDSSHPKSGLATLITDGPGGSKRMYAGLKNAGETWYDITGNRSDTVKIGSDGWGEFHVNDGSVSIYVQK

SEQ ID NO: 26581 - protein, 485 aa, Synthetic construct
HHNGTNGTMMQYFEWYLPNDGNHWNRLNSDASNLKSKGITAVWIPPAWKGASQNDVGYGAYDLYDLGEFNQKGTVRTKYGTRSQLQAAVTSLKNNGIQVYGDVVMNHKGGADATEMVRAVEVNPNNRNQEVTGEYTIEAWTRFDFPGRGNTHSSFKWRWYHFDGVDWDQSRRLNNRIYKFRGHGKAWDWEVDTENGNYDYLMYADIDMDHPEVVNELRNWGVWYTNTLGLDGFRIDAVKHIKYSFTRDWINHVRSATGKNMFAVAEFWKNDLGAIENYLQKTNWNHSVFDVPLHYNLYNASKSGGNYDMRNIFNGTVVQRHPSHAVTFVDNHDSQPEEALESFVEEWFKPLAYALTLTREQGYPSVFYGDYYGIPTHGVPAMRSKIDPILEARQKYAYGPQHDYLDHPDVIGWTREGDSSHPKSGLATLMTDGPGGSKRMYAGLKNAGETWYDITGNRSDTVKIGSDGWGEFHVNDGSVSIYVQK

SEQ ID NO: 26582 - protein, 483 aa, Bacillus sp.
HHNGTNGTMMQYFEWYLPNDGNHWNRLNSDASNLKSKGITAVWIPPAWKGASQNDVGYGAYDLYDLGEFNQKGTVRTKYGTRSQLQAAVTSLKNNGIQVYGDVVMNHKGGADATEMVRAVEVNPNNRNQEVTGEYTIEAWTRFDFPGRGNTHSSFKWRWYHFDGVDWDQSRQTQNRIYKFRGKAWDWEVDTEFGNYDYLMYADYDMDHPEVVNELRNWGVWYTNTLGLDGFRIDAVKHIKYSFTRDWINHVRSATGKNMFAVAEFWKNDLGAIENYLQKTNWNHSVFDVPLHYNLYNASKSGGNYDMRNIFNGTVVQRHPSHAVTFVDNHDSQPEEALESFVEEWFKPLAYALTLTREQGYPSVFYGDYYGIPTHGVPAMRSKIDPILEARQKYAYGPQHDYLDHPDVIGWTREGDSSHPKSGLATLITDGPGGSKRMYAGLKNAGETWYDITGNRSDTVKIGSDGWGEFHVNDGSVSIYVQK

SEQ ID NO: 26583 - protein, 485 aa, Bacillus sp.
HHNGTNGTMMQYFEWYLPNDGNHWNRLNSDASNLKSKGITAVWIPPAWKGASQNDVGYGAYDLYDLGEFNQKGTVRTKYGTRSQLQAAVTSLKNNGIQVYGDVVMNHKGGADATEMVRAVEVNPNNRNQEVTGEYTIEAWTRFDFPGRGNTHSSFKWRWYHFDGVDWDQSRRLNNRIYKFRGHGKAWDWEVDTEFGNYDYLMYADYDMDHPEVVNELRNWGVWYTNTLGLDGFRIDAVKHIKYSFTRDWINHVRSATGKNMFAVAEFWKNDLGAIENYLQKTNWNHSVFDVPLHYNLYNASNSGGNYDMRNIFNGTVVQRHPSHAVTFVDNHDSQPEEALESFVDEWFKPLAYALTLTREQGYPSVFYGDYYGIPTHGVPAMRSKIDPILEARQKYAYGPQHDYLDHPDVIGWTREGDSSHPKSGLATLITDGPGGSKRMYAGLKNAGETWYDITGNRSDTVKIGSDGWGEFHVNGGSVSIYVQK

SEQ ID NO: 26584 - protein, 485 aa, Synthetic construct
HHNGTNGTMMQYFEWYLPNDGNHWNRLNSDASNLKSKGITAVWIPPAWKGASQNDVGYGAYDLYDLGEFNQKGTVRTKYGTRSQLQAAVTSLKNNGIQVYGDVVMNHKGGADATEMVRAVEVNPNNRNQEVTGEYTIEAWTRFDFPGRGNTHSSFKWRWYHFDGVDWDQSRRLNNRIYKFRGHGKAWDWEVDTENGNYDYLMYADIDMDHPEVVNELRNWGVWYTNTLGLDGFRIDAVKHIKYSFTRDWINHVRSATGKNMFAVAEFWKNDLGAIENYLQKTNWNHSVFDVPLHYNLYNASKSGGNYDMRNIFNGTVVQKHPSHAVTFVDNHDSQPEEALESFVEEWFKPLAYALTLTREQGYPSVFYGDYYGIPTHGVPAMRSKIDPILEARQKYAYGPQHDYLDHPDVIGWTREGDSSHPKSGLATLITDGPGGSKRMYAGLKNAGETWYDITGNRSDTVKIGSDGWGEFHVNDGSVSIYVQK

SEQ ID NO: 26585 - protein, 485 aa, Bacillus sp.
HHNGTNGTMMQYFEWYLPNDGNHWNRLNSDASNLKSKGITAVWIPPAWKGTSQNDVGYGAYDLYDLGEFNQKGTVRTKYGTRSQLQAAVTSLKNNGIQVYGDVVMNHKGGADATEMVRAVEVNPNNRNQEVTGEYTIEAWTRFDFPGRGNTHSSFKWRWYHFDGVDWDQSRRFNNRIYKFRGHGKAWDWEVDTEFGNYDYLMYADYDMDHPEVVNELRNWGVWYTNTLGLDGFRIDAVKHIKYSFTRDWINHVRSATGKNMFAVAEFWKNDLGAIENYLQKTNWNHSVFDVPLHYNLYNASKSGGNYDMRNIFNGTVVQRHPSHAVTFVDNHDSQPEEALESFVEEWFKPLAYALTLTREQGYPSVFYGDYYGIPTHGVPAMRSKIDPILEARQKYAYGPQHDYLDHPDVIGWTREGDSSHPKSGLATLITDGPGGSKRMYAGLKNAGETWYDITGNRSDTVKIGSDGWGEFHVNDGSVSIYVQK

SEQ ID NO: 26586 - protein, 483 aa, Bacillus sp.
HHNGTNGTMMQYFEWYLPNDGNHWNRLNSDASNLKSKGITAVWIPPAWKGASQNDVGYGAYDLYDLGEFNQKGTVRTKYGTRSQLQAAVTSLKNNGIQVYGDVVMNHKGGADATEMVRAVEVNPNNRNQEVTGEYTIEAWTRFDFPGRGNTHSSFKWRWYHFDGVDWDQSREFQNRIYKFRGKAWDWEVDTEFGNYDYLMYADYDMDHPEVVNELRNWGVWYTNTLGLDGFRIDAVKHIKYSFTRDWINHVRSATGKNMFAVAEFWKNDLGAIENYLQKTNWNHSVFDVPLHYNLYNASKSGGNYDMRNIFNGTVVQRHPSHAVTFVDNHDSQPEEALESFVEEWFKPLAYALTLTREQGYPSVFYGDYYGIPTHGVPAMRSKIDPILEARQKYAYGPQHDYLDHPDVIGWTREGDSSHPKSGLATLITDGPGGSKRMYAGLKNAGETWYDITGNRSDTVKIGSDGWGEFHVNDGSVSIYVQK

SEQ ID NO: 26587 - protein, 483 aa, Bacillus sp.
HHNGTNGTMMQYFEWYLPNDGNHWNRLNSDASNLKSKGITAVWIPPAWKGVSQNDVGYGAYDLYDLGEFNQKGTVRTKYGTRSQLQAAVTSLKNNGIQVYGDVVMNHKGGADATEMVRAVEVNPNNRNQEVTGEYTIEAWTRFDFPGRGNTHSSFKWRWYHFDGVDWDQSRRFQNRIYKFRGKAWDWEVDTEFGNYDYLMYADYDMDHPEVVNELRNWGVWYTNTLGLDGFRIDAVKHIKYSFTRDWINHVRSATGKNMFAVAEFWKNDLGAIENYLQKTNWNHSVFDVPLHYNLYNASKSGGNYDMRNIFNGTVVQRHPSHAVTFVDNHDSQPEEALESFVEEWFKPLAYALTLTREQGYPSVFYGDYYGIPTHGVPAMRSKIDPILEARQKYAYGPQHDYLDHPDVIGWTREGDSSHPKSGLATLITDGPGGSKRMYAGLKNAGETWYDITGNRSDTVKIGSDGWGEFHVNDGSVSIYVQK

SEQ ID NO: 26588 - protein, 483 aa, Bacillus sp.
HHNGTNGTMMQYFEWYLPNDGNHWNRLNSDASNLKSKGITAVWIPPAWKATSQNDVGYGAYDLYDLGEFNQKGTVRTKYGTRSQLQAAVTSLKNNGIQVYGDVVMNHKGGADATEMVRAVEVNPNNRNQEVTGEYTIEAWTRFDFPGRGNTHSSFKWRWYHFDGVDWDQSRQLQNRIYKFRGKAWDWEVDTEFGNYDYLMYADYDMDHPEVVNELRNWGVWYTNTLGLDGFRIDAVKHIKYSFTRDWINHVRSATGKNMFAVAEFWKNDLGAIENYLQKTNWNHSVFDVPLHYNLYNASKSGGNYDMRNIFNGTVVQRHPSHAVTFVDNHDSQPEEALESFVEEWFKPLAYALTLTREQGYPSVFYGDYYGIPTHGVPAMRSKIDPILEARQKYAYGPQHDYLDHPDVIGWTREGDSSHPKSGLATLITDGPGGSKRMYAGLKNAGETWYDITGNRSDTVKIGSDGWGKFHVNDGSVSIYVQK

SEQ ID NO: 26589 - protein, 483 aa, Bacillus sp.
HHNGTNGTMMQYFEWYLPNDGNHWNRLNSDASNLKSKGITAVWIPPAWKGTSQNDVGYGAYDLYDLGEFNQKGTVRTKYGTRSQLQAAVTSLKNNGIQVYGDVVMNHKGGADATEMVRAVEVNPNNRNQEVTGEYTIEAWTRFDFPGRGNTHSSFKWRWYHFDGVDWDQSRQTNNRIYKFRGKAWDWEVDTEFGNYDYLMYADYDMDHPEVVNELRNWGVWYTNTLGLDGFRIDAVKHIKYSFTRDWINHVRSATGKNMFAVAEFWKNDLGAIENYLQKTNWNHSVFDVPLHYNLYNASKSGGNYDMRNIFNGTVVQRHPSHAVTFVDNHDSQPEEALESFVEEWFKPLAYALTLTREQGYPSVFYGDYYGIPTHGVPAMRSKIDPILEARQKYAYGPQHDYLDHPDVIGWTREGDSSHPKSGLATLITDGPGGSKRMYAGLKNAGETWYDITGNRSDTVKIGSDGWGEFHVNDGSVSIYVQK

SEQ ID NO: 26590 - protein, 483 aa, Bacillus sp.
HHNGTNGTMMQYFEWYLPNDGNHWNRLNSDASNLKSKGITAVWIPPAWKATSQNDVGYGAYDLYDLGEFNQKGTVRTKYGTRSQLQAAVTSLKNNGIQVYGDVVMNHKGGADATEMVRAVEVNPNNRNQEVTGEYTIEAWTRFDFPGRGNTHSSFKWRWYHFDGVDWDQSRQFTNRIYKFRGKAWDWEVDTEFGNYDYLMYADYDMDHPEVVNELRNWGVWYTNTLGLDGFRIDAVKHIKYSFTRDWINHVRSATGKNMFAVAEFWKNDLGAIENYLQKTNWNHSVFDVPLHYNLYNASKSGGNYDMRNIFNGTVVQRHPSHAVTFVDNHDSQPEEALESFVEEWFKPLAYALTLTREQGYPSVFYGDYYGIPTHGVPAMRSKIDPILEARQKYAYGPQHDYLDHPDVIGWTREGDSSHPKSGLATLITDGPGGSKRMYAGLKNAGETWYDITGNRSDTVKIGSDGWGEFHVNDGSVSIYVQK

SEQ ID NO: 26591 - protein, 483 aa, Bacillus sp.
HHNGTNGTMMQYFEWYLPNDGNHWNRLNSDASNLKSKGITAVWIPPAWKGASQNDVGYGAYDLYDLGEFNQKGTVRTKYGTRSQLQAAVTSLKNNGIQVYGDVVMNHKGGADATEMVRAVEVNPNNRNQEVTGEYTIEAWTRFDFPGRGNTHSSFKWRWYHFDGVDWDQSRQLQNRIYKFRGKAWDWEVDTEFGNYDYLMYADYDMDHPEVVNELRNWGVWYTNTLGLDGFRIDAVKHIKYSFTRDWINHVRSATGKNMFAVAEFWKNDLGAIENYLQKTNWNHSVFDVPLHYNLYNASKSGGNYDMRNIFNGTVVQRHPSHAVTFVDNHDSQPEEALESFVEEWFKPLAYALTLTREQGYPSVFYGDYYGIPTHGVPAMRSKIDPILEARQKYAYGPQHDYLDHPDVIGWTREGDSSHPKSGLATLITDGPGGSKRMYAGLKNAGETWYDITGNRSDTVKIGSDGWGEFHVNDGSVSIYVQK

SEQ ID NO: 26592 - protein, 483 aa, Bacillus sp.
HHNGTNGTMMQYFEWYLPNDGNHWNRLNSDASNLKSKGITAVWIPPAWKGASQNDVGYGAYDLYDLGEFNQKGTVRTKYGTRSQLQAAVTSLKNNGIQVYGDVVMNHKGGADATEMVRAVEVNPNNRNQEVTGEYTIEAWTRFDFPGRGNTHSSFKWRWYHFDGVDWDQSRRFQNRIYKFRGKAWDWEVDTEFGNYDYLMYADYDMDHPEVVNELRNWGVWYTNTLGLDGFRIDAVKHIKYSFTRDWINHVRSATGKNMFAVAEFWKNDLGAIENYLQKTNWNHSVFDVPLHYNLYNASKSGGNYDMRNIFNGTVVQRHPSHAVTFVDNHDSQPEEALESFVEEWFKPLAYALTLTREQGYPSVFYGDYYGIPTHGVPAMRSKIDPILEARQKYAYGPQHDYLDHPDVIGWTREGDSSHPKSGLATLITDGPGGSKRMYAGLKNAGETWYDITGNRSDTVKIGSDGWGEFHVNDGSVSIYVQK

SEQ ID NO: 26593 - protein, 483 aa, Bacillus sp.
HHNGTNGTMMQYFEWYLPNDGNHWNRLNSDASNLKSKGITAVWIPPAWKATSQNDVGYGAYDLYDLGEFNQKGTVRTKYGTRSQLQAAVTSLKNNGIQVYGDVVMNHKGGADATEMVRAVEVNPNNRNQEVTGEYTIEAWTRFDFPGRGNTHSSFKWRWYHFDGVDWDQSRQLQNRIYKFRGKAWDWEVDTEFGNYDYLMYADYDMDHPEVVNELRNWGVWYTNTLGLDGFRIDAVKHIKYSFTRDWINHVRSATGKNMFAVAEFWKNDLGAIENYLQKTNWNHSVFDVPLHYNLYNASKSGGNYDMRNIFNGTVVQRHPSHAVTFVDNHDSQPEEALESFVEEWFKPLAYALTLTREQGYPSVFYGDYYGIPTHGVPAMRSKIDPILEARQKYAYGPQHDYLDHPDVIGWTREGDSSHPKSGLATLITDGPGGSKRMYAGLKNAGETWYDITGNRSDTVKIGSDGWGEFHVNDGSVSIYVQK

SEQ ID NO: 26594 - protein, 483 aa, Bacillus sp.
HHNGTNGTMMQYFEWYLPNDGNHWNRLNSDASNLKSKGITAVWIPPAWKGASQNDVGYGAYDLYDLGEFNQKGTVRTKYGTRSQLQAAVTSLKNNGIQVYGDVVMNHKGGADATEMVRAVEVNPNNRNQEVTGEYTIEAWTRFDFPGRGNTHSSFKWRWYHFDGVDWDQSRNFQNRIYKFRGKAWDWEVDTEFGNYDYLMYADYDMDHPEVVNELRNWGVWYTNTLGLDGFRIDAVKHIKYSFTRDWINHVRSATGKNMFAVAEFWKNDLGAIENYLQKTNWNHSVFDVPLHYNLYNASKSGGNYDMRNIFNGTVVQRHPSHAVTFVDNHDSQPEEALESFVEEWFKPLAYALTLTREQGYPSVFYGDYYGIPTHGVPAMRSKIDPILEARQKYAYGPQHDYLDHPDVIGWTREGDSSHPKSGLATLITDGPGGSKRMYAGLKNAGETWYDITGNRSDTVKIGSDGWGEFHVNDGSVSIYVQK

SEQ ID NO: 26595 - protein, 485 aa, Synthetic construct
HHNGTNGTMMQYFEWYLPNDGNHWNRLNSDASNLKSKGITAVWIPPAWKGASQNDVGYGAYDLYDLGEFNQKGTVRTKYGTRSQLQAAVTSLKNNGIQVYGDVVMNHKGGADATEMVRAVEVNPNNRNQEVTGEYTIEAWTRFDFPGRGNTHSSFKWRWYHFDGVDWDQSRRLNNRIYKFRGHGKAWDWEVDTENGNYDYLMYADIDMDHPEVVNELRNWGVWYTNTLGLDGFRIDAVKHIKYSFTRDWINHVRSATGKNMFAVAEFWKNDLGAIENYLQKTNWNHSVFDVPLHYNLYNASKSGGNYDMRNIFNGTVVQRHPSHAVTFVDNHDSQPEEALESFVEEWFKPLAYALTLTREQGYPSVFYGDYYGIPTHGVPAMRSKIDPILEARQKYAYGPQHDYLDHPDVIGWTREGDSSHPKSGLATLISDGPGGSKRMYAGLKNAGETWYDITGNRSDTVKIGSDGWGEFHVNDGSVSIYVQK

SEQ ID NO: 26596 - protein, 485 aa, Synthetic construct
HHNGTNGTMMQYFEWYLPNDGNHWNRLRSDASNLKSKGITAVWIPPAWKGASQNDVGYGAYDLYDLGEFNQKGTVRTKYGTRSQLQAAVTSLKNNGIQVYGDVVMNHKGGADATEMVRAVEVNPNNRNQEVTGEYTIEAWTRFDFPGRGNTHSSFKWRWYHFDGVDWDQSRRLNNRIYKFRGHGKAWDWEVDTENGNYDYLMYADIDMDHPEVVNELRNWGVWYTNTLGLDGFRIDAVKHIKYSFTRDWINHVRSATGKNMFAVAEFWKNDLGAIENYLQKTNWNHSVFDVPLHYNLYNASKSGGNYDMRNIFNGTVVQRHPSHAVTFVDNHDSQPEEALESFVEEWFKPLAYALTLTREQGYPSVFYGDYYGIPTHGVPAMRSKIDPILEARQKYAYGPQHDYLDHPDVIGWTREGDSSHPKSGLATLITDGPGGSKRMYAGLKNAGETWYDITGNRSDTVKIGSDGWGEFHVNDGSVSIYVQK

SEQ ID NO: 26597 - protein, 485 aa, Synthetic construct
HHNGTNGTMMQYFEWYLPNDGNHWNRLNSDASNLKSKGITAVWIPPAWKGASQNDVGYGAYDLYDLGEFNQKGTVRTKYGTRSQLQAAVTSLKNNGIQVYGDVVMNHKGGADATEMVRAVEVNPNNRNQEVTGEYTIEAWTRFDFPGRGNTHSSFKWRWYHFDGVDWDQSRRLNNRIYKFRGHGKAWDWEVDTENGNYDYLMYADIDMDHPEVVNELRNWGVWYTNTLGLDGFRIDAVKHIKYSFTRDWLNHVRSATGKNMFAVAEFWKNDLGAIENYLQKTNWNHSVFDVPLHYNLYNASKSGGNYDMRNIFNGTVVQRHPSHAVTFVDNHDSQPEEALESFVEEWFKPLAYALTLTREQGYPSVFYGDYYGIPTHGVPAMRSKIDPILEARQKYAYGPQHDYLDHPDVIGWTREGDSSHPKSGLATLITDGPGGSKRMYAGLKNAGETWYDITGNRSDTVKIGSDGWGEFHVNDGSVSIYVQK

SEQ ID NO: 26598 - protein, 485 aa, Synthetic construct
HHNGTNGTMMQYFEWYLPNDGNHWNRLNSDASNLKSKGITAVWIPPAWKGASQNDVGYGAYDLYDLGEFNQKGTVRTKYGTRSQLQAAVTSLKNNGIQVYGDVVMNHKGGADATEMVRAVEVNPNNRNQEVTGEYTIEAWTRFDFPGRGNTHSSFKWRWYHFDGVDWDQSRRLNNRIYKFRGHGKAWDWEVDTENGNYDYLMYADIDMDHPEVVNELRNWGVWYTNTLGLDGFRIDAVKHIKYSFTRDWINHVRSATGKNMFAVAEFWKNDLGAIENYLQKTNWNHSVFDVPLHYNLYNASKSGGNYDMRNIFNGTVVQRHPSHAVTFVDNHDSQPEEALESFVEEWFKPLAYALTLTREQGYPSVFYGDYYGIPTHGVPAMRSKIDPILEARQKYAYGPQHDYLDHPDIIGWTREGDSSHPKSGLATLITDGPGGSKRMYAGLKNAGETWYDITGNRSDTVKIGSDGWGEFHVNDGSVSIYVQK

SEQ ID NO: 26599 - protein, 483 aa, Bacillus sp.
HHNGTNGTMMQYFEWYLPNDGNHWNRLNSDASNLKSKGITAVWIPPAWKGASQNDVGYGAYDLYDLGEFNQKGTVRTKYGTRSQLQAAVTSLKNNGIQVYGDVVMNHKGGADATEMVRAVEVNPNNRNQEVTGEYTIEAWTRFDFPGRGNTHSSFKWRWYHFDGVDWDQSRQFDNRIYKFRGKAWDWEVDTEFGNYDYLMYADYDMDHPEVVNELRNWGVWYTNTLGLDGFRIDAVKHIKYSFTRDWINHVRSATGKNMFAVAEFWKNDLGAIENYLQKTNWNHSVFDVPLHYNLYNASKSGGNYDMRNIFNGTVVQRHPSHAVTFVDNHDSQPEEALESFVEEWFKPLAYALTLTREQGYPSVFYGDYYGIPTHGVPAMRSKIDPILEARQKYAYGPQHDYLDHPDVIGWTREGDSSHPKSGLATLITDGPGGSKRMYAGLKNAGETWYDITGNRSDTVKIGSDGWGEFHVNDGSVSIYVQK

SEQ ID NO: 26600 - protein, 485 aa, Synthetic construct
HHNGTNGTMMQYFEWYLPNDGNHWNRLNSDASNLKSKGITAVWIPPAWKGASQNDVGYGAYDLYDLGEFNQKGTVRTKYGTRSQLQAAVTSLKNNGIQVYGDVVMNHKGGADATEMVRAVEVNPNNRNQEVTGEYTIEAWTRFDFPGRGNTHSSFKWRWYHFDGVDWDQSRRLNNRIYKFRGHGKAWDWEVDTENGNYDYLMYADIDMDHPEVVNELRNWGVWYTNTLGLDGFRIDAVKHIKYSFTRDWINHVRSATGKNMFAVAEFWKNDLGAIENYLQKTNWNHSVFDVPLHYNLYNASKSGGNYDMRNIFNGTVVQRHPSHAVTFVDNHDSQPEEALESFVEEWFKPLAYALTLTREQGYPSVFYGDYYGIPTHGVPAMRSKIDPILEARQKYAYGPQHDYLDHPDVIGWTREGDSSHPKSGLATLITDGPGGSKRMYAGLKNAGETWYDITGNRSDTVKIGSDGWGEFHVNDGSVSIYVQR

SEQ ID NO: 26601 - protein, 485 aa, Synthetic construct
HHNGTNGTMMQYFEWYLPNDGNHWNRLNSDASNLKSKGITAVWIPPAWKGASQNDVGYGAYDLYDLGEFNQKGTVRTKYGTRSQLQAAVTSLKNNGIQVYGDVVMNHKGGADATEMVRAVEVNPNNRNQEVTGEYTIEAWTKFDFPGRGNTHSSFKWRWYHFDGVDWDQSRRLNNRIYKFRGHGKAWDWEVDTENGNYDYLMYADIDMDHPEVVNELRNWGVWYTNTLGLDGFRIDAVKHIKYSFTRDWINHVRSATGKNMFAVAEFWKNDLGAIENYLQKTNWNHSVFDVPLHYNLYNASKSGGNYDMRNIFNGTVVQRHPSHAVTFVDNHDSQPEEALESFVEEWFKPLAYALTLTREQGYPSVFYGDYYGIPTHGVPAMRSKIDPILEARQKYAYGPQHDYLDHPDVIGWTREGDSSHPKSGLATLITDGPGGSKRMYAGLKNAGETWYDITGNRSDTVKIGSDGWGEFHVNDGSVSIYVQK

SEQ ID NO: 26602 - protein, 485 aa, Synthetic construct
HHNGTNGTMMQYFEWYLPNDGNHWNRLNSDASNLKSKGITAVWIPPAWKGASQNDVGYGAYDLYDLGEFNQKGTVRTKYGTRSQLQAAVTSLKNNGIQVYGDVVMNHKGGADATEMVRAVEVNPNNRNQEVTGEYTIEAWTRFDFPGRGNTHSSFKWRWYHFDGVDWDQSRRLNNRIYKFRGHGKAWDWEVDTENGNYDYLMYADIDMDHPEVVNELRNWGVWYTNTLGLDGFRIDAVKHIKYSFTRDWINHVRSATGKNMFAVAEFWKNDLGAIENYLQKTNWNHSVFDVPLHYNLYNASKSGGNYDMRNIFNGTVVQRHPSHAVTFVDNHDSQPEEALESFVEEWFKPLAYALTLTREQGYPSVFYGDYYGIPTHGVPAMRSKIDPILEARQKYAYGPQHDYLDHPDVIGWTREGDSSHPKSGLATLITDGPGGSKRMYVGLKNAGETWYDITGNRSDTVKIGSDGWGEFHVNDGSVSIYVQK

SEQ ID NO: 26603 - protein, 483 aa, Synthetic construct
HHNGTNGTMMQYFEWYLPNDGNHWNRLNSDASNLKSKGITAVWIPPAWKGASQNDVGYGAYDLYDLGEFNQKGTVRTKYGTRSQLQAAVTSLKNNGIQVYGDVVMNHKGGADATEMVRAVEVNPNNRNQEVTGEYTIEAWTRFDFPGRGNTHSSFKWRWYHFDGVDWDQSRRLNNRIYKFRGKAWDWEVDTENGNYDYLMYADIDMDHPEVVNELRNWGVWYTNTLGLDGFRIDAVKHIKYSFTRDWINHVRSATGKEMFAVAEFWKNDLGAIENYLQKTNWNHSVFDVPLHYNLYNASKSGGNYDMRNIFNGTVVQRHPSHAVTFVDNHDSQPEEALESFVEEWFKPLAYALTLTREQGYPSVFYGDYYGIPTHGVPAMRSKIDPILEARQKYAYGPQHDYLDHPDVIGWTREGDSSHPKSGLATLITDGPGGSKRMYAGLKNAGETWYDITGNRSDTVKIGSDGWGEFHVNDGSVSIYVQK

SEQ ID NO: 26604 - protein, 485 aa, Synthetic construct
HHNGTNGTMMQYFEWYLPNDGNHWNRLNSDASNLKSKGITAVWIPPAWKGASQNDVGYGAYDLYDLGEFNQKGTVRTKYGTRSQLQAAVTSLKNNGIQVYGDVVMNHKGGADATEMVRAVEVNPNNRNQEVTGEYTIEAWTRFDFPGRGNTHSSFKWRWYHFDGVDWDQSRRLNNRIYKFRGHGKAWDWEVDTENGNYDYLMYADIDMDHPEVVNELRNWGVWYTNTLGLDGFRIDAVKHIKYSFTRDWINHVRSATGKNMFAVAEFWKNDLGAIENYLQKTNWNHSVFDVPLHYNLYNASKSGGNYDMRNIFNGTVVQRHPSHAVTFVDNHDSQPEEALESFVEEWFKPLAYALTLTREQGYPSVFYGDYYGIPTHGVPAMRSKIDPILEARQKYAYGPQHDYLDHHDVIGWTREGDSSHPKSGLATLITDGPGGSKRMYAGLKNAGETWYDITGNRSDTVKIGSDGWGEFHVNDGSVSIYVQK

SEQ ID NO: 26605 - protein, 483 aa, Bacillus sp.
HHNGTNGTMMQYFEWYLPNDGNHWNRLNSDASNLKSKGITAVWIPPAWKGASQNDVGYGAYDLYDLGEFNQKGTVRTKYGTRSQLQAAVTSLKNNGIQVYGDVVMNHKGGADATEMVRAVEVNPNNRNQEVTGEYTIEAWTRFDFPGRGNTHSSFKWRWYHFDGVDWDQSRRLNNRIYKFRGKAWDWEVDTEFGNYDYLMYADYDMDHPEVVNELRNWGVWYTNTLGLDGFRIDAVKHIKYSFTRDWINHVRSATGKNMFAVAEFWKNDLGAIENYLQKTNWNHSVFDVPLHYNLYNASNSGGNYDMRNIFNGTVVQRHPSHAVTFVDNHDSQPEEALESFVDEWFKPLAYALTLTREQGYPSVFYGDYYGIPTHGVPAMRSKIDPILEARQKYAYGPQHDYLDHPDVIGWTREGDSSHPKSGLATLITDGPGGSKRMYAGLKNAGETWYDITGNRSDTVKIGSDGWGEFHVNGGSVSIYVQK

SEQ ID NO: 26606 - protein, 485 aa, Synthetic construct
HHNGTNGTMMQYFEWYLPNDGNHWNRLNSDASNLKSKGITAVWIPPAWKGASQNDVGYGAYDLYDLGEFNQKGTVRTKYGTRSQLQAAVTSLKNNGIQVYGDVVMNHKGGADATEMVRAVEVNPNNRNQEVTGEYTIEAWTRFDFPGRGNTHSSFKWRWYHFDGVDWDQSRRLNNRIYKFRGHGKAWDWEVDTENGNYDYLMYADIDMDHPEVVNELRNWGVWYTNTLGLDGFRIDAVKHIKYSFTRDWINHVRSATGKNMFAVAEFWKNDLGAIENYLQKTNWNHSVFDVPLHYNLYNASNSGGNYDMRNIFNGTVVQRHPSHAVTFVDNHDSQPEEALESFVEEWFKPLAYALTLTREQGYPSVFYGDYYGIPTHGVPAMRSKIDPILEARQKYAYGPQHDYLDHPDVIGWTREGDSSHPKSGLATLITDGPGGSKRMYAGLKNAGETWYDITGNRSDTVKIGSDGWGEFHVNDGSVSIYVQK

SEQ ID NO: 26607 - protein, 485 aa, Synthetic construct
HHNGTNGTMMQYFEWYLPNDGNHWNRLNSDASNLKSKGITAVWIPPAWKGASQNDVGYGAYDLYDLGEFNQKGTVRTKYGTRSQLQAAVTSLKNNGIQVYGDVVMNHKGGADATEMVRAVEVNPNNRNQEVTGDYTIEAWTRFDFPGRGNTHSSFKWRWYHFDGVDWDQSRRLNNRIYKFRGHGKAWDWEVDTENGNYDYLMYADIDMDHPEVVNELRNWGVWYTNTLGLDGFRIDAVKHIKYSFTRDWINHVRSATGKNMFAVAEFWKNDLGAIENYLQKTNWNHSVFDVPLHYNLYNASKSGGNYDMRNIFNGTVVQRHPSHAVTFVDNHDSQPEEALESFVEEWFKPLAYALTLTREQGYPSVFYGDYYGIPTHGVPAMRSKIDPILEARQKYAYGPQHDYLDHPDVIGWTREGDSSHPKSGLATLITDGPGGSKRMYAGLKNAGETWYDITGNRSDTVKIGSDGWGEFHVNDGSVSIYVQK

SEQ ID NO: 26608 - protein, 485 aa, Bacillus sp.
HHNGTNGTMMQYFEWYLPNDGNHWNRLNSDASNLKSKGITAVWIPPAWKATSQNDVGYGAYDLYDLGEFNQKGTVRTKYGTRSQLQAAVTSLKNNGIQVYGDVVMNHKGGADATEMVRAVEVNPNNRNQEVTGEYTIEAWTRFDFPGRGNTHSSFKWRWYHFDGVDWDQSRQFTNRIYKFRGHGKAWDWEVDTEFGNYDYLMYADYDMDHPEVVNELRNWGVWYTNTLGLDGFRIDAVKHIKYSFTRDWINHVRSATGKNMFAVAEFWKNDLGAIENYLQKTNWNHSVFDVPLHYNLYNASKSGGNYDMRNIFNGTVVQRHPSHAVTFVDNHDSQPEEALESFVEEWFKPLAYALTLTREQGYPSVFYGDYYGIPTHGVPAMRSKIDPILEARQKYAYGPQHDYLDHPDVIGWTREGDSSHPKSGLATLITDGPGGSKRMYAGLKNAGETWYDITGNRSDTVKIGSDGWGEFHVNDGSVSIYVQK

SEQ ID NO: 26609 - protein, 485 aa, Bacillus sp.
HHNGTNGTMMQYFEWYLPNDGNHWNRLNSDASNLKSKGITAVWIPPAWKGASQNDVGYGAYDLYDLGEFNQKGTVRTKYGTRSQLQAAVTSLKNNGIQVYGDVVMNHKGGADATEMVRAVEVNPNNRNQEVTGEYTIEAWTRFDFPGRGNTHSSFKWRWYHFDGVDWDQSRQFNNRIYKFRGHGKAWDWEVDTEFGNYDYLMYADYDMDHPEVVNELRNWGVWYTNTLGLDGFRIDAVKHIKYSFTRDWINHVRSATGKNMFAVAEFWKNDLGAIENYLQKTNWNHSVFDVPLHYNLYNASKSGGNYDMRNIFNGTVVQRHPSHAVTFVDNHDSQPEEALESFVEEWFKPLAYALTLTREQGYPSVFYGDYYGIPTHGVPAMRSKIDPILEARQKYAYGPQHDYLDHPDVIGWTREGDSSHPKSGLATLITDGPGGSKRMYAGLKNAGETWYDITGNRSDTVKIGSDGWGEFHVNDGSVSIYVQK

SEQ ID NO: 26610 - protein, 485 aa, Synthetic construct
HHNGTNGTMMQYFEWYLPNDGNHWNRLNSDASNLKSKGITAVWIPPAWKGASQNDVGYGAYDLYDLGEFNQKGTVRTKYGTRSQLQAAVTSLKNNGIQVYGDVVMNHKGGADATEMVRAVEVNPNNRNQEVTGEYTIEAWTRFDFPGRGNTHSSFKWRWYHFDGVDWDQSRRLNNRIYKFRGHGKAWDWEVDTENGNYDYLMYADIDMDHPEVVNELRNWGVWYTNTLGLDGFRIDAVKHIKYSFTRDWINHVRSATGKNMFAVAEFWKNDLGAIENYLQKTNWNHSVFDVPLHYNLYNASKSGGNYDMRNIFNGTVVQRHPSHAVTFVDNHDSQPEEALESFVEEWFKPLAYALTLTREQGYPSVFYGDYYGIPTHGVPAMRSKIDPILEARQKYAYGPQHDYLDHPDVIGWTREGDSSHPKSGLATLITDGPGGSKRMYAGLKNAGETWYDITGNRSDTVKIGSDGWGEFHVNDGSVSIWVQK

SEQ ID NO: 26611 - protein, 483 aa, Synthetic construct
HHNGTNGTMMQYFEWYLPNDGNHWNRLNSDASNLKSKGITAVWIPPAWKGASQNDVGYGAYDLYDLGEFNQKGTVRTKYGTRSQLQAAVTSLKNNGIQVYGDVVMNHKGGADATEMVRAVEVNPNNRNQEVTGEYTIEAWTRFDFPGRGNTHSSFKWRWYHFDGVDWDQSRRLNNRIYKFRGKAWDWEVDTENGNYDYLMYADIDMDHPEVVNELRNWGVWYTNTLGLDGFRIDAVKHIKYSFTRDWINHVRSATGKNMFAVAEFWKNDLGAIENYLQKTNWNHSVFDVPLHYNLYNASKSGGNYDMRNIFNGTVVQRHPSHAVTFVDNHDSQPEEALESFVEEWFKPLAYALTLTREQGYPSVFYGDYYGIPTHGVPAMRSKIDPILEARQKYAYGPQHDYLDHPDVIGWTREGDSSHPKSGLATLITDGPGGSKRMYAGLKNAGETWYDITGNRSDTVTIGSDGWGEFHVNDGSVSIYVQK

SEQ ID NO: 26612 - protein, 485 aa, Synthetic construct
HHNGTNGTMMQYFEWYLPNDGNHWNRLNSDASNLKSKGITAVWIPPAWKGASQNDVGYGAYDLYDLGEFNQKGTVRTKYGTRSQLEAAVTSLKNNGIQVYGDVVMNHKGGADATEMVRAVEVNPNNRNQEVTGEYTIEAWTRFDFPGRGNTHSSFKWRWYHFDGVDWDQSRRLNNRIYKFRGHGKAWDWEVDTENGNYDYLMYADIDMDHPEVVNELRNWGVWYTNTLGLDGFRIDAVKHIKYSFTRDWINHVRSATGKNMFAVAEFWKNDLGAIENYLQKTNWNHSVFDVPLHYNLYNASKSGGNYDMRNIFNGTVVQRHPSHAVTFVDNHDSQPEEALESFVEEWFKPLAYALTLTREQGYPSVFYGDYYGIPTHGVPAMRSKIDPILEARQKYAYGPQHDYLDHPDVIGWTREGDSSHPKSGLATLITDGPGGSKRMYAGLKNAGETWYDITGNRSDTVKIGSDGWGEFHVNDGSVSIYVQK

SEQ ID NO: 26613 - protein, 485 aa, Synthetic construct
HHNGTNGTMMQYFEWYLPNDGNHWNRLNSDASNLKSKGITAVWIPPAWKGASQNDVGYGAYDLYDLGEFNQKGTVRTKYGTRSQLQAAVTSLKNNGIQVYGDVVMNHKGGADATENVRAVEVNPNNRNQEVTGEYTIEAWTRFDFPGRGNTHSSFKWRWYHFDGVDWDQSRRLNNRIYKFRGHGKAWDWEVDTENGNYDYLMYADIDMDHPEVVNELRNWGVWYTNTLGLDGFRIDAVKHIKYSFTRDWINHVRSATGKNMFAVAEFWKNDLGAIENYLQKTNWNHSVFDVPLHYNLYNASKSGGNYDMRNIFNGTVVQRHPSHAVTFVDNHDSQPEEALESFVEEWFKPLAYALTLTREQGYPSVFYGDYYGIPTHGVPAMRSKIDPILEARQKYAYGPQHDYLDHPDVIGWTREGDSSHPKSGLATLITDGPGGSKRMYAGLKNAGETWYDITGNRSDTVKIGSDGWGEFHVNDGSVSIYVQK

SEQ ID NO: 26614 - protein, 485 aa, Synthetic construct
HHNGTNGTMMQYFEWYLPNDGNHWNRLNSDASNLKSKGITAVWIPPAWKGASQNDVGYGAYDLYDLGEFNQKGTVRTKYGTRSQLQAAVTSLKNNGIQVYGDVVMNHKGGADATEMVRAVEVNPNNRNQEVTGEYTIEAWTRFDFPGRGNTHSSFKWRWYHFDGVDWDQSRRLNNRIYKFRGHGKAWDWEVDTENGNYDYLMYADIDMDHPEVVNELRNWGVWYTNTLGLDGFRIDAVKHIKYSFTRDWINHVRSATGKNMFAVAEFWKNDLGALENYLQKTNWNHSVFDVPLHYNLYNASKSGGNYDMRNIFNGTVVQRHPSHAVTFVDNHDSQPEEALESFVEEWFKPLAYALTLTREQGYPSVFYGDYYGIPTHGVPAMRSKIDPILEARQKYAYGPQHDYLDHPDVIGWTREGDSSHPKSGLATLITDGPGGSKRMYAGLKNAGETWYDITGNRSDTVKIGSDGWGEFHVNDGSVSIYVQK

SEQ ID NO: 26615 - protein, 485 aa, Synthetic construct
HHNGTNGTMMQYFEWYLPNDGNHWNRLNSDASNLKSKGITAVWIPPAWKGASQNDVGYGAYDLYDLGEFNQKGTVRTKYGTRSQLQAAVTSLKNNGIQVYGDVVMNHKGGADATEMVRAVEVNPNNRNQEVTGEYTIEAWTRFDFPGRGNTHSSFKWRWYHFDGVDWDQSRRLNNRIYKFRGHGKAWDWEVDTENGNYDYLMYADIDMDHPEVVNELRNWGVWYTNTLGLDGFRIDAVKHIKYSFTRDWINHVRSATGKNMFAVAEFWKNDLGAIENYLQKTNWNHSVFDVPLHYNLYNASKSGGNYDMRNIFNGTVVQRHPSHAVTFVDNHDSQPEEALESFVEEWFKPLAYALTLTREQGYPSVFYGDYYGIPTHGVPAMRSKIDPILEARQKYAYGPQHDYLDHPDVIGWTREGDSSHPKSGLATLITDGPGGSKRMYAGLKNAGETWYDITGNRSDTVKINSDGWGEFHVNDGSVSIYVQK

SEQ ID NO: 26616 - protein, 485 aa, Synthetic construct
HHNGTNGTMMQYFEWYLPNDGNHWNRLNSDASNLKSKGITAVWIPPAWKGASQNDVGYGAYDLYDLGEFNQKGTVRTKYGTRSQLQAAVTSLKNNGIQVYGDVVMNHKGGADATEMVRAVEVNPNNRNQEVTGEYTIEAWTRFDFPGRGNTHSSFKWRWYHFDGVDWDQSRRLNNRIYKFRGHGKAWDWEVDTENGNYDYLMYADIDMDHPEVVNELRNWGVWYTNTLGLDGFRIDAVKHIKYSFTRDWINHVRSATGKNMFAVAEFWKNDLGAIENYLQKTNWNHSVFDVPLHYNLYNASKSGGNYDMRNIFNGTVVQRHPSHAVTFVDNHDSQPEEALESFVEEWFKPLAYALTLTREQGYPSVFYGDYYGIPTHGVPAMRSKIDPILEARQKYAYGPQHDYLDHPDVIGWTREGDSSHPKSGLATLITDGPGGSKRMYAGLKNAGQTWYDITGNRSDTVKIGSDGWGEFHVNDGSVSIYVQK

SEQ ID NO: 26617 - protein, 483 aa, Bacillus sp.
HHNGTNGTMMQYFEWYLPNDGNHWNRLNSDASNLKSKGITAVWIPPAWKGVSQNDVGYGAYDLYDLGEFNQKGTVRTKYGTRSQLQAAVTSLKNNGIQVYGDVVMNHKGGADATEMVRAVEVNPNNRNQEVTGEYTIEAWTRFDFPGRGNTHSSFKWRWYHFDGVDWDQSRQFSNRIYKFRGKAWDWEVDTEFGNYDYLMYADYDMDHPEVVNELRNWGVWYTNTLGLDGFRIDAVKHIKYSFTRDWINHVRSATGKNMFAVAEFWKNDLGAIENYLQKTNWNHSVFDVPLHYNLYNASKSGGNYDMRNIFNGTVVQRHPSHAVTFVDNHDSQPEEALESFVEEWFKPLAYALTLTREQGYPSVFYGDYYGIPTHGVPAMRSKIDPILEARQKYAYGPQHDYLDHPDVIGWTREGDSSHPKSGLATLITDGPGGSKRMYAGLKNAGETWYDITGNRSDTVKIGSDGWGEFHVNDGSVSIYVQK

SEQ ID NO: 26618 - protein, 485 aa, Bacillus sp.
HHNGTNGTMMQYFEWYLPNDGNHWNRLNSDASNLKSKGITAVWIPPAWKGASQNDVGYGAYDLYDLGEFNQKGTVRTKYGTRSQLQAAVTSLKNNGIQVYGDVVMNHKGGADATEMVRAVEVNPNNRNQEVTGEYTIEAWTRFDFPGRGNTHSSFKWRWYHFDGVDWDQSRQFTNRIYKFRGHGKAWDWEVDTEFGNYDYLMYADYDMDHPEVVNELRNWGVWYTNTLGLDGFRIDAVKHIKYSFTRDWINHVRSATGKNMFAVAEFWKNDLGAIENYLQKTNWNHSVFDVPLHYNLYNASKSGGNYDMRNIFNGTVVQRHPSHAVTFVDNHDSQPEEALESFVEEWFKPLAYALTLTREQGYPSVFYGDYYGIPTHGVPAMRSKIDPILEARQKYAYGPQHDYLDHPDVIGWTREGDSSHPKSGLATLITDGPGGSKRMYAGLKNAGETWYDITGNRSDTVKIGSDGWGEFHVNDGSVSIYVQK

SEQ ID NO: 26619 - protein, 483 aa, Bacillus sp.
HHNGTNGTMMQYFEWYLPNDGNHWNRLNSDASNLKSKGITAVWIPPAWKGASQNDVGYGAYDLYDLGEFNQKGTVRTKYGTRSQLQAAVTSLKNNGIQVYGDVVMNHKGGADATEMVRAVEVNPNNRNQEVTGEYTIEAWTRFDFPGRGNTHSSFKWRWYHFDGVDWDQSRRLNNRIYKFRGKAWDWEVDTEFGNYDYLMYADYDMDHPEVVNELRNWGVWYTNTLGLDGFRIDAVKHIKYSFTRDWINHVRSATGKNMFAVAEFWKNDLGAIENYLQKTNWNHSVFDVPLHYNLYNASNSGGNYDMRNIFNGTVVQRHPSHAVTFVDNHDSQPEEALESFVEEWFKPLAYALTLTREQGYPSVFYGDYYGIPTHGVPAMRSKIDPILEARQKYAYGPQHDYLDHPDVIGWTREGDSSHPKSGLATLITDGPGGSKRMYAGLKNAGETWYDITGNRSDTVKIGSDGWGEFHVNGGSVSIYVQK

SEQ ID NO: 26620 - protein, 485 aa, Synthetic construct
HHNGTNGTMMQYFEWYLPNDGNHWNRLNSDASNLKSKGITAVWIPPAWKGASQNDVGYGAYDLYDLGEFNQKGTVRTKYGTRSQLQAAVTSLKNNGIQVYGDVVMNHKGGADATEMVRAVEVNPNNRNQEVTGEYTIEAWTRFDFPGRGNTHSSFKWRWYHFDGVDWDQSRRLNNRIYKFRGHGKAWDWEVDSENGNYDYLMYADIDMDHPEVVNELRNWGVWYTNTLGLDGFRIDAVKHIKYSFTRDWINHVRSATGKNMFAVAEFWKNDLGAIENYLQKTNWNHSVFDVPLHYNLYNASKSGGNYDMRNIFNGTVVQRHPSHAVTFVDNHDSQPEEALESFVEEWFKPLAYALTLTREQGYPSVFYGDYYGIPTHGVPAMRSKIDPILEARQKYAYGPQHDYLDHPDVIGWTREGDSSHPKSGLATLITDGPGGSKRMYAGLKNAGETWYDITGNRSDTVKIGSDGWGEFHVNDGSVSIYVQK

SEQ ID NO: 26621 - protein, 485 aa, Synthetic construct
HHNGTNGTMMQYFEWYLPNDGNHWNRLNSDASNLKSKGITAVWIPPAWKGASQNDVGYGAYDLYDLGEFNQKGTVRTKYGTRSQLQAAVTSLKNNGIQVYGDVVMNHKGGADATEMVRAVEVNPNNRNQEVTGEYTIEAWTRFDFPGRGNTYSSFKWRWYHFDGVDWDQSRRLNNRIYKFRGHGKAWDWEVDTENGNYDYLMYADIDMDHPEVVNELRNWGVWYTNTLGLDGFRIDAVKHIKYSFTRDWINHVRSATGKNMFAVAEFWKNDLGAIENYLQKTNWNHSVFDVPLHYNLYNASKSGGNYDMRNIFNGTVVQRHPSHAVTFVDNHDSQPEEALESFVEEWFKPLAYALTLTREQGYPSVFYGDYYGIPTHGVPAMRSKIDPILEARQKYAYGPQHDYLDHPDVIGWTREGDSSHPKSGLATLITDGPGGSKRMYAGLKNAGETWYDITGNRSDTVKIGSDGWGEFHVNDGSVSIYVQK

SEQ ID NO: 26622 - protein, 485 aa, Bacillus sp.
HHNGTNGTMMQYFEWYLPNDGNHWNRLNSDASNLKSKGITAVWIPPAWKATSQNDVGYGAYDLYDLGEFNQKGTVRTKYGTRSQLQAAVTSLKNNGIQVYGDVVMNHKGGADATEMVRAVEVNPNNRNQEVTGEYTIEAWTRFDFPGRGNTHSSFKWRWYHFDGVDWDQSRQLQNRIYKFRGHGKAWDWEVDTEFGNYDYLMYADYDMDHPEVVNELRNWGVWYTNTLGLDGFRIDAVKHIKYSFTRDWINHVRSATGKNMFAVAEFWKNDLGAIENYLQKTNWNHSVFDVPLHYNLYNASKSGGNYDMRNIFNGTVVQRHPSHAVTFVDNHDSQPEEALESFVEEWFKPLAYALTLTREQGYPSVFYGDYYGIPTHGVPAMRSKIDPILEARQKYAYGPQHDYLDHPDVIGWTREGDSSHPKSGLATLITDGPGGSKRMYAGLKNAGETWYDITGNRSDTVKIGSDGWGKFHVNDGSVSIYVQK

SEQ ID NO: 26623 - protein, 483 aa, Bacillus sp.
HHNGTNGTMMQYFEWYLPNDGNHWNRLNSDASNLKSKGITAVWIPPAWKGASQNDVGYGAYDLYDLGEFNQKGTVRTKYGTRSQLQAAVTSLKNNGIQVYGDVVMNHKGGADATEMVRAVEVNPNNRNQEVTGEYTIEAWTRFDFPGRGNTHSSFKWRWYHFDGVDWDQSRQFYNRIYKFRGKAWDWEVDTEFGNYDYLMYADYDMDHPEVVNELRNWGVWYTNTLGLDGFRIDAVKHIKYSFTRDWINHVRSATGKNMFAVAEFWKNDLGAIENYLQKTNWNHSVFDVPLHYNLYNASKSGGNYDMRNIFNGTVVQRHPSHAVTFVDNHDSQPEEALESFVEEWFKPLAYALTLTREQGYPSVFYGDYYGIPTHGVPAMRSKIDPILEARQKYAYGPQHDYLDHPDVIGWTREGDSSHPKSGLATLITDGPGGSKRMYAGLKNAGETWYDITGNRSDTVKIGSDGWGEFHVNDGSVSIYVQK

SEQ ID NO: 26624 - protein, 485 aa, Bacillus sp.
HHNGTNGTMMQYFEWYLPNDGNHWNRLNSDASNLKSKGITAVWIPPAWKGASQNDVGYGAYDLYDLGEFNQKGTVRTKYGTRSQLQAAVTSLKNNGIQVYGDVVMNHKGGADATEMVRAVEVNPNNRNQEVTGEYTIEAWTRFDFPGRGNTHSSFKWRWYHFDGVDWDQSRQFDNRIYKFRGHGKAWDWEVDTEFGNYDYLMYADYDMDHPEVVNELRNWGVWYTNTLGLDGFRIDAVKHIKYSFTRDWINHVRSATGKNMFAVAEFWKNDLGAIENYLQKTNWNHSVFDVPLHYNLYNASKSGGNYDMRNIFNGTVVQRHPSHAVTFVDNHDSQPEEALESFVEEWFKPLAYALTLTREQGYPSVFYGDYYGIPTHGVPAMRSKIDPILEARQKYAYGPQHDYLDHPDVIGWTREGDSSHPKSGLATLITDGPGGSKRMYAGLKNAGETWYDITGNRSDTVKIGSDGWGEFHVNDGSVSIYVQK

SEQ ID NO: 26625 - protein, 485 aa, Synthetic construct
HHNGTNGTMMQYFEWYLPNDGNHWNRLNSDASNLKSKGITAVWIPPAWKGASQNDVGYGAYDLYDLGEFNQKGTVRTKYGTRSQLQAAVTSLKNNGIQVYGDVVMNHKGGADATEMVRAVEVNPNNRNQEVTGEYTIEAWTRFDFPGRGNTHSSFKWRWYHFDGVDWDQSRRLNNRIYKFRGHGKAWDWEVDTENGNYDYLMYADIDMDHPEVVNELRNWGVWYTNTLGLDGFRIDAVKHIKYSFTRDWINHVRSATGKNMFAVAEFWKNDLGAIENYLQKTNWNHSVFDVPLHYNLYNASKSGGNYDMRNIFNGTVVQRHPSHAVTFVDNHDSQPEESLESFVEEWFKPLAYALTLTREQGYPSVFYGDYYGIPTHGVPAMRSKIDPILEARQKYAYGPQHDYLDHPDVIGWTREGDSSHPKSGLATLITDGPGGSKRMYAGLKNAGETWYDITGNRSDTVKIGSDGWGEFHVNDGSVSIYVQK

SEQ ID NO: 26626 - protein, 485 aa, Bacillus sp.
HHNGTNGTMMQYFEWYLPNDGNHWNRLNSDASNLKSKGITAVWIPPAWKGTSQNDVGYGAYDLYDLGEFNQKGTVRTKYGTRSQLQAAVTSLKNNGIQVYGDVVMNHKGGADATEMVRAVEVNPNNRNQEVTGEYTIEAWTRFDFPGRGNTHSSFKWRWYHFDGVDWDQSRQLNNRIYKFRGHGKAWDWEVDTEFGNYDYLMYADYDMDHPEVVNELRNWGVWYTNTLGLDGFRIDAVKHIKYSFTRDWINHVRSATGKNMFAVAEFWKNDLGAIENYLQKTNWNHSVFDVPLHYNLYNASKSGGNYDMRNIFNGTVVQRHPSHAVTFVDNHDSQPEEALESFVEEWFKPLAYALTLTREQGYPSVFYGDYYGIPTHGVPAMRSKIDPILEARQKYAYGPQHDYLDHPDVIGWTREGDSSHPKSGLATLITDGPGGSKRMYAGLKNAGETWYDITGNRSDTVKIGSDGWGEFHVNDGSVSIYVQK

SEQ ID NO: 26627 - protein, 485 aa, Synthetic construct
HHNGTNGTMMQYFEWYLPNDGNHWNRLNSDASNLKSKGITAVWIPPAWKGASQNDVGYGAYDLYDLGEFNQKGTVRTKYGTRSQLQAAVTSLKNNGIQVYGDVVMNHKGGADATEMVRAVEVNPNNRNQEVTGEYTIEAWTRFDFPGRGNTHSSFKWRWYHFDGVDWDQSRRLNNRIYKFRGHGKAWDWEVDTENGNYDYLMYADIDMDHPEVVNELRNWGVWYTNTLGLDGFRIDAVKHIKYSFTRDWINHVRSATGKNMFAVAEFWKNDLGAIENYLQKTNWNHSVFDVPLHYNLYNASKSGGNYDMRNIFNGTVVQRHPSHAVTFVDNHDSQPEEALESFVEEWFKPLAYALILTREQGYPSVFYGDYYGIPTHGVPAMRSKIDPILEARQKYAYGPQHDYLDHPDVIGWTREGDSSHPKSGLATLITDGPGGSKRMYAGLKNAGETWYDITGNRSDTVKIGSDGWGEFHVNDGSVSIYVQK

SEQ ID NO: 26628 - protein, 485 aa, Bacillus sp.
HHNGTNGTMMQYFEWYLPNDGNHWNRLNSDASNLKSKGITAVWIPPAWKGVSQNDVGYGAYDLYDLGEFNQKGTVRTKYGTRSQLQAAVTSLKNNGIQVYGDVVMNHKGGADATEMVRAVEVNPNNRNQEVTGEYTIEAWTRFDFPGRGNTHSSFKWRWYHFDGVDWDQSRQFSNRIYKFRGHGKAWDWEVDTEFGNYDYLMYADYDMDHPEVVNELRNWGVWYTNTLGLDGFRIDAVKHIKYSFTRDWINHVRSATGKNMFAVAEFWKNDLGAIENYLQKTNWNHSVFDVPLHYNLYNASKSGGNYDMRNIFNGTVVQRHPSHAVTFVDNHDSQPEEALESFVEEWFKPLAYALTLTREQGYPSVFYGDYYGIPTHGVPAMRSKIDPILEARQKYAYGPQHDYLDHPDVIGWTREGDSSHPKSGLATLITDGPGGSKRMYAGLKNAGETWYDITGNRSDTVKIGSDGWGEFHVNDGSVSIYVQK

SEQ ID NO: 26629 - protein, 485 aa, Synthetic construct
HHNGTNGTMMQYFEWYLPNDGNHWNRLNSDASNLKSKGITAVWIPPAWKGASQNDVGYGAYDLYDLGEFNQKGTVRTKYGTRSQLQSAVTSLKNNGIQVYGDVVMNHKGGADATEMVRAVEVNPNNRNQEVTGEYTIEAWTRFDFPGRGNTHSSFKWRWYHFDGVDWDQSRRLNNRIYKFRGHGKAWDWEVDTENGNYDYLMYADIDMDHPEVVNELRNWGVWYTNTLGLDGFRIDAVKHIKYSFTRDWINHVRSATGKNMFAVAEFWKNDLGAIENYLQKTNWNHSVFDVPLHYNLYNASKSGGNYDMRNIFNGTVVQRHPSHAVTFVDNHDSQPEEALESFVEEWFKPLAYALTLTREQGYPSVFYGDYYGIPTHGVPAMRSKIDPILEARQKYAYGPQHDYLDHPDVIGWTREGDSSHPKSGLATLITDGPGGSKRMYAGLKNAGETWYDITGNRSDTVKIGSDGWGEFHVNDGSVSIYVQK

SEQ ID NO: 26630 - protein, 485 aa, Synthetic construct
HHNGTNGTMMQYFEWYLPNDGNHWNRLNSDASNLKSKGITAVWIPPAWKGASQNDVGYGAYDLYDLGEFNQKGTVRTKYGTRSQLQAAVTSLKNNGIQVYGDVVMNHKGGADATEMVRAVEVNPNNRNQEVTGEYTIEAWTRFDFPGRGNTHSSFKWRWYHFDGVDWDQSRRLNNRIYKFRGHGKAWDWEVDTENGNYDYLMYADIDMDHPEVVNELRNWGVWYTNTLGLDGFRIDAVKHIKYSFTRDWINHVRSATGKNMFAVAEFWKNDLGAIENYLNKTNWNHSVFDVPLHYNLYNASKSGGNYDMRNIFNGTVVQRHPSHAVTFVDNHDSQPEEALESFVEEWFKPLAYALTLTREQGYPSVFYGDYYGIPTHGVPAMRSKIDPILEARQKYAYGPQHDYLDHPDVIGWTREGDSSHPKSGLATLITDGPGGSKRMYAGLKNAGETWYDITGNRSDTVKIGSDGWGEFHVNDGSVSIYVQK

SEQ ID NO: 26631 - protein, 485 aa, Synthetic construct
HHNGTNGTMMQYFEWYLPNDGNHWNRLNSDASNLKSKGITAVWIPPAWKGASQNDVGYGAYDLYDLGEFNQKGTVRTKYGTRSQLQAAVTSLKNNGIQVYGDVVMNHKGGADATEMVRAVEVNPNNRNQEVTGEYTIEAWTRFDFPGRGNTHSSFKWRWYHFDGVDWDQSRRLNNRIYKFRGHGKAWDWEVDTENGNYDYLMYADIDMDHPEVVNELRNWGVWYTNTLGLDGFRIDAVKHIKYSFTRDWINHVRSATGKNMFAVAEFWKNDLGAIENYLQKTNWNHSVFDVPLHYNLYNASKSGGNYDMRNIFNGTVVQRHPMHAVTFVDNHDSQPEEALESFVEEWFKPLAYALTLTREQGYPSVFYGDYYGIPTHGVPAMRSKIDPILEARQKYAYGPQHDYLDHPDVIGWTREGDSSHPKSGLATLITDGPGGSKRMYAGLKNAGETWYDITGNRSDTVKIGSDGWGEFHVNDGSVSIYVQK

SEQ ID NO: 26632 - protein, 483 aa, unidentified
HHNGTNGTMMQYFEWYLPNDGNHWNRLRSDASNLKDKGISAVWIPPAWKGASQNDVGYGAYDLYDLGEFNQKGTIRTKYGTRNQLQAAVNALKSNGIQVYGDVVMNHKGGADATEMVKAVEVNPNNRNQEVSGEYTIEAWTKFDFPGRGNTHSNFKWRWYHFDGVDWDQSRKLNNRIYKFRGKGWDWEVDTEFGNYDYLMYADIDMDHPEVVNELRNWGVWYTNTLGLDGFRIDAVKHIKYSFIRDWINHVRSATGKNMFAVAEFWKNDLGAIENYLNKTNWNHSVFDVPLHYNLYNASKSGGNYDMRQIFNGTVVQKHPMHAVTFVDNHDSQPEEALESFVEEWFKPLAYALTLTREQGYPSVFYGDYYGIPTHGVPAMKSKIDPILEARQKYAYGRQHDYLDHPDVIGWTREGDSSHPKSGLATLITDGPGGSKRMYAGLKNAGETWYDITGNRSDTVKIGSDGWGEFHVNDGSVSIYVQK

SEQ ID NO: 26633 - protein, 485 aa, Bacillus sp.
HHNGTNGTMMQYFEWYLPNDGNHWNRLNSDASNLKSKGITAVWIPPAWKGTSQNDVGYGAYDLYDLGEFNQKGTVRTKYGTRSQLQAAVTSLKNNGIQVYGDVVMNHKGGADATEMVRAVEVNPNNRNQEVTGEYTIEAWTRFDFPGRGNTHSSFKWRWYHFDGVDWDQSRDLQNRIYKFRGHGKAWDWEVDTEFGNYDYLMYADYDMDHPEVVNELRNWGVWYTNTLGLDGFRIDAVKHIKYSFTRDWINHVRSATGKNMFAVAEFWKNDLGAIENYLQKTNWNHSVFDVPLHYNLYNASKSGGNYDMRNIFNGTVVQRHPSHAVTFVDNHDSQPEEALESFVEEWFKPLAYALTLTREQGYPSVFYGDYYGIPTHGVPAMRSKIDPILEARQKYAYGPQHDYLDHPDVIGWTREGDSSHPKSGLATLITDGPGGSKRMYAGLKNAGETWYDITGNRSDTVKIGSDGWGEFHVNDGSVSIYVQK

SEQ ID NO: 26634 - protein, 485 aa, Synthetic construct
HHNGTNGTMMQYFEWYLPNDGNHWNRLNSDASNLKSKGITAVWIPPAWKGASQNDVGYGAYDLYDLGEFNQKGTVRTKYGTRSQLQAAVTSLKNNGIQVYGDVVMNHKGGADATEMVRAVEVNPNNRNQEVTGEYTIEAWTRFDFPGRGNTHSSFKWRWYHFDGVDWDQSRRLNNRIYKFRGHGKAWDWEVDTENGNYDYLMYADIDMDHPEVVNELRNWGVWYTNTLGLDGFRIDAVKHIKYSFTRDWINHVRSATGKNMFAVAEFWKNDLGAIENYLQKTNWNHSVFDVPLHYNLYNASKSGGNYDMRNIFNGTVVQRHPSHAVTFVDNHDSQPEEALESFVEEWFKPLAYALTLTREQGYPSVFYGDYYGIPTHGVPAMRSKIDPILEARQKYAYGPQHDYLDHPDVIGWTREGDSSHPKSGLATLITDGPGGSKRMYAGLKNAGEVWYDITGNRSDTVKIGSDGWGEFHVNDGSVSIYVQK

SEQ ID NO: 26635 - protein, 485 aa, Synthetic construct
HHNGTNGTMMQYFEWYLPNDGNHWNRLNSDASNLKSKGITAVWIPPAWKGASQNDVGYGAYDLYDLGEFNQKGTVRTKYGTRSQLQAAVTSLKNNGIQVYGDVVMNHKGGADATEMVRAVEVNPNNRNQEVSGEYTIEAWTRFDFPGRGNTHSSFKWRWYHFDGVDWDQSRRLNNRIYKFRGHGKAWDWEVDTENGNYDYLMYADIDMDHPEVVNELRNWGVWYTNTLGLDGFRIDAVKHIKYSFTRDWINHVRSATGKNMFAVAEFWKNDLGAIENYLQKTNWNHSVFDVPLHYNLYNASKSGGNYDMRNIFNGTVVQRHPSHAVTFVDNHDSQPEEALESFVEEWFKPLAYALTLTREQGYPSVFYGDYYGIPTHGVPAMRSKIDPILEARQKYAYGPQHDYLDHPDVIGWTREGDSSHPKSGLATLITDGPGGSKRMYAGLKNAGETWYDITGNRSDTVKIGSDGWGEFHVNDGSVSIYVQK

SEQ ID NO: 26636 - protein, 485 aa, Bacillus sp.
HHNGTNGTMMQYFEWYLPNDGNHWNRLNSDASNLKSKGITAVWIPPAWKGASQNDVGYGAYDLYDLGEFNQKGTVRTKYGTRSQLQAAVTSLKNNGIQVYGDVVMNHKGGADATEMVRAVEVNPNNRNQEVTGEYTIEAWTRFDFPGRGNTHSSFKWRWYHFDGVDWDQSRQFYNRIYKFRGHGKAWDWEVDTEFGNYDYLMYADYDMDHPEVVNELRNWGVWYTNTLGLDGFRIDAVKHIKYSFTRDWINHVRSATGKNMFAVAEFWKNDLGAIENYLQKTNWNHSVFDVPLHYNLYNASKSGGNYDMRNIFNGTVVQRHPSHAVTFVDNHDSQPEEALESFVEEWFKPLAYALTLTREQGYPSVFYGDYYGIPTHGVPAMRSKIDPILEARQKYAYGPQHDYLDHPDVIGWTREGDSSHPKSGLATLITDGPGGSKRMYAGLKNAGETWYDITGNRSDTVKIGSDGWGEFHVNDGSVSIYVQK

SEQ ID NO: 26637 - protein, 483 aa, Bacillus sp.
HHNGTNGTMMQYFEWYLPNDGNHWNRLNSDASNLKSKGITAVWIPPAWKGTSQNDVGYGAYDLYDLGEFNQKGTVRTKYGTRSQLQAAVTSLKNNGIQVYGDVVMNHKGGADATEMVRAVEVNPNNRNQEVTGEYTIEAWTRFDFPGRGNTHSSFKWRWYHFDGVDWDQSRDLQNRIYKFRGKAWDWEVDTEFGNYDYLMYADYDMDHPEVVNELRNWGVWYTNTLGLDGFRIDAVKHIKYSFTRDWINHVRSATGKNMFAVAEFWKNDLGAIENYLQKTNWNHSVFDVPLHYNLYNASKSGGNYDMRNIFNGTVVQRHPSHAVTFVDNHDSQPEEALESFVEEWFKPLAYALTLTREQGYPSVFYGDYYGIPTHGVPAMRSKIDPILEARQKYAYGPQHDYLDHPDVIGWTREGDSSHPKSGLATLITDGPGGSKRMYAGLKNAGETWYDITGNRSDTVKIGSDGWGEFHVNDGSVSIYVQK

SEQ ID NO: 26638 - protein, 485 aa, Synthetic construct
HHNGTNGTMMQYFEWYLPNDGNHWNRLNSDASNLKSKGITAVWIPPAWKGASQNDVGYGAYDLYDLGEFNQKGTVRTKYGTRSQLQAAVTSLKNNGIQVYGDVVMNHKGGADATEMVRAVEVNPNNRNQEVTGEYTIEAWTRFDFPGRGNTHSSFKWRWYHFDGVDWDQSRRLNNRIYKFRGHGKAWDWEVDTENGNYDYLMYADIDMDHPEVVNELRNWGVWYTNTLGLDGFRIDAVKHIKYSFTRDWINHVRSATGKNMFAVAEFWKNDLGAIENYLQKTNWNHSVFDVPLHYNLYNASKSGGNYDMRNIFNGTVVQRHPSHAVTFVDNHDSQPEEALESFVEEWFKPLAYALTLTREQGYPSVFYGDYYGIPTHGVPAMRSKIDPILEARQKYAYGPQHDYLDHPDVIGWTREGDSSHPNSGLATLITDGPGGSKRMYAGLKNAGETWYDITGNRSDTVKIGSDGWGEFHVNDGSVSIYVQK

SEQ ID NO: 26639 - protein, 509 aa, Bacillus
YTIIATLIISFFTPFSTAQANTAPVNGTMMQYFEWDLPNDGTLWTKVKNEASSLSALGITALWLPPAYKGTSQADVGYGVYDLYDLGEFNQKGTIRTKYGTKTQYLQAIQAAKSAGMQVYADVVFNHKAGADSTEWVDAVEVNPSNRNQETSGTYQIQAWTKFDFPGRGNTYSSFKWRWYHFDGTDWDESRKLNRIYKFRGTGKAWDWEVDTENGNYDYLMFADLDMDHPEVVAELKNWGKWYVNTTNVDGFRLDAVKHIKYSFFPDWLSYVRNQTGKNLFAVGEFWGYDVNKLHNYITKTNGAMSLFDAPLHNNFYIASKSSGYFDMRYLLNNTLMKDQPALAVTLVDNHDTQPGQSLQSWVEPWFKPLAYAFILTRQEGYPCVFYGDYYGIPKYNIPGLKSKIDPLLIARRDYAYGTQRDYIDHQDIIGWTREGIDAKPNSGLAALITDGPGGSKWMYVGKRHAGKVFYDLTGNRSDTVTINADGWGEFKVNGGSVSIWVAKTSNVT

SEQ ID NO: 26640 - protein, 482 aa, Bacillus sp.
HHNGTNGTMMQYFEWYLPNDGNHWNRLNSDASNLKSKGITAVWIPPAWKGASQNDVGYGAYDLYDLGEFNQKGTVRTKYGTRSQLQAAVTSLKNNGIQVYGDVVMNHKGGADATEMVRAVEVNPNNRNQEVTGEYTIEAWTRFDFPGRGNTHSSFKWRWYHFDGVDWDQSRQLNRIYKFRGKAWDWEVDTEFGNYDYLMYADYDMDHPEVVNELRNWGVWYTNTLGLDGFRIDAVKHIKYSFTRDWINHVRSATGKNMFAVAEFWKNDLGAIENYLQKTNWNHSVFDVPLHYNLYNASKSGGNYDMRNIFNGTVVQRHPSHAVTFVDNHDSQPEEALESFVEEWFKPLAYALTLTREQGYPSVFYGDYYGIPTHGVPAMRSKIDPILEARQKYAYGPQHDYLDHPDVIGWTREGDSSHPKSGLATLITDGPGGSKRMYAGLKNAGETWYDITGNRSDTVKIGSDGWGEFHVNDGSVSIYVQK

SEQ ID NO: 26641 - protein, 482 aa, Bacillus sp.
HHNGTNGTMMQYFEWYLPNDGNHWNRLNSDASNLKSKGITAVWIPPAWKGTSQNDVGYGAYDLYDLGEFNQKGTVRTKYGTRSQLQAAVTSLKNNGIQVYGDVVMNHKGGADATEMVRAVEVNPNNRNQEVTGEYTIEAWTRFDFPGRGNTHSSFKWRWYHFDGVDWDQSRNNNRIYKFRGKAWDWEVDTEFGNYDYLMYADYDMDHPEVVNELRNWGVWYTNTLGLDGFRIDAVKHIKYSFTRDWINHVRSATGKNMFAVAEFWKNDLGAIENYLQKTNWNHSVFDVPLHYNLYNASKSGGNYDMRNIFNGTVVQRHPSHAVTFVDNHDSQPEEALESFVEEWFKPLAYALTLTREQGYPSVFYGDYYGIPTHGVPAMRSKIDPILEARQKYAYGPQHDYLDHPDVIGWTREGDSSHPKSGLATLITDGPGGSKRMYAGLKNAGETWYDITGNRSDTVKIGSDGWGEFHVNDGSVSIYVQK

SEQ ID NO: 26642 - protein, 482 aa, Synthetic construct
HNGTNGTMMQYFEWYLPNDGNHWNRLRSDASNLKDKGISAVWIPPAWKGTSQADVGYGAYDLYDLGEFNQKGTIRTKYGTRNQLQAAVNALKSNGIQVYGDVVMNHKAGADATEMVNAVEVNPNNRNQEVSGDYTIEAYTKFDFPGRGNTHSNFKWRWYHFDGVDWDQSRSLNNRIYKFRGKGWDWPVDTEFGNYDYLMYADLDMDHPEVVNELRNWGVWYTNTLGLDGFRIDAVKHIKFSFTRDWINHVRSATGKNMFAVAEYWKNDLGAIENYLNFTNWNHSVFDVPLHYNLYSASNSGGNYDMRQIFNGTVVQKHPMHAVTFVDNHDTQPEESLESFVEEWFKPLAYALILTRESGYPSVFYGDYYGIPTHGVPAMKSKIDPILEARQKYAYGRQHDYLDHHDIVGWTREGDSSHPNSGLATLITDGPGGAKRMYVGRQNAGETWHDITGNRSEPVVINSEGWGTFHVNKGSVSIYVQR

SEQ ID NO: 26643 - protein, 484 aa, Bacillus sp.
HHNGTNGTMMQYFEWYLPNDGNHWNRLNSDASNLKSKGITAVWIPPAWKGASQNDVGYGAYDLYDLGEFNQKGTVRTKYGTRSQLQAAVTSLKNNGIQVYGDVVMNHKGGADATEMVRAVEVNPNNRNQEVTGEYTIEAWTRFDFPGRGNTHSSFKWRWYHFDGVDWDQSRQLNRIYKFRGHGKAWDWEVDTEFGNYDYLMYADYDMDHPEVVNELRNWGVWYTNTLGLDGFRIDAVKHIKYSFTRDWINHVRSATGKNMFAVAEFWKNDLGAIENYLQKTNWNHSVFDVPLHYNLYNASKSGGNYDMRNIFNGTVVQRHPSHAVTFVDNHDSQPEEALESFVEEWFKPLAYALTLTREQGYPSVFYGDYYGIPTHGVPAMRSKIDPILEARQKYAYGPQHDYLDHPDVIGWTREGDSSHPKSGLATLITDGPGGSKRMYAGLKNAGETWYDITGNRSDTVKIGSDGWGEFHVNDGSVSIYVQK

SEQ ID NO: 26644 - protein, 484 aa, Synthetic construct
HHNGTNGTMMQYFEWYLPNDGNHWNRLNSDASNLKSKGITAVWIPPAWKGASQNDVGYGAYDLYDLGEFNQKGTVRTKYGTRSQLQAAVTSLKNNGIQVYGDVVMNHKGGADATEMVRAVEVNPNNRNQEVTGEYTIEAWTRFDFPGRGNTHSSFKWRWYHFDGVDWDQSRRLNRIYKFRGHGKAWDWEVDTENGNYDYLMYADIDMDHPEVVNELRNWGVWYTNTLGLDGFRIDAVKHIKYSFTRDWINHVRSATGKNMFAVAEFWKNDLGAIENYLQKTNWNHSVFDVPLHYNLYNASKSGGNYDMRNIFNGTVVQRHPSHAVTFVDNHDSQPEEALESFVEEWFKPLAYALTLTREQGYPSVFYGDYYGIPTHGVPAMRSKIDPILEARQKYAYGPQHDYLDHPDVIGWTREGDSSHPKSGLATLITDGPGGSKRMYAGLKNAGETWYDITGNRSDTVKIGSDGWGEFHVNDGSVSIYVQK

SEQ ID NO: 26645 - protein, 484 aa, Bacillus sp.
HHNGTNGTMMQYFEWYLPNDGNHWNRLNSDASNLKSKGITAVWIPPAWKGTSQNDVGYGAYDLYDLGEFNQKGTVRTKYGTRSQLQAAVTSLKNNGIQVYGDVVMNHKGGADATEMVRAVEVNPNNRNQEVTGEYTIEAWTRFDFPGRGNTHSSFKWRWYHFDGVDWDQSRNNNRIYKFRGHGKAWDWEVDTEFGNYDYLMYADYDMDHPEVVNELRNWGVWYTNTLGLDGFRIDAVKHIKYSFTRDWINHVRSATGKNMFAVAEFWKNDLGAIENYLQKTNWNHSVFDVPLHYNLYNASKSGGNYDMRNIFNGTVVQRHPSHAVTFVDNHDSQPEEALESFVEEWFKPLAYALTLTREQGYPSVFYGDYYGIPTHGVPAMRSKIDPILEARQKYAYGPQHDYLDHPDVIGWTREGDSSHPKSGLATLITDGPGGSKRMYAGLKNAGETWYDITGNRSDTVKIGSDGWGEFHVNDGSVSIYVQK

SEQ ID NO: 26646 - protein, 481 aa, Bacillus licheniformis
VNGTLMQYFEWYTPNDGQHWKRLQNDAEHLSDIGITAVWIPPAYKGTSQADVGYGAYDLYDLGEFHQKGTVRTKYGTKGELQSAIKSLHSRDINVYGDVVINHKGGADATEDVTAVEVDPADRNRVISGEHLIKAWTHFHFPGRGSTYSDFKWHWYHFDGTDWDESRKLNRIYKFQGKAWDWEVSNENGNYDYLMYADIDYDHPDVAAEIKRWGTWYANQLQLDGFRLDAVKHIKFSFLRDWVNHVREKTGKEMFTVAEYWQNDLGALENYLNKTNFNHSVFDVPLHYQFHAASTQGGGYDMRKLLNGTVVSKHPLKSVTFVDNHDTQPGQSLESTVQTWFKPLAYAFILTRESGYPQVFYGDMYGTKGDSQREIPALKHKIEPILKARKQYAYGAQHDYFDHHDIVGWTREGDSSVANSGLAALITDGPGGAKRMYVGRQNAGETWHDITGNRSEPVVINSEGWGEFHVNGGSVSIYVQR

SEQ ID NO: 26647 - protein, 481 aa, Bacillus amyloliquefaciens
VNGTLMQYFEWYTPNDGQHWKRLQNDAEHLSDIGITAVWIPPAYKGTSQADVGYGAYDLYDLGEFHQKGTVRTKYGTKGELQSAIKSLHSRDINVYGDVVINHKGGADATEDVTAVEVDPADRNRVISGEHLIKAWTHFHFPGRGSTYSDFKWHWYHFDGTDWDESRKLNRIYKFQGKAWDWEVSNENGNYDYLMYADIDYDHPDVAAEIKRWGTWYANELQLDGFRLDAVKHIKFSFLRDWVNHVREKTGKEMFTVAEYWQNDLGALENYLNKTNFNHSVFDVPLHYQFHAASTQGGGYDMRKLLNGTVVSKHPLKSVTFVDNHDTQPGQSLESTVQTWFKPLAYAFILTRESGYPQVFYGDMYGTKGDSQREIPALKHKIEPILKARKQYAYGAQHDYFDHHDIVGWTREGDSSVANSGLAALITDGPGGAKRMYVGRQNAGETWHDITGNRSEPVVINSEGWGNFHVNGGSVSIYVQR

SEQ ID NO: 26648 - protein, 481 aa, Bacillus licheniformis
VNGTLMQYFEWYTPNDGQHWKRLQNDAEHLSDIGITAVWIPPAYKGTSQADVGYGAYDLYDLGEFHQKGTVRTKYGTKGELQSAIKSLHSRDINVYGDVVINHKGGADATEDVTAVEVDPADRNRVISGEHLIKAWTHFHFPGRGSTYSDFKWHWYHFDGTDWDESRKLNRIYKFQGKAWDWEVSNENGNYDYLTYADIDYDHPDVAAEIKRWGTWYANELQLDGFRLDAVKHIKFSFLRDWVNHVREKTGKEMFTVAEYWQNDLGALENYLNKTNFNHSVFDVPLHYQFHAASTQGGGYDMRKLLNGTVVSKHPLKSVTFVDNHDTQPGQSLESTVQTWFKPLAYAFILTRESGYPQVFYGDMYGTKGDSQREIPALKHKIEPILKARKQYAYGAQHDYFDHHDIVGWTREGDSSVANSGLAALITDGPGGAKRMYVGRQNAGETWHDITGNRSEPVVINSEGWGEFHVNGGSVSIYVQR

SEQ ID NO: 26649 - protein, 481 aa, Bacillus licheniformis
LNGTLMQYFEWYTPNDGQHWKRLQNDAEHLSDIGITAVWIPPAYKGTSQADVGYGAYDLYDLGEFHQKGTVRTKYGTKGELQSAIKSLHSRDINVYGDVVINHKGGADATEDVTAVEVDPADRNRVISGEHLIKAWTHFHFPGRGSTYSDFKWHWYHFDGTDWDESRKLNRIYKFQGKAWDWEVSNENGNYDYLMYADIDYDHPDVAAEIKRWGTWYANELQLDGFRLDAVKHIKFSFLRDWVNHVREKTGKEMFTVAEYWQNDLGALENYLNKTNFNHSVFDVPLHYQFHAASTQGGGYDMRKLLNGTVVSKHPLKSVTFVDNHDTQPGQSLESTVQTWFKPLAYAFILTRESGYPQVFYGDMYGTKGDSQREIPALKHKIEPILKARKQYAYGAQHDYFDHHDIVGWTREGDSSVANSGLAALITDGPGGAKRMYVGRQNAGETWHDITGNRSEPVVINSEGWGEFHVNGGSVSIYVQR

SEQ ID NO: 26650 - protein, 480 aa, Bacillus sp.
APINETMMQYFEWDLPNDGTLWTKVKNEAANLSSLGITALWLPPAYKGTSQSDVGYGVYDLYDLGEFNQKGTIRTKYGTKTQLERAIRSLKANGIQVYADVVFNHKAGADQTEFVDAVEVDPSNRNQEVSGTYQIEAWTKFDFPGRGNTYSSFKWRWYHFDGTDWDESRKLNRIYKFRGKAWDWEVDTENGNYDYLMFADLDMDHPEVVTELKNWGTWYVNTTNIDGFRLDAVKHIKFSFMRDWLGHVRGQTGKNLFAVGEFWSYDVNKLHNYITKTNGSMSLFDAPLHNNFYTASKSSGYFDMRYLLNNTLMKDQPSLAVTLVDNHDTQPGQSLQSWVEPWFKPLAYAFILTRQEGYPCVFYGDYYGIPSDGVPGLKSKIDPLLIARRDYAYGTQRDYIDHQDIIGWTREGIDTKPNSGLAALITDGPGGSKWMYVGKKHAGKVFYDLTGNRSDTVTINADGWGEFKVNGGSVSIWVAK

SEQ ID NO: 26651 - protein, 480 aa, Bacillus sp.
APINETMMQYFEWDLPNDGTLWTKVKNEAANLSSLGITALWLPPAYKGTSQSDVGYGVYDLYDLGEFNQKGTIRTKYGTKTQYIQAIQAAKAAGMQVYADVVFNHKAGADGTEFVDAVEVDPSNRNQEVSGTYQIEAWTKFDFPGRGNTYSSFKWRWYHFDGTDWDESRKLNRIYKFRGKAWDWEVDTENGNYDYLMFADLDMDHPEVVTELKNWGTWYVNTTNIDGFRLDAVKHIKFSFMRDWLTYVRNQTGKNLFAVGEFWSYDVNKLHNYITKTNGSMSLFDAPLHNNFYTASKSSGYFDMRNLLNGTLVQRHPSHAVTLVDNHDTQPGEALESFVQGWFKPLAYAFILTRQEGYPCVFYGDYYGIPSDGVPGLKSKIDPLLIARRDYAYGTQRDYIDHQDIIGWTREGIDTKPNSGLAALITDGPGGSKWMYVGKKHAGKVFYDLTGNRSDTVTINADGWGEFKVNGGSVSIWVAK

SEQ ID NO: 26652 - protein, 482 aa, Bacillus sp.
HHNGTNGTMMQYFEWYLPNDGNHWNRLNSDASNLKSKGITAVWIPPAWKGASQNDVGYGAYDLYDLGEFNQKGTVRTKYGTRSQLQAAVTSLKNNGIQVYGDVVMNHKGGADATEMVRAVEVNPNNRNQEVTGEYTIEAWTRFDFPGRGNTHSSFKWRWYHFDGVDWDQSRRLNNRIYKFRGHGKAWDWEVDTEFGNYDYLMYADYDMDHPEVVNELRNWGVWYTNTLGLDGFRIDAVKHIKYSFTRDWINHVRSATGKNMFAVAEFWKNDLGAIENYLQKTNWNHSVFDVPLHYNLYNASKSGGNYDMRNIFNGTVVQRHPSHAVTFVDNHDSQPEEALESFVEEWFKPLAYALTLTREQGYPSVFYGDYYGIPTHGVPAMRSKIDPILEARQKYAYGPQHDYLDHPDVIGWTREGDSSHPKSGLATLITDGPGGSKRMYAGLKNAGETWYDITGNRSDTVKIGSDGWGEFHVNDGSVSIY

SEQ ID NO: 26653 - protein, 480 aa, Bacillus sp.
HHNGTNGTMMQYFEWYLPNDGNHWNRLNSDASNLKSKGITAVWIPPAWKGASQNDVGYGAYDLYDLGEFNQKGTVRTKYGTRSQLQAAVTSLKNNGIQVYGDVVMNHKGGADATEMVRAVEVNPNNRNQEVTGEYTIEAWTRFDFPGRGNTHSSFKWRWYHFDGVDWDQSRRLNNRIYKFRGKAWDWEVDTEFGNYDYLMYADYDMDHPEVVNELRNWGVWYTNTLGLDGFRIDAVKHIKYSFTRDWINHVRSATGKNMFAVAEFWKNDLGAIENYLQKTNWNHSVFDVPLHYNLYNASKSGGNYDMRNIFNGTVVQRHPSHAVTFVDNHDSQPEEALESFVEEWFKPLAYALTLTREQGYPSVFYGDYYGIPTHGVPAMRSKIDPILEARQKYAYGPQHDYLDHPDVIGWTREGDSSHPKSGLATLITDGPGGSKRMYAGLKNAGETWYDITGNRSDTVKIGSDGWGEFHVNDGSVSIY

SEQ ID NO: 26654 - protein, 482 aa, Synthetic construct
APVNGTMMQYFEWDLPNDGTLWTKVKNEASSLSALGITALWLPPAYKGTSQADVGYGVYDLYDLGEFNQKGTIRTKYGTKTQYLQAIQAAKSAGMQVYADVVFNHKAGADATEDVTAVEVNPANRNQETSEEYQIKAWTDFRFPGRGNTYSDFKWHWYHFDGADWDESRKISRIFKFRGEGKAWDWEVSSENGNYDYLMYADVDMDHPEVVAELKNWGKWYVNTTNVDGFRLDAVKHIKYSFFPDWLSYVRNQTGKNLFAVGEFWGYDVNKLHNYITKTNGAMSLFDAPLHNNFYIASKSSGYFDMRYLLNNTLMKDQPALAVTLVDNHDTQPGQSLQSWVEPWFKPLAYAFILTRQEGYPCVFYGDYYGIPKYNIPGLKSKIDPLLIARRDYAYGTQRDYIDHQDIIGWTREGIDAKPNSGLAALITDGPGGSKWMYVGKRHAGKVFYDLTGNRSDTVTINADGWGEFKVNGGSVSIWVAK

SEQ ID NO: 26655 - protein, 491 aa, Geobacillus stearothermophilus
AXXNGTMMQYFEWYLPNDGQHWXRLXNDAXNLSSXGITALWIPPAYKGTSQSDVGYGAYDLYDLGEFNQKGTVRTKYGTKAQLXXAIXALHAXGIQVYGDVVMNHKGGADGTEXVXAVEVNPSDRNQEISGXYXIXAWTKFDFPGRGNTYSXFKWRWYHFDGVDWDESRKLNNRIYKFRGXGKAWDWEVDTENGNYDYLMYADIDMDHPEVVXELKNWGXWYXNTLNLDGFRLDAVKHIKFSFXXDWLSHVRSXTGKXLFTVGEYWXXDIGALENYLXKTNWXMSLFDVPLHYNFYXASKSGGAYDMRXLLXGTLVXXHPXXAVTFVDNHDTQPGQALESWVDXWFKPLAYAFILTREXGYPXVFYGDYYGIPQYNXXEIPSLKSKIDPLLXARRXYAYGTQHDYLDHXDIIGWTREGXTSKPNSGLAALITDGPGGSKWMYVGKQXAGXVWYDLTGNRSDTVTINSDGWGEFXVNGGSVSVWVXRKTTVS

SEQ ID NO: 26656 - protein, 478 aa, Alicyclobacillus
APINETMMQYFEWDLPNDGTLWTKVKNEAANLSSLGITALWLPPAYKGTSQSDVGYGVYDLYDLGEFNQKGTIRTKYGTKTQYIQAIQAAKAAGMQVYADVVFNHKAGADGTEFVDAVEVDPSNRNQETSGTYQIQAWTKFDFPGRGNTYSSFKWRWYHFDGTDWDESRKLNRIYKFTGKAWDWEVDTENGNYDYLLFADLDMDHPEVVTELKNWGTWYVNTTNIDGFRLDAVKHIKYQFFPDWLTYVRNQTGKNLFAVGEFWSYDVNKLHNYITKTNGSMSLFDAPLHNNFYTASKSSGYFDMRYLLNNTLMKDQPSLAVTLVDNHDTQPGQSLQSWVEPWFKPLAYAFILTRQEGYPCVFYGDYYGIPKYNIPGLKSKIDPLLIARRDYAYGTQHDYLDNQDVIGWTREGDSAHAGSGLATVMSDGPGGSKTMYVGTAHAGQVFKDITGNRTDTVTINSAGNGTFPCNGGSVSIWV

SEQ ID NO: 26657 - protein, 480 aa, Bacillus sp.
APINETMMQYFEWDLPNDGTLWTKVKNEAANLSSLGITALWLPPAYKGTSQSDVGYGVYDLYDLGEFNQKGTIRTKYGTKTQYIQAIQAAKAAGMQVYADVVFNHKAGADGTEFVDAVEVDPSNRNQETSGTYQIQAWTKFDFPGRGNTYSSFKWRWYHFDGTDWDESRKLNRIYKFRSTGKAWDWEVDTENGNYDYLLFADLDMDHPEVVTELKNWGTWYVNTTNIDGFRLDAVKHIKYQFFPDWLTYVRNQTGKNLFAVGEFWSYDVNKLHNYITKTNGSMSLFDAPLHNNFYTASKSSGYFDMRYLLNNTLMKDQPSLAVTLVDNHDTQPGQSLQSWVEPWFKPLAYAFILTRQEGYPCVFYGDYYGIPKYNIPGLKSKIDPLLIARRDYAYGTQHDYLDNQDVIGWTREGDSAHAGSGLATVMSDGPGGSKTMYVGTAHAGQVFKDITGNRTDTVTINSAGNGTFPCNGGSVSIWV

SEQ ID NO: 26658 - protein, 485 aa, Bacillus sp.
HHNGTNGTMMQYFEWYLPNDGNHWNRLNSDASNLKSKGITAVWIPPAWKAASQNDVGYGAYDLYDLGEFNQKGTVRTKYGTRSQLQAAVTSLKNNGIQVYGDVVMNHKGGADATEMVRAVEVNPNNRNQEVTGEYTIEAWTRFDFPGRGNTHSSFKWRWYHFDGVDWDQSRDLQNRIYKFRGHGKAWDWEVDTEFGNYDYLMYADYDMDHPEVVNELRNWGVWYTNTLGLDGFRIDAVKHIKYSFTRDWINHVRSATGKNMFAVAEFWKNDLGAIENYLQKTNWNHSVFDVPLHYNLYNASKSGGNYDMRNIFNGTVVQAHPMHAVTFVDNHDSQPEEALESFVEEWFKPLAYALTLTREQGYPSVFYGDYYGIPTHGVPAMRSKIDPILEARQKYAYGPQHDYLDHPDVIGWTREGDSSHPKSGLATLITDGPGGSKRMYAGLKNAGETWYDITGNRSDTVKIGSDGWGEFHVNYGSVSIYVQK

SEQ ID NO: 26659 - protein, 485 aa, Bacillus sp.
HHNGTNGTMMQYFEWYLPNDGNHWNRLNSDASNLKSKGITAVWIPPAWKGASQNDVGYGAYDLYDLGEFNQKGTVRTKYGTRSQLQAAVTSLKNNGIQVYGDVVMNHKGGADATEMVDAVEVNPNNRNQEVTGEYTIEAWTRFDFPGRGNTHSSFKWRWYHFDGVDWDQSRQLDNRIYKFRGHGKAWDWEVDTEFGNYDYLMYADYDMDHPEVVNELRNWGVWYTNTLGLDGFRIDAVKHIKYSFTRDWINHVRSATGKNMFAVAEFWKNDLGAIENYLQKTNWNHSVFDVPLHYNLYNASKSGGNYDMRNIFNGTVVQRHPSHAVTFVDNHDSQPEEALESFVEEWFKPLAYALTLTREQGYPSVFYGDYYGIPTHGVPAMRSKIDPILEARQKYAYGPQHDYLDHPDVIGWTREGDSSHPKSGLATLITDGPGGSKRMYAGLKNAGETWYDITGNRSDTVKIGSDGWGEFHVNDGSVSIYVQK

SEQ ID NO: 26660 - protein, 483 aa, Bacillus sp.
HHNGTNGTMMQYFEWYLPNDGNHWNRLNSDASNLKSKGITAVWIPPAWKATSQNDVGYGAYDLYDLGEFNQKGTVRTKYGTRSQLQAAVTSLKNNGIQVYGDVVMNHKGGADATEMVRAVEVNPNNRNQEVTGEYTIEAWTRFDFPGRGNTHSSFKWRWYHFDGVDWDQSRRFTNRIYKFRGKAWDWEVDTEFGNYDYLMYADYDMDHPEVVNELRNWGVWYTNTLGLDGFRIDAVKHIKYSFTRDWINHVRSATGKNMFAVAEFWKNDLGAIENYLQKTNWNHSVFDVPLHYNLYNASKSGGNYDMRNIFNGTVVQRHPSHAVTFVDNHDSQPEEALESFVEEWFKPLAYALTLTREQGYPSVFYGDYYGIPTHGVPAMRSKIDPILEARQKYAYGPQHDYLDHPDVIGWTREGDSSHPKSGLATLITDGPGGSKRMYAGLKNAGETWYDITGNRSDTVKIGSDGWGEFHVNDGSVSIYVQK

SEQ ID NO: 26661 - protein, 485 aa, Bacillus sp.
HHNGTNGTMMQYFEWYLPNDGNHWNRLNSDASNLKSKGITAVWIPPAWKGASQNDVGYGAYDLYDLGEFNQKGTVRTKYGTRSQLQAAVTSLKNNGIQVYGDVVMNHKGGADATEMVRAVEVNPNNRNQEVTGEYTIEAWTRFDFPGRGNTHSSFKWRWYHFDGVDWDQSRRFNNRIYKFRGHGKAWDWEVDTEFGNYDYLMYADYDMDHPEVVNELRNWGVWYTNTLGLDGFRIDAVKHIKYSFTRDWINHVRSATGKNMFAVAEFWKNDLGAIENYLQKTNWNHSVFDVPLHYNLYNASKSGGNYDMRNIFNGTVVQRHPSHAVTFVDNHDSQPEEALESFVEEWFKPLAYALTLTREQGYPSVFYGDYYGIPTHGVPAMRSKIDPILEARQKYAYGPQHDYLDHPDVIGWTREGDSSHPKSGLATLITDGPGGSKRMYAGLKNAGETWYDITGNRSDTVKIGSDGWGEFHVNDGSVSIYVQK

SEQ ID NO: 26662 - protein, 485 aa, Synthetic construct
HHNGTNGTMMQYFEWYLPNDGNHWNRLNSDASNLKSKGITAVWIPPAWKGASQNDVGYGAYDLYDLGEFNQKGTVRTKYGTRSQLQAAVTSLKNNGIQVYGDVVMNHKGGADATEMVRAVEVNPNNRNQEVTGEYTIEAWTGFDFPGRGNTHSSFKWRWYHFDGVDWDQSRRLNNRIYKFRGHGKAWDWEVDTENGNYDYLMYADIDMDHPEVVNELRNWGVWYTNTLGLDGFRIDAVKHIKYSFTRDWINHVRSATGKNMFAVAEFWKNDLGAIENYLQKTNWNHSVFDVPLHYNLYNASKSGGNYDMRNIFNGTVVQRHPSHAVTFVDNHDSQPEEALESFVEEWFKPLAYALTLTREQGYPSVFYGDYYGIPTHGVPAMRSKIDPILEARQKYAYGPQHDYLDHPDVIGWTREGDSSHPKSGLATLITDGPGGSKRMYAGLKNAGETWYDITGNRSDTVKIGSDGWGEFHVNDGSVSIYVQK

SEQ ID NO: 26663 - protein, 483 aa, Bacillus sp.
HHNGTNGTMMQYFEWYLPNDGNHWNRLNSDASNLKSKGITAVWIPPAWKGASQNDVGYGAYDLYDLGEFNQKGTVRTKYGTRSQLQAAVTSLKNNGIQVYGDVVMNHKGGADATEMVRAVEVNPNNRNQEVTGEYTIEAWTRFDFPGRGNTHSSFKWRWYHFDGVDWDQSRRLQNRIYKFRGKAWDWEVDTEFGNYDYLMYADYDMDHPEVVNELRNWGVWYTNTLGLDGFRIDAVKHIKYSFTRDWINHVRSATGKNMFAVAEFWKNDLGAIENYLQKTNWNHSVFDVPLHYNLYNASKSGGNYDMRNIFNGTVVQRHPSHAVTFVDNHDSQPEEALESFVEEWFKPLAYALTLTREQGYPSVFYGDYYGIPTHGVPAMRSKIDPILEARQKYAYGPQHDYLDHPDVIGWTREGDSSHPKSGLATLITDGPGGSKRMYAGLKNAGETWYDITGNRSDTVKIGSDGWGEFHVNDGSVSIYVQK

SEQ ID NO: 26664 - protein, 485 aa, Bacillus sp.
HHNGTNGTMMQYFEWYLPNDGNHWNRLNSDASNLKSKGITAVWIPPAWKGASQNDVGYGAYDLYDLGEFNQKGTVRTKYGTRSQLQAAVTSLKNNGIQVYGDVVMNHKGGADATEMVRAVEVNPNNRNQEVTGEYTIEAWTRFDFPGRGNTHSSFKWRWYHFDGVDWDQSREFDNRIYKFRGHGKAWDWEVDTEFGNYDYLMYADYDMDHPEVVNELRNWGVWYTNTLGLDGFRIDAVKHIKYSFTRDWINHVRSATGKNMFAVAEFWKNDLGAIENYLQKTNWNHSVFDVPLHYNLYNASKSGGNYDMRNIFNGTVVQAHPNHAVTFVDNHDSQPEEALESFVEEWFKPLAYALTLTREQGYPSVFYGDYYGIPTHGVPAMRSKIDPILEARQKYAYGPQHDYLDHPDVIGWTREGDSSHPKSGLATLITDGPGGSKRMYAGLKNAGETWYDITGNRSDTVKIGSDGWGEFHVNDGSVSIYVQK

SEQ ID NO: 26665 - protein, 485 aa, Bacillus sp.
HHNGTNGTMMQYFEWYLPNDGNHWNRLNSDASNLKSKGITAVWIPPAWKGASQNDVGYGAYDLYDLGEFNQKGTVRTKYGTRSQLQAAVTSLKNNGIQVYGDVVMNHKGGADATEMVRAVEVNPNNRNQEVTGEYTIEAWTRFDFPGRGNTHSSFKWRWYHFDGVDWDQSRRLNNRIYKFRGHGKAWDWEVDTEFGNYDYLMYADYDMDHPEVVNELRNWGVWYTNTLGLDGFRIDAVKHIKYSFTRDWINHVRSATGKNMFAVAEFWKNDLGAIENYLQKTNWNHSVFDVPLHYNLYNASKSGGNYDMRNIFNGTVVQRHPSHAVTFVDNHDSQPEEALESFVEEWFKPLAYALTLTREQGYPSVFYGDYYGIPTHGVPAMRSKIDPILEARQKYAYGPQHDYLDHPDVIGWTREGDSSHPKSGLATLITDGPGGSKRMYVGLKNAGETWYDITGNRSDTVKIGSDGWGEFHVNDGSVSIYVQK

SEQ ID NO: 26666 - protein, 483 aa, Bacillus sp.
HHNGTNGTMMQYFEWYLPNDGNHWNRLNSDASNLKSKGITAVWIPPAWKGPSQNDVGYGAYDLYDLGEFNQKGTVRTKYGTRSQLQAAVTSLKNNGIQVYGDVVMNHKGGADATEMVRAVEVNPNNRNQEVTGEYTIEAWTRFDFPGRGNTHSSFKWRWYHFDGVDWDQSRQLDNRIYKFRGKAWDWEVDTEFGNYDYLMYADYDMDHPEVVNELRNWGVWYTNTLGLDGFRIDAVKHIKYSFTRDWINHVRSATGKNMFAVAEFWKNDLGAIENYLQKTNWNHSVFDVPLHYNLYNASKSGGNYDMRNIFNGTVVQRHPSHAVTFVDNHDSQPEEALESFVEEWFKPLAYALTLTREQGYPSVFYGDYYGIPTHGVPAMRSKIDPILEARQKYAYGPQHDYLDHPDVIGWTREGDSSHPKSGLATLITDGPGGSKRMYAGLKNAGETWYDITGNRSDTVKIGSDGWGEFHVNDGSVSIYVQK

SEQ ID NO: 26667 - protein, 483 aa, Bacillus sp.
HHNGTNGTMMQYFEWYLPNDGNHWNRLNSDASNLKSKGITAVWIPPAWKGASQNDVGYGAYDLYDLGEFNQKGTVRTKYGTRSQLQAAVTSLKNNGIQVYGDVVMNHKGGADATEMVRAVEVNPNNRNQEVTGEYTIEAWTRFDFPGRGNTHSSFKWRWYHFDGVDWDQSRQTNNRIYKFRGKAWDWEVDTEFGNYDYLMYADYDMDHPEVVNELRNWGVWYTNTLGLDGFRIDAVKHIKYSFTRDWINHVRSATGKNMFAVAEFWKNDLGAIENYLQKTNWNHSVFDVPLHYNLYNASKSGGNYDMRNIFNGTVVQVHPSHAVTFVDNHDSQPEEALESFVEEWFKPLAYALTLTREQGYPSVFYGDYYGIPTHGVPAMRSKIDPILEARQKYAYGPQHDYLDHPDVIGWTREGDSSHPKSGLATLITDGPGGSKRMYAGLKNAGETWYDITGNRSDTVKIGSDGWGEFHVNYGSVSIYVQK

SEQ ID NO: 26668 - protein, 483 aa, Bacillus sp.
HHNGTNGTMMQYFEWYLPNDGNHWNRLNSDASNLKSKGITAVWIPPAWKGASQNDVGYGAYDLYDLGEFNQKGTVRTKYGTRSQLQAAVTSLKNNGIQVYGDVVMNHKGGADATEMVRAVEVNPNNRNQEVTGEYTIEAWTRFDFPGRGNTHSSFKWRWYHFDGVDWDQSRQITNRIYKFRGKAWDWEVDTEFGNYDYLMYADYDMDHPEVVNELRNWGVWYTNTLGLDGFRIDAVKHIKYSFTRDWINHVRSATGKNMFAVAEFWKNDLGAIENYLQKTNWNHSVFDVPLHYNLYNASKSGGNYDMRNIFNGTVVQRHPSHAVTFVDNHDSQPEEALESFVEEWFKPLAYALTLTREQGYPSVFYGDYYGIPTHGVPAMRSKIDPILEARQKYAYGPQHDYLDHPDVIGWTREGDSSHPKSGLATLITDGPGGSKRMYAGLKNAGETWYDITGNRSDTVKIGSDGWGEFHVNDGSVSIYVQK

SEQ ID NO: 26669 - protein, 485 aa, Bacillus sp.
HHNGTNGTMMQYFEWYLPNDGNHWNRLNSDASNLKSKGITAVWIPPAWKAASQNDVGYGAYDLYDLGEFNQKGTVRTKYGTRSQLQAAVTSLKNNGIQVYGDVVMNHKGGADATEMVRAVEVNPNNRNQEVTGEYTIEAWTRFDFPGRGNTHSSFKWRWYHFDGVDWDQSRQTQNRIYKFRGHGKAWDWEVDTEFGNYDYLMYADYDMDHPEVVNELRNWGVWYTNTLGLDGFRIDAVKHIKYSFTRDWINHVRSATGKNMFAVAEFWKNDLGAIENYLQKTNWNHSVFDVPLHYNLYNASKSGGNYDMRNIFNGTVVQRHPSHAVTFVDNHDSQPEEALESFVEEWFKPLAYALTLTREQGYPSVFYGDYYGIPTHGVPAMRSKIDPILEARQKYAYGPQHDYLDHPDVIGWTREGDSSHPKSGLATLITDGPGGSKRMYAGLKNAGETWYDITGNRSDTVKIGSDGWGEFHVNDGSVSIYVQK

SEQ ID NO: 26670 - protein, 483 aa, Bacillus sp.
HHNGTNGTMMQYFEWYLPNDGNHWNRLNSDASNLKSKGITAVWIPPAWKGISQNDVGYGAYDLYDLGEFNQKGTVRTKYGTRSQLQAAVTSLKNNGIQVYGDVVMNHKGGADATEMVRAVEVNPNNRNQEVTGEYTIEAWTRFDFPGRGNTHSSFKWRWYHFDGVDWDQSREFNNRIYKFRGKAWDWEVDTEFGNYDYLMYADYDMDHPEVVNELRNWGVWYTNTLGLDGFRIDAVKHIKYSFTRDWINHVRSATGKNMFAVAEFWKNDLGAIENYLQKTNWNHSVFDVPLHYNLYNASKSGGNYDMRNIFNGTVVQRHPSHAVTFVDNHDSQPEEALESFVEEWFKPLAYALTLTREQGYPSVFYGDYYGIPTHGVPAMRSKIDPILEARQKYAYGPQHDYLDHPDVIGWTREGDSSHPKSGLATLITDGPGGSKRMYAGLKNAGETWYDITGNRSDTVKIGSDGWGEFHVNDGSVSIYVQK

SEQ ID NO: 26671 - protein, 483 aa, Synthetic construct
HHNGTNGTMMQYFEWYLPNDGNHWNRLNSDASNLKSKGITAVWIPPAWKGASQNDVGYGAYDLYDLGEFNQKGTVRTKYGTRSQLQAAVTSLKNNGIQVYGDVVMNHKGGADATEMVRAVEVNPNNRNQEVTGEYTIEAWTRFDFPGRGNTHSSFKWRWYHFDGVDWDQSRRLNNRIYKFRGKAWDWEVDTENGNYDYLMYADIDMDHPEVVNELRNWGVWYTNTLGLDGFRIDAVKHIKYSFTRDWINHVRSATGKNMFAVAEFWKNDLGAIENYLQKTNWNHSVFDVPLHYNLYNASKSGGNYDMRRIFNGTVVQRHPSHAVTFVDNHDSQPEEALESFVEEWFKPLAYALTLTREQGYPSVFYGDYYGIPTHGVPAMRSKIDPILEARQKYAYGPQHDYLDHPDVIGWTREGDSSHPKSGLATLITDGPGGSKRMYAGLKNAGETWYDITGNRSDTVKIGSDGWGEFHVNDGSVSIYVQK

SEQ ID NO: 26672 - protein, 485 aa, Bacillus sp.
HHNGTNGTMMQYFEWYLPNDGNHWNRLNSDASNLKSKGITAVWIPPAWKAVSQNDVGYGAYDLYDLGEFNQKGTVRTKYGTRSQLQAAVTSLKNNGIQVYGDVVMNHKGGADATEMVRAVEVNPNNRNQEVTGEYTIEAWTRFDFPGRGNTHSSFKWRWYHFDGVDWDQSRQLQNRIYKFRGHGKAWDWEVDTEFGNYDYLMYADYDMDHPEVVNELRNWGVWYTNTLGLDGFRIDAVKHIKYSFTRDWINHVRSATGKNMFAVAEFWKNDLGAIENYLQKTNWNHSVFDVPLHYNLYNASKSGGNYDMRNIFNGTVVQRHPSHAVTFVDNHDSQPEEALESFVEEWFKPLAYALTLTREQGYPSVFYGDYYGIPTHGVPAMRSKIDPILEARQKYAYGPQHDYLDHPDVIGWTREGDSSHPKSGLATLITDGPGGSKRMYAGLKNAGETWYDITGNRSDTVKIGSDGWGEFHVNDGSVSIYVQK

SEQ ID NO: 26673 - protein, 485 aa, Bacillus sp.
HHNGTNGTMMQYFEWYLPNDGNHWNRLNSDASNLKSKGITAVWIPPAWKGTSQNDVGYGAYDLYDLGEFNQKGTVRTKYGTRSQLQAAVTSLKNNGIQVYGDVVMNHKGGADATEMVRAVEVNPNNRNQEVTGEYTIEAWTRFDFPGRGNTHSSFKWRWYHFDGVDWDQSRELTNRIYKFRGHGKAWDWEVDTEFGNYDYLMYADYDMDHPEVVNELRNWGVWYTNTLGLDGFRIDAVKHIKYSFTRDWINHVRSATGKNMFAVAEFWKNDLGAIENYLQKTNWNHSVFDVPLHYNLYNASKSGGNYDMRNIFNGTVVQRHPSHAVTFVDNHDSQPEEALESFVEEWFKPLAYALTLTREQGYPSVFYGDYYGIPTHGVPAMRSKIDPILEARQKYAYGPQHDYLDHPDVIGWTREGDSSHPKSGLATLITDGPGGSKRMYAGLKNAGETWYDITGNRSDTVKIGSDGWGEFHVNDGSVSIYVQK

SEQ ID NO: 26674 - protein, 485 aa, Bacillus sp.
HHNGTNGTMMQYFEWYLPNDGNHWNRLNSDASNLKSKGITAVWIPPAWKGASQNDVGYGAYDLYDLGEFNQKGTVRTKYGTRSQLQAAVTSLKNNGIQVYGDVVMNHKGGADATEMVRAVEVNPNNRNQEVTGEYTIEAWTRFDFPGRGNTHSSFKWRWYHFDGVDWDQSRQLNNRIYKFRGHGKAWDWEVDTEFGNYDYLMYADYDMDHPEVVNELRNWGVWYTNTLGLDGFRIDAVKHIKYSFTRDWINHVRSATGKNMFAVAEFWKNDLGAIENYLQKTNWNHSVFDVPLHYNLYNASKSGGNYDMRNIFNGTVVQRHPSHAVTFVDNHDSQPEEALESFVEEWFKPLAYALTLTREQGYPSVFYGDYYGIPTHGVPAMRSKIDPILEARQKYAYGPQHDYLDHPDVIGWTREGDSSHPKSGLATLITDGPGGSKRMYAGLKNAGETWYDITGNRSDTVKIGSDGWGEFHVNDGSVSIYVQK

SEQ ID NO: 26675 - protein, 485 aa, Bacillus sp.
HHNGTNGTMMQYFEWYLPNDGNHWNRLNSDASNLKSKGITAVWIPPAWKGASQNDVGYGAYDLYDLGEFNQKGTVRTKYGTRSQLQAAVTSLKNNGIQVYGDVVMNHKGGADATEMVRAVEVNPNNRNQEVTGEYTIEAWTRFDFPGRGNTHSSFKWRWYHFDGVDWDQSRRLNNRIYKFRGHGKAWDWEVDTEFGNYDYLMYADYDMDHPEVVNELRNWGVWYTNTLGLDGFRIDAVKHIKYSFTRDWINHVRSATGKNMFAVAEFWKNDLGAIENYLQKTNWNHSVFDVPLHYNLYNASKSGGNYDMRNIFNGTVVQRHPSHAVTFVDNHDSQPEEALESFVEEWFKPLAYALTLTREQGYPSVFYGDYYGIPTHGVPAMKSKIDPILEARQKYAYGPQHDYLDHPDVIGWTREGDSSHPKSGLATLITDGPGGSKRMYAGLKNAGETWYDITGNRSDTVKIGSDGWGEFHVNDGSVSIYVQK

SEQ ID NO: 26676 - protein, 485 aa, Bacillus sp.
HHNGTNGTMMQYFEWYLPNDGNHWNRLNSDASNLKSKGITAVWIPPAWKATSQNDVGYGAYDLYDLGEFNQKGTVRTKYGTRSQLQSAVTSLKNNGIQVYGDVVMNHKGGADATEMVRAVEVNPNNRNQEVTGEYTIEAWTRFDFPGRGNTHSSFKWRWYHFDGVDWDQSRNTDNRIYKFRGHGKAWDWEVDTEFGNYDYLMYADYDMDHPEVVNELRNWGVWYTNTLGLDGFRIDAVKHIKYSFTRDWINHVRSATGKNMFAVAEFWKNDLGAIENYLQKTNWNHSVFDVPLHYNLYNASKSGGNYDMRNIFNGTVVQRHPSHAVTFVDNHDSQPEEALESFVEEWFKPLAYALTLTREQGYPSVFYGDYYGIPTHGVPAMRSKIDPILEARQKYAYGPQHDYLDHPDVIGWTREGDSSHPKSGLATLITDGPGGSKRMYAGLKNAGETWYDITGNRSDTVKIGSDGWGEFHVNDGSVSIYVQK

SEQ ID NO: 26677 - protein, 483 aa, Synthetic construct
HHNGTNGTMMQYFEWYLPNDGNHWNRLNSDASNLKSKGITAVWIPPAWKGASQNDVGYGAYDLYDLGEFNQKGTVRTKYGTRSQLQAAVTSLKNNGIQVYGDVVMNHKGGADATEMVRAVEVNPNNRNQEVTGEYTIEAWTRFDFPGRGNTHSSFKWRWYHFDGVDWDQSRRLSNRIYKFRGKAWDWEVDTENGNYDYLMYADIDMDHPEVVNELRNWGVWYTNTLGLDGFRIDAVKHIKYSFTRDWINHVRSATGKNMFAVAEFWKNDLGAIENYLQKTNWNHSVFDVPLHYNLYNASKSGGNYDMRKLLNGTVVSKHPSKAVTFVDNHDTQPEEALESFVQPWFKPLAYAFILTRESGYPSVFYGDMYGIPTHGIPAMKHKIEPILKARKQYAYGAQHDYLDHHDIVGWTREGDSSHPNSGLATLITDGPGGAKRMYVGRQNAGETWHDITGNRSEPVVINSEGWGEFHVNKGSVSIYVQR

SEQ ID NO: 26678 - protein, 485 aa, Bacillus sp.
HHNGTNGTMMQYFEWYLPNDGNHWNRLNSDASNLKSKGITAVWIPPAWKAASQNDVGYGAYDLYDLGEFNQKGTVRTKYGTRSQLQAAVTSLKNNGIQVYGDVVMNHKGGADATEMVRAVEVNPNNRNQEVTGEYTIEAWTRFDFPGRGNTHSSFKWRWYHFDGVDWDQSREFQNRIYKFRGHGKAWDWEVDTEFGNYDYLMYADYDMDHPEVVNELRNWGVWYTNTLGLDGFRIDAVKHIKYSFTRDWINHVRSATGKNMFAVAEFWKNDLGAIENYLQKTNWNHSVFDVPLHYNLYNASKSGGNYDMRNIFNGTVVQRHPSHAVTFVDNHDSQPEEALESFVEEWFKPLAYALTLTREQGYPSVFYGDYYGIPTHGVPAMRSKIDPILEARQKYAYGPQHDYLDHPDVIGWTREGDSSHPKSGLATLITDGPGGSKRMYAGLKNAGETWYDITGNRSDTVKIGSDGWGEFHVNDGSVSIYVQK

SEQ ID NO: 26679 - protein, 483 aa, Bacillus sp.
HHNGTNGTMMQYFEWYLPNDGNHWNRLNSDASNLKSKGITAVWIPPAWKGASQNDVGYGAYDLYDLGEFNQKGTVRTKYGTRSQLQAAVTSLKNNGIQVYGDVVMNHKGGADATEMVRAVEVNPNNRNQEVTGEYTIEAWTRFDFPGRGNTHSSFKWRWYHFDGVDWDQSRRLNNRIYKFRGKAWDWEVDSEFGNYDYLMYADYDMDHPEVVNELRNWGVWYTNTLGLDGFRIDAVKHIKYSFTRDWINHVRSATGKNMFAVAEFWKNDLGAIENYLQKTNWNHSVFDVPLHYNLYNASKSGGNYDMRNIFNGTVVQRHPSHAVTFVDNHDSQPEEALESFVEEWFKPLAYALTLTREQGYPSVFYGDYYGIPTHGVPAMRSKIDPILEARQKYAYGPQHDYLDHPDVIGWTREGDSSHPKSGLATLITDGPGGSKRMYAGLKNAGETWYDITGNRSDTVKIGSDGWGEFHVNDGSVSIYVQK

SEQ ID NO: 26680 - protein, 485 aa, Bacillus sp.
HHNGTNGTMMQYFEWYLPNDGNHWNRLNSDASNLKSKGITAVWIPPAWKGISQNDVGYGAYDLYDLGEFNQKGTVRTKYGTRSQLQAAVTSLKNNGIQVYGDVVMNHKGGADATEMVRAVEVNPNNRNQEVTGEYTIEAWTRFDFPGRGNTHSSFKWRWYHFDGVDWDQSRQFNNRIYKFRGHGKAWDWEVDTEFGNYDYLMYTDYDMDHPEVVNELRNWGVWYTNTLGLDGFRIDAVKHIKYSFTRDWINHVRSATGKNMFAVAEFWKNDLGAIENYLQKTNWNHSVFDVPLHYNLYNASKSGGNYDMRNIFNGTVVQRHPSHAVTFVDNHDSQPEEALESFVEEWFKPLAYALTLTREQGYPSVFYGDYYGIPTHGVPAMRSKIDPILEARQKYAYGPQHDYLDHPDVIGWTREGDSSHPKSGLATLITDGPGGSKRMYAGLKNAGETWYDITGNRSDTVKIGSDGWGEFHVNDGSVSIYVQK

SEQ ID NO: 26681 - protein, 483 aa, Bacillus sp.
HHNGTNGTMMQYFEWYLPNDGNHWNRLNSDASNLKSKGITAVWIPPAWKGASQNDVGYGAYDLYDLGEFNQKGTVRTKYGTRSQLQAAVTSLKNNGIQVYGDVVMNHKGGADATEMVRAVEVNPNNRNQEVTGEYTIEAWTRFDFPGRGNTHSSFKWRWYHFDGVDWDQSRRLNNRIYKFRGKAWDWEVDTEFGNYDYLMYADYDMDHPEVVNELRNWGVWYTNTLGLDGFRIDAVKHIKYSFTRDWINHVRSATGKNMFAVAEFWKNDLGAIENYLQKTNWNHSVFDVPLHYNLYNASQSGGNYDMRNIFNGTVVQRHPSHAVTFVDNHDSQPEEALESFVDEWFKPLAYALTLTREQGYPSVFYGDYYGIPTHGVPAMRSKIDPILEARQKYAYGPQHDYLDHPDVIGWTREGDSSHPKSGLATLITDGPGGSKRMYAGLKNAGETWYDITGNRSDTVKIGSDGWGEFHVNGGSVSIYVQK

SEQ ID NO: 26682 - protein, 483 aa, Synthetic construct
HHNGTNGTMMQYFEWYLPNDGNHWNRLNSDASNLKSKGITAVWIPPAWKGASQNDVGYGAYDLYDLGEFNQKGTVRTKYGTRSQLQAAVTSLKNNGIQVYGDVVMNHKGGADATEMVRAVEVNPNNRNQEVTGEYTIEAWTRFDFPGRGNTHSSFKWRWYHFDGVDWDQSRRLNNRIYKFRGKAWDWEVDTENGNYDYLMYADIDMDHPEVVNELRNWGVWYTNTLGLDGFRIDAVKHIKYSFTRDWINHVRSATGKNMFAVAEFWKNDLGAIENYLQKTNWNHSVFDVPLHYNLYNASKSGGNYDMRNIFNGTVVQRHPSHAVTFVDNHDSQPEEALESFVEEWFKPLAYALTLTREQGYPSVFYGDYYGIPTHGVPAMRSKIDPILEARQKYAYGPQHDYLDHPDVIGWTREGDSQHPKSGLATLITDGPGGSKRMYAGLKNAGETWYDITGNRSDTVKIGSDGWGEFHVNDGSVSIYVQK

SEQ ID NO: 26683 - protein, 483 aa, Bacillus sp.
HHNGTNGTMMQYFEWYLPNDGNHWNRLNSDASNLKSKGITAVWIPPAWKGASQNDVGYGAYDLYDLGEFNQKGTVRTKYGTRSQLQAAVTSLKNNGIQVYGDVVMNHKGGADATEMVRAVEVNPNNRNQEVTGEYTIEAWTRFDFPGRGNTHSSFKWRWYHFDGVDWDQSRRLNNRIYKFRGKAWDWEVDTEFGNYDYLMYADYDMDHPEVVNELRNWGVWYTNTLGLDGFRIDAVKHIKYSFTRDWINHVRSATGKNMFAVAEFWKNDLGAIENYLQKTNWNHSVFDVPLHYNLYNASKSGGNYDMRNIFNGTVVQRHPSHAVTFVDNHDSQPEEALESFVDEWFKPLAYALTLTREQGYPSVFYGDYYGIPTHGVPAMRSKIDPILEARQKYAYGPQHDYLDHPDVIGWTREGDSSHPKSGLATLITDGPGGSKRMYAGLKNAGETWYDITGNRSDTVKIGSDGWGEFHVNGGSVSIYVQK

SEQ ID NO: 26684 - protein, 483 aa, Synthetic construct
HHNGTNGTMMQYFEWYLPNDGNHWNRLNSDASNLKSKGITAVWIPPAWKGASQNDVGYGAYDLYDLGEFNQKGTVRTKYGTRSQLQAAVTSLKNNGIQVYGDVVMNHKGGADATEMVRAVEVNPNNRNQEVTGEYTIEAWTRFDFPGRGNTHSSFKWRWYHFDGVDWDQSRRLNNRIYKFRGKAWDWEVDTENGNYDYLMYADSDMDHPEVVNELRNWGVWYTNTLGLDGFRIDAVKHIKYSFTRDWINHVRSATGKNMFAVAEFWKNDLGAIENYLQKTNWNHSVFDVPLHYNLYNASKSGGNYDMRNIFNGTVVQRHPSHAVTFVDNHDSQPEEALESFVEEWFKPLAYALTLTREQGYPSVFYGDYYGIPTHGVPAMRSKIDPILEARQKYAYGPQHDYLDHPDVIGWTREGDSSHPKSGLATLITDGPGGSKRMYAGLKNAGETWYDITGNRSDTVKIGSDGWGEFHVNDGSVSIYVQK

SEQ ID NO: 26685 - protein, 485 aa, Bacillus sp.
HHNGTNGTMMQYFEWYLPNDGNHWNRLNSDASNLKSKGITAVWIPPAWKGASQNDVGYGAYDLYDLGEFNQKGTVRTKYGTRSQLQAAVTSLKNNGIQVYGDVVMNHKGGADATEMVRAVEVNPNNRNQEVTGEYTIEAWTRFDFPGRGNTHSSFKWRWYHFDGVDWDQSREFDNRIYKFRGHGKAWDWEVDTEFGNYDYLMYADYDMDHPEVVNELRNWGVWYTNTLGLDGFRIDAVKHIKYSFTRDWINHVRSATGKNMFAVAEFWKNDLGAIENYLQKTNWNHSVFDVPLHYNLYNASKSGGNYDMRNIFNGTVVQVHPSHAVTFVDNHDSQPEEALESFVEEWFKPLAYALTLTREQGYPSVFYGDYYGIPTHGVPAMRSKIDPILEARQKYAYGPQHDYLDHPDVIGWTREGDSSHPKSGLATLITDGPGGSKRMYAGLKNAGETWYDITGNRSDTVKIGSDGWGEFHVNYGSVSIYVQK

SEQ ID NO: 26686 - protein, 483 aa, Bacillus sp.
HHNGTNGTMMQYFEWYLPNDGNHWNRLNSDASNLKSKGITAVWIPPAWKGASQNDVGYGAYDLYDLGEFNQKGTVRTKYGTRSQLQAAVTSLKNNGIQVYGDVVMNHKGGADATEMVRAVEVNPNNRNQEVTGEYTIEAWTRFDFPGRGNTHSSFKWRWYHFDGVDWDQSRQISNRIYKFRGKAWDWEVDTEFGNYDYLMYADYDMDHPEVVNELRNWGVWYTNTLGLDGFRIDAVKHIKYSFTRDWINHVRSATGKNMFAVAEFWKNDLGAIENYLQKTNWNHSVFDVPLHYNLYNASKSGGNYDMRNIFNGTVVQRHPSHAVTFVDNHDSQPEEALESFVEEWFKPLAYALTLTREQGYPSVFYGDYYGIPTHGVPAMRSKIDPILEARQKYAYGPQHDYLDHPDVIGWTREGDSSHPKSGLATLITDGPGGSKRMYAGLKNAGETWYDITGNRSDTVKIGSDGWGEFHVNDGSVSIYVQK

SEQ ID NO: 26687 - protein, 485 aa, Synthetic construct
HHNGTNGTMMQYFEWYLPNDGNHWNRLNSDASNLKSKGITAVWIPPAWKGASQNDVGYGAYDLYDLGEFNQKGTVRTKYGTRSQLQAAVTSLKNNGIQVYGDVVMNHKGGADATEMVRAVEVNPNNRNQEVTGEYTIEAWTRFDFPGRGNTHSSFKWRWYHFDGVDWDQSRRLNNRIYKFRGHGKAWDWEVDTENGNYDYLMYADIDMDHPEVVNELRNWGVWYTNTLGLDGFRIDAVKHIKYSFTRDWINHVRSATGKNMFAVAEFWKNDLGAIENYLQKTNWNHSVFDVPLHYNLYNASKSGGNYDMRNIFNGTVVQRHPSHAVTFVDNHDSQPEEALESFVEEWFKPLAYALTLTREQGYPSVFYGDYYGIPTHGVPAMRSKIDPILEARQKYAYGRQHDYLDHPDVIGWTREGDSSHPKSGLATLITDGPGGSKRMYAGLKNAGETWYDITGNRSDTVKIGSDGWGEFHVNDGSVSIYVQK

SEQ ID NO: 26688 - protein, 483 aa, Synthetic construct
HHNGTNGTMMQYFEWYLPNDGNHWNRLNSDASNLKSKGITAVWIPPAWKGASQNDVGYGAYDLYDLGEFNQKGTVRTKYGTRSQLQAAVTSLKNNGIQVYGDVVMNHKGGADATEMVRAVEVNPNNRNQEVTGEYTIEAWTRFDFPGRGNTHSSFKWRWYHFDGVDWDQSRRLNNRIYKFRGKAWDWEVDSEFGNYDYLMYADIDMDHPEVVNELRNWGVWYTNTLGLDGFRIDAVKHIKYSFTRDWINHVRSATGKNMFAVAEFWKNDLGAIENYLQKTNWNHSVFDVPLHYNLYNASKSGGNYDMRNIFNGTVVQRHPSHAVTFVDNHDSQPEEALESFVEEWFKPLAYALTLTREQGYPSVFYGDYYGIPTHGVPAMRSKIDPILEARQKYAYGPQHDYLDHPDVIGWTREGDSSHPKSGLATLITDGPGGSKRMYAGLKNAGETWYDITGNRSDTVKIGSDGWGEFHVNDGSVSIYVQK

SEQ ID NO: 26689 - protein, 483 aa, Synthetic construct
HHNGTNGTMMQYFEWYLPNDGNHWNRLNSDASNLKSKGITAVWIPPAWKGASQNDVGYGAYDLYDLGEFNQKGTVRTKYGTRSQLQAAVTSLKNNGIQVYGDVVMNHKGGADATEMVRAVEVNPNNRNQEVTGEYTIEAWTRFDFPGRGNTHSSFKWRWYHFDGVDWDQSRKYENRIYKFRGKAWDWEVDTENGNYDYLMYADIDMDHPEVVNELRNWGVWYTNTLGLDGFRIDAVKHIKYSFTRDWINHVRSATGKNMFAVAEFWKNDLGAIENYLQKTNWNHSVFDVPLHYNLYNASKSGGNYDMRNIFNGTVVQRHPSHAVTFVDNHDSQPEEALESFVEEWFKPLAYALTLTREQGYPSVFYGDYYGIPTHGVPAMRSKIDPILEARQKYAYGPQHDYLDHPDVIGWTREGDSSHPKSGLATLITDGPGGSKRMYAGLKNAGETWYDITGNRSDTVKIGSDGWGEFHVNDGSVSIYVQK

SEQ ID NO: 26690 - protein, 483 aa, Bacillus sp.
HHNGTNGTMMQYFEWYLPNDGNHWNRLNSDASNLKSKGITAVWIPPAWKGASQNDVGYGAYDLYDLGEFNQKGTVRTKYGTRSQLQAAVTSLKNNGIQVYGDVVMNHKGGADATEMVRAVEVNPNNRNQEVTGEYTIEAWTRFDFPGRGNTHSSFKWRWYHFDGVDWDQSRKFQNRIYKFRGKAWDWEVDTEFGNYDYLMYVDYDMDHPEVVNELRNWGVWYTNTLGLDGFRIDAVKHIKYSFTRDWINHVRSATGKNMFAVAEFWKNDLGAIENYLQKTNWNHSVFDVPLHYNLYNASKSGGNYDMRNIFNGTVVQRHPSHAVTFVDNHDSQPEEALESFVEEWFKPLAYALTLTREQGYPSVFYGDYYGIPTHGVPAMRSKIDPILEARQKYAYGPQHDYLDHPDVIGWTREGDSSHPKSGLATLITDGPGGSKRMYAGLKNAGETWYDITGNRSDTVKIGSDGWGEFHVNDGSVSIYVQK

SEQ ID NO: 26691 - protein, 483 aa, Bacillus sp.
HHNGTNGTMMQYFEWYLPNDGNHWNRLNSDASNLKSKGITAVWIPPAWKGVSQNDVGYGAYDLYDLGEFNQKGTVRTKYGTRSQLQAAVTSLKNNGIQVYGDVVMNHKGGADATEMVRAVEVNPNNRNQEVTGEYTIEAWTRFDFPGRGNTHSSFKWRWYHFDGVDWDQSRQLSNRIYKFRGKAWDWEVDTEFGNYDYLMYADYDMDHPEVVNELRNWGVWYTNTLGLDGFRIDAVKHIKYSFTRDWINHVRSATGKNMFAVAEFWKNDLGAIENYLQKTNWNHSVFDVPLHYNLYNASKSGGNYDMRNIFNGTVVQRHPSHAVTFVDNHDSQPEEALESFVEEWFKPLAYALTLTREQGYPSVFYGDYYGIPTHGVPAMRSKIDPILEARQKYAYGPQHDYLDHPDVIGWTREGDSSHPKSGLATLITDGPGGSKRMYAGLKNAGETWYDITGNRSDTVKIGSDGWGEFHVNDGSVSIYVQK

SEQ ID NO: 26692 - protein, 485 aa, Bacillus sp.
HHNGTNGTMMQYFEWYLPNDGNHWNRLNSDASNLKSKGITAVWIPPAWKGISQNDVGYGAYDLYDLGEFNQKGTVRTKYGTRSQLQAAVTSLKNNGIQVYGDVVMNHKGGADATEMVRAVEVNPNNRNQEVTGEYTIEAWTRFDFPGRGNTHSSFKWRWYHFDGVDWDQSRRFNNRIYKFRGHGKAWDWEVDTEFGNYDYLMYADYDMDHPEVVNELRNWGVWYTNTLGLDGFRIDAVKHIKYSFTRDWINHVRSATGKNMFAVAEFWKNDLGAIENYLQKTNWNHSVFDVPLHYNLYNASKSGGNYDMRNIFNGTVVQRHPSHAVTFVDNHDSQPEEALESFVEEWFKPLAYALTLTREQGYPSVFYGDYYGIPTHGVPAMRSKIDPILEARQKYAYGPQHDYLDHPDVIGWTREGDSSHPKSGLATLITDGPGGSKRMYAGLKNAGETWYDITGNRSDTVKIGSDGWGEFHVNDGSVSIYVQK

SEQ ID NO: 26693 - protein, 485 aa, Bacillus sp.
HHNGTNGTMMQYFEWYLPNDGNHWNRLNSDASNLKSKGITAVWIPPAWKGASQNDVGYGAYDLYDLGEFNQKGTVRTKYGTRSQLQAAVTSLKNNGIQVYGDVVMNHKGGADATEMVRAVEVNPNNRNQEVTGEYTIEAWTRFDFPGRGNTHSSFKWRWYHFDGVDWDQSRDFNNRIYKFRGHGKAWDWEVDTEFGNYDYLMYADYDMDHPEVVNELRNWGVWYTNTLGLDGFRIDAVKHIKYSFTRDWINHVRSATGKNMFAVAEFWKNDLGAIENYLQKTNWNHSVFDVPLHYNLYNASKSGGNYDMRNIFNGTVVQRHPSHAVTFVDNHDSQPEEALESFVEEWFKPLAYALTLTREQGYPSVFYGDYYGIPTHGVPAMRSKIDPILEARQKYAYGPQHDYLDHPDVIGWTREGDSSHPKSGLATLITDGPGGSKRMYAGLKNAGETWYDITGNRSDTVKIGSDGWGEFHVNDGSVSIYVQK

SEQ ID NO: 26694 - protein, 485 aa, Bacillus sp.
HHNGTNGTMMQYFEWYLPNDGNHWNRLNSDASNLKSKGITAVWIPPAWKATSQNDVGYGAYDLYDLGEFNQKGTVRTKYGTRSQLQAAVTSLKNNGIQVYGDVVMNHKGGADATEMVRAVEVNPNNRNQEVTGEYTIEAWTRFDFPGRGNTHSSFKWRWYHFDGVDWDQSRQLNNRIYKFRGHGKAWDWEVDTEFGNYDYLMYADYDMDHPEVVNELRNWGVWYTNTLGLDGFRIDAVKHIKYSFTRDWINHVRSATGKNMFAVAEFWKNDLGAIENYLQKTNWNHSVFDVPLHYNLYNASKSGGNYDMRNIFNGTVVQRHPSHAVTFVDNHDSQPEEALESFVEEWFKPLAYALTLTREQGYPSVFYGDYYGIPTHGVPAMRSKIDPILEARQKYAYGPQHDYLDHPDVIGWTREGDSSHPKSGLATLITDGPGGSKRMYAGLKNAGETWYDITGNRSDTVKIGSDGWGEFHVNDGSVSIYVQK

SEQ ID NO: 26695 - protein, 483 aa, Bacillus sp.
HHNGTNGTMMQYFEWYLPNDGNHWNRLNSDASNLKSKGITAVWIPPAWKATSQNDVGYGAYDLYDLGEFNQKGTVRTKYGTRSQLQAAVTSLKNNGIQVYGDVVMNHKGGADATEMVRAVEVNPNNRNQEVTGEYTIEAWTRFDFPGRGNTHSSFKWRWYHFDGVDWDQSRQLTNRIYKFRGKAWDWEVDTEFGNYDYLMYADYDMDHPEVVNELRNWGVWYTNTLGLDGFRIDAVKHIKYSFTRDWINHVRSATGKNMFAVAEFWKNDLGAIENYLQKTNWNHSVFDVPLHYNLYNASKSGGNYDMRNIFNGTVVQRHPSHAVTFVDNHDSQPEEALESFVEEWFKPLAYALTLTREQGYPSVFYGDYYGIPTHGVPAMRSKIDPILEARQKYAYGPQHDYLDHPDVIGWTREGDSSHPKSGLATLITDGPGGSKRMYAGLKNAGETWYDITGNRSDTVKIGSDGWGEFHVNDGSVSIYVQK

SEQ ID NO: 26696 - protein, 485 aa, Bacillus sp.
HHNGTNGTMMQYFEWYLPNDGNHWNRLNSDASNLKSKGITAVWIPPAWKGVSQNDVGYGAYDLYDLGEFNQKGTVRTKYGTRSQLQAAVTSLKNNGIQVYGDVVMNHKGGADATEMVRAVEVNPNNRNQEVTGEYTIEAWTRFDFPGRGNTHSSFKWRWYHFDGVDWDQSRRFNNRIYKFRGHGKAWDWEVDTEFGNYDYLMYADYDMDHPEVVNELRNWGVWYTNTLGLDGFRIDAVKHIKYSFTRDWINHVRSATGKNMFAVAEFWKNDLGAIENYLQKTNWNHSVFDVPLHYNLYNASKSGGNYDMRNIFNGTVVQRHPSHAVTFVDNHDSQPEEALESFVEEWFKPLAYALTLTREQGYPSVFYGDYYGIPTHGVPAMRSKIDPILEARQKYAYGPQHDYLDHPDVIGWTREGDSSHPKSGLATLITDGPGGSKRMYAGLKNAGETWYDITGNRSDTVKIGSDGWGEFHVNDGSVSIYVQK

SEQ ID NO: 26697 - protein, 485 aa, Synthetic construct
HHNGTNGTMMQYFEWYLPNDGNHWNRLNSDASNLKSKGITAVWIPPAWKGASQNDVGYGAYDLYDLGEFNQKGTVRTKYGTRSQLQAAVTSLKNNGIQVYGDVVMNHKGGADATEMVRAVEVNPNNRNQEVTGEYTIEAWTRFDFPGRGNTHSSFKWRWYHFDGVDWDQSRRLNNRIYKFRGHGKAWDWEVDTENGNYDYLMYADIDMDHPEVVNELRNWGVWYTNTLGLDGFRIDAVKHIKYSFTRDWINHVRSATGKNMFAVAEFWKNDLGAIENYLQKTNWNHSVFDVPLHYNLYNASKSGGNYDMRNIFNGTVVQRHPSHAVTFVDNHDSQPEEALESFVEEWFKPLAYALTLTREQGYPSVFYGDYYGIPTHGVPAMRSKIDPILEARQKYAYGAQHDYLDHPDVIGWTREGDSSHPKSGLATLITDGPGGSKRMYAGLKNAGETWYDITGNRSDTVKIGSDGWGEFHVNDGSVSIYVQK

SEQ ID NO: 26698 - protein, 485 aa, Bacillus sp.
HHNGTNGTMMQYFEWYLPNDGNHWNRLNSDASNLKSKGITAVWIPPAWKAASQNDVGYGAYDLYDLGEFNQKGTVRTKYGTRSQLQAAVTSLKNNGIQVYGDVVMNHKGGADATEMVRAVEVNPNNRNQEVTGEYTIEAWTRFDFPGRGNTHSSFKWRWYHFDGVDWDQSRQLQNRIYKFRGHGKAWDWEVDTEFGNYDYLMYADYDMDHPEVVNELRNWGVWYTNTLGLDGFRIDAVKHIKYSFTRDWINHVRSATGKNMFAVAEFWKNDLGAIENYLQKTNWNHSVFDVPLHYNLYNASKSGGNYDMRNIFNGTVVQRHPSHAVTFVDNHDSQPEEALESFVEEWFKPLAYALTLTREQGYPSVFYGDYYGIPTHGVPAMRSKIDPILEARQKYAYGPQHDYLDHPDVIGWTREGDSSHPKSGLATLITDGPGGSKRMYAGLKNAGETWYDITGNRSDTVKIGSDGWGEFHVNDGSVSIYVQK

SEQ ID NO: 26699 - protein, 485 aa, Bacillus sp.
HHNGTNGTMMQYFEWYLPNDGNHWNRLNSDASNLKSKGITAVWIPPAWKGASQNDVGYGAYDLYDLGEFNQKGTVRTKYGTRSQLQAAVTSLKNNGIQVYGDVVMNHKGGADATEMVRAVEVNPNNRNQEVTGEYTIEAWTRFDFPGRGNTHSSFKWRWYHFDGVDWDQSRRLNNRIYKFRGHGKAWDWEVDTEFGNYDYLMYADYDMDHPEVVNELRNWGVWYTNTLGLDGFRIDAVKHIKYSFTRDWINHVRSATGKNMFAVAEFWKNDLGAIENYLQKTNWNHSVFDVPLHYNLYNASKSGGNYDMRNIFNGTVVQRHPSHAVTFVDNHDSQPEEALESFVEEWFKPLAYALTLTREQGYPSVFYGDYYGIPTHGVPAMRSKIDPILEARQKYAYGPQHDYLDHPDVIGWTREGDSSHPNSGLATLITDGPGGSKRMYAGLKNAGETWYDITGNRSDTVKIGSDGWGEFHVNDGSVSIYVQK

SEQ ID NO: 26700 - protein, 485 aa, Bacillus sp.
HHNGTNGTMMQYFEWYLPNDGNHWNRLNSDASNLKSKGITAVWIPPAWKGASQNDVGYGAYDLYDLGEFNQKGTVRTKYGTRSQLQAAVTSLKNNGIQVYGDVVMNHKGGADATEMVRAVEVNPNNRNQEVTGEYTIEAWTRFDFPGRGNTHSSFKWRWYHFDGVDWDQSRQVNNRIYKFRGHGKAWDWEVDTEFGNYDYLMYADYDMDHPEVVNELRNWGVWYTNTLGLDGFRIDAVKHIKYSFTRDWINHVRSATGKNMFAVAEFWKNDLGAIENYLQKTNWNHSVFDVPLHYNLYNASKSGGNYDMRNIFNGTVVQRHPSHAVTFVDNHDSQPEEALESFVEEWFKPLAYALTLTREQGYPSVFYGDYYGIPTHGVPAMRSKIDPILEARQKYAYGPQHDYLDHPDVIGWTREGDSSHPKSGLATLITDGPGGSKRMYAGLKNAGETWYDITGNRSDTVKIGSDGWGEFHVNDGSVSIYVQK

SEQ ID NO: 26701 - protein, 485 aa, Bacillus sp.
HHNGTNGTMMQYFEWYLPNDGNHWNRLNSDASNLKSKGITAVWIPPAWKGVSQNDVGYGAYDLYDLGEFNQKGTVRTKYGTRSQLQAAVTSLKNNGIQVYGDVVMNHKGGADATEMVRAVEVNPNNRNQEVTGEYTIEAWTRFDFPGRGNTHSSFKWRWYHFDGVDWDQSRQTNNRIYKFRGHGKAWDWEVDTEFGNYDYLMYADYDMDHPEVVNELRNWGVWYTNTLGLDGFRIDAVKHIKYSFTRDWINHVRSATGKNMFAVAEFWKNDLGAIENYLQKTNWNHSVFDVPLHYNLYNASKSGGNYDMRNIFNGTVVQRHPSHAVTFVDNHDSQPEEALESFVEEWFKPLAYALTLTREQGYPSVFYGDYYGIPTHGVPAMRSKIDPILEARQKYAYGPQHDYLDHPDVIGWTREGDSSHPKSGLATLITDGPGGSKRMYAGLKNAGETWYDITGNRSDTVKIGSDGWGEFHVNDGSVSIYVQK

SEQ ID NO: 26702 - protein, 485 aa, Bacillus sp.
HHNGTNGTMMQYFEWYLPNDGNHWNRLNSDASNLKSKGITAVWIPPAWKGASQNDVGYGAYDLYDLGEFNQKGTVRTKYGTRSQLQAAVTSLKNNGIQVYGDVVMNHKGGADATEMVRAVEVNPNNRNQEVTGEYTIEAWTRFDFPGRGNTHSSFKWRWYHFDGVDWDQSRRLNNRIYKFRGHGKAWDWEVDTEFGNYDYLMYADYDMDHPEVVNELRNWGVWYTNTLGLDGFRIDAVKHIKYSFTRDWINHVRSATGKNMFAVAEFWKNDLGAIENYLQKTNWNHSVFDVPLHYNLYNASKSGGNYDMRNIFNGTVVQRHPSHAVTFVDNHDSQPEEALESFVEEWFKPLAYALTLTREQGYPSVFYGDYYGIPTHGVPAMRSKIDPILEARQKYAYGPQHDYLDHPDVIGWTREGDSSHPKSGLATLITDGPGGSKRMYAGLKNAGETWYDITGNRSDTVKIGSDGWGNFHVNDGSVSIYVQK

SEQ ID NO: 26703 - protein, 485 aa, Bacillus sp.
HHNGTNGTMMQYFEWYLPNDGNHWNRLNSDASNLKSKGITAVWIPPAWKGASQNDVGYGAYDLYDLGEFNQKGTVRTKYGTRSQLQAAVTSLKNNGIQVYGDVVMNHKGGADATEMVRAVEVNPNNRNQEVTGEYTIEAWTRFDFPGRGNTHSSFKWRWYHFDGVDWDQSRRLNNRIYKFRGHGKAWDWEVDTEFGNYDYLMYADYDMDHPEVVNELRNWGVWYTNTLGLDGFRIDAVKHIKYSFTRDWINHVRSATGKNMFAVAEFWKNDLGAIENYLQKTNWNHSVFDVPLHYNLYNASKSGGNYDMRNIFNGTVVQSHPMHAVTFVDNHDSQPEEALESFVEEWFKPLAYALTLTREQGYPSVFYGDYYGIPTHGVPAMRSKIDPILEARQKYAYGPQHDYLDHPDVIGWTREGDSSHPKSGLATLITDGPGGSKRMYAGLKNAGETWYDITGNRSDTVKIGSDGWGEFHVNDGSVSIYVQK

SEQ ID NO: 26704 - protein, 483 aa, Bacillus sp.
HHNGTNGTMMQYFEWYLPNDGNHWNRLNSDASNLKSKGITAVWIPPAWKGASQNDVGYGAYDLYDLGEFNQKGTVRTKYGTRSQLQAAVTSLKNNGIQVYGDVVMNHKGGADATEMVRAVEVNPNNRNQEVTGEYTIEAWTRFDFPGRGNTHSSFKWRWYHFDGVDWDQSRQTNNRIYKFRGKAWDWEVDTEFGNYDYLMYADYDMDHPEVVNELRNWGVWYTNTLGLDGFRIDAVKHIKYSFTRDWINHVRSATGKNMFAVAEFWKNDLGAIENYLQKTNWNHSVFDVPLHYNLYNASKSGGNYDMRNIFNGTVVQRHPSHAVTFVDNHDSQPEEALESFVEEWFKPLAYALTLTREQGYPSVFYGDYYGIPTHGVPAMRSKIDPILEARQKYAYGPQHDYLDHPDVIGWTREGDSSHPKSGLATLITDGPGGSKRMYAGLKNAGETWYDITGNRSDTVKIGSDGWGEFHVNDGSVSIYVQK

SEQ ID NO: 26705 - protein, 485 aa, Bacillus sp.
HHNGTNGTMMQYFEWYLPNDGNHWNRLNSDASNLKSKGITAVWIPPAWKGASQNDVGYGAYDLYDLGEFNQKGTVRTKYGTRSQLQAAVTSLKNNGIQVYGDVVMNHKGGADATEMVRAVEVNPNNRNQEVTGEYTIEAWTKFDFPGRGNTHSSFKWRWYHFDGVDWDQSRRLNNRIYKFRGHGKAWDWEVDTEFGNYDYLMYADYDMDHPEVVNELRNWGVWYTNTLGLDGFRIDAVKHIKYSFTRDWINHVRSATGKNMFAVAEFWKNDLGAIENYLQKTNWNHSVFDVPLHYNLYNASKSGGNYDMRNIFNGTVVQRHPSHAVTFVDNHDSQPEEALESFVEEWFKPLAYALTLTREQGYPSVFYGDYYGIPTHGVPAMRSKIDPILEARQKYAYGPQHDYLDHPDVIGWTREGDSSHPKSGLATLITDGPGGSKRMYAGLKNAGETWYDITGNRSDTVKIGSDGWGEFHVNDGSVSIYVQK

SEQ ID NO: 26706 - protein, 483 aa, Bacillus sp.
HHNGTNGTMMQYFEWYLPNDGNHWNRLNSDASNLKSKGITAVWIPPAWKAVSQNDVGYGAYDLYDLGEFNQKGTVRTKYGTRSQLQAAVTSLKNNGIQVYGDVVMNHKGGADATEMVRAVEVNPNNRNQEVTGEYTIEAWTRFDFPGRGNTHSSFKWRWYHFDGVDWDQSRQLQNRIYKFRGKAWDWEVDTEFGNYDYLMYADYDMDHPEVVNELRNWGVWYTNTLGLDGFRIDAVKHIKYSFTRDWINHVRSATGKNMFAVAEFWKNDLGAIENYLQKTNWNHSVFDVPLHYNLYNASKSGGNYDMRNIFNGTVVQRHPSHAVTFVDNHDSQPEEALESFVEEWFKPLAYALTLTREQGYPSVFYGDYYGIPTHGVPAMRSKIDPILEARQKYAYGPQHDYLDHPDVIGWTREGDSSHPKSGLATLITDGPGGSKRMYAGLKNAGETWYDITGNRSDTVKIGSDGWGEFHVNDGSVSIYVQK

SEQ ID NO: 26707 - protein, 485 aa, Bacillus sp.
HHNGTNGTMMQYFEWYLPNDGNHWNRLNSDASNLKSKGITAVWIPPAWKGASQNDVGYGAYDLYDLGEFNQKGTVRTKYGTRSQLQAAVTSLKNNGIQVYGDVVMNHKGGADATEMVRAVEVNPNNRNQEVTGEYTIEAWTRFDFPGRGNTHSSFKWRWYHFDGVDWDQSRRLNNRIYKFRGHGKAWDWEVDTEFGNYDYLMYADYDMDHPEVVNELRNWGVWYTNTLGLDGFRIDAVKHIKYSFTRDWINHVRSATGKNMFAVAEFWKNDLGAIENYLQKTNWNHSVFDVPLHYNLYNASNSGGNYDMRNIFNGTVVQRHPSHAVTFVDNHDSQPEEALESFVEEWFKPLAYALTLTREQGYPSVFYGDYYGIPTHGVPAMRSKIDPILEARQKYAYGPQHDYLDHPDVIGWTREGDSSHPKSGLATLITDGPGGSKRMYAGLKNAGETWYDITGNRSDTVKIGSDGWGEFHVNDGSVSIYVQK

SEQ ID NO: 26708 - protein, 483 aa, Bacillus sp.
HHNGTNGTMMQYFEWYLPNDGNHWNRLNSDASNLKSKGITAVWIPPAWKGASQNDVGYGAYDLYDLGEFNQKGTVRTKYGTRSQLQAAVTSLKNNGIQVYGDVVMNHKGGADATEMVRAVEVNPNNRNQEVTGEYTIEAWTRFDFPGRGNTHSSFKWRWYHFDGVDWDQSRRLNNRIYKFRGKAWDWEVDTEFGNYDYLMYADYDMDHPEVVNELRNWGVWYTNTLGLDGFRIDAVKHIKYSFTRDWINHVRSATGKNMFAVAEFWKNDLGAIENYLQKTNWNHSVFDVPLHYNLYNASNSGGNYDMRNIFNGTVVQRHPSHAVTFVDNHDSQPEEALESFVDEWFKPLAYALTLTREQGYPSVFYGDYYGIPTHGVPAMRSKIDPILEARQKYAYGPQHDYLDHPDVIGWTREGDSSHPKSGLATLITDGPGGSKRMYAGLKNAGETWYDITGNRSDTVKIGSDGWGEFHVNGKSVSIYVQK

SEQ ID NO: 26709 - protein, 485 aa, Synthetic construct
HHNGTNGTMMQYFEWYLPNDGNHWNRLNSDASNLKSKGITAVWIPPAWKGASQNDVGYGAYDLYDLGEFNQKGTVRTKYGTRSQLQAAVTSLKNNGIQVYGDVVMNHKGGADATEMVRAVEVNPNNRNQEVTGEYTIEAWTRFDFPGRGNTHSSFKWRWYHFDGVDWDQSRRLNNRIYKFRGHGKAWDWEVDTENGNYDYLMYADIDMDHPEVVNELRNWGVWYTNTLGLDGFRIDAVKHIKYSFTRDWINHVRSATGKNMFAVAEFWKNDLGAIENYLQKTNWNHSVFDVPLHYNLYNASKSGGNYDMRNIFNGTVVQRHPSHAVTFVDNHDSQPEEALESFVEEWFKPLAYALTLTREQGYPSVFYGDYYGIPTHGVPAMRSKIDPILEARQKYAYGPQHDYLDHPDVIGWTREGDSSHPKSGLATLITDGPGGSKRMYAGLKNAGETWYDITGNRSETVKIGSDGWGEFHVNDGSVSIYVQK

SEQ ID NO: 26710 - protein, 485 aa, Bacillus sp.
HHNGTNGTMMQYFEWYLPNDGNHWNRLNSDASNLKSKGITAVWIPPAWKATSQNDVGYGAYDLYDLGEFNQKGTVRTKYGTRSQLQAAVTSLKNNGIQVYGDVVMNHKGGADATEMVRAVEVNPNNRNQEVTGEYTIEAWTRFDFPGRGNTHSSFKWRWYHFDGVDWDQSRQLTNRIYKFRGHGKAWDWEVDTEFGNYDYLMYADYDMDHPEVVNELRNWGVWYTNTLGLDGFRIDAVKHIKYSFTRDWINHVRSATGKNMFAVAEFWKNDLGAIENYLQKTNWNHSVFDVPLHYNLYNASKSGGNYDMRNIFNGTVVQRHPSHAVTFVDNHDSQPEEALESFVEEWFKPLAYALTLTREQGYPSVFYGDYYGIPTHGVPAMRSKIDPILEARQKYAYGPQHDYLDHPDVIGWTREGDSSHPKSGLATLITDGPGGSKRMYAGLKNAGETWYDITGNRSDTVKIGSDGWGEFHVNDGSVSIYVQK

SEQ ID NO: 26711 - protein, 485 aa, Bacillus sp.
HHNGTNGTMMQYFEWYLPNDGNHWNRLNSDASNLKSKGITAVWIPPAWKGTSQNDVGYGAYDLYDLGEFNQKGTVRTKYGTRSQLQAAVTSLKNNGIQVYGDVVMNHKGGADATEMVRAVEVNPNNRNQEVTGEYTIEAWTRFDFPGRGNTHSSFKWRWYHFDGVDWDQSRRLNNRIYKFRGHGKAWDWEVDTEFGNYDYLMYADYDMDHPEVVNELRNWGVWYTNTLGLDGFRIDAVKHIKYSFTRDWINHVRSATGKNMFAVAEFWKNDLGAIENYLQKTNWNHSVFDVPLHYNLYNASKSGGNYDMRNIFNGTVVQRHPSHAVTFVDNHDSQPEEALESFVEEWFKPLAYALTLTREQGYPSVFYGDYYGIPTHGVPAMRSKIDPILEARQKYAYGPQHDYLDHPDVIGWTREGDSSHPKSGLATLITDGPGGSKRMYAGLKNAGETWYDITGNRSDTVKIGSDGWGEFHVNDGSVSIYVQK

SEQ ID NO: 26712 - protein, 485 aa, Synthetic construct
HHNGTNGTMMQYFEWYLPNDGNHWNRLNSDASNLKSKGITAVWIPPAWKGASQNDVGYGAYDLYDLGEFNQKGTVRTKYGTRSQLQAAVTSLKNNGIQVYGDVVMNHKGGADATEMVRAVEVNPNNRNQEVTGEYTIEAWTRFDFPGRGNTHSSFKWRWYHFDGVDWDQSRRLNNRIYKFRGHGKAWDWEVDTENGNYDYLMYADIDMDHPEVVNELRNWGVWYTNTLGLDGFRIDAVKHIKYSFTRDWIDHVRSATGKNMFAVAEFWKNDLGAIENYLQKTNWNHSVFDVPLHYNLYNASKSGGNYDMRNIFNGTVVQRHPSHAVTFVDNHDSQPEEALESFVEEWFKPLAYALTLTREQGYPSVFYGDYYGIPTHGVPAMRSKIDPILEARQKYAYGPQHDYLDHPDVIGWTREGDSSHPKSGLATLITDGPGGSKRMYAGLKNAGETWYDITGNRSDTVKIGSDGWGEFHVNDGSVSIYVQK

SEQ ID NO: 26713 - protein, 485 aa, Synthetic construct
HHNGTNGTMMQYFEWYLPNDGNHWNRLNSDASNLKSKGITAVWIPPAWKGASQNDVGYGAYDLYDLGEFNQKGTVRTKYGTRSQLQAAVTSLKNNGIQVYGDVVMNHKGGADATEMVRAVEVNPNNRNQEVTGEYTIEAWTRFDFPGRGNTHSSFKWRWYHFDGVDWDQSRRLNNRIYKFRGHGKAWDWEVDTENGNYDYLMYADIDMDHPEVVNELRNWGVWYTNTLGLDGFRIDAVKHIKYSFTRDWINHVRSATGKNMFAVAEFWKNDLGAIENYLTKTNWNHSVFDVPLHYNLYNASKSGGNYDMRNIFNGTVVQRHPSHAVTFVDNHDSQPEEALESFVEEWFKPLAYALTLTREQGYPSVFYGDYYGIPTHGVPAMRSKIDPILEARQKYAYGPQHDYLDHPDVIGWTREGDSSHPKSGLATLITDGPGGSKRMYAGLKNAGETWYDITGNRSDTVKIGSDGWGEFHVNDGSVSIYVQK

SEQ ID NO: 26714 - protein, 483 aa, Cytophaga sp.
HHNGTNGTMMQYFEWYLPNDGNHWNRLRDDAANLKSKGITAVWIPPAWKGTSQNDVGYGAYDLYDLGEFNQKGTVRTKYGTRNQLQAAVTSLKNNGIQVYGDVVMNHKGGADGTEIVNAVEVNRSNRNQETSGEYAIEAWTKFDFPGRGNNHSSFKWRWYHFDGTDWDQSRQLQNKIYKFRGKAWDWEVDTENGNYDYLMYADVDMDHPEVIHELRNWGVWYTNTLNLDGFRIDAVKHIKYSFTRDWLTHVRNTTGKPMFAVAEFWKNDLGAIENYLNKTSWNHSVFDVPLHYNLYNASNSGGYYDMRNILNGSVVQKHPTHAVTFVDNHDSQPGEALESFVQQWFKPLAYALVLTREQGYPSVFYGDYYGIPTHGVPAMKSKIDPLLQARQTFAYGTQRDYIDNPDVIGWTREGDSTKAKSGLATVITDGPGGSKRMYVGTSNAGEIWYDLTGNRTDKITIGSDGYATFPVNGGSVSVWVQQ

SEQ ID NO: 26715 - protein, 483 aa, Bacillus sp.
HHNGTNGTMMQYFEWYLPNDGNHWNRLNSDASNLKSKGITAVWIPPAWKGASQNDVGYGAYDLYDLGEFNQKGTVRTKYGTRSQLQAAVTSLKNNGIQVYGDVVMNHKGGADATEMVRAVEVNPNNRNQEVTGEYTIEAWTRFDFPGRGNTHSSFKWRWYHFDGVDWDQSRRYSNRIYKFRGKAWDWEVDTENGNYDYLMYADIDMDHPEVVNELRNWGVWYTNTLGLDGFRIDAVKHIKYSFTRDWINHVRSATGKNMFAVAEFWKNDLGAIENYLQKTNWNHSVFDVPLHYNLYNASKSGGNYDMRNIFNGTVVQRHPSHAVTFVDNHDSQPEEALESFVEEWFKPLAYALTLTREQGYPSVFYGDYYGIPTHGVPAMRSKIDPILEARQKYAYGPQHDYLDHPDVIGWTREGDSSHPKSGLATLITDGPGGSKRMYAGLKNAGETWYDITGNRSDTVKIGSDGWGEFHVNDGSVSIYVQK

SEQ ID NO: 26716 - protein, 483 aa, Bacillus sp.
HHNGTNGTMMQYFEWYLPNDGNHWNRLNSDASNLKSKGITAVWIPPAWKATSQNDVGYGAYDLYDLGEFNQKGTVRTKYGTRSQLQAAVTSLKNNGIQVYGDVVMNHKGGADATEMVRAVEVNPNNRNQEVTGEYTIEAWTRFDFPGRGNTHSSFKWRWYHFDGVDWDQSRNIQNRIYKFRGKAWDWEVDTEFGNYDYLMYADYDMDHPEVVNELRNWGVWYTNTLGLDGFRIDAVKHIKYSFTRDWINHVRSATGKNMFAVAEFWKNDLGAIENYLQKTNWNHSVFDVPLHYNLYNASKSGGNYDMRNIFNGTVVQRHPSHAVTFVDNHDSQPEEALESFVEEWFKPLAYALTLTREQGYPSVFYGDYYGIPTHGVPAMRSKIDPILEARQKYAYGPQHDYLDHPDVIGWTREGDSSHPKSGLATLITDGPGGSKRMYAGLKNAGETWYDITGNRSDTVKIGSDGWGEFHVNDGSVSIYVQK

SEQ ID NO: 26717 - protein, 485 aa, Bacillus sp.
HHNGTNGTMMQYFEWYLPNDGNHWNRLNSDASNLKSKGITAVWIPPAWKGASQNDVGYGAYDLYDLGEFNQKGTVRTKYGTRSQLQAAVTSLKNNGIQVYGDVVMNHKGGADATEMVRAVEVNPNNRNQEVTGEYTIEAWTRFDFPGRGNTHSSFKWRWYHFDGVDWDQSRQLSNRIYKFRGHGKAWDWEVDTEFGNYDYLMYADYDMDHPEVVNELRNWGVWYTNTLGLDGFRIDAVKHIKYSFTRDWINHVRSATGKNMFAVAEFWKNDLGAIENYLQKTNWNHSVFDVPLHYNLYNASKSGGNYDMRNIFNGTVVQRHPSHAVTFVDNHDSQPEEALESFVEEWFKPLAYALTLTREQGYPSVFYGDYYGIPTHGVPAMRSKIDPILEARQKYAYGPQHDYLDHPDVIGWTREGDSSHPKSGLATLITDGPGGSKRMYAGLKNAGETWYDITGNRSDTVKIGSDGWGEFHVNDGSVSIYVQK

SEQ ID NO: 26718 - protein, 483 aa, Synthetic construct
HHNGTNGTMMQYFEWYLPNDGNHWNRLNSDASNLKSKGITAVWIPPAWKGASQNDVGYGAYDLYDLGEFNQKGTVRTKYGTRSQLQAAVTSLKNNGIQVYGDVVMNHKGGADATEMVRAVEVNPNNRNQEVTGEYTIEAWTRFDFPGRGNTHSSFKWRWYHFDGVDWDQSRRLNNRIYKFRGKAWDWEVDTENGNYDYLMYADIDMDHPEVVNELRNWGVWYTNTLGLDGFRIDAVKHIKYSFTRDWINHVRSATGKNMFAVAEFWKNDLGAIENYLQKTNWNHSVFDVPLHYNLYNASKSGGNYDMRNIFNGTVVQRHPSHAVTFVDNHDSQPEEALESFVEEWFKPLAYALTLTREQGYPSVFYGDYYGIPTHGVPAMRSKIDPILEARQKYAYGPQHDYLDHPDVIGWTREGDMSHPKSGLATLITDGPGGSKRMYAGLKNAGETWYDITGNRSDTVKIGSDGWGEFHVNDGSVSIYVQK

SEQ ID NO: 26719 - protein, 483 aa, Bacillus sp.
HHNGTNGTMMQYFEWYLPNDGNHWNRLNSDASNLKSKGITAVWIPPAWKGASQNDVGYGAYDLYDLGEFNQKGTVRTKYGTRSQLQAAVTSLKNNGIQVYGDVVMNHKGGADATEMVRAVEVNPNNRNQEVTGEYTIEAWTRFDFPGRGNTHSSFKWRWYHFDGVDWDQSREFDNRIYKFRGKAWDWEVDTEFGNYDYLMYADYDMDHPEVVNELRNWGVWYTNTLGLDGFRIDAVKHIKYSFTRDWINHVRSATGKNMFAVAEFWKNDLGAIENYLQKTNWNHSVFDVPLHYNLYNASKSGGNYDMRNIFNGTVVQRHPSHAVTFVDNHDSQPEEALESFVDPWFKPLAYALTLTREQGYPSVFYGDYYGIPTHGVPAMRSKIDPILEARQKYAYGPQHDYLDHPDVIGWTREGDSSHPKSGLATLITDGPGGSKRMYAGLKNAGETWYDITGNRSDTVKIGSDGWGEFHVNGGSVSIYVQK

SEQ ID NO: 26720 - protein, 485 aa, Synthetic construct
HHNGTNGTMMQYFEWYLPNDGNHWNRLNSDASNLKSKGITAVWIPPAWKGASQNDVGYGAYDLYDLGEFNQKGTVRTKYGTRSQLQAAVTSLKNNGIQVYGDVVMNHKGGADATEMVQAVEVNPNNRNQEVTGEYTIEAWTRFDFPGRGNTHSSFKWRWYHFDGVDWDQSRRLNNRIYKFRGHGKAWDWEVDTENGNYDYLMYADIDMDHPEVVNELRNWGVWYTNTLGLDGFRIDAVKHIKYSFTRDWINHVRSATGKNMFAVAEFWKNDLGAIENYLQKTNWNHSVFDVPLHYNLYNASKSGGNYDMRNIFNGTVVQRHPSHAVTFVDNHDSQPEEALESFVEEWFKPLAYALTLTREQGYPSVFYGDYYGIPTHGVPAMRSKIDPILEARQKYAYGPQHDYLDHPDVIGWTREGDSSHPKSGLATLITDGPGGSKRMYAGLKNAGETWYDITGNRSDTVKIGSDGWGEFHVNDGSVSIYVQK

SEQ ID NO: 26721 - protein, 485 aa, Synthetic construct
HHNGTNGTMMQYFEWYLPNDGNHWNRLNSDASNLKSKGITAVWIPPAWKGASQNDVGYGAYDLYDLGEFNQKGTVRTKYGTRSQLQAAVTSLKNNGIQVYGDVVMNHKGGADATEMVRAVEVNPNNRNQEVTGEYTIEAWTRFDFPGRGNTHSSFKWRWYHFDGVDWDQSRRLNNRIYKFRGHGKAWDWEVDTENGNYDYLMYADIDMDHPEVVNELRNWGVWYTNTLGLDGFRIDAVKHIKYSFTRDWINHVRSATGKNMFAVAEFWKNDLGAIENYLQKTNWNHSVFDVPLHYNLYNASKSGGNYDMRNIFNGTVVQRHPSHAVTFVDNHDSQPEEALESFVEEWFKPLAYALTLTREQGYPSVFYGDYYGIPTHEVPAMRSKIDPILEARQKYAYGPQHDYLDHPDVIGWTREGDSSHPKSGLATLITDGPGGSKRMYAGLKNAGETWYDITGNRSDTVKIGSDGWGEFHVNDGSVSIYVQK

SEQ ID NO: 26722 - protein, 485 aa, Synthetic construct
HHNGTNGTMMQYFEWYLPNDGNHWNRLNSDASNLKSKGITAVWIPPAWKGASQNDVGYGAYDLYDLGEFNQKGTVRTKYGTRSQLQAAVTSLKNNGIQVYGDVVMNHKGGADATEMVRAVEVNPNNRNQEVTGEYTIEAWTRFDFPGRGNTHSSFKWRWYHFDGVDWDQSRRLNNRIYKFRGHGKAWDWEVDTENGNYDYLMYADIDMDHPEVVNELRNWGVWYTNTLGLDGFRIDAVKHIKYSFTRDWIGHVRSATGKNMFAVAEFWKNDLGAIENYLQKTNWNHSVFDVPLHYNLYNASKSGGNYDMRNIFNGTVVQRHPSHAVTFVDNHDSQPEEALESFVEEWFKPLAYALTLTREQGYPSVFYGDYYGIPTHGVPAMRSKIDPILEARQKYAYGPQHDYLDHPDVIGWTREGDSSHPKSGLATLITDGPGGSKRMYAGLKNAGETWYDITGNRSDTVKIGSDGWGEFHVNDGSVSIYVQK

SEQ ID NO: 26723 - protein, 485 aa, Synthetic construct
HHNGTNGTMMQYFEWYLPNDGNHWNRLNSDASNLASKGITAVWIPPAWKGASQNDVGYGAYDLYDLGEFNQKGTVRTKYGTRSQLQAAVTSLKNNGIQVYGDVVMNHKGGADATEMVRAVEVNPNNRNQEVTGEYTIEAWTRFDFPGRGNTHSSFKWRWYHFDGVDWDQSRRLNNRIYKFRGHGKAWDWEVDTENGNYDYLMYADIDMDHPEVVNELRNWGVWYTNTLGLDGFRIDAVKHIKYSFTRDWINHVRSATGKNMFAVAEFWKNDLGAIENYLQKTNWNHSVFDVPLHYNLYNASKSGGNYDMRNIFNGTVVQRHPSHAVTFVDNHDSQPEEALESFVEEWFKPLAYALTLTREQGYPSVFYGDYYGIPTHGVPAMRSKIDPILEARQKYAYGPQHDYLDHPDVIGWTREGDSSHPKSGLATLITDGPGGSKRMYAGLKNAGETWYDITGNRSDTVKIGSDGWGEFHVNDGSVSIYVQK

SEQ ID NO: 26724 - protein, 483 aa, Bacillus sp.
HHNGTNGTMMQYFEWYLPNDGNHWNRLNSDASNLKSKGITAVWIPPAWKATSQNDVGYGAYDLYDLGEFNQKGTVRTKYGTRSQLQAAVTSLKNNGIQVYGDVVMNHKGGADATEMVRAVEVNPNNRNQEVTGEYTIEAWTRFDFPGRGNTHSSFKWRWYHFDGVDWDQSRQVNNRIYKFRGKAWDWEVDTEFGNYDYLMYADYDMDHPEVVNELRNWGVWYTNTLGLDGFRIDAVKHIKYSFTRDWINHVRSATGKNMFAVAEFWKNDLGAIENYLQKTNWNHSVFDVPLHYNLYNASKSGGNYDMRNIFNGTVVQRHPSHAVTFVDNHDSQPEEALESFVEEWFKPLAYALTLTREQGYPSVFYGDYYGIPTHGVPAMRSKIDPILEARQKYAYGPQHDYLDHPDVIGWTREGDSSHPKSGLATLITDGPGGSKRMYAGLKNAGETWYDITGNRSDTVKIGSDGWGEFHVNDGSVSIYVQK

SEQ ID NO: 26725 - protein, 485 aa, Bacillus sp.
HHNGTNGTMMQYFEWYLPNDGNHWNRLNSDASNLKSKGITAVWIPPAWKGASQNDVGYGAYDLYDLGEFNQKGTVRTKYGTRSQLQAAVTSLKNNGIQVYGDVVMNHKGGADATEMVRAVEVNPNNRNQEVTGEYTIEAWTRFDFPGRGNTHSSFKWRWYHFDGVDWDQSRRFQNRIYKFRGHGKAWDWEVDTEFGNYDYLMYVDYDMDHPEVVNELRNWGVWYTNTLGLDGFRIDAVKHIKYSFTRDWINHVRSATGKNMFAVAEFWKNDLGAIENYLQKTNWNHSVFDVPLHYNLYNASKSGGNYDMRNIFNGTVVQRHPSHAVTFVDNHDSQPEEALESFVEEWFKPLAYALTLTREQGYPSVFYGDYYGIPTHGVPAMRSKIDPILEARQKYAYGPQHDYLDHPDVIGWTREGDSSHPKSGLATLITDGPGGSKRMYAGLKNAGETWYDITGNRSDTVKIGSDGWGEFHVNDGSVSIYVQK

SEQ ID NO: 26726 - protein, 483 aa, Bacillus sp.
HHNGTNGTMMQYFEWYLPNDGNHWNRLNSDASNLKSKGITAVWIPPAWKGASQNDVGYGAYDLYDLGEFNQKGTVRTKYGTRSQLQAAVTSLKNNGIQVYGDVVMNHKGGADATEMVRAVEVNPNNRNQEVTGEYTIEAWTRFDFPGRGNTHSSFKWRWYHFDGVDWDQSREFDNRIYKFRGKAWDWEVDTEFGNYDYLMYADYDMDHPEVVNELRNWGVWYTNTLGLDGFRIDAVKHIKYSFTRDWINHVRSATGKNMFAVAEFWKNDLGAIENYLQKTNWNHSVFDVPLHYNLYNASKSGGNYDMRNIFNGTVVQVHPSHAVTFVDNHDSQPEEALESFVEEWFKPLAYALTLTREQGYPSVFYGDYYGIPTHGVPAMRSKIDPILEARQKYAYGPQHDYLDHPDVIGWTREGDSSHPKSGLATLITDGPGGSKRMYAGLKNAGETWYDITGNRSDTVKIGSDGWGEFHVNYGSVSIYVQK

SEQ ID NO: 26727 - protein, 483 aa, Bacillus sp.
HHNGTNGTMMQYFEWYLPNDGNHWNRLNSDASNLKSKGITAVWIPPAWKGASQNDVGYGAYDLYDLGEFNQKGTVRTKYGTRSQLQAAVTSLKNNGIQVYGDVVMNHKGGADATEMVRAVEVNPNNRNQEVTGEYTIEAWTRFDFPGRGNTHSSFKWRWYHFDGVDWDQSREFNNRIYKFRGKAWDWEVDTEFGNYDYLMYADYDMDHPEVVNELRNWGVWYTNTLGLDGFRIDAVKHIKYSFTRDWINHVRSATGKNMFAVAEFWKNDLGAIENYLQKTNWNHSVFDVPLHYNLYNASKSGGNYDMRNIFNGTVVQRHPSHAVTFVDNHDSQPEEALESFVEEWFKPLAYALTLTREQGYPSVFYGDYYGIPTHGVPAMRSKIDPILEARQKYAYGPQHDYLDHPDVIGWTREGDSSHPKSGLATLITDGPGGSKRMYAGLKNAGETWYDITGNRSDTVKIGSDGWGEFHVNDGSVSIYVQK

SEQ ID NO: 26728 - protein, 485 aa, Synthetic construct
HHNGTNGTMMQYFEWYLPNDGNHWNRLNSDASNLKSKGITAVWIPPAWKGASQNDVGYGAYDLYDLGEFNQKGTVRTKYGTRSQLQAAVTSLKNNGIQVYGDVVMNHKGGADATEMVRAVEVNPNNRNQEVTGEYTIEAWTRFDFPGRGNTHSSFKWRWYHFDGVDWDQSRRLNNRIYKFRGHGKAWDWEVDTENGNYDYLMYADIDMDHPEVVNELRNWGVWYTNTLGLDGFRIDAVKHIKYSFTRDWINHVRSATGKNMFAVAEFWKNDLGAIENYLQKTNWNHSVFDVPLHYNLYNASKSGGNYDMRNIFNGTVVQRHPSHAVTFVDNHDSQPEEALESFVEEWFKPLAYALTLTREQGYPSVFYGDYYGIPTHGVPAMRSKIDPILEARQKYAYGPQHDYLDHPDVIGWTREGDSSHPKSGLATLITDGPGGSKRMYAGLANAGETWYDITGNRSDTVKIGSDGWGEFHVNDGSVSIYVQK

SEQ ID NO: 26729 - protein, 485 aa, Synthetic construct
HHNGTNGTMMQYFEWYLPNDGNHWNRLNSDASNLKSKGITAVWIPPAWKGASQNDVGYGAYDLYDLGEFNQKGTVRTKYGTRSQLQAAVTSLKNNGIQVYGDVVMNHKGGADATEMVRAVEVNPNNRNQEVTGEYTIEAWTRFDFPGRGNTHSSFKWRWYHFDGVDWDQSRRLNNRIYKFRGHGKAWDWEVDTENGNYDYLMYADYDMDHPEVVNELRNWGVWYTNTLGLDGFRIDAVKHIKYSFTRDWINHVRSATGKNMFAVAEFWKNDLGAIENYLQKTNWNHSVFDVPLHYNLYNASKSGGNYDMRNIFNGTVVQRHPSHAVTFVDNHDSQPEEALESFVEEWFKPLAYALTLTREQGYPSVFYGDYYGIPTHGVPAMRSKIDPILEARQKYAYGPQHDYLDHPDVIGWTREGDSSHPKSGLATLITDGPGGSKRMYAGLKNAGETWYDITGNRSDTVKIGSDGWGEFHVNDGSVSIYVQK

SEQ ID NO: 26730 - protein, 483 aa, Synthetic construct
HHNGTNGTMMQYFEWYLPNDGNHWNRLNSDASNLKSKGITAVWIPPAWKGASQNDVGYGAYDLYDLGEFNQKGTVRTKYGTRSQLQAAVTSLKNNGIQVYGDVVMNHKGGADATEMVCAVEVNPNNRNQEVTGEYTIEAWTRFDFPGRGNTHSSFKWRWYHFDGVDWDQSRRLNNRIYKFRGKAWDWEVDTENGNYDYLMYADIDMDHPEVVNELRNWGVWYTNTLGLDGFRIDAVKHIKYSFTRDWINHVRSATGKNMFAVAEFWKNDLGAIENYLQKTNWNHSVFDVPLHYNLYNASKSGGNYDMRNIFNGTVVQRHPSHAVTFVDNHDSQPEEALESFVEEWFKPLAYALTLTREQGYPSVFYGDYYGIPTHGVPAMRSKIDPILEARQKYAYGPQHDYLDHPDVIGWTREGDSSHPKSGLATLITDGPGGSKRMYAGLKNAGETWYDITGNRSDTVKIGSDGWGEFHVNDGSVSIYVQK

SEQ ID NO: 26731 - protein, 483 aa, Bacillus sp.
HHNGTNGTMMQYFEWYLPNDGNHWNRLNSDASNLKSKGITAVWIPPAWKGASQNDVGYGAYDLYDLGEFNQKGTVRTKYGTRSQLQAAVTSLKNNGIQVYGDVVMNHKGGADATEMVRAVEVNPNNRNQEVTGEYTIEAWTRFDFPGRGNTHSSFKWRWYHFDGVDWDQSRRFDNRIYKFRGKAWDWEVDTEFGNYDYLMYADYDMDHPEVVNELRNWGVWYTNTLGLDGFRIDAVKHIKYSFTRDWINHVRSATGKNMFAVAEFWKNDLGAIENYLQKTNWNHSVFDVPLHYNLYNASKSGGNYDMRNIFNGTVVQRHPSHAVTFVDNHDSQPEEALESFVEEWFKPLAYALTLTREQGYPSVFYGDYYGIPTHGVPAMRSKIDPILEARQKYAYGPQHDYLDHPDVIGWTREGDSSHPKSGLATLITDGPGGSKRMYAGLKNAGETWYDITGNRSDTVKIGSDGWGEFHVNDGSVSIYVQK

SEQ ID NO: 26732 - protein, 483 aa, Bacillus sp.
HHNGTNGTMMQYFEWYLPNDGNHWNRLNSDASNLKSKGITAVWIPPAWKATSQNDVGYGAYDLYDLGEFNQKGTVRTKYGTRSQLQAAVTSLKNNGIQVYGDVVMNHKGGADATEMVRAVEVNPNNRNQEVTGEYTIEAWTRFDFPGRGNTHSSFKWRWYHFDGVDWDQSRQLNNRIYKFRGKAWDWEVDTEFGNYDYLMYADYDMDHPEVVNELRNWGVWYTNTLGLDGFRIDAVKHIKYSFTRDWINHVRSATGKNMFAVAEFWKNDLGAIENYLQKTNWNHSVFDVPLHYNLYNASKSGGNYDMRNIFNGTVVQRHPSHAVTFVDNHDSQPEEALESFVEEWFKPLAYALTLTREQGYPSVFYGDYYGIPTHGVPAMRSKIDPILEARQKYAYGPQHDYLDHPDVIGWTREGDSSHPKSGLATLITDGPGGSKRMYAGLKNAGETWYDITGNRSDTVKIGSDGWGEFHVNDGSVSIYVQK

SEQ ID NO: 26733 - protein, 483 aa, Synthetic construct
HHNGTNGTMMQYFEWYLPNDGNHWNRLNSDASNLKSKGITAVWIPPAWKGASQNDVGYGAYDLYDLGEFNQKGTVRTKYGTRSQLQAAVTSLKNNGIQVYGDVVMNHKGGADATELVRAVEVNPNNRNQEVTGEYTIEAWTRFDFPGRGNTHSSFKWRWYHFDGVDWDQSRRLNNRIYKFRGKAWDWEVDTENGNYDYLMYADIDMDHPEVVNELRNWGVWYTNTLGLDGFRIDAVKHIKYSFTRDWINHVRSATGKNMFAVAEFWKNDLGAIENYLQKTNWNHSVFDVPLHYNLYNASKSGGNYDMRNIFNGTVVQRHPSHAVTFVDNHDSQPEEALESFVEEWFKPLAYALTLTREQGYPSVFYGDYYGIPTHGVPAMRSKIDPILEARQKYAYGPQHDYLDHPDVIGWTREGDSSHPKSGLATLITDGPGGSKRMYAGLKNAGETWYDITGNRSDTVKIGSDGWGEFHVNDGSVSIYVQK

SEQ ID NO: 26734 - protein, 485 aa, Synthetic construct
HHNGTNGTMMQYFEWYLPNDGNHWNRLNSDASNLKSKGITAVWIPPAWKGASQNDVGYGAYDLYDLGEFNQKGTVRTKYGTRSQLQAAVTSLKNNGIQVYGDVVMNHKGGADATEMVRAVEVNPNNRNQEVTGEYTIEAWTRFDFPGRGNTHSSFKWRWYHFDGVDWDQSRRLSNRIYKFRGHGKAWDWEVDTENGNYDYLMYADIDMDHPEVVNELRNWGVWYTNTLGLDGFRIDAVKHIKYSFTRDWINHVRSATGKNMFAVAEFWKNDLGAIENYLQKTNWNHSVFDVPLHYNLYNASKSGGNYDMRNIFNGTVVQRHPSHAVTFVDNHDSQPEEALESFVEEWFKPLAYALTLTREQGYPSVFYGDYYGIPTHGVPAMRSKIDPILEARQKYAYGPQHDYLDHPDVIGWTREGDSSHPKSGLATLITDGPGGSKRMYAGLKNAGETWYDITGNRSDTVKIGSDGWGEFHVNDGSVSIYVQK

SEQ ID NO: 26735 - protein, 485 aa, Synthetic construct
HHNGTNGTMMQYFEWYLPNDGNHWNRLNSDASNLKSKGITAVWIPPAWKGASQNDVGYGAYDLYDLGEFNQKGTVRTKYGTRSQLQAAVTSLKNNGIQVYGDVVMNHKGGADATEMVRAVEVNPNNRNQEVTGEYTIEAWTRFDFPGRGNTHSSFKWRWYHFDGVDWDQSRRLNNRIYKFRGHGKAWDWEVDTENGNYDYLMYADIDMDHPEVVNELRNWGVWYTNTLGLDGFRIDAVKHIKYSFTRDWINHVRSATGKNMFAVAEFWKNDLGAIENYLQKTNWNHSVFDVPLHYNLYNASKSGGNYDMRQIFNGTVVQRHPSHAVTFVDNHDSQPEEALESFVEEWFKPLAYALTLTREQGYPSVFYGDYYGIPTHGVPAMRSKIDPILEARQKYAYGPQHDYLDHPDVIGWTREGDSSHPKSGLATLITDGPGGSKRMYAGLKNAGETWYDITGNRSDTVKIGSDGWGEFHVNDGSVSIYVQK

SEQ ID NO: 26736 - protein, 483 aa, Bacillus sp.
HHNGTNGTMMQYFEWYLPNDGNHWNRLNSDASNLKSKGITAVWIPPAWKATSQNDVGYGAYDLYDLGEFNQKGTVRTKYGTRSQLQAAVTSLKNNGIQVYGDVVMNHKGGADATEMVRAVEVNPNNRNQEVTGEYTIEAWTRFDFPGRGNTHSSFKWRWYHFDGVDWDQSRRFNNRIYKFRGKAWDWEVDTEFGNYDYLMYADYDMDHPEVVNELRNWGVWYTNTLGLDGFRIDAVKHIKYSFTRDWINHVRSATGKNMFAVAEFWKNDLGAIENYLQKTNWNHSVFDVPLHYNLYNASKSGGNYDMRNIFNGTVVQRHPSHAVTFVDNHDSQPEEALESFVEEWFKPLAYALTLTREQGYPSVFYGDYYGIPTHGVPAMRSKIDPILEARQKYAYGPQHDYLDHPDVIGWTREGDSSHPKSGLATLITDGPGGSKRMYAGLKNAGETWYDITGNRSDTVKIGSDGWGEFHVNDGSVSIYVQK

SEQ ID NO: 26737 - protein, 483 aa, Synthetic construct
HHNGTNGTMMQYFEWYLPNDGNHWNRLNSDASNLKSKGITAVWIPPAWKGASQNDVGYGAYDLYDLGEFNQKGTVRTKYGTRSQLQAAVTSLKNNGIQVYGDVVMNHKGGADATEMVVAVEVNPNNRNQEVTGEYTIEAWTRFDFPGRGNTHSSFKWRWYHFDGVDWDQSRRLNNRIYKFRGKAWDWEVDTENGNYDYLMYADIDMDHPEVVNELRNWGVWYTNTLGLDGFRIDAVKHIKYSFTRDWINHVRSATGKNMFAVAEFWKNDLGAIENYLQKTNWNHSVFDVPLHYNLYNASKSGGNYDMRNIFNGTVVQRHPSHAVTFVDNHDSQPEEALESFVEEWFKPLAYALTLTREQGYPSVFYGDYYGIPTHGVPAMRSKIDPILEARQKYAYGPQHDYLDHPDVIGWTREGDSSHPKSGLATLITDGPGGSKRMYAGLKNAGETWYDITGNRSDTVKIGSDGWGEFHVNDGSVSIYVQK

SEQ ID NO: 26738 - protein, 485 aa, Synthetic construct
HHNGTNGTMMQYFEWYLPNDGNHWNRLNSDASNLKSKGITAVWIPPAWKGASQNDVGYGAYDLYDLGEFNQKGTVRTKYGTRSQLKAAVTSLKNNGIQVYGDVVMNHKGGADATEMVRAVEVNPNNRNQEVTGEYTIEAWTRFDFPGRGNTHSSFKWRWYHFDGVDWDQSRRLNNRIYKFRGHGKAWDWEVDTENGNYDYLMYADIDMDHPEVVNELRNWGVWYTNTLGLDGFRIDAVKHIKYSFTRDWINHVRSATGKNMFAVAEFWKNDLGAIENYLQKTNWNHSVFDVPLHYNLYNASKSGGNYDMRNIFNGTVVQRHPSHAVTFVDNHDSQPEEALESFVEEWFKPLAYALTLTREQGYPSVFYGDYYGIPTHGVPAMRSKIDPILEARQKYAYGPQHDYLDHPDVIGWTREGDSSHPKSGLATLITDGPGGSKRMYAGLKNAGETWYDITGNRSDTVKIGSDGWGEFHVNDGSVSIYVQK

SEQ ID NO: 26739 - protein, 485 aa, Synthetic construct
HHNGTNGTMMQYFEWYLPNDGNHWNRLNSDASNLKSKGITAVWIPPAWKGASQNDVGYGAYDLYDLGEFNQKGTVRTKYGTRSQLQAAVTSLKNNGIQVYGDVVMNHKGGADATEMVRAVEVNPNNRNQEVTGEYTIEAWTRFDFPGRGNTHSSFKWRWYHFDGVDWDQSRRLNNRIYKFRGHGKAWDWEVDTENGNYDYLMYADIDMDHPEVVNELRNWGVWYTNTLGLDGFRIDAVKHIKYSFTRDWINHVRSATGKNMFAVAEFWKNDLGAIENYLQKTNWNHSVFDVPLHYNLYNASKSGGNYDMRNIFNGTVVQRHPSHAVTFVDNHDSQPEEALESFVEEWFKPLAYALTLTREQGYPSVFYGDYYGIPTHGVPAMRSKIDPILEARQKYAYGPQHDYLDHPDVIGWTREGDSSHPGSGLATLITDGPGGSKRMYAGLKNAGETWYDITGNRSDTVKIGSDGWGEFHVNDGSVSIYVQK

SEQ ID NO: 26740 - protein, 485 aa, Synthetic construct
HHNGTNGTMMQYFEWYLPNDGNHWNRLNSDASNLKSKGITAVWIPPAWKGASQNDVGYGAYDLYDLGEFNQKGTVRTKYGTRSQLQAAVTSLKNNGIQVYGDVVMNHKGGADATEMVRAVEVNPNNRNQEVTGEYTIEAWTRFDFPGRGNTHSSFKWRWYHFDGVDWDQSRRLNNRIYKFRGHGKAWDWEVDSEFGNYDYLMYADIDMDHPEVVNELRNWGVWYTNTLGLDGFRIDAVKHIKYSFTRDWINHVRSATGKNMFAVAEFWKNDLGAIENYLQKTNWNHSVFDVPLHYNLYNASKSGGNYDMRNIFNGTVVQRHPSHAVTFVDNHDSQPEEALESFVEEWFKPLAYALTLTREQGYPSVFYGDYYGIPTHGVPAMRSKIDPILEARQKYAYGPQHDYLDHPDVIGWTREGDSSHPKSGLATLITDGPGGSKRMYAGLKNAGETWYDITGNRSDTVKIGSDGWGEFHVNDGSVSIYVQK

SEQ ID NO: 26741 - protein, 483 aa, Cytophaga sp.
HHNGTNGTMMQYFEWYLPNDGNHWNRLRSDASNLKDKGISAVWIPPAWKGASQNDVGYGAYDLYDLGEFNQKGTIRTKYGTRNQLQAAVNALKSNGIQVYGDVVMNHKGGADATEMVKAVEVNPNNRNQEVSGEYTIEAWTKFDFPGRGNTHSNFKWRWYHFDGVDWDQSRKLNNRIYKFRGKGWDWEVDTEFGNYDYLMYADIDMDHPEVVNELRNWGVWYTNTLGLDGFRIDAVKHIKYSFTRDWINHVRSATGKNMFAVAEFWKNDLGAIENYLNKTNWNHSVFDVPLHYNLYNASKSGGNYDMRQIFNGTVVQKHPMHAVTFVDNHDSQPEEALESFVEEWFKPLAYALTLTREQGYPSVFYGDYYGIPTHGVPAMKSKIDPILEARQKYAYGTQRDYIDNPDVIGWTREGDSTKAKSGLATVITDGPGGSKRMYVGTSNAGEIWYDLTGNRTDKITIGSDGYATFPVNGGSVSVWVQQ

SEQ ID NO: 26742 - protein, 485 aa, Synthetic construct
HHNGTNGTMMQYFEWYLPNDGNHWNRLNSDASNLKSKGITAVWIPPAWKGASQNDVGYGAYDLYDLGEFNQKGTVRTKYGTRSQLQAAVTSLKNNGIQVYGDVVMNHKGGADATEMVRAVEVNPNNRNQEVTGEYTIEAWTRFDFPGRGNTHSSFKWRWYHFDGVDWDQSRRLNNRIYKFRGHGKAWDWEVDTENGNYDYLMYADIDMDHPEVVNELRNWGVWYTNTLGLDGFRIDAVKHIKYSFTRDWINHVRSATGKNMFAVAEFWKNDLGAIENYLQKTNWNHSVFDVPLHYNLYNASKSGGNYDMRNIFNGTVVQRHPTHAVTFVDNHDSQPEEALESFVEEWFKPLAYALTLTREQGYPSVFYGDYYGIPTHGVPAMRSKIDPILEARQKYAYGPQHDYLDHPDVIGWTREGDSSHPKSGLATLITDGPGGSKRMYAGLKNAGETWYDITGNRSDTVKIGSDGWGEFHVNDGSVSIYVQK

SEQ ID NO: 26743 - protein, 483 aa, Synthetic construct
HHNGTNGTMMQYFEWYLPNDGNHWNRLNSDASNLKSKGITAVWIPPAWKGASQNDVGYGAYDLYDLGEFNQKGTVRTKYGTRSQLQAAVTSLKNNGIQVYGDVVMNHKGGADATEYVRAVEVNPNNRNQEVTGEYTIEAWTRFDFPGRGNTHSSFKWRWYHFDGVDWDQSRRLNNRIYKFRGKAWDWEVDTENGNYDYLMYADIDMDHPEVVNELRNWGVWYTNTLGLDGFRIDAVKHIKYSFTRDWINHVRSATGKNMFAVAEFWKNDLGAIENYLQKTNWNHSVFDVPLHYNLYNASKSGGNYDMRNIFNGTVVQRHPSHAVTFVDNHDSQPEEALESFVEEWFKPLAYALTLTREQGYPSVFYGDYYGIPTHGVPAMRSKIDPILEARQKYAYGPQHDYLDHPDVIGWTREGDSSHPKSGLATLITDGPGGSKRMYAGLKNAGETWYDITGNRSDTVKIGSDGWGEFHVNDGSVSIYVQK

SEQ ID NO: 26744 - protein, 485 aa, Synthetic construct
HHNGTNGTMMQYFEWYLPNDGNHWNRLNSDASNLKSKGITAVWIPPAWKGASQNDVGYGAYDLYDLGEFNQKGTVRTKYGTRSQLQAAVTSLKNNGIQVYGDVVMNHKGGADATEMVRAVEVNPNNRNQEVTGEYTIEAWTRFDFPGRGNTHSSFKWRWYHFDGVDWDQSRRYSNRIYKFRGHGKAWDWEVDTENGNYDYLMYADIDMDHPEVVNELRNWGVWYTNTLGLDGFRIDAVKHIKYSFTRDWINHVRSATGKNMFAVAEFWKNDLGAIENYLQKTNWNHSVFDVPLHYNLYNASKSGGNYDMRNIFNGTVVQRHPSHAVTFVDNHDSQPEEALESFVEEWFKPLAYALTLTREQGYPSVFYGDYYGIPTHGVPAMRSKIDPILEARQKYAYGPQHDYLDHPDVIGWTREGDSSHPKSGLATLITDGPGGSKRMYAGLKNAGETWYDITGNRSDTVKIGSDGWGEFHVNDGSVSIYVQK

SEQ ID NO: 26745 - protein, 485 aa, Synthetic construct
HHNGTNGTMMQYFEWYLPNDGNHWNRLNSDASNLKSKGITAVWIPPAWKGASQNDVGYGAYDLYDLGEFNQKGTVRTKYGTRSQLQAAVTSLKNNGIQVYGDVVMNHKGGADATEMVTAVEVNPNNRNQEVTGEYTIEAWTRFDFPGRGNTHSSFKWRWYHFDGVDWDQSRRLNNRIYKFRGHGKAWDWEVDTENGNYDYLMYADIDMDHPEVVNELRNWGVWYTNTLGLDGFRIDAVKHIKYSFTRDWINHVRSATGKNMFAVAEFWKNDLGAIENYLQKTNWNHSVFDVPLHYNLYNASKSGGNYDMRNIFNGTVVQRHPSHAVTFVDNHDSQPEEALESFVEEWFKPLAYALTLTREQGYPSVFYGDYYGIPTHGVPAMRSKIDPILEARQKYAYGPQHDYLDHPDVIGWTREGDSSHPKSGLATLITDGPGGSKRMYAGLKNAGETWYDITGNRSDTVKIGSDGWGEFHVNDGSVSIYVQK

SEQ ID NO: 26746 - protein, 483 aa, Synthetic construct
HHNGTNGTMMQYFEWYLPNDGNHWNRLNSDASNLKSKGITAVWIPPAWKGASQNDVGYGAYDLYDLGEFNQKGTVRTKYGTRSQLQAAVTSLKNNGIQVYGDVVMNHKGGADATEMVPAVEVNPNNRNQEVTGEYTIEAWTRFDFPGRGNTHSSFKWRWYHFDGVDWDQSRRLNNRIYKFRGKAWDWEVDTENGNYDYLMYADIDMDHPEVVNELRNWGVWYTNTLGLDGFRIDAVKHIKYSFTRDWINHVRSATGKNMFAVAEFWKNDLGAIENYLQKTNWNHSVFDVPLHYNLYNASKSGGNYDMRNIFNGTVVQRHPSHAVTFVDNHDSQPEEALESFVEEWFKPLAYALTLTREQGYPSVFYGDYYGIPTHGVPAMRSKIDPILEARQKYAYGPQHDYLDHPDVIGWTREGDSSHPKSGLATLITDGPGGSKRMYAGLKNAGETWYDITGNRSDTVKIGSDGWGEFHVNDGSVSIYVQK

SEQ ID NO: 26747 - protein, 485 aa, Bacillus sp.
HHNGTNGTMMQYFEWYLPNDGNHWNRLNSDASNLKSKGITAVWIPPAWKAASQNDVGYGAYDLYDLGEFNQKGTVRTKYGTRSQLQAAVTSLKNNGIQVYGDVVMNHKGGADATEMVRAVEVNPNNRNQEVTGEYTIEAWTRFDFPGRGNTHSSFKWRWYHFDGVDWDQSRQFNNRIYKFRGHGKAWDWEVDTEFGNYDYLMYADYDMDHPEVVNELRNWGVWYTNTLGLDGFRIDAVKHIKYSFTRDWINHVRSATGKNMFAVAEFWKNDLGAIENYLQKTNWNHSVFDVPLHYNLYNASKSGGNYDMRNIFNGTVVQRHPSHAVTFVDNHDSQPEEALESFVEEWFKPLAYALTLTREQGYPSVFYGDYYGIPTHGVPAMRSKIDPILEARQKYAYGPQHDYLDHPDVIGWTREGDSSHPKSGLATLITDGPGGSKRMYAGLKNAGETWYDITGNRSDTVKIGSDGWGEFHVNDGSVSIYVQK

SEQ ID NO: 26748 - protein, 483 aa, Synthetic construct
HHNGTNGTMMQYFEWYLPNDGNHWNRLNSDASNLKSKGITAVWIPPAWKGASQNDVGYGAYDLYDLGEFNQKGTVRTKYGTRSQLQAAVTSLKNNGIQVYGDVVMNHKGGADATEFVRAVEVNPNNRNQEVTGEYTIEAWTRFDFPGRGNTHSSFKWRWYHFDGVDWDQSRRLNNRIYKFRGKAWDWEVDTENGNYDYLMYADIDMDHPEVVNELRNWGVWYTNTLGLDGFRIDAVKHIKYSFTRDWINHVRSATGKNMFAVAEFWKNDLGAIENYLQKTNWNHSVFDVPLHYNLYNASKSGGNYDMRNIFNGTVVQRHPSHAVTFVDNHDSQPEEALESFVEEWFKPLAYALTLTREQGYPSVFYGDYYGIPTHGVPAMRSKIDPILEARQKYAYGPQHDYLDHPDVIGWTREGDSSHPKSGLATLITDGPGGSKRMYAGLKNAGETWYDITGNRSDTVKIGSDGWGEFHVNDGSVSIYVQK

SEQ ID NO: 26749 - protein, 485 aa, Synthetic construct
HHNGTNGTMMQYFEWYLPNDGNHWNRLNSDASNLKSKGITAVWIPPAWKGASQNDVGYGAYDLYDLGEFNQKGTVRTKYGTRSQLQAAVTSLKNNGIQVYGDVVMNHKGGADATEMVRAVEVNPNNRNQEVTGTYTIEAWTRFDFPGRGNTHSSFKWRWYHFDGVDWDQSRRLNNRIYKFRGHGKAWDWEVDTENGNYDYLMYADIDMDHPEVVNELRNWGVWYTNTLGLDGFRIDAVKHIKYSFTRDWINHVRSATGKNMFAVAEFWKNDLGAIENYLQKTNWNHSVFDVPLHYNLYNASKSGGNYDMRNIFNGTVVQRHPSHAVTFVDNHDSQPEEALESFVEEWFKPLAYALTLTREQGYPSVFYGDYYGIPTHGVPAMRSKIDPILEARQKYAYGPQHDYLDHPDVIGWTREGDSSHPKSGLATLITDGPGGSKRMYAGLKNAGETWYDITGNRSDTVKIGSDGWGEFHVNDGSVSIYVQK

SEQ ID NO: 26750 - protein, 483 aa, Bacillus sp.
HHNGTNGTMMQYFEWYLPNDGNHWNRLNSDASNLKSKGITAVWIPPAWKAASQNDVGYGAYDLYDLGEFNQKGTVRTKYGTRSQLQAAVTSLKNNGIQVYGDVVMNHKGGADATEMVRAVEVNPNNRNQEVTGEYTIEAWTRFDFPGRGNTHSSFKWRWYHFDGVDWDQSRDLQNRIYKFRGKAWDWEVDTEFGNYDYLMYADYDMDHPEVVNELRNWGVWYTNTLGLDGFRIDAVKHIKYSFTRDWINHVRSATGKNMFAVAEFWKNDLGAIENYLQKTNWNHSVFDVPLHYNLYNASKSGGNYDMRNIFNGTVVQAHPMHAVTFVDNHDSQPEEALESFVEEWFKPLAYALTLTREQGYPSVFYGDYYGIPTHGVPAMRSKIDPILEARQKYAYGPQHDYLDHPDVIGWTREGDSSHPKSGLATLITDGPGGSKRMYAGLKNAGETWYDITGNRSDTVKIGSDGWGEFHVNYGSVSIYVQK

SEQ ID NO: 26751 - protein, 483 aa, Bacillus sp.
HHNGTNGTMMQYFEWYLPNDGNHWNRLNSDASNLKSKGITAVWIPPAWKGASQNDVGYGAYDLYDLGEFNQKGTVRTKYGTRSQLQAAVTSLKNNGIQVYGDVVMNHKGGADATEMVRAVEVNPNNRNQEVTGEYTIEAWTRFDFPGRGNTHSSFKWRWYHFDGVDWDQSRRLNNRIYKFRGKAWDWEVDTEFGNYDYLMYADYDMDHPEVVNELRNWGVWYTNTLGLDGFRIDAVKHIKYSFTRDWINHVRSATGKNMFAVAEFWKNDLGAIENYLQKTNWNHSVFDVPLHYNLYNASKSGGNYDMRNIFNGTVVQRHPSHAVTFVDNHDSQPEEALESFVEEWFKPLAYALTLTREQGYPSVFYGDYYGIPTHGVPAMKSKIDPILEARQKYAYGPQHDYLDHPDVIGWTREGDSSHPKSGLATLITDGPGGSKRMYAGLKNAGETWYDITGNRSDTVKIGSDGWGEFHVNDGSVSIYVQK

SEQ ID NO: 26752 - protein, 483 aa, Synthetic construct
HHNGTNGTMMQYFEWYLPNDGNHWNRLNSDASNLKSKGITAVWIPPAWKGASQNDVGYGAYDLYDLGEFNQKGTVRTKYGTRSQLQAAVTSLKNNGIQVYGDVVMNHKGGADATEMVRAVEVNPNNRNQEVTGEYTIEAWTRFDFPGRGNTHSSFKWRWYHFDGVDWDQSRRLNNRIYKFRGKAWDWEVDTENGNYDYLMYADLDMDHPEVVNELRNWGVWYTNTLGLDGFRIDAVKHIKYSFTRDWINHVRSATGKNMFAVAEFWKNDLGAIENYLQKTNWNHSVFDVPLHYNLYNASKSGGNYDMRNIFNGTVVQRHPSHAVTFVDNHDSQPEEALESFVEEWFKPLAYALTLTREQGYPSVFYGDYYGIPTHGVPAMRSKIDPILEARQKYAYGPQHDYLDHPDVIGWTREGDSSHPKSGLATLITDGPGGSKRMYAGLKNAGETWYDITGNRSDTVKIGSDGWGEFHVNDGSVSIYVQK

SEQ ID NO: 26753 - protein, 485 aa, Bacillus sp.
HHNGTNGTMMQYFEWYLPNDGNHWNRLNSDASNLKSKGITAVWIPPAWKGASQNDVGYGAYDLYDLGEFNQKGTVRTKYGTRSQLQAAVTSLKNNGIQVYGDVVMNHKGGADATEMVRAVEVNPNNRNQEVTGEYTIEAWTRFDFPGRGNTHSSFKWRWYHFDGVDWDQSRQLENRIYKFRGHGKAWDWEVDTEFGNYDYLMYADYDMDHPEVVNELRNWGVWYTNTLGLDGFRIDAVKHIKYSFTRDWINHVRSATGKNMFAVAEFWKNDLGAIENYLQKTNWNHSVFDVPLHYNLYNASKSGGNYDMRNIFNGTVVQRHPSHAVTFVDNHDSQPEEALESFVEEWFKPLAYALTLTREQGYPSVFYGDYYGIPTHGVPAMRSKIDPILEARQKYAYGPQHDYLDHPDVIGWTREGDSSHPKSGLATLITDGPGGSKRMYAGLKNAGETWYDITGNRSDTVKIGSDGWGEFHVNDGSVSIYVQK

SEQ ID NO: 26754 - protein, 483 aa, Bacillus sp.
HHNGTNGTMMQYFEWYLPNDGNHWNRLNSDASNLKSKGITAVWIPPAWKGTSQNDVGYGAYDLYDLGEFNQKGTVRTKYGTRSQLQAAVTSLKNNGIQVYGDVVMNHKGGADATEMVRAVEVNPNNRNQEVTGEYTIEAWTRFDFPGRGNTHSSFKWRWYHFDGVDWDQSRKISNRIYKFRGKAWDWEVDTEFGNYDYLMYADYDMDHPEVVNELRNWGVWYTNTLGLDGFRIDAVKHIKYSFTRDWINHVRSATGKNMFAVAEFWKNDLGAIENYLQKTNWNHSVFDVPLHYNLYNASKSGGNYDMRNIFNGTVVQRHPSHAVTFVDNHDSQPEEALESFVEEWFKPLAYALTLTREQGYPSVFYGDYYGIPTHGVPAMRSKIDPILEARQKYAYGPQHDYLDHPDVIGWTREGDSSHPKSGLATLITDGPGGSKRMYAGLKNAGETWYDITGNRSDTVKIGSDGWGEFHVNDGSVSIYVQK

SEQ ID NO: 26755 - protein, 485 aa, Synthetic construct
HHNGTNGTMMQYFEWYLPNDGNHWNRLNSDASNLKSKGITAVWIPPAWKGASQNDVGYGAYDLYDLGEFNQKGTVRTKYGTRSQLQAAVTSLKNNGIQVYGDVVMNHKGGADATEMVRAVEVNPNNRNQEVTGEYTIEAWTRFDFPGRGNTHSSFKWRWYHFDGVDWDQSRRLNNRIYKFRGHGKAWDWEVDTENGNYDYLMYADIDMDHPEVVNELRNWGVWYTNTLGLDGFRIDAVKHIKYSFTRDWINHVRAATGKNMFAVAEFWKNDLGAIENYLQKTNWNHSVFDVPLHYNLYNASKSGGNYDMRNIFNGTVVQRHPSHAVTFVDNHDSQPEEALESFVEEWFKPLAYALTLTREQGYPSVFYGDYYGIPTHGVPAMRSKIDPILEARQKYAYGPQHDYLDHPDVIGWTREGDSSHPKSGLATLITDGPGGSKRMYAGLKNAGETWYDITGNRSDTVKIGSDGWGEFHVNDGSVSIYVQK

SEQ ID NO: 26756 - protein, 485 aa, Synthetic construct
HHNGTNGTMMQYFEWYLPNDGNHWNRLNSDASNLKSKGITAVWIPPAWKGASQNDVGYGAYDLYDLGEFNQKGTVRTKYGTRSQLQAAVTSLKNNGIQVYGDVVMNHKGGADATEMVRAVEVNPNNRNQEVTGEYTIEAWTRFDFPGRGNTHSSFKWRWYHFDGVDWDQSRRLNNRIYKFRGHGKAWDWEVDTENGNYDYLMYADIDMDHPEVVNELRNWGVWYTNTLGLDGFRIDAVKHIKYSFTRDWINHVRSATGKNMFAVAEFWKNDLGAIENYLQKTNWNHSVFDVPLHYNLYNASKSGGNYDMRNIFNGTVVQRHPSHAVTFVDNHDSQPEEALESFVEEWFKPLAYALTLTREQGYPSVFYGDYYGIPTHGVPAMRSKIDPILEARQKYAYGPQHDYLDHQDVIGWTREGDSSHPKSGLATLITDGPGGSKRMYAGLKNAGETWYDITGNRSDTVKIGSDGWGEFHVNDGSVSIYVQK

SEQ ID NO: 26757 - protein, 485 aa, Bacillus sp.
HHNGTNGTMMQYFEWYLPNDGNHWNRLNSDASNLKSKGITAVWIPPAWKGASQNDVGYGAYDLYDLGEFNQKGTVRTKYGTRSQLQAAVTSLKNNGIQVYGDVVMNHKGGADATEMVRAVEVNPNNRNQEVTGEYTIEAWTRFDFPGRGNTHSSFKWRWYHFDGVDWDQSRQISNRIYKFRGHGKAWDWEVDTEFGNYDYLMYADYDMDHPEVVNELRNWGVWYTNTLGLDGFRIDAVKHIKYSFTRDWINHVRSATGKNMFAVAEFWKNDLGAIENYLQKTNWNHSVFDVPLHYNLYNASKSGGNYDMRNIFNGTVVQRHPSHAVTFVDNHDSQPEEALESFVEEWFKPLAYALTLTREQGYPSVFYGDYYGIPTHGVPAMRSKIDPILEARQKYAYGPQHDYLDHPDVIGWTREGDSSHPKSGLATLITDGPGGSKRMYAGLKNAGETWYDITGNRSDTVKIGSDGWGEFHVNDGSVSIYVQK

SEQ ID NO: 26758 - protein, 485 aa, Synthetic construct
HHNGTNGTMMQYFEWYLPNDGNHWNRLNSDASNLKSKGITAVWIPPAWKGASQNDVGYGAYDLYDLGEFNQKGTVRTKYGTRSQLQAAVTSLKNNGIQVYGDVVMNHKGGADATEMVRAVEVNPNNRNQEVTGEYTIEAWTRFDFPGRGNTHSSFKWRWYHFDGVDWDQSRRLNNRIYKFRGHGKAWDWEVDTENGNYDYLMYADIDMDHPEVVNELRNWGVWYTNTLGLDGFRIDAVKHIKYSFTRDWINHVRSATGKNMFAVAEFWKNDLGAIENYLQKTNWNHSVFDVPLHYNLYNASKSGGNYDMRNIFNGTVVQRHPSHAVTFVDNHDSQPEEALESFVEEWFKPLAYALTLTREQGYPSVFYGDYYGIPTHGVPAMRSKIDPILEARQKYAYGPQHDYLDHPDVIGWTREGDSSHPKSGLATLITDGPGGSKRMYAGLQNAGETWYDITGNRSDTVKIGSDGWGEFHVNDGSVSIYVQK

SEQ ID NO: 26759 - protein, 483 aa, Bacillus sp.
HHNGTNGTMMQYFEWYLPNDGNHWNRLNSDASNLKSKGITAVWIPPAWKGASQNDVGYGAYDLYDLGEFNQKGTVRTKYGTRSQLLAAVTSLKNNGIQVYGDVVMNHKGGADATEMVRAVEVNPNNRNQEVTGEYTIEAWTRFDFPGRGNTHSSFKWRWYHFDGVDWDQSRRLNNRIYKFRGKAWDWEVDTEFGNYDYLMYADYDMDHPEVVNELRNWGVWYTNTLGLDGFRIDAVKHIKYSFTRDWINHVRSATGKNMFAVAEFWKNDLGAIENYLQKTNWNHSVFDVPLHYNLYNASKSGGNYDMRNIFNGTVVQAHPMHAVTFVDNHDSQPEEALESFVEEWFKPLAYALTLTREQGYPSVFYGDYYGIPTHGVPAMRSKIDPILEARQKYAYGPQHDYLDHPDVIGWTREGDSSHPKSGLATLITDGPGGSKRMYAGLKNAGETWYDITGNRSDTVKIGSDGWGEFHVNDGSVSIYVQK

SEQ ID NO: 26760 - protein, 483 aa, Synthetic construct
HHNGTNGTMMQYFEWYLPNDGNHWNRLNSDASNLKSKGITAVWIPPAWKGASQNDVGYGAYDLYDLGEFNQKGTVRTKYGTRSQLQAAVTSLKNNGIQVYGDVVMNHKGGADATEMVRAVEVNPNNRNQEVTGEYTIEAWTRFDFPGRGNTHSSFKWRWYHFDGVDWDQSRRLNNRIYKFRGKAWDWEVDTENGNYDYLMYADIDMDHPEVVNELRNWGVWYTNTLGLDGFRIDAVKHIKYSFTRDWINHVRSATGKNMFAVAEFWKNDLGAIENYLQKTNWNHSVFDVPLHYNLYNASKSGGNYDMRNIFNGTVVQRHPSHAVTFVDNHDSQPEEALESFVEEWFKPLAYALTLTREQGYPSVFYGDYYGIPTHGVPAMRSKIDPILEARQKYAYGPQHDYLDHPDVIGWTREGDSSHPKSGLATLITDGPGGSKRMYAGLKNAGETWYDITGNRSDTVKIGSDGWGEFHVNDGSVSIYVQK

SEQ ID NO: 26761 - protein, 485 aa, Bacillus sp.
HHNGTNGTMMQYFEWYLPNDGNHWNRLNSDASNLKSKGITAVWIPPAWKGPSQNDVGYGAYDLYDLGEFNQKGTVRTKYGTRSQLQAAVTSLKNNGIQVYGDVVMNHKGGADATEMVRAVEVNPNNRNQEVTGEYTIEAWTRFDFPGRGNTHSSFKWRWYHFDGVDWDQSRQLDNRIYKFRGHGKAWDWEVDTEFGNYDYLMYADYDMDHPEVVNELRNWGVWYTNTLGLDGFRIDAVKHIKYSFTRDWINHVRSATGKNMFAVAEFWKNDLGAIENYLQKTNWNHSVFDVPLHYNLYNASKSGGNYDMRNIFNGTVVQRHPSHAVTFVDNHDSQPEEALESFVEEWFKPLAYALTLTREQGYPSVFYGDYYGIPTHGVPAMRSKIDPILEARQKYAYGPQHDYLDHPDVIGWTREGDSSHPKSGLATLITDGPGGSKRMYAGLKNAGETWYDITGNRSDTVKIGSDGWGEFHVNDGSVSIYVQK

SEQ ID NO: 26762 - protein, 483 aa, Bacillus sp.
HHNGTNGTMMQYFEWYLPNDGNHWNRLNSDASNLKSKGITAVWIPPAWKATSQNDVGYGAYDLYDLGEFNQKGTVRTKYGTRSQLQAAVTSLKNNGIQVYGDVVMNHKGGADATEMVRAVEVNPNNRNQEVTGEYTIEAWTRFDFPGRGNTHSSFKWRWYHFDGVDWDQSRQLENRIYKFRGKAWDWEVDTEFGNYDYLMYADYDMDHPEVVNELRNWGVWYTNTLGLDGFRIDAVKHIKYSFTRDWINHVRSATGKNMFAVAEFWKNDLGAIENYLQKTNWNHSVFDVPLHYNLYNASKSGGNYDMRNIFNGTVVQRHPSHAVTFVDNHDSQPEEALESFVEEWFKPLAYALTLTREQGYPSVFYGDYYGIPTHGVPAMRSKIDPILEARQKYAYGPQHDYLDHPDVIGWTREGDSSHPKSGLATLITDGPGGSKRMYAGLKNAGETWYDITGNRSDTVKIGSDGWGEFHVNDGSVSIYVQK

SEQ ID NO: 26763 - protein, 483 aa, Bacillus sp.
HHNGTNGTMMQYFEWYLPNDGNHWNRLNSDASNLKSKGITAVWIPPAWKGASQNDVGYGAYDLYDLGEFNQKGTVRTKYGTRSQLQAAVTSLKNNGIQVYGDVVMNHKGGADATEMVRAVEVNPNNRNQEVTGEYTIEAWTRFDFPGRGNTHSSFKWRWYHFDGVDWDQSREFDNRIYKFRGKAWDWEVDTEFGNYDYLMYADYDMDHPEVVNELRNWGVWYTNTLGLDGFRIDAVKHIKYSFTRDWINHVRSATGKNMFAVAEFWKNDLGAIENYLQKTNWNHSVFDVPLHYNLYNASKSGGNYDMRNIFNGTVVQVHPSHAVTFVDNHDSQPEEALESFVEEWFKPLAYALTLTREQGYPSVFYGDYYGIPTHGVPAMRSKIDPILEARQKYAYGPQHDYLDHPDVIGWTREGDSSHPKSGLATLITDGPGGSKRMYAGLKNAGETWYDITGNRSDTVKIGSDGWGEFHVNDGSVSIYVQK

SEQ ID NO: 26764 - protein, 485 aa, Bacillus sp.
HHNGTNGTMMQYFEWYLPNDGNHWNRLNSDASNLKSKGITAVWIPPAWKGASQNDVGYGAYDLYDLGEFNQKGTVRTKYGTRSQLQAAVTSLKNNGIQVYGDVVMNHKGGADATEMVPAVEVNPNNRNQEVTGDYTIEAWTRFDFPGRGNTHSSFKWRWYHFDGVDWDQSRRLNNRIYKFRGHGKAWDWEVDTEFGNYDYLMYADYDMDHPEVVNELRNWGVWYTNTLGLDGFRIDAVKHIKYSFTRDWINHVRSATGKNMFAVAEFWKNDLGAIENYLQKTNWNHSVFDVPLHYNLYNASKSGGNYDMRNIFNGTVVQRHPSHAVTFVDNHDSQPEEALESFVEEWFKPLAYALTLTREQGYPSVFYGDYYGIPTHGVPAMRSKIDPILEARQKYAYGPQHDYLDHPDVIGWTREGDSSHPKSGLATLITDGPGGSKRMYAGLKNAGETWYDITGNRSDTVKIGSDGWGEFHVNDGSVSIYVQK

SEQ ID NO: 26765 - protein, 483 aa, Synthetic construct
HHNGTNGTMMQYFEWYLPNDGNHWNRLNSDASNLKSKGITAVWIPPAWKGASQNDVGYGAYDLYDLGEFNQKGTVRTKYGTRSQLQAAVTSLKNNGIQVYGDVVMNHKGGADATEMVRAVEVNPNNRNQEVTGEYTIEAWTRFDFPGRGNTHSSFKWRWYHFDGVDWDQSRRLNNRIYKFRGKAWDWEVDTENGNYDYLMYADIDMDHPEVVNELRNWGVWYTNTLGLDGFRIDAVKHIKYSFTRDWINHVRSATGKNMFAVAEFWKNDLGAIENYLQKTNWNHSVFDVPLHYNLYNASKSGGNYDMRNIFNGTVVQRHPSHAVTFVDNHDSQPEEALESFVEEWFKPLAYALTLTREQGYPSVFYGDYYGIPTHGVPAMRSKIDPILEARQKYAYGPQHDYLDHPDVIGWTREGDSRHPKSGLATLITDGPGGSKRMYAGLKNAGETWYDITGNRSDTVKIGSDGWGEFHVNDGSVSIYVQK

SEQ ID NO: 26766 - protein, 483 aa, Bacillus sp.
HHNGTNGTMMQYFEWYLPNDGNHWNRLNSDASNLKSKGITAVWIPPAWKGASQNDVGYGAYDLYDLGEFNQKGTVRTKYGTRSQLQAAVTSLKNNGIQVYGDVVMNHKGGADATEMVRAVEVNPNNRNQEVTGEYTIEAWTRFDFPGRGNTHSSFKWRWYHFDGVDWDQSRRLNNRIYKFRGKAWDWEVDTEFGNYDYLMYADYDMDHPEVVNELRNWGVWYTNTLGLDGFRIDAVKHIKYSFTRDWINHVRSATGKNMFAVAEFWKNDLGAIENYLQKTNWNHSVFDVPLHYNLYNASKSGGNYDMRNIFNGTVVQSHPMHAVTFVDNHDSQPEEALESFVEEWFKPLAYALTLTREQGYPSVFYGDYYGIPTHGVPAMRSKIDPILEARQKYAYGPQHDYLDHPDVIGWTREGDSSHPKSGLATLITDGPGGSKRMYAGLKNAGETWYDITGNRSDTVKIGSDGWGEFHVNDGSVSIYVQK

SEQ ID NO: 26767 - protein, 485 aa, Synthetic construct
HHNGTNGTMMQYFEWYLPNDGNHWNRLNSDASNLSSKGITAVWIPPAWKGASQNDVGYGAYDLYDLGEFNQKGTVRTKYGTRSQLQAAVTSLKNNGIQVYGDVVMNHKGGADATEMVRAVEVNPNNRNQEVTGEYTIEAWTRFDFPGRGNTHSSFKWRWYHFDGVDWDQSRRLNNRIYKFRGHGKAWDWEVDTENGNYDYLMYADIDMDHPEVVNELRNWGVWYTNTLGLDGFRIDAVKHIKYSFTRDWINHVRSATGKNMFAVAEFWKNDLGAIENYLQKTNWNHSVFDVPLHYNLYNASKSGGNYDMRNIFNGTVVQRHPSHAVTFVDNHDSQPEEALESFVEEWFKPLAYALTLTREQGYPSVFYGDYYGIPTHGVPAMRSKIDPILEARQKYAYGPQHDYLDHPDVIGWTREGDSSHPKSGLATLITDGPGGSKRMYAGLKNAGETWYDITGNRSDTVKIGSDGWGEFHVNDGSVSIYVQK

SEQ ID NO: 26768 - protein, 485 aa, Synthetic construct
HHNGTNGTMMQYFEWYLPNDGNHWNRLNSDASNLKSKGITAVWIPPAWKGASQNDVGYGAYDLYDLGEFNQKGTVRTKYGTRSQLQAAVTSLKNNGIQVYGDVVMNHKGGADATEMVRAVEVNPNNRNQEVTGEYTIEAWTRFDFPGRGNTHSSFKWRWYHFDGVDWDQSRRLNNRIYKFRGHGKAWDWEVDTENGNYDYLMYADIDMDHPEVVNELRNWGVWYTNTLGLDGFRIDAVKHIKYSFTRDWINHVRGATGKNMFAVAEFWKNDLGAIENYLQKTNWNHSVFDVPLHYNLYNASKSGGNYDMRNIFNGTVVQRHPSHAVTFVDNHDSQPEEALESFVEEWFKPLAYALTLTREQGYPSVFYGDYYGIPTHGVPAMRSKIDPILEARQKYAYGPQHDYLDHPDVIGWTREGDSSHPKSGLATLITDGPGGSKRMYAGLKNAGETWYDITGNRSDTVKIGSDGWGEFHVNDGSVSIYVQK

SEQ ID NO: 26769 - protein, 485 aa, Synthetic construct
HHNGTNGTMMQYFEWYLPNDGNHWNRLNSDASNLKSKGITAVWIPPAWKGASQNDVGYGAYDLYDLGEFNQKGTVRTKYGTRSQLQAAVTSLKNNGIQVYGDVVMNHKGGADATEMVRAVEVNPNNRNQEVTGEYTIEAWTRFDFPGRGNTHSSFKWRWYHFDGVDWDQSRRLNNRIYKFRGHGKAWDWEVDTENGNYDYLMYADIDMDHPEVVNELRNWGVWYTNTLGLDGFRIDAVKHIKYSFTRDWINHVRSATGKNMFAVAEFWKNDLGAIENYLQKTNWNHSVFDVPLHYNLYNASKSGGNYDMRNIFNGTVVQRHPSHAVTFVDNHDSQPEEALESFVEEWFKPLAYALTLTREQGYPSVFYGDYYGIPTHGVPAMRSKIDPILEARQKYAYGPQHDYLDHPDVIGWTREGDSSHPKSGLATLITDGPGGSKRMYAGLKNAGETWYDITGNRSDTVKIGSDGWGTFHVNDGSVSIYVQK

SEQ ID NO: 26770 - protein, 485 aa, Bacillus sp.
HHNGTNGTMMQYFEWYLPNDGNHWNRLNSDASNLKSKGITAVWIPPAWKATSQNDVGYGAYDLYDLGEFNQKGTVRTKYGTRSQLQAAVTSLKNNGIQVYGDVVMNHKGGADATEMVRAVEVNPNNRNQEVTGEYTIEAWTRFDFPGRGNTHSSFKWRWYHFDGVDWDQSRRFNNRIYKFRGHGKAWDWEVDTEFGNYDYLMYADYDMDHPEVVNELRNWGVWYTNTLGLDGFRIDAVKHIKYSFTRDWINHVRSATGKNMFAVAEFWKNDLGAIENYLQKTNWNHSVFDVPLHYNLYNASKSGGNYDMRNIFNGTVVQRHPSHAVTFVDNHDSQPEEALESFVEEWFKPLAYALTLTREQGYPSVFYGDYYGIPTHGVPAMRSKIDPILEARQKYAYGPQHDYLDHPDVIGWTREGDSSHPKSGLATLITDGPGGSKRMYAGLKNAGETWYDITGNRSDTVKIGSDGWGEFHVNDGSVSIYVQK

SEQ ID NO: 26771 - protein, 485 aa, Synthetic construct
HHNGTNGTMMQYFEWYLPNDGNHWNRLNSDASNLKSKGITAVWIPPAWKGASQNDVGYGAYDLYDLGEFNQKGTVRTKYGTRSQLQAAVTSLKNNGIQVYGDVVMNHKGGADATEDVRAVEVNPNNRNQEVTGEYTIEAWTRFDFPGRGNTHSSFKWRWYHFDGVDWDQSRRLNNRIYKFRGHGKAWDWEVDTENGNYDYLMYADIDMDHPEVVNELRNWGVWYTNTLGLDGFRIDAVKHIKYSFTRDWINHVRSATGKNMFAVAEFWKNDLGAIENYLQKTNWNHSVFDVPLHYNLYNASKSGGNYDMRNIFNGTVVQRHPSHAVTFVDNHDSQPEEALESFVEEWFKPLAYALTLTREQGYPSVFYGDYYGIPTHGVPAMRSKIDPILEARQKYAYGPQHDYLDHPDVIGWTREGDSSHPKSGLATLITDGPGGSKRMYAGLKNAGETWYDITGNRSDTVKIGSDGWGEFHVNDGSVSIYVQK

SEQ ID NO: 26772 - protein, 485 aa, Synthetic construct
HHNGTNGTMMQYFEWYLPNDGNHWNRLNSDASNLKSKGITAVWIPPAWKGASQNDVGYGAYDLYDLGEFNQKGTVRTKYGTRSQLQAAVTSLKNNGIQVYGDVVMNHKGGADATEMVRAVEVNPNNRNQEVTGEYTIEAWTRFDFPGRGNTHSSFKWRWYHFDGVDWDQSRRLNNRIYKFRGHGKAWDWEVDTENGNYDYLMYADIDMDHPEVVNELRNWGVWYTNTLGLDGFRIDAVKHIKYSFTRDWINHVRSATGKNMFAVAEFWKNDLGAIENYLQKTNWNHSVFDVPLHYNLYNASKSGGNYDMRNIFNGTVVQRHPSHAVTFVDNHDSQPEEALESFVEEWFKPLAYALTLTREQGYPSVFYGDYYGIPTHGVPAMRSKIDPILEARQKYAYGPQHDYLDHPDVIGWTREGDSSHPKSGLATLITDGPGGSKRMYAGLKNAGETWYDITGNRSDTVKIGSDGWGEFHVNDGSVSIYVQQ

SEQ ID NO: 26773 - protein, 485 aa, Bacillus sp.
HHNGTNGTMMQYFEWYLPNDGNHWNRLNSDASNLKSKGITAVWIPPAWKGASQNDVGYGAYDLYDLGEFNQKGTVRTKYGTRSQLQAAVTSLKNNGIQVYGDVVMNHKGGADATEMVRAVEVNPNNRNQEVTGEYTIEAWTRFDFPGRGNTHSSFKWRWYHFDGVDWDQSRRLNNRIYKFRGHGKAWDWEVDSEFGNYDYLMYADYDMDHPEVVNELRNWGVWYTNTLGLDGFRIDAVKHIKYSFTRDWINHVRSATGKNMFAVAEFWKNDLGAIENYLQKTNWNHSVFDVPLHYNLYNASKSGGNYDMRNIFNGTVVQRHPSHAVTFVDNHDSQPEEALESFVEEWFKPLAYALTLTREQGYPSVFYGDYYGIPTHGVPAMRSKIDPILEARQKYAYGPQHDYLDHPDVIGWTREGDSSHPKSGLATLITDGPGGSKRMYAGLKNAGETWYDITGNRSDTVKIGSDGWGEFHVNDGSVSIYVQK

SEQ ID NO: 26774 - protein, 483 aa, Bacillus sp.
HHNGTNGTMMQYFEWYLPNDGNHWNRLNSDASNLKSKGITAVWIPPAWKAASQNDVGYGAYDLYDLGEFNQKGTVRTKYGTRSQLQAAVTSLKNNGIQVYGDVVMNHKGGADATEMVRAVEVNPNNRNQEVTGEYTIEAWTRFDFPGRGNTHSSFKWRWYHFDGVDWDQSRQFNNRIYKFRGKAWDWEVDTEFGNYDYLMYADYDMDHPEVVNELRNWGVWYTNTLGLDGFRIDAVKHIKYSFTRDWINHVRSATGKNMFAVAEFWKNDLGAIENYLQKTNWNHSVFDVPLHYNLYNASKSGGNYDMRNIFNGTVVQRHPSHAVTFVDNHDSQPEEALESFVEEWFKPLAYALTLTREQGYPSVFYGDYYGIPTHGVPAMRSKIDPILEARQKYAYGPQHDYLDHPDVIGWTREGDSSHPKSGLATLITDGPGGSKRMYAGLKNAGETWYDITGNRSDTVKIGSDGWGEFHVNDGSVSIYVQK

SEQ ID NO: 26775 - protein, 485 aa, Bacillus sp.
HHNGTNGTMMQYFEWYLPNDGNHWNRLNSDASNLKSKGITAVWIPPAWKGASQNDVGYGAYDLYDLGEFNQKGTVRTKYGTRSQLQAAVTSLKNNGIQVYGDVVMNHKGGADATEMVRAVEVNPNNRNQEVTGEYTIEAWTRFDFPGRGNTHSSFKWRWYHFDGVDWDQSRRLNNRIYKFRGHGKAWDWEVDTEFGNYDYLMYADYDMDHPEVVNELRNWGVWYTNTLGLDGFRIDAVKHIKYSFTRDWINHVRSATGKNMFAVAEFWKNDLGAIENYLQKTNWNHSVFDVPLHYNLYNASKSGGNYDMRNIFNGTVVQAHPMHAVTFVDNHDSQPEEALESFVEEWFKPLAYALTLTREQGYPSVFYGDYYGIPTHGVPAMRSKIDPILEARQKYAYGPQHDYLDHPDVIGWTREGDSSHPKSGLATLITDGPGGSKRMYAGLKNAGETWYDITGNRSDTVKIGSDGWGEFHVNDGSVSIYVQK

SEQ ID NO: 26776 - protein, 483 aa, Synthetic construct
HHNGTNGTMMQYFEWYLPNDGNHWNRLNSDASNLKSKGITAVWIPPAWKGASQNDVGYGAYDLYDLGEFNQKGTVRTKYGTRSQLQAAVTSLKNNGIQVYGDVVMNHKGGADATEMVRAVEVNPNNRNQEVTGEYTIEAWTLFDFPGRGNTHSSFKWRWYHFDGVDWDQSRRLNNRIYKFRGKAWDWEVDTENGNYDYLMYADIDMDHPEVVNELRNWGVWYTNTLGLDGFRIDAVKHIKYSFTRDWINHVRSATGKNMFAVAEFWKNDLGAIENYLQKTNWNHSVFDVPLHYNLYNASKSGGNYDMRNIFNGTVVQRHPSHAVTFVDNHDSQPEEALESFVEEWFKPLAYALTLTREQGYPSVFYGDYYGIPTHGVPAMRSKIDPILEARQKYAYGPQHDYLDHPDVIGWTREGDSSHPKSGLATLITDGPGGSKRMYAGLKNAGETWYDITGNRSDTVKIGSDGWGEFHVNDGSVSIYVQK

SEQ ID NO: 26777 - protein, 483 aa, Bacillus sp.
HHNGTNGTMMQYFEWYLPNDGNHWNRLNSDASNLKSKGITAVWIPPAWKGASQNDVGYGAYDLYDLGEFNQKGTVRTKYGTRSQLQAAVTSLKNNGIQVYGDVVMNHKGGADATEMVRAVEVNPNNRNQEVTGEYTIEAWTRFDFPGRGNTHSSFKWRWYHFDGVDWDQSRQFDNRIYKFRGKAWDWEVDTEFGNYDYLMYTDYDMDHPEVVNELRNWGVWYTNTLGLDGFRIDAVKHIKYSFTRDWINHVRSATGKNMFAVAEFWKNDLGAIENYLQKTNWNHSVFDVPLHYNLYNASKSGGNYDMRNIFNGTVVQRHPSHAVTFVDNHDSQPEEALESFVEEWFKPLAYALTLTREQGYPSVFYGDYYGIPTHGVPAMRSKIDPILEARQKYAYGPQHDYLDHPDVIGWTREGDSSHPKSGLATLITDGPGGSKRMYAGLKNAGETWYDITGNRSDTVKIGSDGWGEFHVNDGSVSIYVQK

SEQ ID NO: 26778 - protein, 483 aa, Bacillus sp.
HHNGTNGTMMQYFEWYLPNDGNHWNRLNSDASNLKSKGITAVWIPPAWKGASQNDVGYGAYDLYDLGEFNQKGTVRTKYGTRSQLQAAVTSLKNNGIQVYGDVVMNHKGGADATEMVRAVEVNPNNRNQEVTGEYTIEAWTRFDFPGRGNTHSSFKWRWYHFDGVDWDQSRQLDNRIYKFRGKAWDWEVDTEFGNYDYLMYADYDMDHPEVVNELRNWGVWYTNTLGLDGFRIDAVKHIKYSFTRDWINHVRSATGKNMFAVAEFWKNDLGAIENYLQKTNWNHSVFDVPLHYNLYNASKSGGNYDMRNIFNGTVVQRHPSHAVTFVDNHDSQPEEALESFVEEWFKPLAYALTLTREQGYPSVFYGDYYGIPTHGVPAMRSKIDPILEARQKYAYGPQHDYLDHPDVIGWTREGDSSHPKSGLATLITDGPGGSKRMYAGLKNAGETWYDITGNRSDTVKIGSDGWGEFHVNDGSVSIYVQK

SEQ ID NO: 26779 - protein, 483 aa, Bacillus sp.
HHNGTNGTMMQYFEWYLPNDGNHWNRLNSDASNLKSKGITAVWIPPAWKAASQNDVGYGAYDLYDLGEFNQKGTVRTKYGTRSQLQAAVTSLKNNGIQVYGDVVMNHKGGADATEMVRAVEVNPNNRNQEVTGEYTIEAWTRFDFPGRGNTHSSFKWRWYHFDGVDWDQSRRFQNRIYKFRGKAWDWEVDTEFGNYDYLMYADYDMDHPEVVNELRNWGVWYTNTLGLDGFRIDAVKHIKYSFTRDWINHVRSATGKNMFAVAEFWKNDLGAIENYLQKTNWNHSVFDVPLHYNLYNASKSGGNYDMRNIFNGTVVQRHPSHAVTFVDNHDSQPEEALESFVEEWFKPLAYALTLTREQGYPSVFYGDYYGIPTHGVPAMRSKIDPILEARQKYAYGPQHDYLDHPDVIGWTREGDSSHPKSGLATLITDGPGGSKRMYAGLKNAGETWYDITGNRSDTVKIGSDGWGEFHVNDGSVSIYVQK

SEQ ID NO: 26780 - protein, 483 aa, Bacillus sp.
HHNGTNGTMMQYFEWYLPNDGNHWNRLNSDASNLKSKGITAVWIPPAWKGASQNDVGYGAYDLYDLGEFNQKGTVRTKYGTRSQLQAAVTSLKNNGIQVYGDVVMNHKGGADATEMVRAVEVNPNNRNQEVTGEYTIEAWTRFDFPGRGNTHSSFKWRWYHFDGVDWDQSRDFDNRIYKFRGKAWDWEVDTEFGNYDYLMYADYDMDHPEVVNELRNWGVWYTNTLGLDGFRIDAVKHIKYSFTRDWINHVRSATGKNMFAVAEFWKNDLGAIENYLQKTNWNHSVFDVPLHYNLYNASKSGGNYDMRNIFNGTVVQRHPSHAVTFVDNHDSQPEEALESFVEEWFKPLAYALTLTREQGYPSVFYGDYYGIPTHGVPAMRSKIDPILEARQKYAYGPQHDYLDHPDVIGWTREGDSSHPKSGLATLITDGPGGSKRMYAGLKNAGETWYDITGNRSDTVKIGSDGWGEFHVNDGSVSIYVQK

SEQ ID NO: 26781 - protein, 485 aa, Synthetic construct
HHNGTNGTMMQYFEWYLPNDGNHWNRLNSDASNLKSKGITAVWIPPAWKGASQNDVGYGAYDLYDLGEFNQKGTVRTKYGTRSQLQAAVTSLKNNGIQVYGDVVMNHKGGADATEMVRAVEVNPNNRNQEVTGEYTIEAWTRFDFPGRGNTHSSFKWRWYHFDGVDWDQSRRLNNRIYKFRGHGKAWDWEVDTENGNYDYLMYADIDMDHPEVVNELRNWGVWYTNTLGLDGFRIDAVKHIKYSFTRDWINHVRSATGKNMFAVAEFWKNDLGAIENYLQKTNWNHSVFDVPLHYNLYNASKSGGNYDMRNIFNGTVVQRHPSHAVTFVDNHDSQPEEALESFVEEWFKPLAYALTLTREQGYPSVFYGDYYGIPTHGVPAMRSKIDPILEARQKYAYGPQHDYLDHPDVIGWTREGDSSHPKSGLATLITDGPGGSKRMYAGLKNAGETWYDITGNRSDTVKIGSDGWGEFRVNDGSVSIYVQK

SEQ ID NO: 26782 - protein, 483 aa, Bacillus sp.
HHNGTNGTMMQYFEWYLPNDGNHWNRLNSDASNLKSKGITAVWIPPAWKGTSQNDVGYGAYDLYDLGEFNQKGTVRTKYGTRSQLQAAVTSLKNNGIQVYGDVVMNHKGGADATEMVRAVEVNPNNRNQEVTGEYTIEAWTRFDFPGRGNTHSSFKWRWYHFDGVDWDQSRELTNRIYKFRGKAWDWEVDTEFGNYDYLMYADYDMDHPEVVNELRNWGVWYTNTLGLDGFRIDAVKHIKYSFTRDWINHVRSATGKNMFAVAEFWKNDLGAIENYLQKTNWNHSVFDVPLHYNLYNASKSGGNYDMRNIFNGTVVQRHPSHAVTFVDNHDSQPEEALESFVEEWFKPLAYALTLTREQGYPSVFYGDYYGIPTHGVPAMRSKIDPILEARQKYAYGPQHDYLDHPDVIGWTREGDSSHPKSGLATLITDGPGGSKRMYAGLKNAGETWYDITGNRSDTVKIGSDGWGEFHVNDGSVSIYVQK

SEQ ID NO: 26783 - protein, 483 aa, Synthetic construct
HHNGTNGTMMQYFEWYLPNDGNHWNRLNSDASNLKSKGITAVWIPPAWKGASQNDVGYGAYDLYDLGEFNQKGTVRTKYGTRSQLQAAVTSLKNNGIQVYGDVVMNHKGGADATEMVRAVEVNPNNRNQEVTGEYTIEAWTRFDFPGRGNTHSSFKWRWYHFDGVDWDQSRRLNNRIYKFRGKAWDWEVDTENGNYDYLMYADYDMDHPEVVNELRNWGVWYTNTLGLDGFRIDAVKHIKYSFTRDWINHVRSATGKNMFAVAEFWKNDLGAIENYLQKTNWNHSVFDVPLHYNLYNASKSGGNYDMRNIFNGTVVQRHPSHAVTFVDNHDSQPEEALESFVEEWFKPLAYALTLTREQGYPSVFYGDYYGIPTHGVPAMRSKIDPILEARQKYAYGPQHDYLDHPDVIGWTREGDSSHPKSGLATLITDGPGGSKRMYAGLKNAGETWYDITGNRSDTVKIGSDGWGEFHVNDGSVSIYVQK

SEQ ID NO: 26784 - protein, 485 aa, Synthetic construct
HHNGTNGTMMQYFEWYLPNDGNHWNRLNSDASNLKSKGITAVWIPPAWKGASQNDVGYGAYDLYDLGEFNQKGTVRTKYGTRSQLQAAVTSLKNNGIQVYGDVVMNHKGGADATEMVRAVEVNPNNRNQEVTGEYTIEAWTRFDFPGRGNTHSSFKWRWYHFDGVDWDQSRRLNNRIYKFRGHGKAWDWEVDTENGNYDYLMYADIDMDHPEVVNELRNWGVWYTNTLGLDGFRIDAVKHIKYSFTRDWINHVRSATGKNMFAVAEFWKNDLGAIENYLQKTNWNHSVFDVPLHYNLYNASKSGGNYDMRNIFNGTVVQRHPSHAVTFVDNHDSQPEEALESFVEEWFKPLAYALTLTREQGYPSVFYGDYYGIPTHGVPAMRSKIDPILEARQKYAYGPQHDYLDHPDVIGWTREGDSSHPKSGLATVITDGPGGSKRMYAGLKNAGETWYDITGNRSDTVKIGSDGWGEFHVNDGSVSIYVQK

SEQ ID NO: 26785 - protein, 483 aa, Bacillus sp.
HHNGTNGTMMQYFEWYLPNDGNHWNRLNSDASNLKSKGITAVWIPPAWKGISQNDVGYGAYDLYDLGEFNQKGTVRTKYGTRSQLQAAVTSLKNNGIQVYGDVVMNHKGGADATEMVRAVEVNPNNRNQEVTGEYTIEAWTRFDFPGRGNTHSSFKWRWYHFDGVDWDQSRNLQNRIYKFRGKAWDWEVDTEFGNYDYLMYADYDMDHPEVVNELRNWGVWYTNTLGLDGFRIDAVKHIKYSFTRDWINHVRSATGKNMFAVAEFWKNDLGAIENYLQKTNWNHSVFDVPLHYNLYNASKSGGNYDMRNIFNGTVVQRHPSHAVTFVDNHDSQPEEALESFVEEWFKPLAYALTLTREQGYPSVFYGDYYGIPTHGVPAMRSKIDPILEARQKYAYGPQHDYLDHPDVIGWTREGDSSHPKSGLATLITDGPGGSKRMYAGLKNAGETWYDITGNRSDTVKIGSDGWGEFHVNDGSVSIYVQK

SEQ ID NO: 26786 - protein, 485 aa, Bacillus sp.
HHNGTNGTMMQYFEWYLPNDGNHWNRLNSDASNLKSKGITAVWIPPAWKGASQNDVGYGAYDLYDLGEFNQKGTVRTKYGTRSQLQAAVTSLKNNGIQVYGDVVMNHKGGADATEMVRAVEVNPNNRNQEVTGEYTIEAWTRFDFPGRGNTHSSFKWRWYHFDGVDWDQSREFDNRIYKFRGHGKAWDWEVDTEFGNYDYLMYADYDMDHPEVVNELRNWGVWYTNTLGLDGFRIDAVKHIKYSFTRDWINHVRSATGKNMFAVAEFWKNDLGAIENYLQKTNWNHSVFDVPLHYNLYNASKSGGNYDMRNIFNGTVVQVHPSHAVTFVDNHDSQPEEALESFVEEWFKPLAYALTLTREQGYPSVFYGDYYGIPTHGVPAMRSKIDPILEARQKYAYGPQHDYLDHPDVIGWTREGDSSHPKSGLATLITDGPGGSKRMYAGLKNAGETWYDITGNRSDTVKIGSDGWGEFHVNDGSVSIYVQK

SEQ ID NO: 26787 - protein, 483 aa, Bacillus sp.
HHNGTNGTMMQYFEWYLPNDGNHWNRLNSDASNLKSKGITAVWIPPAWKATSQNDVGYGAYDLYDLGEFNQKGTVRTKYGTRSQLQAAVTSLKNNGIQVYGDVVMNHKGGADATEMVRAVEVNPNNRNQEVTGEYTIEAWTRFDFPGRGNTHSSFKWRWYHFDGVDWDQSRRFSNRIYKFRGKAWDWEVDTEFGNYDYLMYADYDMDHPEVVNELRNWGVWYTNTLGLDGFRIDAVKHIKYSFTRDWINHVRSATGKNMFAVAEFWKNDLGAIENYLQKTNWNHSVFDVPLHYNLYNASKSGGNYDMRNIFNGTVVQRHPSHAVTFVDNHDSQPEEALESFVEEWFKPLAYALTLTREQGYPSVFYGDYYGIPTHGVPAMRSKIDPILEARQKYAYGPQHDYLDHPDVIGWTREGDSSHPKSGLATLITDGPGGSKRMYAGLKNAGETWYDITGNRSDTVKIGSDGWGEFHVNDGSVSIYVQK

SEQ ID NO: 26788 - protein, 485 aa, Synthetic construct
HHNGTNGTMMQYFEWYLPNDGNHWNRLNSDASNLKSKGITAVWIPPAWKGASQNDVGYGAYDLYDLGEFNQKGTVRTKYGTRSQLQAAVTSLKNNGIQVYGDVVMNHKGGADATEMVRAVEVNPNNRNQEVTGEYTIEAWTRFDFPGRGNTHSSFKWRWYHFDGVDWDQSRRLNNRIYKFRGHGKAWDWEVDTENGNYDYLMYADIDMDHPEVVNELRNWGVWYTNTLGLDGFRIDAVKHIKYSFTRDWINHVRSATGKNMFAVAEFWKNDLGAIENYLQKTNWNHSVFDVPLHYNLYNASKSGGNYDMRNIFNGTVVQRHPSHAVTFVDNHDSQPEEALESFVEEWFKPLAYALTLTREQGYPSVFYGDYYGIPTHGVPAMRSKIDPILEARQKYAYGPQHDYLDHPDVIGWTREGDSSHPKSGLATLITDGPGGSKRMYAGLKNAGEIWYDITGNRSDTVKIGSDGWGEFHVNDGSVSIYVQK

SEQ ID NO: 26789 - protein, 485 aa, Bacillus sp.
HHNGTNGTMMQYFEWYLPNDGNHWNRLNSDASNLKSKGITAVWIPPAWKGASQNDVGYGAYDLYDLGEFNQKGTVRTKYGTRSQLQAAVTSLKNNGIQVYGDVVMNHKGGADATEMVSAVEVNPNNRNQEVTGDYTIEAWTRFDFPGRGNTHSSFKWRWYHFDGVDWDQSRRLNNRIYKFRGHGKAWDWEVDTEFGNYDYLMYADYDMDHPEVVNELRNWGVWYTNTLGLDGFRIDAVKHIKYSFTRDWINHVRSATGKNMFAVAEFWKNDLGAIENYLQKTNWNHSVFDVPLHYNLYNASKSGGNYDMRNIFNGTVVQRHPSHAVTFVDNHDSQPEEALESFVEEWFKPLAYALTLTREQGYPSVFYGDYYGIPTHGVPAMRSKIDPILEARQKYAYGPQHDYLDHPDVIGWTREGDSSHPKSGLATLITDGPGGSKRMYAGLKNAGETWYDITGNRSDTVKIGSDGWGEFHVNDGSVSIYVQK

SEQ ID NO: 26790 - protein, 485 aa, Synthetic construct
HHNGTNGTMMQYFEWYLPNDGNHWNRLNSDASNLKSKGITAVWIPPAWKGASQNDVGYGAYDLYDLGEFNQKGTVRTKYGTRSQLQAAVTSLKNNGIQVYGDVVMNHKGGADATEMVRAVEVNPNNRNQEVTGEYTIEAWTRFDFPGRGNTHSSFKWRWYHFDGVDWDQSRRLNNRIYKFRGHGKAWDWEVDTENGNYDYLMYADIDMDHPEVVNELRNWGVWYTNTLGLDGFRIDAVKHIKYSFTRDWINHVRSATGKNMFAVAEFWKNDLGAIENYLQKTNWNHSVFDVPLHYNLYNASKSGGNYDMRNIFNGTVVQRHPSHAVTFVDNHDSQPEEALESFVEEWFKPLAYALTLTREQGYPSVFYGDYYGIPTHGVPAMRSKIDPILEARQKYAYGPQHDYLDHPDVIGWTREGDSSHPKSGLATLITDGPGGSKRMYAGAKNAGETWYDITGNRSDTVKIGSDGWGEFHVNDGSVSIYVQK

SEQ ID NO: 26791 - protein, 483 aa, Synthetic construct
HHNGTNGTMMQYFEWYLPNDGNHWNRLNSDASNLKSKGITAVWIPPAWKGASQNDVGYGAYDLYDLGEFNQKGTVRTKYGTRSQLQAAVTSLKNNGIQVYGDVVMNHKGGADATEMVRAVEVNPNNRNQEVTGEYTIEAWTVFDFPGRGNTHSSFKWRWYHFDGVDWDQSRRLNNRIYKFRGKAWDWEVDTENGNYDYLMYADIDMDHPEVVNELRNWGVWYTNTLGLDGFRIDAVKHIKYSFTRDWINHVRSATGKNMFAVAEFWKNDLGAIENYLQKTNWNHSVFDVPLHYNLYNASKSGGNYDMRNIFNGTVVQRHPSHAVTFVDNHDSQPEEALESFVEEWFKPLAYALTLTREQGYPSVFYGDYYGIPTHGVPAMRSKIDPILEARQKYAYGPQHDYLDHPDVIGWTREGDSSHPKSGLATLITDGPGGSKRMYAGLKNAGETWYDITGNRSDTVKIGSDGWGEFHVNDGSVSIYVQK

SEQ ID NO: 26792 - protein, 485 aa, Bacillus sp.
HHNGTNGTMMQYFEWYLPNDGNHWNRLNSDASNLKSKGITAVWIPPAWKATSQNDVGYGAYDLYDLGEFNQKGTVRTKYGTRSQLQAAVTSLKNNGIQVYGDVVMNHKGGADATEMVRAVEVNPNNRNQEVTGEYTIEAWTRFDFPGRGNTHSSFKWRWYHFDGVDWDQSRRFDNRIYKFRGHGKAWDWEVDTEFGNYDYLMYADYDMDHPEVVNELRNWGVWYTNTLGLDGFRIDAVKHIKYSFTRDWINHVRSATGKNMFAVAEFWKNDLGAIENYLQKTNWNHSVFDVPLHYNLYNASKSGGNYDMRNIFNGTVVQRHPSHAVTFVDNHDSQPEEALESFVEEWFKPLAYALTLTREQGYPSVFYGDYYGIPTHGVPAMRSKIDPILEARQKYAYGPQHDYLDHPDVIGWTREGDSSHPKSGLATLITDGPGGSKRMYAGLKNAGETWYDITGNRSDTVKIGSDGWGEFHVNDGSVSIYVQK

SEQ ID NO: 26793 - protein, 485 aa, Bacillus sp.
HHNGTNGTMMQYFEWYLPNDGNHWNRLNSDASNLKSKGITAVWIPPAWKGTSQNDVGYGAYDLYDLGEFNQKGTVRTKYGTRSQLQAAVTSLKNNGIQVYGDVVMNHKGGADATEMVRAVEVNPNNRNQEVTGEYTIEAWTRFDFPGRGNTHSSFKWRWYHFDGVDWDQSRKISNRIYKFRGHGKAWDWEVDTEFGNYDYLMYADYDMDHPEVVNELRNWGVWYTNTLGLDGFRIDAVKHIKYSFTRDWINHVRSATGKNMFAVAEFWKNDLGAIENYLQKTNWNHSVFDVPLHYNLYNASKSGGNYDMRNIFNGTVVQRHPSHAVTFVDNHDSQPEEALESFVEEWFKPLAYALTLTREQGYPSVFYGDYYGIPTHGVPAMRSKIDPILEARQKYAYGPQHDYLDHPDVIGWTREGDSSHPKSGLATLITDGPGGSKRMYAGLKNAGETWYDITGNRSDTVKIGSDGWGEFHVNDGSVSIYVQK

SEQ ID NO: 26794 - protein, 485 aa, Bacillus sp.
HHNGTNGTMMQYFEWYLPNDGNHWNRLNSDASNLKSKGITAVWIPPAWKGASQNDVGYGAYDLYDLGEFNQKGTVRTKYGTRSQLQAAVTSLKNNGIQVYGDVVMNHKGGADATEMVRAVEVNPNNRNQEVTGEYTIEAWTRFDFPGRGNTHSSFKWRWYHFDGVDWDQSRQFDNRIYKFRGHGKAWDWEVDTEFGNYDYLMYTDYDMDHPEVVNELRNWGVWYTNTLGLDGFRIDAVKHIKYSFTRDWINHVRSATGKNMFAVAEFWKNDLGAIENYLQKTNWNHSVFDVPLHYNLYNASKSGGNYDMRNIFNGTVVQRHPSHAVTFVDNHDSQPEEALESFVEEWFKPLAYALTLTREQGYPSVFYGDYYGIPTHGVPAMRSKIDPILEARQKYAYGPQHDYLDHPDVIGWTREGDSSHPKSGLATLITDGPGGSKRMYAGLKNAGETWYDITGNRSDTVKIGSDGWGEFHVNDGSVSIYVQK

SEQ ID NO: 26795 - protein, 485 aa, Bacillus sp.
HHNGTNGTMMQYFEWYLPNDGNHWNRLNSDASNLKSKGITAVWIPPAWKGASQNDVGYGAYDLYDLGEFNQKGTVRTKYGTRSQLQAAVTSLKNNGIQVYGDVVMNHKGGADATEMVRAVEVNPNNRNQEVTGEYTIEAWTRFDFPGRGNTHSSFKWRWYHFDGVDWDQSRRLNNRIYKFRGHGKAWDWEVDTEFGNYDYLMYADYDMDHPEVVNELRNWGVWYTNTLGLDGFRIDAVKHIKYSFTRDWINHVRSATGKNMFAVAEFWKNDLGAIENYLQKTNWNHSVFDVPLHYNLYNASKSGGNYDMRNIFNGTVVQRHPMHAVTFVDNHDSQPEEALESFVEEWFKPLAYALTLTREQGYPSVFYGDYYGIPTHGVPAMRSKIDPILEARQKYAYGPQHDYLDHPDVIGWTREGDSSHPKSGLATLITDGPGGSKRMYAGLKNAGETWYDITGNRSDTVKIGSDGWGEFHVNDGSVSIYVQK

SEQ ID NO: 26796 - protein, 483 aa, Synthetic construct
HHNGTNGTMMQYFEWYLPNDGNHWNRLNSDASNLKSKGITAVWIPPAWKGASQNDVGYGAYDLYDLGEFNQKGTVRTKYGTRSQLQAAVTSLKNNGIQVYGDVVMNHKGGADATEMVRAVEVNPNNRNQEVTGEYTIEAWTRFDFPGRGNTHSSFKWRWYHFDGVDWDQSRRLNNRIYKFRGKAWDWEVDTENGNYDYLMYADHDMDHPEVVNELRNWGVWYTNTLGLDGFRIDAVKHIKYSFTRDWINHVRSATGKNMFAVAEFWKNDLGAIENYLQKTNWNHSVFDVPLHYNLYNASKSGGNYDMRNIFNGTVVQRHPSHAVTFVDNHDSQPEEALESFVEEWFKPLAYALTLTREQGYPSVFYGDYYGIPTHGVPAMRSKIDPILEARQKYAYGPQHDYLDHPDVIGWTREGDSSHPKSGLATLITDGPGGSKRMYAGLKNAGETWYDITGNRSDTVKIGSDGWGEFHVNDGSVSIYVQK

SEQ ID NO: 26797 - protein, 483 aa, Bacillus sp.
HHNGTNGTMMQYFEWYLPNDGNHWNRLNSDASNLKSKGITAVWIPPAWKGASQNDVGYGAYDLYDLGEFNQKGTVRTKYGTRSQLQAAVTSLKNNGIQVYGDVVMNHKGGADATEMVRAVEVNPNNRNQEVTGEYTIEAWTRFDFPGRGNTHSSFKWRWYHFDGVDWDQSREFDNRIYKFRGKAWDWEVDTEFGNYDYLMYADYDMDHPEVVNELRNWGVWYTNTLGLDGFRIDAVKHIKYSFTRDWINHVRSATGKNMFAVAEFWKNDLGAIENYLQKTNWNHSVFDVPLHYNLYNASKSGGNYDMRNIFNGTVVQRHPSHAVTFVDNHDSQPEEALESFVEEWFKPLAYALTLTREQGYPSVFYGDYYGIPTHGVPAMRSKIDPILEARQKYAYGPQHDYLDHPDVIGWTREGDSSHPKSGLATLITDGPGGSKRMYAGLKNAGETWYDITGNRSDTVKIGSDGWGEFHVNDGSVSIYVQK

SEQ ID NO: 26798 - protein, 483 aa, Bacillus sp.
HHNGTNGTMMQYFEWYLPNDGNHWNRLNSDASNLKSKGITAVWIPPAWKGASQNDVGYGAYDLYDLGEFNQKGTVRTKYGTRSQLQAAVTSLKNNGIQVYGDVVMNHKGGADATEMVSAVEVNPNNRNQEVTGDYTIEAWTRFDFPGRGNTHSSFKWRWYHFDGVDWDQSRRLNNRIYKFRGKAWDWEVDTEFGNYDYLMYADYDMDHPEVVNELRNWGVWYTNTLGLDGFRIDAVKHIKYSFTRDWINHVRSATGKNMFAVAEFWKNDLGAIENYLQKTNWNHSVFDVPLHYNLYNASKSGGNYDMRNIFNGTVVQRHPSHAVTFVDNHDSQPEEALESFVEEWFKPLAYALTLTREQGYPSVFYGDYYGIPTHGVPAMRSKIDPILEARQKYAYGPQHDYLDHPDVIGWTREGDSSHPKSGLATLITDGPGGSKRMYAGLKNAGETWYDITGNRSDTVKIGSDGWGEFHVNDGSVSIYVQK

SEQ ID NO: 26799 - protein, 485 aa, Bacillus sp.
HHNGTNGTMMQYFEWYLPNDGNHWNRLNSDASNLKSKGITAVWIPPAWKGASQNDVGYGAYDLYDLGEFNQKGTVRTKYGTRSQLQAAVTSLKNNGIQVYGDVVMNHKGGADATEMVRAVEVNPNNRNQEVTGEYTIEAWTRFDFPGRGNTHSSFKWRWYHFDGVDWDQSRQINNRIYKFRGHGKAWDWEVDTEFGNYDYLMYADYDMDHPEVVNELRNWGVWYTNTLGLDGFRIDAVKHIKYSFTRDWINHVRSATGKNMFAVAEFWKNDLGAIENYLQKTNWNHSVFDVPLHYNLYNASKSGGNYDMRNIFNGTVVQRHPSHAVTFVDNHDSQPEEALESFVEEWFKPLAYALTLTREQGYPSVFYGDYYGIPTHGVPAMRSKIDPILEARQKYAYGPQHDYLDHPDVIGWTREGDSSHPKSGLATLITDGPGGSKRMYAGLKNAGETWYDITGNRSDTVKIGSDGWGEFHVNDGSVSIYVQK

SEQ ID NO: 26800 - protein, 485 aa, Synthetic construct
HHNGTNGTMMQYFEWYLPNDGNHWNRLNSDASNLKSKGITAVWIPPAWKGASQNDVGYGAYDLYDLGEFNQKGTVRTKYGTRSQLQAAVTSLKNNGIQVYGDVVMNHKGGADATEMVRAVEVNPNNRNQEVTGEYTIEAWTRFDFPGRGNTHSSFKWRWYHFDGVDWDQSRRLNNRIYKFRGHGKAWDWEVDTENGNYDYLMYADIDMDHPEVVNELRNWGVWYTNTLGLDGFRIDAVKHIKYSFTRDWVNHVRSATGKNMFAVAEFWKNDLGAIENYLQKTNWNHSVFDVPLHYNLYNASKSGGNYDMRNIFNGTVVQRHPSHAVTFVDNHDSQPEEALESFVEEWFKPLAYALTLTREQGYPSVFYGDYYGIPTHGVPAMRSKIDPILEARQKYAYGPQHDYLDHPDVIGWTREGDSSHPKSGLATLITDGPGGSKRMYAGLKNAGETWYDITGNRSDTVKIGSDGWGEFHVNDGSVSIYVQK

SEQ ID NO: 26801 - protein, 485 aa, Bacillus sp.
HHNGTNGTMMQYFEWYLPNDGNHWNRLNSDASNLKSKGITAVWIPPAWKGASQNDVGYGAYDLYDLGEFNQKGTVRTKYGTRSQLQAAVTSLKNNGIQVYGDVVMNHKGGADATEMVRAVEVNPNNRNQEVTGEYTIEAWTRFDFPGRGNTHSSFKWRWYHFDGVDWDQSRRLNNRIYKFRGHGKAWDWEVDTEFGNYDYLMYADYDMDHPEVVNELRRWGVWYTNTLGLDGFRIDAVKHIKYSFTRDWINHVRSATGKNMFAVAEFWKNDLGAIENYLQKTNWNHSVFDVPLHYNLYNASKSGGNYDMRNIFNGTVVQRHPSHAVTFVDNHDSQPEEALESFVEEWFKPLAYALTLTREQGYPSVFYGDYYGIPTHGVPAMRSKIDPILEARQKYAYGPQHDYLDHPDVIGWTREGDSSHPKSGLATLITDGPGGSKRMYAGLKNAGETWYDITGNRSDTVKIGSDGWGEFHVNDGSVSIYVQK

SEQ ID NO: 26802 - protein, 485 aa, Synthetic construct
HHNGTNGTMMQYFEWYLPNDGNHWNRLNSDASNLKSKGITAVWIPPAWKGASQNDVGYGAYDLYDLGEFNQKGTVRTKYGTRSQLQAAVTSLKNNGIQVYGDVVMNHKGGADATEMVRAVEVNPNNRNQEVTGEYTIEAWTRFDFPGRGNTHSSFKWRWYHFDGVDWDQSRKYENRIYKFRGHGKAWDWEVDTENGNYDYLMYADIDMDHPEVVNELRNWGVWYTNTLGLDGFRIDAVKHIKYSFTRDWINHVRSATGKNMFAVAEFWKNDLGAIENYLQKTNWNHSVFDVPLHYNLYNASKSGGNYDMRNIFNGTVVQRHPSHAVTFVDNHDSQPEEALESFVEEWFKPLAYALTLTREQGYPSVFYGDYYGIPTHGVPAMRSKIDPILEARQKYAYGPQHDYLDHPDVIGWTREGDSSHPKSGLATLITDGPGGSKRMYAGLKNAGETWYDITGNRSDTVKIGSDGWGEFHVNDGSVSIYVQK

SEQ ID NO: 26803 - protein, 485 aa, Synthetic construct
HHNGTNGTMMQYFEWYLPNDGNHWNRLNSDASNLKSKGITAVWIPPAWKGASQNDVGYGAYDLYDLGEFNQKGTVRTKYGTRSQLQAAVTSLKNNGIQVYGDVVMNHKGGADATEMVRAVEVNPNNRNQEVTGEYTIEAWTRFDFPGRGNTHSSFKWRWYHFDGVDWDQSRRLNNRIYKFRGHGKAWDWEVDTENGNYDYLMYADIDMDHPEVVNELRNWGVWYTNTLGLDGFRIDAVKHIKYSFTRDWINHVRSATGKNMFAVAEFWKNDLGAIENYLQKTNWNHSVFDVPLHYNLYNASKSGGNYDMRNIFNGTVVQRHPSHAVTFVDNHDSQPEEALESFVEEWFKPLAYALTLTREQGYPSVFYGDYYGIPTHGVPAMRSKIDPILEARQKYAYGPQHDYLDHPDVIGWTREGDSSHPKSGLATLITDGPGGSKRMYAGLKNAGETWYDITGNRTDTVKIGSDGWGEFHVNDGSVSIYVQK

SEQ ID NO: 26804 - protein, 483 aa, Bacillus sp.
HHNGTNGTMMQYFEWYLPNDGNHWNRLNSDASNLKSKGITAVWIPPAWKGISQNDVGYGAYDLYDLGEFNQKGTVRTKYGTRSQLQAAVTSLKNNGIQVYGDVVMNHKGGADATEMVRAVEVNPNNRNQEVTGEYTIEAWTRFDFPGRGNTHSSFKWRWYHFDGVDWDQSRQLENRIYKFRGKAWDWEVDTEFGNYDYLMYADYDMDHPEVVNELRNWGVWYTNTLGLDGFRIDAVKHIKYSFTRDWINHVRSATGKNMFAVAEFWKNDLGAIENYLQKTNWNHSVFDVPLHYNLYNASKSGGNYDMRNIFNGTVVQRHPSHAVTFVDNHDSQPEEALESFVEEWFKPLAYALTLTREQGYPSVFYGDYYGIPTHGVPAMRSKIDPILEARQKYAYGPQHDYLDHPDVIGWTREGDSSHPKSGLATLITDGPGGSKRMYAGLKNAGETWYDITGNRSDTVKIGSDGWGEFHVNDGSVSIYVQK

SEQ ID NO: 26805 - protein, 483 aa, Bacillus sp.
HHNGTNGTMMQYFEWYLPNDGNHWNRLNSDASNLKSKGITAVWIPPAWKGASQNDVGYGAYDLYDLGEFNQKGTVRTKYGTRSQLQAAVTSLKNNGIQVYGDVVMNHKGGADATEMVRAVEVNPNNRNQEVTGEYTIEAWTRFDFPGRGNTHSSFKWRWYHFDGVDWDQSRDFNNRIYKFRGKAWDWEVDTEFGNYDYLMYADYDMDHPEVVNELRNWGVWYTNTLGLDGFRIDAVKHIKYSFTRDWINHVRSATGKNMFAVAEFWKNDLGAIENYLQKTNWNHSVFDVPLHYNLYNASKSGGNYDMRNIFNGTVVQRHPSHAVTFVDNHDSQPEEALESFVEEWFKPLAYALTLTREQGYPSVFYGDYYGIPTHGVPAMRSKIDPILEARQKYAYGPQHDYLDHPDVIGWTREGDSSHPKSGLATLITDGPGGSKRMYAGLKNAGETWYDITGNRSDTVKIGSDGWGEFHVNDGSVSIYVQK

SEQ ID NO: 26806 - protein, 485 aa, Synthetic construct
HHNGTNGTMMQYFEWYLPNDGNHWNRLNSDASNLKSKGITAVWIPPAWKGASQNDVGYGAYDLYDLGEFNQKGTVRTKYGTRSQLQAAVKSLKNNGIQVYGDVVMNHKGGADATEMVRAVEVNPNNRNQEVTGEYTIEAWTRFDFPGRGNTHSSFKWRWYHFDGVDWDQSRRLNNRIYKFRGHGKAWDWEVDTENGNYDYLMYADIDMDHPEVVNELRNWGVWYTNTLGLDGFRIDAVKHIKYSFTRDWINHVRSATGKNMFAVAEFWKNDLGAIENYLQKTNWNHSVFDVPLHYNLYNASKSGGNYDMRNIFNGTVVQRHPSHAVTFVDNHDSQPEEALESFVEEWFKPLAYALTLTREQGYPSVFYGDYYGIPTHGVPAMRSKIDPILEARQKYAYGPQHDYLDHPDVIGWTREGDSSHPKSGLATLITDGPGGSKRMYAGLKNAGETWYDITGNRSDTVKIGSDGWGEFHVNDGSVSIYVQK

SEQ ID NO: 26807 - protein, 485 aa, Bacillus sp.
HHNGTNGTMMQYFEWYLPNDGNHWNRLNSDASNLKSKGITAVWIPPAWKGASQNDVGYGAYDLYDLGEFNQKGTVRTKYGTRSQLQAAVTSLKNNGIQVYGDVVMNHKGGADATEMVRAVEVNPNNRNQEVTGEYTIEAWTRFDFPGRGNTHSSFKWRWYHFDGVDWDQSRQTSNRIYKFRGHGKAWDWEVDTEFGNYDYLMYADYDMDHPEVVNELRNWGVWYTNTLGLDGFRIDAVKHIKYSFTRDWINHVRSATGKNMFAVAEFWKNDLGAIENYLQKTNWNHSVFDVPLHYNLYNASKSGGNYDMRNIFNGTVVQRHPSHAVTFVDNHDSQPEEALESFVEEWFKPLAYALTLTREQGYPSVFYGDYYGIPTHGVPAMRSKIDPILEARQKYAYGPQHDYLDHPDVIGWTREGDSSHPKSGLATLITDGPGGSKRMYAGLKNAGETWYDITGNRSDTVKIGSDGWGEFHVNDGSVSIYVQK

SEQ ID NO: 26808 - protein, 483 aa, Synthetic construct
HHNGTNGTMMQYFEWYLPNDGNHWNRLNSDASNLKSKGITAVWIPPAWKGASQNDVGYGAYDLYDLGEFNQKGTVRTKYGTRSQLQAAVTSLKNNGIQVYGDVVMNHKGGADATEMVRAVEVNPNNRNQEVTGEYTIEAWTRFDFPGRGNTHSSFKWRWYHFDGVDWDQSRRLNNRIYKFRGKAWDWEVDTENGNYDYLMYADIDMDHPEVVNELRNWGVWYTNTLGLDGFRIDAVKHIKYSFTRDWINHVRSATGKNMFAVAEFWKNDLGAIENYLQKTNWNHSVFDVPLHYNLYNASKSGGNYDMRNIFNGTVVQRHPSHAVTFVDNHDSQPEEALESFVEEWFKPLAYALTLTREQGYPSVFYGDYYGIPTHGVPAMRSKIDPILEARQKYAYGPQHDYLDHPDVIGWTREGCSSHPKSGLATLITDGPGGSKRMYAGLKNAGETWYDITGNRSDTVKIGSDGWGEFHVNDGSVSIYVQK

SEQ ID NO: 26809 - protein, 483 aa, Bacillus sp.
HHNGTNGTMMQYFEWYLPNDGNHWNRLNSDASNLKSKGITAVWIPPAWKGASQNDVGYGAYDLYDLGEFNQKGTVRTKYGTRSQLQAAVTSLKNNGIQVYGDVVMNHKGGADATEMVRAVEVNPNNRNQEVTGEYTIEAWTRFDFPGRGNTHSSFKWRWYHFDGVDWDQSRELQNRIYKFRGKAWDWEVDTEFGNYDYLMYADYDMDHPEVVNELRNWGVWYTNTLGLDGFRIDAVKHIKYSFTRDWINHVRSATGKNMFAVAEFWKNDLGAIENYLQKTNWNHSVFDVPLHYNLYNASKSGGNYDMRNIFNGTVVQRHPSHAVTFVDNHDSQPEEALESFVEEWFKPLAYALTLTREQGYPSVFYGDYYGIPTHGVPAMRSKIDPILEARQKYAYGPQHDYLDHPDVIGWTREGDSSHPKSGLATLITDGPGGSKRMYAGLKNAGETWYDITGNRSDTVKIGSDGWGEFHVNDGSVSIYVQK

SEQ ID NO: 26810 - protein, 485 aa, Synthetic construct
HHNGTNGTMMQYFEWYLPNDGNHWNRLNSDASNLKSKGITAVWIPPAWKGASQNDVGYGAYDLYDLGEFNQKGTVRTKYGTRSQLQAAVTSLKNNGIQVYGDVVMNHKGGADATEMVRAVEVNPNNRNQEVTGEYTIEAWTRFDFPGRGNTHSSFKWRWYHFDGVDWDQSRRLNNRIYKFRGHGKAWDWEVDTENGNYDYLMYADIDMDHPEVVNELRNWGVWYTNTLGLDGFRIDAVKHIKYSFTRDWINHVRSATGKNMFAVAEFWKNDLGAIENYLQKTNWNHSVFDVPLHYNLYNASKSGGNYDMRNIFNGTVVQRHPSHAVTFVDNHDSQPEEALESFVEEWFKPLAYALTLTREQGYPSVFYGDYYGIPTHGVPAMRSKIDPILEARQKYAYGPQHDYLDHPDVIGWTREGDSSHPKSGLATLITDGPGGSKTMYAGLKNAGETWYDITGNRSDTVKIGSDGWGEFHVNDGSVSIYVQK

SEQ ID NO: 26811 - protein, 485 aa, Synthetic construct
HHNGTNGTMMQYFEWYLPNDGNHWNRLNSDASNLKSKGITAVWIPPAWKGASQNDVGYGAYDLYDLGEFNQKGTVRTKYGTRSQLQAAVTSLKNNGIQVYGDVVMNHKGGADATEMVRAVEVNPNNRNQEVTGEYTIEAWTRFDFPGRGNTHSSFKWRWYHFDGVDWDQSRRLNNRIYKFRGHGKAWDWEVDTENGNYDYLMYADIDMDHPEVVNELRNWGVWYTNTLGLDGFRIDAVKHIKYSFTRDWINHVRSATGKNMFAVAEFWKNDLGAIENYLQKTNWNHSVFDVPLHYNLYNASKSGGNYDMRNIFNGTVVQRHPSHAVTFVDNHDSQPEEALESFVEEWFKPLAYALTLTREQGYPSVFYGDYYGIPTHGVPAMRSKIDPILEARQKYAYGPQHDYLDHPDVIGWTREGDSAHPKSGLATLITDGPGGSKRMYAGLKNAGETWYDITGNRSDTVKIGSDGWGEFHVNDGSVSIYVQK

SEQ ID NO: 26812 - protein, 485 aa, Bacillus sp.
HHNGTNGTMMQYFEWYLPNDGNHWNRLNSDASNLKSKGITAVWIPPAWKGASQNDVGYGAYDLYDLGEFNQKGTVRTKYGTRSQLQAAVTSLKNNGIQVYGDVVMNHKGGADATEMVRAVEVNPNNRNQEVTGDYTIEAWTRFDFPGRGNTHSSFKWRWYHFDGVDWDQSRRLNNRIYKFRGHGKAWDWEVDTEFGNYDYLMYADYDMDHPEVVNELRNWGVWYTNTLGLDGFRIDAVKHIKYSFTRDWINHVRSATGKNMFAVAEFWKNDLGAIENYLQKTNWNHSVFDVPLHYNLYNASKSGGNYDMRNIFNGTVVQRHPSHAVTFVDNHDSQPEEALESFVEEWFKPLAYALTLTREQGYPSVFYGDYYGIPTHGVPAMRSKIDPILEARQKYAYGPQHDYLDHPDVIGWTREGDSSHPKSGLATLITDGPGGSKRMYAGLKNAGETWYDITGNRSDTVKIGSDGWGEFHVNDGSVSIYVQK

SEQ ID NO: 26813 - protein, 483 aa, Bacillus sp.
HHNGTNGTMMQYFEWYLPNDGNHWNRLNSDASNLKSKGITAVWIPPAWKAASQNDVGYGAYDLYDLGEFNQKGTVRTKYGTRSQLQAAVTSLKNNGIQVYGDVVMNHKGGADATEMVRAVEVNPNNRNQEVTGEYTIEAWTRFDFPGRGNTHSSFKWRWYHFDGVDWDQSRQTQNRIYKFRGKAWDWEVDTEFGNYDYLMYADYDMDHPEVVNELRNWGVWYTNTLGLDGFRIDAVKHIKYSFTRDWINHVRSATGKNMFAVAEFWKNDLGAIENYLQKTNWNHSVFDVPLHYNLYNASKSGGNYDMRNIFNGTVVQRHPSHAVTFVDNHDSQPEEALESFVEEWFKPLAYALTLTREQGYPSVFYGDYYGIPTHGVPAMRSKIDPILEARQKYAYGPQHDYLDHPDVIGWTREGDSSHPKSGLATLITDGPGGSKRMYAGLKNAGETWYDITGNRSDTVKIGSDGWGEFHVNDGSVSIYVQK

SEQ ID NO: 26814 - protein, 483 aa, Synthetic construct
HHNGTNGTMMQYFEWYLPNDGNHWNRLNSDASNLKSKGITAVWIPPAWKGASQNDVGYGAYDLYDLGEFNQKGTVRTKYGTRSQLQAAVTSLKNNGIQVYGDVVMNHKGGADATEMVRAVEVNPNNRNQEVTGEYTIEAWTRFDFPGRGNTHSSFKWRWYHFDGVDWDQSRRLNNRIYKFRGKAWDWEVDTENGNYDYLMYADCDMDHPEVVNELRNWGVWYTNTLGLDGFRIDAVKHIKYSFTRDWINHVRSATGKNMFAVAEFWKNDLGAIENYLQKTNWNHSVFDVPLHYNLYNASKSGGNYDMRNIFNGTVVQRHPSHAVTFVDNHDSQPEEALESFVEEWFKPLAYALTLTREQGYPSVFYGDYYGIPTHGVPAMRSKIDPILEARQKYAYGPQHDYLDHPDVIGWTREGDSSHPKSGLATLITDGPGGSKRMYAGLKNAGETWYDITGNRSDTVKIGSDGWGEFHVNDGSVSIYVQK

SEQ ID NO: 26815 - protein, 485 aa, Bacillus sp.
HHNGTNGTMMQYFEWYLPNDGNHWNRLNSDASNLKSKGITAVWIPPAWKATSQNDVGYGAYDLYDLGEFNQKGTVRTKYGTRSQLQAAVTSLKNNGIQVYGDVVMNHKGGADATEMVRAVEVNPNNRNQEVTGEYTIEAWTRFDFPGRGNTHSSFKWRWYHFDGVDWDQSRQINNRIYKFRGHGKAWDWEVDTEFGNYDYLMYADYDMDHPEVVNELRNWGVWYTNTLGLDGFRIDAVKHIKYSFTRDWINHVRSATGKNMFAVAEFWKNDLGAIENYLQKTNWNHSVFDVPLHYNLYNASKSGGNYDMRNIFNGTVVQRHPSHAVTFVDNHDSQPEEALESFVEEWFKPLAYALTLTREQGYPSVFYGDYYGIPTHGVPAMRSKIDPILEARQKYAYGPQHDYLDHPDVIGWTREGDSSHPKSGLATLITDGPGGSKRMYAGLKNAGETWYDITGNRSDTVKIGSDGWGEFHVNDGSVSIYVQK

SEQ ID NO: 26816 - protein, 485 aa, Synthetic construct
HHNGTNGTMMQYFEWYLPNDGNHWNRLNSDASNLKSKGITAVWIPPAWKGASQNDVGYGAYDLYDLGEFNQKGTVRTKYGTRSQLQAAVTSLKNNGIQVYGDVVMNHKGGADATEMVRAVEVNPNNRNQEVTGEYTIEAWTRFDFPGRGNTHSSFKWRWYHFDGVDWDQSRRLNNRIYKFRGHGKAWDWEVDTENGNYDYLMYADIDMDHPEVVNELRNWGTWYTNTLGLDGFRIDAVKHIKYSFTRDWINHVRSATGKNMFAVAEFWKNDLGAIENYLQKTNWNHSVFDVPLHYNLYNASKSGGNYDMRNIFNGTVVQRHPSHAVTFVDNHDSQPEEALESFVEEWFKPLAYALTLTREQGYPSVFYGDYYGIPTHGVPAMRSKIDPILEARQKYAYGPQHDYLDHPDVIGWTREGDSSHPKSGLATLITDGPGGSKRMYAGLKNAGETWYDITGNRSDTVKIGSDGWGEFHVNDGSVSIYVQK

SEQ ID NO: 26817 - protein, 483 aa, Bacillus sp.
HHNGTNGTMMQYFEWYLPNDGNHWNRLNSDASNLKSKGITAVWIPPAWKGISQNDVGYGAYDLYDLGEFNQKGTVRTKYGTRSQLQAAVTSLKNNGIQVYGDVVMNHKGGADATEMVRAVEVNPNNRNQEVTGEYTIEAWTRFDFPGRGNTHSSFKWRWYHFDGVDWDQSRQFNNRIYKFRGKAWDWEVDTEFGNYDYLMYTDYDMDHPEVVNELRNWGVWYTNTLGLDGFRIDAVKHIKYSFTRDWINHVRSATGKNMFAVAEFWKNDLGAIENYLQKTNWNHSVFDVPLHYNLYNASKSGGNYDMRNIFNGTVVQRHPSHAVTFVDNHDSQPEEALESFVEEWFKPLAYALTLTREQGYPSVFYGDYYGIPTHGVPAMRSKIDPILEARQKYAYGPQHDYLDHPDVIGWTREGDSSHPKSGLATLITDGPGGSKRMYAGLKNAGETWYDITGNRSDTVKIGSDGWGEFHVNDGSVSIYVQK

SEQ ID NO: 26818 - protein, 485 aa, Synthetic construct
HHNGTNGTMMQYFEWYLPNDGNHWNRLNSDASNLKSKGITAVWIPPAWKGASQNDVGYGAYDLYDLGEFNQKGTVRTKYGTRSQLQAAVTSLKNNGIQVYGDVVMNHKGGADATEMVRAVEVNPNNRNQEVTGEYTIEAWTRFDFPGRGNTHSSFKWRWYHFDGVDWDQSRRLNNRIYKFRGHGKAWDWEVDTENGNYDYLMYADIDMDHPEVVNELRNWGVWYTNTLGLDGFRIDAVKHIKYSFTRDWINHVREATGKNMFAVAEFWKNDLGAIENYLQKTNWNHSVFDVPLHYNLYNASKSGGNYDMRNIFNGTVVQRHPSHAVTFVDNHDSQPEEALESFVEEWFKPLAYALTLTREQGYPSVFYGDYYGIPTHGVPAMRSKIDPILEARQKYAYGPQHDYLDHPDVIGWTREGDSSHPKSGLATLITDGPGGSKRMYAGLKNAGETWYDITGNRSDTVKIGSDGWGEFHVNDGSVSIYVQK

SEQ ID NO: 26819 - protein, 483 aa, Synthetic construct
HHNGTNGTMMQYFEWYLPNDGNHWNRLNSDASNLKSKGITAVWIPPAWKGASQNDVGYGAYDLYDLGEFNQKGTVRTKYGTRSQLQAAVTSLKNNGIQVYGDVVMNHKGGADATEMVRAVEVNPNNRNQEVTGEYTIEAWTRFDFPGRGNTHSSFKWRWYHFDGVDWDQSRRLNNRIYKFRGKAWDWEVDTENGNYDYLMYADIDMDHPEVVNELRNWGVWYTNTLGLDGFRIDAVKHIKYSFTRDWINHVRSATGKNMFAVAEFWKNDLGAIENYLSKTNWNHSVFDVPLHYNLYNASKSGGNYDMRNIFNGTVVQRHPSHAVTFVDNHDSQPEEALESFVEEWFKPLAYALTLTREQGYPSVFYGDYYGIPTHGVPAMRSKIDPILEARQKYAYGPQHDYLDHPDVIGWTREGDSSHPKSGLATLITDGPGGSKRMYAGLKNAGETWYDITGNRSDTVKIGSDGWGEFHVNDGSVSIYVQK

SEQ ID NO: 26820 - protein, 483 aa, Bacillus sp.
HHNGTNGTMMQYFEWYLPNDGNHWNRLNSDASNLKSKGITAVWIPPAWKGASQNDVGYGAYDLYDLGEFNQKGTVRTKYGTRSQLQAAVTSLKNNGIQVYGDVVMNHKGGADATEMVRAVEVNPNNRNQEVTGEYTIEAWTRFDFPGRGNTHSSFKWRWYHFDGVDWDQSRRFQNRIYKFRGKAWDWEVDTEFGNYDYLMYVDYDMDHPEVVNELRNWGVWYTNTLGLDGFRIDAVKHIKYSFTRDWINHVRSATGKNMFAVAEFWKNDLGAIENYLQKTNWNHSVFDVPLHYNLYNASKSGGNYDMRNIFNGTVVQRHPSHAVTFVDNHDSQPEEALESFVEEWFKPLAYALTLTREQGYPSVFYGDYYGIPTHGVPAMRSKIDPILEARQKYAYGPQHDYLDHPDVIGWTREGDSSHPKSGLATLITDGPGGSKRMYAGLKNAGETWYDITGNRSDTVKIGSDGWGEFHVNDGSVSIYVQK

SEQ ID NO: 26821 - protein, 483 aa, Bacillus sp.
HHNGTNGTMMQYFEWYLPNDGNHWNRLNSDASNLKSKGITAVWIPPAWKGASQNDVGYGAYDLYDLGEFNQKGTVRTKYGTRSQLQAAVTSLKNNGIQVYGDVVMNHKGGADATEMVRAVEVNPNNRNQEVTGEYTIEAWTRFDFPGRGNTHSSFKWRWYHFDGVDWDQSRQTDNRIYKFRGKAWDWEVDTEFGNYDYLMYADYDMDHPEVVNELRNWGVWYTNTLGLDGFRIDAVKHIKYSFTRDWINHVRSATGKNMFAVAEFWKNDLGAIENYLQKTNWNHSVFDVPLHYNLYNASKSGGNYDMRNIFNGTVVQRHPSHAVTFVDNHDSQPEEALESFVEEWFKPLAYALTLTREQGYPSVFYGDYYGIPTHGVPAMRSKIDPILEARQKYAYGPQHDYLDHPDVIGWTREGDSSHPKSGLATLITDGPGGSKRMYAGLKNAGETWYDITGNRSDTVKIGSDGWGEFHVNDGSVSIYVQK

SEQ ID NO: 26822 - protein, 485 aa, Synthetic construct
HHNGTNGTMMQYFEWYLPNDGNHWNRLNSDASNLKSKGITAVWIPPAWKGASQNDVGYGAYDLYDLGEFNQKGTVRTKYGTRSQLQAAVTSLKNNGIQVYGDVVMNHKGGADATEMVRAVEVNPNNRNQEVTGEYTIEAWTRFDFPGRGNTHSSFKWRWYHFDGVDWDQSRRLNNRIYKFRGHGKAWDWEVDTENGNYDYLMYADIDMDHPEVVNELRNWGVWYTNTLQLDGFRIDAVKHIKYSFTRDWINHVRSATGKNMFAVAEFWKNDLGAIENYLQKTNWNHSVFDVPLHYNLYNASKSGGNYDMRNIFNGTVVQRHPSHAVTFVDNHDSQPEEALESFVEEWFKPLAYALTLTREQGYPSVFYGDYYGIPTHGVPAMRSKIDPILEARQKYAYGPQHDYLDHPDVIGWTREGDSSHPKSGLATLITDGPGGSKRMYAGLKNAGETWYDITGNRSDTVKIGSDGWGEFHVNDGSVSIYVQK

SEQ ID NO: 26823 - protein, 485 aa, Synthetic construct
HHNGTNGTMMQYFEWYLPNDGNHWNRLNSDASNLKSKGITAVWIPPAWKGASQNDVGYGAYDLYDLGEFNQKGTVRTKYGTRSQLQAAVTSLKNNGIQVYGDVVMNHKGGADATEMVRAVEVNPNNRNQEVTGEYTIEAWTRFDFPGRGNTHSSFKWRWYHFDGVDWDQSRRLNNRIYKFRGHGKAWDWEVDTENGNYDYLMYADIDMDHPEVVNELRNWGVWYTNTLGLDGFRIDAVKHIKYSFTRDWINHVRSATGKNMFAVAEFWKNDLGAIENYLQKTNWNHSVFDVPLHYNLYNASKSGGNYDMRNIFNGTVVQRHPSHAVTFVDNHDSQPEEALESFVEEWFKPLAYALTLTREQGYPSVFYGDYYGIPTHGVPAMRSKIDPILEARQDYAYGPQHDYLDHPDVIGWTREGDSSHPKSGLATLITDGPGGSKRMYAGLKNAGETWYDITGNRSDTVKIGSDGWGEFHVNDGSVSIYVQK

SEQ ID NO: 26824 - protein, 483 aa, Bacillus sp.
HHNGTNGTMMQYFEWYLPNDGNHWNRLNSDASNLKSKGITAVWIPPAWKATSQNDVGYGAYDLYDLGEFNQKGTVRTKYGTRSQLQAAVTSLKNNGIQVYGDVVMNHKGGADATEMVRAVEVNPNNRNQEVTGEYTIEAWTRFDFPGRGNTHSSFKWRWYHFDGVDWDQSRNVNNRIYKFRGKAWDWEVDTEFGNYDYLMYADYDMDHPEVVNELRNWGVWYTNTLGLDGFRIDAVKHIKYSFTRDWINHVRSATGKNMFAVAEFWKNDLGAIENYLQKTNWNHSVFDVPLHYNLYNASKSGGNYDMRNIFNGTVVQAHPMHAVTFVDNHDSQPEEALESFVEEWFKPLAYALTLTREQGYPSVFYGDYYGIPTHGVPAMRSKIDPILEARQKYAYGPQHDYLDHPDVIGWTREGDSSHPKSGLATLITDGPGGSKRMYAGLKNAGETWYDITGNRSDTVKIGSDGWGEFHVNYGSVSIYVQK

SEQ ID NO: 26825 - protein, 485 aa, Bacillus sp.
HHNGTNGTMMQYFEWYLPNDGNHWNRLNSDASNLKSKGITAVWIPPAWKAASQNDVGYGAYDLYDLGEFNQKGTVRTKYGTRSQLQAAVTSLKNNGIQVYGDVVMNHKGGADATEMVRAVEVNPNNRNQEVTGEYTIEAWTRFDFPGRGNTHSSFKWRWYHFDGVDWDQSRDLDNRIYKFRGHGKAWDWEVDTEFGNYDYLMYADYDMDHPEVVNELRNWGVWYTNTLGLDGFRIDAVKHIKYSFTRDWINHVRSATGKNMFAVAEFWKNDLGAIENYLQKTNWNHSVFDVPLHYNLYNASKSGGNYDMRNIFNGTVVQAHPMHAVTFVDNHDSQPEEALESFVEEWFKPLAYALTLTREQGYPSVFYGDYYGIPTHGVPAMRSKIDPILEARQKYAYGPQHDYLDHPDVIGWTREGDSSHPKSGLATLITDGPGGSKRMYVGLKNAGETWYDITGNRSDTVKIGSDGWGEFHVNYGSVSIYVQK

SEQ ID NO: 26826 - protein, 485 aa, Synthetic construct
HHNGTNGTMMQYFEWYLPNDGNHWNRLNSDASNLKDKGITAVWIPPAWKGASQNDVGYGAYDLYDLGEFNQKGTVRTKYGTRSQLQAAVTSLKNNGIQVYGDVVMNHKGGADATEMVRAVEVNPNNRNQEVTGEYTIEAWTRFDFPGRGNTHSSFKWRWYHFDGVDWDQSRRLNNRIYKFRGHGKAWDWEVDTENGNYDYLMYADIDMDHPEVVNELRNWGVWYTNTLGLDGFRIDAVKHIKYSFTRDWINHVRSATGKNMFAVAEFWKNDLGAIENYLQKTNWNHSVFDVPLHYNLYNASKSGGNYDMRNIFNGTVVQRHPSHAVTFVDNHDSQPEEALESFVEEWFKPLAYALTLTREQGYPSVFYGDYYGIPTHGVPAMRSKIDPILEARQKYAYGPQHDYLDHPDVIGWTREGDSSHPKSGLATLITDGPGGSKRMYAGLKNAGETWYDITGNRSDTVKIGSDGWGEFHVNDGSVSIYVQK

SEQ ID NO: 26827 - protein, 485 aa, Bacillus sp.
HHNGTNGTMMQYFEWYLPNDGNHWNRLNSDASNLKSKGITAVWIPPAWKGASQNDVGYGAYDLYDLGEFNQKGTVRTKYGTRSQLQAAVTSLKNNGIQVYGDVVMNHKGGADATEMVRAVEVNPNNRNQEVTGEYTIEAWTRFDFPGRGNTHSSFKWRWYHFDGVDWDQSRRFDNRIYKFRGHGKAWDWEVDTEFGNYDYLMYADYDMDHPEVVNELRNWGVWYTNTLGLDGFRIDAVKHIKYSFTRDWINHVRSATGKNMFAVAEFWKNDLGAIENYLQKTNWNHSVFDVPLHYNLYNASKSGGNYDMRNIFNGTVVQRHPSHAVTFVDNHDSQPEEALESFVEEWFKPLAYALTLTREQGYPSVFYGDYYGIPTHGVPAMRSKIDPILEARQKYAYGPQHDYLDHPDVIGWTREGDSSHPKSGLATLITDGPGGSKRMYAGLKNAGETWYDITGNRSDTVKIGSDGWGEFHVNDGSVSIYVQK

SEQ ID NO: 26828 - protein, 485 aa, Synthetic construct
HHNGTNGTMMQYFEWYLPNDGNHWNRLNSDASNLKSKGITAVWIPPAWKGASQNDVGYGAYDLYDLGEFNQKGTVRTKYGTRSQLQAAVTSLKNNGIQVYGDVVMNHKGGADATEMVRAVEVNPNNRNQEVTGEYTIEAWTRFDFPGRGNTHSSFKWRWYHFDGVDWDQSRRLNNRIYKFRGHGKAWDWEVDTENGNYDYLMYADIDMDHPEVVNELRNWGVWYTNTLGLDGFRIDAVKHIKYSFTRDWINHVRSATGKGMFAVAEFWKNDLGAIENYLQKTNWNHSVFDVPLHYNLYNASKSGGNYDMRNIFNGTVVQRHPSHAVTFVDNHDSQPEEALESFVEEWFKPLAYALTLTREQGYPSVFYGDYYGIPTHGVPAMRSKIDPILEARQKYAYGPQHDYLDHPDVIGWTREGDSSHPKSGLATLITDGPGGSKRMYAGLKNAGETWYDITGNRSDTVKIGSDGWGEFHVNDGSVSIYVQK

SEQ ID NO: 26829 - protein, 483 aa, Synthetic construct
HHNGTNGTMMQYFEWYLPNDGNHWNRLNSDASNLKSKGITAVWIPPAWKGASQNDVGYGAYDLYDLGEFNQKGTVRTKYGTRSQLQAAVTSLKNNGIQVYGDVVMNHKGGADATEMVRAVEVNPNNRNQEVTGEYTIEAWTRFDFPGRGNTHSSFKWRWYHFDGVDWDQSRMLNNRIYKFRGKAWDWEVDTENGNYDYLMYADIDMDHPEVVNELRNWGVWYTNTLGLDGFRIDAVKHIKYSFTRDWINHVRSATGKNMFAVAEFWKNDLGAIENYLQKTNWNHSVFDVPLHYNLYNASKSGGNYDMRNIFNGTVVQRHPSHAVTFVDNHDSQPEEALESFVEEWFKPLAYALTLTREQGYPSVFYGDYYGIPTHGVPAMRSKIDPILEARQKYAYGPQHDYLDHPDVIGWTREGDSSHPKSGLATLITDGPGGSKRMYAGLKNAGETWYDITGNRSDTVKIGSDGWGEFHVNDGSVSIYVQK

SEQ ID NO: 26830 - protein, 485 aa, Bacillus sp.
HHNGTNGTMMQYFEWYLPNDGNHWNRLNSDASNLKSKGITAVWIPPAWKGVSQNDVGYGAYDLYDLGEFNQKGTVRTKYGTRSQLQAAVTSLKNNGIQVYGDVVMNHKGGADATEMVRAVEVNPNNRNQEVTGEYTIEAWTRFDFPGRGNTHSSFKWRWYHFDGVDWDQSRDFNNRIYKFRGHGKAWDWEVDTEFGNYDYLMYADYDMDHPEVVNELRNWGVWYTNTLGLDGFRIDAVKHIKYSFTRDWINHVRSATGKNMFAVAEFWKNDLGAIENYLQKTNWNHSVFDVPLHYNLYNASKSGGNYDMRNIFNGTVVQRHPSHAVTFVDNHDSQPEEALESFVEEWFKPLAYALTLTREQGYPSVFYGDYYGIPTHGVPAMRSKIDPILEARQKYAYGPQHDYLDHPDVIGWTREGDSSHPKSGLATLITDGPGGSKRMYAGLKNAGETWYDITGNRSDTVKIGSDGWGEFHVNDGSVSIYVQK

SEQ ID NO: 26831 - protein, 485 aa, Synthetic construct
HHNGTNGTMMQYFEWYLPNDGNHWNRLNSDASNLKSKGITAVWIPPAWKGASQNDVGYGAYDLYDLGEFNQKGTVRTKYGTRSQLQAAVTSLKNNGIQVYGDVVMNHKGGADATEMVRAVEVNPNNRNQEVTGEYTIEAWTRFDFPGRGNTHSSFKWRWYHFDGVDWDQSRRLNNRIYKFRGHGKAWDWEVDTENGNYDYLMYADIDMDHPEVVNELRNWGVWYTNTLGLDGFRIDAVKHIKYSFTRDWINHVRSATGKNMFAVAEFWKNDLGAIENYLQKTNWNHSVFDVPLHYNLYNASKSGGNYDMRNIFNGTVVQRHPSHAVTFVDNHDSQPEEALESFVEEWFKPLAYALTLTREQGYPSVFYGDYYGIPTHGVPAMRHKIDPILEARQKYAYGPQHDYLDHPDVIGWTREGDSSHPKSGLATLITDGPGGSKRMYAGLKNAGETWYDITGNRSDTVKIGSDGWGEFHVNDGSVSIYVQK

SEQ ID NO: 26832 - protein, 485 aa, Bacillus sp.
HHNGTNGTMMQYFEWYLPNDGNHWNRLNSDASNLKSKGITAVWIPPAWKGASQNDVGYGAYDLYDLGEFNQKGTVRTKYGTRSQLQAAVTSLKNNGIQVYGDVVMNHKGGADATEMVSAVEVNPNNRNQEVTGDYTIEAWTRFDFPGRGNTHSSFKWRWYHFDGVDWDQSRRLNNRIYKFRAHGKAWDWEVDTEFGNYDYLMYADYDMDHPEVVNELRNWGVWYTNTLGLDGFRIDAVKHIKYSFTRDWINHVRSATGKNMFAVAEFWKNDLGAIENYLQKTNWNHSVFDVPLHYNLYNASKSGGNYDMRNIFNGTVVQRHPSHAVTFVDNHDSQPEEALESFVEEWFKPLAYALTLTREQGYPSVFYGDYYGIPTHGVPAMRSKIDPILEARQKYAYGPQHDYLDHPDVIGWTREGDSSHPKSGLATLITDGPGGSKRMYAGLKNAGETWYDITGNRSDTVKIGSDGWGEFHVNDGSVSIYVQK

SEQ ID NO: 26833 - protein, 483 aa, Bacillus sp.
HHNGTNGTMMQYFEWYLPNDGNHWNRLNSDASNLKSKGITAVWIPPAWKGASQNDVGYGAYDLYDLGEFNQKGTVRTKYGTRSQLQAAVTSLKNNGIQVYGDVVMNHKGGADATEMVRAVEVNPNNRNQEVTGEYTIEAWTRFDFPGRGNTHSSFKWRWYHFDGVDWDQSRRLNNRIYKFRGKAWDWEVDTEFGNYDYLMYADYDMDHPEVVNELRNWGVWYTNTLGLDGFRIDAVKHIKYSFTRDWINHVRSATGKNMFAVAEFWKNDLGAIENYLQKTNWNHSVFDVPLHYNLYNASKSGGNYDMRNIFNGTVVQRHPSHAVTFVDNHDSQPEEALESFVEEWFKPLAYALTLTREQGYPSVFYGDYYGIPTHGVPAMRSKIDPILEARQKYAYGPQHDYLDHPDVIGWTREGDSSHPNSGLATLITDGPGGSKRMYAGLKNAGETWYDITGNRSDTVKIGSDGWGEFHVNDGSVSIYVQK

SEQ ID NO: 26834 - protein, 485 aa, Synthetic construct
HHNGTNGTMMQYFEWYLPNDGNHWNRLNSDASNLKSHGITAVWIPPAWKGASQNDVGYGAYDLYDLGEFNQKGTVRTKYGTRSQLQAAVTSLKNNGIQVYGDVVMNHKGGADATEMVRAVEVNPNNRNQEVTGEYTIEAWTRFDFPGRGNTHSSFKWRWYHFDGVDWDQSRRLNNRIYKFRGHGKAWDWEVDTENGNYDYLMYADIDMDHPEVVNELRNWGVWYTNTLGLDGFRIDAVKHIKYSFTRDWINHVRSATGKNMFAVAEFWKNDLGAIENYLQKTNWNHSVFDVPLHYNLYNASKSGGNYDMRNIFNGTVVQRHPSHAVTFVDNHDSQPEEALESFVEEWFKPLAYALTLTREQGYPSVFYGDYYGIPTHGVPAMRSKIDPILEARQKYAYGPQHDYLDHPDVIGWTREGDSSHPKSGLATLITDGPGGSKRMYAGLKNAGETWYDITGNRSDTVKIGSDGWGEFHVNDGSVSIYVQK

SEQ ID NO: 26835 - protein, 483 aa, Bacillus sp.
HHNGTNGTMMQYFEWYLPNDGNHWNRLNSDASNLKSKGITAVWIPPAWKATSQNDVGYGAYDLYDLGEFNQKGTVRTKYGTRSQLQAAVTSLKNNGIQVYGDVVMNHKGGADATEMVRAVEVNPNNRNQEVTGEYTIEAWTRFDFPGRGNTHSSFKWRWYHFDGVDWDQSRRFDNRIYKFRGKAWDWEVDTEFGNYDYLMYADYDMDHPEVVNELRNWGVWYTNTLGLDGFRIDAVKHIKYSFTRDWINHVRSATGKNMFAVAEFWKNDLGAIENYLQKTNWNHSVFDVPLHYNLYNASKSGGNYDMRNIFNGTVVQRHPSHAVTFVDNHDSQPEEALESFVEEWFKPLAYALTLTREQGYPSVFYGDYYGIPTHGVPAMRSKIDPILEARQKYAYGPQHDYLDHPDVIGWTREGDSSHPKSGLATLITDGPGGSKRMYAGLKNAGETWYDITGNRSDTVKIGSDGWGEFHVNDGSVSIYVQK

SEQ ID NO: 26836 - protein, 485 aa, Bacillus sp.
HHNGTNGTMMQYFEWYLPNDGNHWNRLNSDASNLKSKGITAVWIPPAWKATSQNDVGYGAYDLYDLGEFNQKGTVRTKYGTRSQLQAAVTSLKNNGIQVYGDVVMNHKGGADATEMVRAVEVNPNNRNQEVTGEYTIEAWTRFDFPGRGNTHSSFKWRWYHFDGVDWDQSRNVNNRIYKFRGHGKAWDWEVDTEFGNYDYLMYADYDMDHPEVVNELRNWGVWYTNTLGLDGFRIDAVKHIKYSFTRDWINHVRSATGKNMFAVAEFWKNDLGAIENYLQKTNWNHSVFDVPLHYNLYNASKSGGNYDMRNIFNGTVVQAHPMHAVTFVDNHDSQPEEALESFVEEWFKPLAYALTLTREQGYPSVFYGDYYGIPTHGVPAMRSKIDPILEARQKYAYGPQHDYLDHPDVIGWTREGDSSHPKSGLATLITDGPGGSKRMYAGLKNAGETWYDITGNRSDTVKIGSDGWGEFHVNYGSVSIYVQK

SEQ ID NO: 26837 - protein, 485 aa, Synthetic construct
HHNGTNGTMMQYFEWYLPNDGNHWNRLNSDASNLKSKGITAVWIPPAWKGASQNDVGYGAYDLYDLGEFNQKGTVRTKYGTRSQLQAAVTSLKNNGIQVYGDVVMNHKGGADATEMVRAVEVNPNNRNQEVTGEYTIEAWTRFDFPGRGNTHSSFKWRWYHFDGVDWDQSRRLNNRIYKFRGHGKAWDWEVDTENGNYDYLMYADIDMDHPEVVNELRNWGVWYTNTLGLDGFRIDAVKHIKYSFTRDWINHVRSATGKNMFAVAEFWKNDLGAIENYLQKTNWNHSVFDVPLHYNLYNASKSGGNYDMRNIFNGTVVQRHPSHAVTFVDNHDSQPEEALESFVEEWFKPLAYALTLTREQGYPSVFYGDYYGIPTHGVPAMRSKIDPILEARQKYAYGPQHDYLDHPDVIGWTREGDSSHPKSGLATLITDGPGGSKRMYAGLKHAGETWYDITGNRSDTVKIGSDGWGEFHVNDGSVSIYVQK

SEQ ID NO: 26838 - protein, 485 aa, Synthetic construct
HHNGTNGTMMQYFEWYLPNDGNHWNRLNSDASNLKSKGITAVWIPPAWKGASQNDVGYGAYDLYDLGEFNQKGTVRTKYGTRSQLQAAVTSLKNNGIQVYGDVVMNHKGGADATEMVRAVEVNPNNRNQEVTGEYTIEAWTRFDFPGRGNTHSSFKWRWYHFDGVDWDQSRRLNNRIYKFRGHGKAWDWEVDTENGNYDYLMYADIDMDHPEVVNELRKWGVWYTNTLGLDGFRIDAVKHIKYSFTRDWINHVRSATGKNMFAVAEFWKNDLGAIENYLQKTNWNHSVFDVPLHYNLYNASKSGGNYDMRNIFNGTVVQRHPSHAVTFVDNHDSQPEEALESFVEEWFKPLAYALTLTREQGYPSVFYGDYYGIPTHGVPAMRSKIDPILEARQKYAYGPQHDYLDHPDVIGWTREGDSSHPKSGLATLITDGPGGSKRMYAGLKNAGETWYDITGNRSDTVKIGSDGWGEFHVNDGSVSIYVQK

SEQ ID NO: 26839 - protein, 483 aa, Bacillus sp.
HHNGTNGTMMQYFEWYLPNDGNHWNRLNSDASNLKSKGITAVWIPPAWKGISQNDVGYGAYDLYDLGEFNQKGTVRTKYGTRSQLQAAVTSLKNNGIQVYGDVVMNHKGGADATEMVRAVEVNPNNRNQEVTGEYTIEAWTRFDFPGRGNTHSSFKWRWYHFDGVDWDQSRRFNNRIYKFRGKAWDWEVDTEFGNYDYLMYADYDMDHPEVVNELRNWGVWYTNTLGLDGFRIDAVKHIKYSFTRDWINHVRSATGKNMFAVAEFWKNDLGAIENYLQKTNWNHSVFDVPLHYNLYNASKSGGNYDMRNIFNGTVVQRHPSHAVTFVDNHDSQPEEALESFVEEWFKPLAYALTLTREQGYPSVFYGDYYGIPTHGVPAMRSKIDPILEARQKYAYGPQHDYLDHPDVIGWTREGDSSHPKSGLATLITDGPGGSKRMYAGLKNAGETWYDITGNRSDTVKIGSDGWGEFHVNDGSVSIYVQK

SEQ ID NO: 26840 - protein, 485 aa, Synthetic construct
HHNGTNGTMMQYFEWYLPNDGNHWNRLNSDASNLKSKGITAVWIPPAWKGASQNDVGYGAYDLYDLGEFNQKGTVRTKYGTRSQLQAAVTSLKNNGIQVYGDVVMNHKGGADATEMVRAVEVNPNNRNQEVTGEYTIEAWTRFDFPGRGNTHSSFKWRWYHFDGVDWDQSRRLNNRIYKFRGHGKAWDWEVDTENGNYDYLMYADIDMDHPEVVNELRNWGVWYTNTLGLDGFRIDAVKHIKYSFTRDWINHVRSATGKNMFAVAEFWKNDLGAIENYLQKTNWNHSVFDVPLHYNLYNASKSGGNYDMRNIFNGTVVQRHPSHAVTFVDNHDSQPEEALESFVEEWFKPLAYALTLTREQGYPSVFYGDYYGIPTHGVPAMRQKIDPILEARQKYAYGPQHDYLDHPDVIGWTREGDSSHPKSGLATLITDGPGGSKRMYAGLKNAGETWYDITGNRSDTVKIGSDGWGEFHVNDGSVSIYVQK

SEQ ID NO: 26841 - protein, 485 aa, Bacillus sp.
HHNGTNGTMMQYFEWYLPNDGNHWNRLNSDASNLKSKGITAVWIPPAWKAASQNDVGYGAYDLYDLGEFNQKGTVRTKYGTRSQLQAAVTSLKNNGIQVYGDVVMNHKGGADATEMVRAVEVNPNNRNQEVTGEYTIEAWTRFDFPGRGNTHSSFKWRWYHFDGVDWDQSRRFQNRIYKFRGHGKAWDWEVDTEFGNYDYLMYADYDMDHPEVVNELRNWGVWYTNTLGLDGFRIDAVKHIKYSFTRDWINHVRSATGKNMFAVAEFWKNDLGAIENYLQKTNWNHSVFDVPLHYNLYNASKSGGNYDMRNIFNGTVVQRHPSHAVTFVDNHDSQPEEALESFVEEWFKPLAYALTLTREQGYPSVFYGDYYGIPTHGVPAMRSKIDPILEARQKYAYGPQHDYLDHPDVIGWTREGDSSHPKSGLATLITDGPGGSKRMYAGLKNAGETWYDITGNRSDTVKIGSDGWGEFHVNDGSVSIYVQK

SEQ ID NO: 26842 - protein, 483 aa, Bacillus sp.
HHNGTNGTMMQYFEWYLPNDGNHWNRLNSDASNLKSKGITAVWIPPAWKATSQNDVGYGAYDLYDLGEFNQKGTVRTKYGTRSQLQSAVTSLKNNGIQVYGDVVMNHKGGADATEMVRAVEVNPNNRNQEVTGEYTIEAWTRFDFPGRGNTHSSFKWRWYHFDGVDWDQSRNTDNRIYKFRGKAWDWEVDTEFGNYDYLMYADYDMDHPEVVNELRNWGVWYTNTLGLDGFRIDAVKHIKYSFTRDWINHVRSATGKNMFAVAEFWKNDLGAIENYLQKTNWNHSVFDVPLHYNLYNASKSGGNYDMRNIFNGTVVQRHPSHAVTFVDNHDSQPEEALESFVEEWFKPLAYALTLTREQGYPSVFYGDYYGIPTHGVPAMRSKIDPILEARQKYAYGPQHDYLDHPDVIGWTREGDSSHPKSGLATLITDGPGGSKRMYAGLKNAGETWYDITGNRSDTVKIGSDGWGEFHVNDGSVSIYVQK

SEQ ID NO: 26843 - protein, 483 aa, Synthetic construct
HHNGTNGTMMQYFEWYLPNDGNHWNRLNSDASNLKSKGITAVWIPPAWKGASQNDVGYGAYDLYDLGEFNQKGTVRTKYGTRSQLQAAVTSLKNNGIQVYGDVVMNHKGGADATEMVFAVEVNPNNRNQEVTGEYTIEAWTRFDFPGRGNTHSSFKWRWYHFDGVDWDQSRRLNNRIYKFRGKAWDWEVDTENGNYDYLMYADIDMDHPEVVNELRNWGVWYTNTLGLDGFRIDAVKHIKYSFTRDWINHVRSATGKNMFAVAEFWKNDLGAIENYLQKTNWNHSVFDVPLHYNLYNASKSGGNYDMRNIFNGTVVQRHPSHAVTFVDNHDSQPEEALESFVEEWFKPLAYALTLTREQGYPSVFYGDYYGIPTHGVPAMRSKIDPILEARQKYAYGPQHDYLDHPDVIGWTREGDSSHPKSGLATLITDGPGGSKRMYAGLKNAGETWYDITGNRSDTVKIGSDGWGEFHVNDGSVSIYVQK

SEQ ID NO: 26844 - protein, 485 aa, Synthetic construct
HHNGTNGTMMQYFEWYLPNDGNHWNRLNSDASNLKSKGITAVWIPPAWKGASQNDVGYGAYDLYDLGEFNQKGTVRTKYGTRSQLQAAVTSLKNNGIQVYGDVVMNHKGGADATEMVRAVEVNPNNRNQEVTGEYTIEAWTRFDFPGRGNTHSSFKWRWYHFDGVDWDQSRRLNNRIYKFRGHGKAWDWEVDTENGNYDYLMYADIDMDHPEVVNELRNWGVWYTNTLGLDGFRIDAVKHIKYSFTRDWINHVRSATGKNMFAVAEFWKNDLGAIENYLQKTNWNHSVFDVPLHYNLYNASKSGGNYDMRNIFNGTVVQRHPSHAVTFVDNHDSQPEEALESFVEEWFKPLAYALTLTREQGYPSVFYGDYYGIPTHGVPAMRSKIDPILEARQKYAYGPQHDYLDHPDVIGWTREGDSSHPKSGLATLITDGPGGSKRMYAGLKNAGETWYDITGNRSDTVKIGSDGWGEFPVNDGSVSIYVQK

SEQ ID NO: 26845 - protein, 485 aa, Synthetic construct
HHNGTNGTMMQYFEWNLPNDGNHWNRLNSDASNLKSKGITAVWIPPAWKGASQNDVGYGAYDLYDLGEFNQKGTVRTKYGTRSQLQAAVTSLKNNGIQVYGDVVMNHKGGADATEMVRAVEVNPNNRNQEVTGEYTIEAWTRFDFPGRGNTHSSFKWRWYHFDGVDWDQSRRLNNRIYKFRGHGKAWDWEVDTENGNYDYLMYADIDMDHPEVVNELRNWGVWYTNTLGLDGFRIDAVKHIKYSFTRDWINHVRSATGKNMFAVAEFWKNDLGAIENYLQKTNWNHSVFDVPLHYNLYNASKSGGNYDMRNIFNGTVVQRHPSHAVTFVDNHDSQPEEALESFVEEWFKPLAYALTLTREQGYPSVFYGDYYGIPTHGVPAMRSKIDPILEARQKYAYGPQHDYLDHPDVIGWTREGDSSHPKSGLATLITDGPGGSKRMYAGLKNAGETWYDITGNRSDTVKIGSDGWGEFHVNDGSVSIYVQK

SEQ ID NO: 26846 - protein, 483 aa, Bacillus sp.
HHNGTNGTMMQYFEWYLPNDGNHWNRLNSDASNLKSKGITAVWIPPAWKGASQNDVGYGAYDLYDLGEFNQKGTVRTKYGTRSQLQAAVTSLKNNGIQVYGDVVMNHKGGADATEMVRAVEVNPNNRNQEVTGEYTIEAWTRFDFPGRGNTHSSFKWRWYHFDGVDWDQSRRLNNRIYKFRGKAWDWEVDTEFGNYDYLMYADYDMDHPEVVNELRNWGVWYTNTLGLDGFRIDAVKHIKYSFTRDWINHVRSATGKNMFAVAEFWKNDLGAIENYLQKTNWNHSVFDVPLHYNLYNASKSGGNYDMRNIFNGTVVQAHPMHAVTFVDNHDSQPEEALESFVEEWFKPLAYALTLTREQGYPSVFYGDYYGIPTHGVPAMRSKIDPILEARQKYAYGPQHDYLDHPDVIGWTREGDSSHPKSGLATLITDGPGGSKRMYAGLKNAGETWYDITGNRSDTVKIGSDGWGEFHVNDGSVSIYVQK

SEQ ID NO: 26847 - protein, 483 aa, Synthetic construct
HHNGTNGTMMQYFEWYLPNDGNHWNRLNSDASNLKSKGITAVWIPPAWKGASQNDVGYGAYDLYDLGEFNQKGTVRTKYGTRSQLQAAVTSLKNNGIQVYGDVVMNHKGGADATEMVRAVEVNPNNRNQEVTGEYTIEAWTRFDFPGRGNTHSSFKWRWYHFDGVDWDQSRRLNNRIYKFRGKAWDWEVDTENGNYDYLMYADIDMDHPEVVNELRNWGVWYTNTLGLDGFRIDAVKHIKYSFTRDWINHVRSATGKNMFAVAEFWKNDLGAIENYLQKTNWNHSVFDVPLHYNLYNASKSGGNYDMRYIFNGTVVQRHPSHAVTFVDNHDSQPEEALESFVEEWFKPLAYALTLTREQGYPSVFYGDYYGIPTHGVPAMRSKIDPILEARQKYAYGPQHDYLDHPDVIGWTREGDSSHPKSGLATLITDGPGGSKRMYAGLKNAGETWYDITGNRSDTVKIGSDGWGEFHVNDGSVSIYVQK

SEQ ID NO: 26848 - protein, 483 aa, Bacillus sp.
HHNGTNGTMMQYFEWYLPNDGNHWNRLNSDASNLKSKGITAVWIPPAWKGTSQNDVGYGAYDLYDLGEFNQKGTVRTKYGTRSQLQAAVTSLKNNGIQVYGDVVMNHKGGADATEMVRAVEVNPNNRNQEVTGEYTIEAWTRFDFPGRGNTHSSFKWRWYHFDGVDWDQSRRTQNRIYKFRGKAWDWEVDTEFGNYDYLMYTDYDMDHPEVVNELRNWGVWYTNTLGLDGFRIDAVKHIKYSFTRDWINHVRSATGKNMFAVAEFWKNDLGAIENYLQKTNWNHSVFDVPLHYNLYNASKSGGNYDMRNIFNGTVVQRHPSHAVTFVDNHDSQPEEALESFVEEWFKPLAYALTLTREQGYPSVFYGDYYGIPTHGVPAMRSKIDPILEARQKYAYGPQHDYLDHPDVIGWTREGDSSHPKSGLATLITDGPGGSKRMYAGLKNAGETWYDITGNRSDTVKIGSDGWGEFHVNDGSVSIYVQK

SEQ ID NO: 26849 - protein, 483 aa, Synthetic construct
HHNGTNGTMMQYFEWYLPNDGNHWNRLNSDASNLKSKGITAVWIPPAWKGASQNDVGYGAYDLYDLGEFNQKGTVRTKYGTRSQLQAAVTSLKNNGIQVYGDVVMNHKGGADATEMVRAVEVNPNNRNQEVTGEYTIEAWTIFDFPGRGNTHSSFKWRWYHFDGVDWDQSRRLNNRIYKFRGKAWDWEVDTENGNYDYLMYADIDMDHPEVVNELRNWGVWYTNTLGLDGFRIDAVKHIKYSFTRDWINHVRSATGKNMFAVAEFWKNDLGAIENYLQKTNWNHSVFDVPLHYNLYNASKSGGNYDMRNIFNGTVVQRHPSHAVTFVDNHDSQPEEALESFVEEWFKPLAYALTLTREQGYPSVFYGDYYGIPTHGVPAMRSKIDPILEARQKYAYGPQHDYLDHPDVIGWTREGDSSHPKSGLATLITDGPGGSKRMYAGLKNAGETWYDITGNRSDTVKIGSDGWGEFHVNDGSVSIYVQK

SEQ ID NO: 26850 - protein, 483 aa, Bacillus sp.
HHNGTNGTMMQYFEWYLPNDGNHWNRLNSDASNLKSKGITAVWIPPAWKGASQNDVGYGAYDLYDLGEFNQKGTVRTKYGTRSQLQAAVTSLKNNGIQVYGDVVMNHKGGADATEMVRAVEVNPNNRNQEVTGEYTIEAWTRFDFPGRGNTHSSFKWRWYHFDGVDWDQSRQINNRIYKFRGKAWDWEVDTEFGNYDYLMYADYDMDHPEVVNELRNWGVWYTNTLGLDGFRIDAVKHIKYSFTRDWINHVRSATGKNMFAVAEFWKNDLGAIENYLQKTNWNHSVFDVPLHYNLYNASKSGGNYDMRNIFNGTVVQRHPSHAVTFVDNHDSQPEEALESFVEEWFKPLAYALTLTREQGYPSVFYGDYYGIPTHGVPAMRSKIDPILEARQKYAYGPQHDYLDHPDVIGWTREGDSSHPKSGLATLITDGPGGSKRMYAGLKNAGETWYDITGNRSDTVKIGSDGWGEFHVNDGSVSIYVQK

SEQ ID NO: 26851 - protein, 485 aa, Bacillus sp.
HHNGTNGTMMQYFEWYLPNDGNHWNRLNSDASNLKSKGITAVWIPPAWKATSQNDVGYGAYDLYDLGEFNQKGTVRTKYGTRSQLQAAVTSLKNNGIQVYGDVVMNHKGGADATEMVRAVEVNPNNRNQEVTGEYTIEAWTRFDFPGRGNTHSSFKWRWYHFDGVDWDQSRQVNNRIYKFRGHGKAWDWEVDTEFGNYDYLMYADYDMDHPEVVNELRNWGVWYTNTLGLDGFRIDAVKHIKYSFTRDWINHVRSATGKNMFAVAEFWKNDLGAIENYLQKTNWNHSVFDVPLHYNLYNASKSGGNYDMRNIFNGTVVQRHPSHAVTFVDNHDSQPEEALESFVEEWFKPLAYALTLTREQGYPSVFYGDYYGIPTHGVPAMRSKIDPILEARQKYAYGPQHDYLDHPDVIGWTREGDSSHPKSGLATLITDGPGGSKRMYAGLKNAGETWYDITGNRSDTVKIGSDGWGEFHVNDGSVSIYVQK

SEQ ID NO: 26852 - protein, 483 aa, Bacillus sp.
HHNGTNGTMMQYFEWYLPNDGNHWNRLNSDASNLKSKGITAVWIPPAWKGLSQNDVGYGAYDLYDLGEFNQKGTVRTKYGTRSQLQAAVTSLKNNGIQVYGDVVMNHKGGADATEMVRAVEVNPNNRNQEVTGEYTIEAWTRFDFPGRGNTHSSFKWRWYHFDGVDWDQSRRLQNRIYKFRGKAWDWEVDTEFGNYDYLMYADYDMDHPEVVNELRNWGVWYTNTLGLDGFRIDAVKHIKYSFTRDWINHVRSATGKNMFAVAEFWKNDLGAIENYLQKTNWNHSVFDVPLHYNLYNASKSGGNYDMRNIFNGTVVQRHPSHAVTFVDNHDSQPEEALESFVEEWFKPLAYALTLTREQGYPSVFYGDYYGIPTHGVPAMRSKIDPILEARQKYAYGPQHDYLDHPDVIGWTREGDSSHPKSGLATLITDGPGGSKRMYAGLKNAGETWYDITGNRSDTVKIGSDGWGEFHVNDGSVSIYVQK

SEQ ID NO: 26853 - protein, 483 aa, Bacillus sp.
HHNGTNGTMMQYFEWYLPNDGNHWNRLNSDASNLKSKGITAVWIPPAWKGASQNDVGYGAYDLYDLGEFNQKGTVRTKYGTRSQLQAAVTSLKNNGIQVYGDVVMNHKGGADATEMVRAVEVNPNNRNQEVTGEYTIEAWTRFDFPGRGNTHSSFKWRWYHFDGVDWDQSRQVNNRIYKFRGKAWDWEVDTEFGNYDYLMYADYDMDHPEVVNELRNWGVWYTNTLGLDGFRIDAVKHIKYSFTRDWINHVRSATGKNMFAVAEFWKNDLGAIENYLQKTNWNHSVFDVPLHYNLYNASKSGGNYDMRNIFNGTVVQRHPSHAVTFVDNHDSQPEEALESFVEEWFKPLAYALTLTREQGYPSVFYGDYYGIPTHGVPAMRSKIDPILEARQKYAYGPQHDYLDHPDVIGWTREGDSSHPKSGLATLITDGPGGSKRMYAGLKNAGETWYDITGNRSDTVKIGSDGWGEFHVNDGSVSIYVQK

SEQ ID NO: 26854 - protein, 485 aa, Bacillus sp.
HHNGTNGTMMQYFEWYLPNDGNHWNRLNSDASNLKSKGITAVWIPPAWKGISQNDVGYGAYDLYDLGEFNQKGTVRTKYGTRSQLQAAVTSLKNNGIQVYGDVVMNHKGGADATEMVRAVEVNPNNRNQEVTGEYTIEAWTRFDFPGRGNTHSSFKWRWYHFDGVDWDQSRQLENRIYKFRGHGKAWDWEVDTEFGNYDYLMYADYDMDHPEVVNELRNWGVWYTNTLGLDGFRIDAVKHIKYSFTRDWINHVRSATGKNMFAVAEFWKNDLGAIENYLQKTNWNHSVFDVPLHYNLYNASKSGGNYDMRNIFNGTVVQRHPSHAVTFVDNHDSQPEEALESFVEEWFKPLAYALTLTREQGYPSVFYGDYYGIPTHGVPAMRSKIDPILEARQKYAYGPQHDYLDHPDVIGWTREGDSSHPKSGLATLITDGPGGSKRMYAGLKNAGETWYDITGNRSDTVKIGSDGWGEFHVNDGSVSIYVQK

SEQ ID NO: 26855 - protein, 485 aa, Bacillus sp.
HHNGTNGTMMQYFEWYLPNDGNHWNRLNSDASNLKSKGITAVWIPPAWKATSQNDVGYGAYDLYDLGEFNQKGTVRTKYGTRSQLQAAVTSLKNNGIQVYGDVVMNHKGGADATEMVRAVEVNPNNRNQEVTGEYTIEAWTRFDFPGRGNTHSSFKWRWYHFDGVDWDQSRDFTNRIYKFRGHGKAWDWEVDTEFGNYDYLMYADYDMDHPEVVNELRNWGVWYTNTLGLDGFRIDAVKHIKYSFTRDWINHVRSATGKNMFAVAEFWKNDLGAIENYLQKTNWNHSVFDVPLHYNLYNASKSGGNYDMRNIFNGTVVQRHPSHAVTFVDNHDSQPEEALESFVEEWFKPLAYALTLTREQGYPSVFYGDYYGIPTHGVPAMRSKIDPILEARQKYAYGPQHDYLDHPDVIGWTREGDSSHPPSGLATLITDGPGGSKRMYAGLKNAGETWYDITGNRSDTVKIGSDGWGEFHVNDGSVSIYVQK

SEQ ID NO: 26856 - protein, 485 aa, Synthetic construct
HHNGTNGTMMQYFEWYLPNDGNHWNRLNSDASNLKSKGITAVWIPPAWKGASQNDVGYGAYDLYDLGEFNQKGTVRTKYGTRSQLQRAVTSLKNNGIQVYGDVVMNHKGGADATEMVRAVEVNPNNRNQEVTGEYTIEAWTRFDFPGRGNTHSSFKWRWYHFDGVDWDQSRRLNNRIYKFRGHGKAWDWEVDTENGNYDYLMYADIDMDHPEVVNELRNWGVWYTNTLGLDGFRIDAVKHIKYSFTRDWINHVRSATGKNMFAVAEFWKNDLGAIENYLQKTNWNHSVFDVPLHYNLYNASKSGGNYDMRNIFNGTVVQRHPSHAVTFVDNHDSQPEEALESFVEEWFKPLAYALTLTREQGYPSVFYGDYYGIPTHGVPAMRSKIDPILEARQKYAYGPQHDYLDHPDVIGWTREGDSSHPKSGLATLITDGPGGSKRMYAGLKNAGETWYDITGNRSDTVKIGSDGWGEFHVNDGSVSIYVQK

SEQ ID NO: 26857 - protein, 485 aa, Bacillus sp.
HHNGTNGTMMQYFEWYLPNDGNHWNRLNSDASNLKSKGITAVWIPPAWKATSQNDVGYGAYDLYDLGEFNQKGTVRTKYGTRSQLQAAVTSLKNNGIQVYGDVVMNHKGGADATEMVRAVEVNPNNRNQEVTGEYTIEAWTRFDFPGRGNTHSSFKWRWYHFDGVDWDQSRNIQNRIYKFRGHGKAWDWEVDTEFGNYDYLMYADYDMDHPEVVNELRNWGVWYTNTLGLDGFRIDAVKHIKYSFTRDWINHVRSATGKNMFAVAEFWKNDLGAIENYLQKTNWNHSVFDVPLHYNLYNASKSGGNYDMRNIFNGTVVQRHPSHAVTFVDNHDSQPEEALESFVEEWFKPLAYALTLTREQGYPSVFYGDYYGIPTHGVPAMRSKIDPILEARQKYAYGPQHDYLDHPDVIGWTREGDSSHPKSGLATLITDGPGGSKRMYAGLKNAGETWYDITGNRSDTVKIGSDGWGEFHVNDGSVSIYVQK

SEQ ID NO: 26858 - protein, 483 aa, Bacillus sp.
HHNGTNGTMMQYFEWYLPNDGNHWNRLNSDASNLKSKGITAVWIPPAWKGVSQNDVGYGAYDLYDLGEFNQKGTVRTKYGTRSQLQAAVTSLKNNGIQVYGDVVMNHKGGADATEMVRAVEVNPNNRNQEVTGEYTIEAWTRFDFPGRGNTHSSFKWRWYHFDGVDWDQSRDFNNRIYKFRGKAWDWEVDTEFGNYDYLMYADYDMDHPEVVNELRNWGVWYTNTLGLDGFRIDAVKHIKYSFTRDWINHVRSATGKNMFAVAEFWKNDLGAIENYLQKTNWNHSVFDVPLHYNLYNASKSGGNYDMRNIFNGTVVQRHPSHAVTFVDNHDSQPEEALESFVEEWFKPLAYALTLTREQGYPSVFYGDYYGIPTHGVPAMRSKIDPILEARQKYAYGPQHDYLDHPDVIGWTREGDSSHPKSGLATLITDGPGGSKRMYAGLKNAGETWYDITGNRSDTVKIGSDGWGEFHVNDGSVSIYVQK

SEQ ID NO: 26859 - protein, 485 aa, Bacillus sp.
HHNGTNGTMMQYFEWYLPNDGNHWNRLNSDASNLKSKGITAVWIPPAWKGASQNDVGYGAYDLYDLGEFNQKGTVRTKYGTRSQLQAAVTSLKNNGIQVYGDVVMNHKGGADATEMVRAVEVNPNNRNQEVTGEYTIEAWTRFDFPGRGNTHSSFKWRWYHFDGVDWDQSRRLNNRIYKFRGHGKAWDWEVDTEFGNYDYLMYADYDMDHPEVVNELRNWGVWYTNTLGLDGFRIDAVKHIKYSFTRDWINHVRSATGKNMFAVAEFWKNDLGAIENYLQKTNWNHSVFDVPLHYNLYNASKSGGNYDMRNIFNGTVVQRHPSHAVTFVDNHDSQPEEALESFVEEWFKPLAYALTLTREQGYPSVFYGDYYGIPTHGVPAMRSKIDPILEARQKYAYGPQHDYLDHPDVIGWTREGDSSHPKSGLATLITDGPGGSKRMYAGLKNAGETWYDITGNRSDTVKIGSDGWGEFSVNDGSVSIYVQK

SEQ ID NO: 26860 - protein, 485 aa, Bacillus sp.
HHNGTNGTMMQYFEWYLPNDGNHWNRLNSDASNLKSKGITAVWIPPAWKGASQNDVGYGAYDLYDLGEFNQKGTVRTKYGTRSQLQAAVTSLKNNGIQVYGDVVMNHKGGADATEMVRAVEVNPNNRNQEVTGEYTIEAWTRFDFPGRGNTHSSFKWRWYHFDGVDWDQSREFDNRIYKFRGHGKAWDWEVDTEFGNYDYLMYADYDMDHPEVVNELRNWGVWYTNTLGLDGFRIDAVKHIKYSFTRDWINHVRSATGKNMFAVAEFWKNDLGAIENYLQKTNWNHSVFDVPLHYNLYNASKSGGNYDMRNIFNGTVVQRHPSHAVTFVDNHDSQPEEALESFVDPWFKPLAYALTLTREQGYPSVFYGDYYGIPTHGVPAMRSKIDPILEARQKYAYGPQHDYLDHPDVIGWTREGDSSHPKSGLATLITDGPGGSKRMYAGLKNAGETWYDITGNRSDTVKIGSDGWGEFHVNGGSVSIYVQK

SEQ ID NO: 26861 - protein, 483 aa, Synthetic construct
HHNGTNGTMMQYFEWYLPNDGNHWNRLNSDASNLKSKGITAVWIPPAWKGASQNDVGYGAYDLYDLGEFNQKGTVRTKYGTRSQLQAAVTSLKNNGIQVYGDVVMNHKGGADATEWVRAVEVNPNNRNQEVTGEYTIEAWTRFDFPGRGNTHSSFKWRWYHFDGVDWDQSRRLNNRIYKFRGKAWDWEVDTENGNYDYLMYADIDMDHPEVVNELRNWGVWYTNTLGLDGFRIDAVKHIKYSFTRDWINHVRSATGKNMFAVAEFWKNDLGAIENYLQKTNWNHSVFDVPLHYNLYNASKSGGNYDMRNIFNGTVVQRHPSHAVTFVDNHDSQPEEALESFVEEWFKPLAYALTLTREQGYPSVFYGDYYGIPTHGVPAMRSKIDPILEARQKYAYGPQHDYLDHPDVIGWTREGDSSHPKSGLATLITDGPGGSKRMYAGLKNAGETWYDITGNRSDTVKIGSDGWGEFHVNDGSVSIYVQK

SEQ ID NO: 26862 - protein, 483 aa, Bacillus sp.
HHNGTNGTMMQYFEWYLPNDGNHWNRLNSDASNLKSKGITAVWIPPAWKGASQNDVGYGAYDLYDLGEFNQKGTVRTKYGTRSQLQAAVTSLKNNGIQVYGDVVMNHKGGADATEMVRAVEVNPNNRNQEVTGEYTIEAWTRFDFPGRGNTHSSFKWRWYHFDGVDWDQSRRFNNRIYKFRGKAWDWEVDTEFGNYDYLMYADYDMDHPEVVNELRNWGVWYTNTLGLDGFRIDAVKHIKYSFTRDWINHVRSATGKNMFAVAEFWKNDLGAIENYLQKTNWNHSVFDVPLHYNLYNASKSGGNYDMRNIFNGTVVQRHPSHAVTFVDNHDSQPEEALESFVEEWFKPLAYALTLTREQGYPSVFYGDYYGIPTHGVPAMRSKIDPILEARQKYAYGPQHDYLDHPDVIGWTREGDSSHPKSGLATLITDGPGGSKRMYAGLKNAGETWYDITGNRSDTVKIGSDGWGEFHVNDGSVSIYVQK

SEQ ID NO: 26863 - protein, 485 aa, Bacillus sp.
HHNGTNGTMMQYFEWYLPNDGNHWNRLNSDASNLKSKGITAVWIPPAWKGLSQNDVGYGAYDLYDLGEFNQKGTVRTKYGTRSQLQAAVTSLKNNGIQVYGDVVMNHKGGADATEMVRAVEVNPNNRNQEVTGEYTIEAWTRFDFPGRGNTHSSFKWRWYHFDGVDWDQSRRLQNRIYKFRGHGKAWDWEVDTEFGNYDYLMYADYDMDHPEVVNELRNWGVWYTNTLGLDGFRIDAVKHIKYSFTRDWINHVRSATGKNMFAVAEFWKNDLGAIENYLQKTNWNHSVFDVPLHYNLYNASKSGGNYDMRNIFNGTVVQRHPSHAVTFVDNHDSQPEEALESFVEEWFKPLAYALTLTREQGYPSVFYGDYYGIPTHGVPAMRSKIDPILEARQKYAYGPQHDYLDHPDVIGWTREGDSSHPKSGLATLITDGPGGSKRMYAGLKNAGETWYDITGNRSDTVKIGSDGWGEFHVNDGSVSIYVQK

SEQ ID NO: 26864 - protein, 485 aa, Synthetic construct
HHNGTNGTMMQYFEWYLPNDGNHWNRLNSDASNLKSKGITAVWIPPAWKGASQNDVGYGAYDLYDLGEFNQKGTVRTKYGTRSQLQAAVTSLKNNGIQVYGDVVMNHKGGADATEMVRAVEVNPNNRNQEVTGEYTIEAWTRFDFPGRGNTHSSFKWRWYHFDGVDWDQSRRLNNRIYKFRGHGKAWDWEVDTENGNYDYLMYADIDMDHPEVVNELRNWGVWYTNTLGLDGFRIDAVKHIKYSFTRDWINHVRSATGKNMFAVAEFWKNDLGAIENYLQKTNWNHSVFDVPLHYNLYNASKSGGNYDMRNIFNGTVVQRHPSHAVTFVDNHDSQPEEALESFVEEWFKPLAYALTLTREQGYPSVFYGDYYGIPTHGVPAMRSKIDPILEARQKYAYGPQHDYLDHPDVIGWTREGDSSHPKSGLATLITDGPGGSKRMYAGRKNAGETWYDITGNRSDTVKIGSDGWGEFHVNDGSVSIYVQK

SEQ ID NO: 26865 - protein, 483 aa, Bacillus sp.
HHNGTNGTMMQYFEWYLPNDGNHWNRLNSDASNLKSKGITAVWIPPAWKGTSQNDVGYGAYDLYDLGEFNQKGTVRTKYGTRSQLQAAVTSLKNNGIQVYGDVVMNHKGGADATEMVRAVEVNPNNRNQEVTGEYTIEAWTRFDFPGRGNTHSSFKWRWYHFDGVDWDQSRDLDNRIYKFRGKAWDWEVDTEFGNYDYLMYADYDMDHPEVVNELRNWGVWYTNTLGLDGFRIDAVKHIKYSFTRDWINHVRSATGKNMFAVAEFWKNDLGAIENYLQKTNWNHSVFDVPLHYNLYNASKSGGNYDMRNIFNGTVVQRHPSHAVTFVDNHDSQPEEALESFVEEWFKPLAYALTLTREQGYPSVFYGDYYGIPTHGVPAMRSKIDPILEARQKYAYGPQHDYLDHPDVIGWTREGDSSHPKSGLATLITDGPGGSKRMYAGLKNAGETWYDITGNRSDTVKIGSDGWGEFHVNDGSVSIYVQK

SEQ ID NO: 26866 - protein, 485 aa, Synthetic construct
HHNGTNGTMMQYFEWYLPNDGNHWNRLNSDASNLKSKGITAVWIPPAWKGASQNDVGYGAYDLYDLGEFNQKGTVRTKYGTRSQLQAAVTTLKNNGIQVYGDVVMNHKGGADATEMVRAVEVNPNNRNQEVTGEYTIEAWTRFDFPGRGNTHSSFKWRWYHFDGVDWDQSRRLNNRIYKFRGHGKAWDWEVDTENGNYDYLMYADIDMDHPEVVNELRNWGVWYTNTLGLDGFRIDAVKHIKYSFTRDWINHVRSATGKNMFAVAEFWKNDLGAIENYLQKTNWNHSVFDVPLHYNLYNASKSGGNYDMRNIFNGTVVQRHPSHAVTFVDNHDSQPEEALESFVEEWFKPLAYALTLTREQGYPSVFYGDYYGIPTHGVPAMRSKIDPILEARQKYAYGPQHDYLDHPDVIGWTREGDSSHPKSGLATLITDGPGGSKRMYAGLKNAGETWYDITGNRSDTVKIGSDGWGEFHVNDGSVSIYVQK

SEQ ID NO: 26867 - protein, 485 aa, Bacillus sp.
HHNGTNGTMMQYFEWYLPNDGNHWNRLNSDASNLKSKGITAVWIPPAWKATSQNDVGYGAYDLYDLGEFNQKGTVRTKYGTRSQLQAAVTSLKNNGIQVYGDVVMNHKGGADATEMVRAVEVNPNNRNQEVTGEYTIEAWTRFDFPGRGNTHSSFKWRWYHFDGVDWDQSRQLENRIYKFRGHGKAWDWEVDTEFGNYDYLMYADYDMDHPEVVNELRNWGVWYTNTLGLDGFRIDAVKHIKYSFTRDWINHVRSATGKNMFAVAEFWKNDLGAIENYLQKTNWNHSVFDVPLHYNLYNASKSGGNYDMRNIFNGTVVQRHPSHAVTFVDNHDSQPEEALESFVEEWFKPLAYALTLTREQGYPSVFYGDYYGIPTHGVPAMRSKIDPILEARQKYAYGPQHDYLDHPDVIGWTREGDSSHPKSGLATLITDGPGGSKRMYAGLKNAGETWYDITGNRSDTVKIGSDGWGEFHVNDGSVSIYVQK

SEQ ID NO: 26868 - protein, 485 aa, Synthetic construct
HHNGTNGTMMQYFEWYLPNDGNHWNRLNSDASNLKSKGITAVWIPPAWKGASQNDVGYGAYDLYDLGEFNQKGTVRTKYGTRSQLQAAVTSLKNNGIQVYGDVVMNHKGGADATEMVRAVEVNPNNRNQEVTGEYTIEAWTRFDFPGRGNTHSSFKWRWYHFDGVDWDQSRRLNNRIYKFRGHGKAWDWEVDTENGNYDYLMYADLDMDHPEVVNELRNWGVWYTNTLGLDGFRIDAVKHIKYSFTRDWINHVRSATGKNMFAVAEFWKNDLGAIENYLQKTNWNHSVFDVPLHYNLYNASKSGGNYDMRNIFNGTVVQRHPSHAVTFVDNHDSQPEEALESFVEEWFKPLAYALTLTREQGYPSVFYGDYYGIPTHGVPAMRSKIDPILEARQKYAYGPQHDYLDHPDVIGWTREGDSSHPKSGLATLITDGPGGSKRMYAGLKNAGETWYDITGNRSDTVKIGSDGWGEFHVNDGSVSIYVQK

SEQ ID NO: 26869 - protein, 485 aa, Synthetic construct
HHNGTNGTMMQYFEWYLPNDGNHWNRLNSDASNLKSKGITAVWIPPAWKGASQNDVGYGAYDLYDLGEFNQKGTVRTKYGTRSQLQAAVTSLKNNGIQVYGDVVMNHKGGADATEMVRAVEVNPNNRNQEVTGEYTIEAWTRFDFPGRGNTHSSFKWRWYHFDGVDWDQSRRLNNRIYKFRGHGKAWDWEVDTENGNYDYLMYADIDMDHPEVVNELRNWGVWYTNTLGLDGFRIDAVKHIKYSFTRDWINHVRSATGKNMFAVAEFWKNDLGAIENYLQKTNWNHSVFDVPLHYNLYNASKSGGNYDMRNIFNGTVVQRHPSHAVTFVDNHDSQPEEALESFVEEWFKPLAYALTLTREQGYPSVFYGDYYGIPTHGVPAMRSKIDPILEARQKYAYGPQHDYLDHPDVIGWTREGDSSHPKSGLATLITDGPGGSKRMYAGLKNAGETWYDITGNRSDTVKIGSDGWGEFHVNKGSVSIYVQK

SEQ ID NO: 26870 - protein, 483 aa, Bacillus sp.
HHNGTNGTMMQYFEWYLPNDGNHWNRLNSDASNLKSKGITAVWIPPAWKATSQNDVGYGAYDLYDLGEFNQKGTVRTKYGTRSQLQAAVTSLKNNGIQVYGDVVMNHKGGADATEMVRAVEVNPNNRNQEVTGEYTIEAWTRFDFPGRGNTHSSFKWRWYHFDGVDWDQSRDFTNRIYKFRGKAWDWEVDTEFGNYDYLMYADYDMDHPEVVNELRNWGVWYTNTLGLDGFRIDAVKHIKYSFTRDWINHVRSATGKNMFAVAEFWKNDLGAIENYLQKTNWNHSVFDVPLHYNLYNASKSGGNYDMRNIFNGTVVQRHPSHAVTFVDNHDSQPEEALESFVEEWFKPLAYALTLTREQGYPSVFYGDYYGIPTHGVPAMRSKIDPILEARQKYAYGPQHDYLDHPDVIGWTREGDSSHPPSGLATLITDGPGGSKRMYAGLKNAGETWYDITGNRSDTVKIGSDGWGEFHVNDGSVSIYVQK

SEQ ID NO: 26871 - protein, 483 aa, Bacillus sp.
HHNGTNGTMMQYFEWYLPNDGNHWNRLNSDASNLKSKGITAVWIPPAWKGASQNDVGYGAYDLYDLGEFNQKGTVRTKYGTRSQLQAAVTSLKNNGIQVYGDVVMNHKGGADATEMVRAVEVNPNNRNQEVTGEYTIEAWTRFDFPGRGNTHSSFKWRWYHFDGVDWDQSRQLSNRIYKFRGKAWDWEVDTEFGNYDYLMYADYDMDHPEVVNELRNWGVWYTNTLGLDGFRIDAVKHIKYSFTRDWINHVRSATGKNMFAVAEFWKNDLGAIENYLQKTNWNHSVFDVPLHYNLYNASKSGGNYDMRNIFNGTVVQRHPSHAVTFVDNHDSQPEEALESFVEEWFKPLAYALTLTREQGYPSVFYGDYYGIPTHGVPAMRSKIDPILEARQKYAYGPQHDYLDHPDVIGWTREGDSSHPKSGLATLITDGPGGSKRMYAGLKNAGETWYDITGNRSDTVKIGSDGWGEFHVNDGSVSIYVQK

SEQ ID NO: 26872 - protein, 485 aa, Bacillus sp.
HHNGTNGTMMQYFEWYLPNDGNHWNRLNSDASNLKSKGITAVWIPPAWKGTSQNDVGYGAYDLYDLGEFNQKGTVRTKYGTRSQLQAAVTSLKNNGIQVYGDVVMNHKGGADATEMVRAVEVNPNNRNQEVTGEYTIEAWTRFDFPGRGNTHSSFKWRWYHFDGVDWDQSRDLDNRIYKFRGHGKAWDWEVDTEFGNYDYLMYADYDMDHPEVVNELRNWGVWYTNTLGLDGFRIDAVKHIKYSFTRDWINHVRSATGKNMFAVAEFWKNDLGAIENYLQKTNWNHSVFDVPLHYNLYNASKSGGNYDMRNIFNGTVVQRHPSHAVTFVDNHDSQPEEALESFVEEWFKPLAYALTLTREQGYPSVFYGDYYGIPTHGVPAMRSKIDPILEARQKYAYGPQHDYLDHPDVIGWTREGDSSHPKSGLATLITDGPGGSKRMYAGLKNAGETWYDITGNRSDTVKIGSDGWGEFHVNDGSVSIYVQK

SEQ ID NO: 26873 - protein, 485 aa, Bacillus sp.
HHNGTNGTMMQYFEWYLPNDGNHWNRLNSDASNLKSKGITAVWIPPAWKGASQNDVGYGAYDLYDLGEFNQKGTVRTKYGTRSQLQAAVTSLKNNGIQVYGDVVMNHKGGADATEMVRAVEVNPNNRNQEVTGEYTIEAWTRFDFPGRGNTHSSFKWRWYHFDGVDWDQSRQFNNRIYKFRGHGKAWDWEVDTEFGNYDYLMYTDYDMDHPEVVNELRNWGVWYTNTLGLDGFRIDAVKHIKYSFTRDWINHVRSATGKNMFAVAEFWKNDLGAIENYLQKTNWNHSVFDVPLHYNLYNASKSGGNYDMRNIFNGTVVQRHPSHAVTFVDNHDSQPEEALESFVEEWFKPLAYALTLTREQGYPSVFYGDYYGIPTHGVPAMRSKIDPILEARQKYAYGPQHDYLDHPDVIGWTREGDSSHPKSGLATLITDGPGGSKRMYAGLKNAGETWYDITGNRSDTVKIGSDGWGEFHVNDGSVSIYVQK

SEQ ID NO: 26874 - protein, 485 aa, Bacillus sp.
HHNGTNGTMMQYFEWYLPNDGNHWNRLNSDASNLKSKGITAVWIPPAWKGASQNDVGYGAYDLYDLGEFNQKGTVRTKYGTRSQLQAAVTSLKNNGIQVYGDVVMNHKGGADATEMVRAVEVNPNNRNQEVTGEYTIEAWTRFDFPGRGNTHSSFKWRWYHFDGVDWDQSRRLQNRIYKFRGHGKAWDWEVDTEFGNYDYLMYADYDMDHPEVVNELRNWGVWYTNTLGLDGFRIDAVKHIKYSFTRDWINHVRSATGKNMFAVAEFWKNDLGAIENYLQKTNWNHSVFDVPLHYNLYNASKSGGNYDMRNIFNGTVVQRHPSHAVTFVDNHDSQPEEALESFVEEWFKPLAYALTLTREQGYPSVFYGDYYGIPTHGVPAMRSKIDPILEARQKYAYGPQHDYLDHPDVIGWTREGDSSHPKSGLATLITDGPGGSKRMYAGLKNAGETWYDITGNRSDTVKIGSDGWGEFHVNDGSVSIYVQK

SEQ ID NO: 26875 - protein, 483 aa, Bacillus sp.
HHNGTNGTMMQYFEWYLPNDGNHWNRLNSDASNLKSKGITAVWIPPAWKGASQNDVGYGAYDLYDLGEFNQKGTVRTKYGTRSQLQAAVTSLKNNGIQVYGDVVMNHKGGADATEMVRAVEVNPNNRNQEVTGEYTIEAWTRFDFPGRGNTHSSFKWRWYHFDGVDWDQSRQFNNRIYKFRGKAWDWEVDTEFGNYDYLMYTDYDMDHPEVVNELRNWGVWYTNTLGLDGFRIDAVKHIKYSFTRDWINHVRSATGKNMFAVAEFWKNDLGAIENYLQKTNWNHSVFDVPLHYNLYNASKSGGNYDMRNIFNGTVVQRHPSHAVTFVDNHDSQPEEALESFVEEWFKPLAYALTLTREQGYPSVFYGDYYGIPTHGVPAMRSKIDPILEARQKYAYGPQHDYLDHPDVIGWTREGDSSHPKSGLATLITDGPGGSKRMYAGLKNAGETWYDITGNRSDTVKIGSDGWGEFHVNDGSVSIYVQK

SEQ ID NO: 26876 - protein, 485 aa, Bacillus sp.
HHNGTNGTMMQYFEWYLPNDGNHWNRLNSDASNLKSKGITAVWIPPAWKGASQNDVGYGAYDLYDLGEFNQKGTVRTKYGTRSQLQAAVTSLKNNGIQVYGDVVMNHKGGADATEMVRAVEVNPNNRNQEVTGEYTIEAWTRFDFPGRGNTHSSFKWRWYHFDGVDWDQSRQLTNRIYKFRGHGKAWDWEVDTEFGNYDYLMYADYDMDHPEVVNELRNWGVWYTNTLGLDGFRIDAVKHIKYSFTRDWINHVRSATGKNMFAVAEFWKNDLGAIENYLQKTNWNHSVFDVPLHYNLYNASKSGGNYDMRNIFNGTVVQRHPSHAVTFVDNHDSQPEEALESFVEEWFKPLAYALTLTREQGYPSVFYGDYYGIPTHGVPAMRSKIDPILEARQKYAYGPQHDYLDHPDVIGWTREGDSSHPKSGLATLITDGPGGSKRMYAGLKNAGETWYDITGNRSDTVKIGSDGWGEFHVNDGSVSIYVQK

SEQ ID NO: 26877 - protein, 485 aa, Synthetic construct
HHNGTNGTMMQYFEWYLPNDGNHWNRLNNDASNLKSKGITAVWIPPAWKGASQNDVGYGAYDLYDLGEFNQKGTVRTKYGTRSQLQAAVTSLKNNGIQVYGDVVMNHKGGADATEMVRAVEVNPNNRNQEVTGEYTIEAWTRFDFPGRGNTHSSFKWRWYHFDGVDWDQSRRLNNRIYKFRGHGKAWDWEVDTENGNYDYLMYADIDMDHPEVVNELRNWGVWYTNTLGLDGFRIDAVKHIKYSFTRDWINHVRSATGKNMFAVAEFWKNDLGAIENYLQKTNWNHSVFDVPLHYNLYNASKSGGNYDMRNIFNGTVVQRHPSHAVTFVDNHDSQPEEALESFVEEWFKPLAYALTLTREQGYPSVFYGDYYGIPTHGVPAMRSKIDPILEARQKYAYGPQHDYLDHPDVIGWTREGDSSHPKSGLATLITDGPGGSKRMYAGLKNAGETWYDITGNRSDTVKIGSDGWGEFHVNDGSVSIYVQK

SEQ ID NO: 26878 - protein, 485 aa, Synthetic construct
HHNGTNGTMMQYFEWYLPNDGNHWNRLNSDASNLKSKGITAVWIPPAWKGASQNDVGYGAYDLYDLGEFNQKGTVRTKYGTRSQLQAAVTSLKNNGIQVYGDVVMNHKGGADATEMVRAVEVNPNNRNQEVTGEYTIEAWTRFDFPGRGNTHSSFKWRWYHFDGVDWDQSRRLNNRIYKFRGHGKAWDWEVDTENGNYDYLMYADIDMDHPEVVNELRNWGVWYTNTLGLDGFRIDAVKHIKYSFTRDWINHVRSATGKNMFAVAEFWKNDLGAIENYLQKTNWNHSVFDVPLHYNLYNASKSGGNYDMRNIFNGTVVQSHPSHAVTFVDNHDSQPEEALESFVEEWFKPLAYALTLTREQGYPSVFYGDYYGIPTHGVPAMRSKIDPILEARQKYAYGPQHDYLDHPDVIGWTREGDSSHPKSGLATLITDGPGGSKRMYAGLKNAGETWYDITGNRSDTVKIGSDGWGEFHVNDGSVSIYVQK

SEQ ID NO: 26879 - protein, 483 aa, Bacillus sp.
HHNGTNGTMMQYFEWYLPNDGNHWNRLNSDASNLKSKGITAVWIPPAWKGASQNDVGYGAYDLYDLGEFNQKGTVRTKYGTRSQLQAAVTSLKNNGIQVYGDVVMNHKGGADATEMVRAVEVNPNNRNQEVTGEYTIEAWTRFDFPGRGNTHSSFKWRWYHFDGVDWDQSRRLNNRIYKFRGKAWDWEVDTEFGNYDYLMYADYDMDHPEVVNELRNWGVWYTNTLGLDGFRIDAVKHIKYSFTRDWINHVRSATGKNMFAVAEFWKNDLGAIENYLQKTNWNHSVFDVPLHYNLYNASKSGGNYDMRNIFNGTVVQKHPSHAVTFVDNHDSQPEEALESFVEEWFKPLAYALTLTREQGYPSVFYGDYYGIPTHGVPAMRSKIDPILEARQKYAYGPQHDYLDHPDVIGWTREGDSSHPKSGLATLITDGPGGSKRMYAGLKNAGETWYDITGNRSDTVKIGSDGWGEFHVNDGSVSIYVQK

SEQ ID NO: 26880 - protein, 485 aa, Bacillus sp.
HHNGTNGTMMQYFEWYLPNDGNHWNRLNSDASNLKSKGITAVWIPPAWKGASQNDVGYGAYDLYDLGEFNQKGTVRTKYGTRSQLQAAVTSLKNNGIQVYGDVVMNHKGGADATEMVRAVEVNPNNRNQEVTGEYTIEAWTRFDFPGRGNTHSSFKWRWYHFDGVDWDQSRKFNNRIYKFRGHGKAWDWEVDTEFGNYDYLMYADYDMDHPEVVNELRNWGVWYTNTLGLDGFRIDAVKHIKYSFTRDWINHVRSATGKNMFAVAEFWKNDLGAIENYLQKTNWNHSVFDVPLHYNLYNASKSGGNYDMRNIFNGTVVQRHPSHAVTFVDNHDSQPEEALESFVEEWFKPLAYALTLTREQGYPSVFYGDYYGIPTHGVPAMRSKIDPILEARQKYAYGPQHDYLDHPDVIGWTREGDSSHPKSGLATLITDGPGGSKRMYAGLKNAGETWYDITGNRSDTVKIGSDGWGEFHVNDGSVSIYVQK

SEQ ID NO: 26881 - protein, 485 aa, Bacillus sp.
HHNGTNGTMMQYFEWYLPNDGNHWNRLNSDASNLKSKGITAVWIPPAWKGASQNDVGYGAYDLYDLGEFNQKGTVRTKYGTRSQLQAAVTSLKNNGIQVYGDVVMNHKGGADATEMVRAVEVNPNNRNQEVTGEYTIEAWTRFDFPGRGNTHSSFKWRWYHFDGVDWDQSRRLNNRIYKFRGHGKAWDWEVDTEFGNYDYLMYADYDMDHPEVVNELRNWGVWYTNTLGLDGFRIDAVKHIKYSFTRDWINHVRSATGKNMFAVAEFWKNDLGAIENYLQKTNWNHSVFDVPLHYNLYNASKSGGNYDMRNIFNGTVVQRHPSHAVTFVDNHDSQPEEALESFVEEWFKPLAYALTLTREQGYPSVFYGDYYGIPTHGVPAMRSKIDPILEARQKYAYGPQHDYLDHHDVIGWTREGDSSHPKSGLATLITDGPGGSKRMYAGLKNAGETWYDITGNRSDTVKIGSDGWGEFHVNDGSVSIYVQK

SEQ ID NO: 26882 - protein, 483 aa, Bacillus sp.
HHNGTNGTMMQYFEWYLPNDGNHWNRLNSDASNLKSKGITAVWIPPAWKGVSQNDVGYGAYDLYDLGEFNQKGTVRTKYGTRSQLQAAVTSLKNNGIQVYGDVVMNHKGGADATEMVRAVEVNPNNRNQEVTGEYTIEAWTRFDFPGRGNTHSSFKWRWYHFDGVDWDQSRRFNNRIYKFRGKAWDWEVDTEFGNYDYLMYADYDMDHPEVVNELRNWGVWYTNTLGLDGFRIDAVKHIKYSFTRDWINHVRSATGKNMFAVAEFWKNDLGAIENYLQKTNWNHSVFDVPLHYNLYNASKSGGNYDMRNIFNGTVVQRHPSHAVTFVDNHDSQPEEALESFVEEWFKPLAYALTLTREQGYPSVFYGDYYGIPTHGVPAMRSKIDPILEARQKYAYGPQHDYLDHPDVIGWTREGDSSHPKSGLATLITDGPGGSKRMYAGLKNAGETWYDITGNRSDTVKIGSDGWGEFHVNDGSVSIYVQK

SEQ ID NO: 26883 - protein, 483 aa, Bacillus sp.
HHNGTNGTMMQYFEWYLPNDGNHWNRLNSDASNLKSKGITAVWIPPAWKGVSQNDVGYGAYDLYDLGEFNQKGTVRTKYGTRSQLQAAVTSLKNNGIQVYGDVVMNHKGGADATEMVRAVEVNPNNRNQEVTGEYTIEAWTRFDFPGRGNTHSSFKWRWYHFDGVDWDQSRQTNNRIYKFRGKAWDWEVDTEFGNYDYLMYADYDMDHPEVVNELRNWGVWYTNTLGLDGFRIDAVKHIKYSFTRDWINHVRSATGKNMFAVAEFWKNDLGAIENYLQKTNWNHSVFDVPLHYNLYNASKSGGNYDMRNIFNGTVVQRHPSHAVTFVDNHDSQPEEALESFVEEWFKPLAYALTLTREQGYPSVFYGDYYGIPTHGVPAMRSKIDPILEARQKYAYGPQHDYLDHPDVIGWTREGDSSHPKSGLATLITDGPGGSKRMYAGLKNAGETWYDITGNRSDTVKIGSDGWGEFHVNDGSVSIYVQK

SEQ ID NO: 26884 - protein, 485 aa, Synthetic construct
HHNGTNGTMMQYFEWYLPNDGNHWNRLNSDASNLKSKGITAVWIPPAWKGASQNDVGYGAYDLYDLGEFNQKGTVRTKYGTRSQLQAAVTSLKNNGIQVYGDVVMNHKGGADATEMVRAVEVNPNNRNQEVTGEYTIEAWTRFDFPGRGNTHSSFKWRWYHFDGVDWDQSRRLNNRIYKFRGHGKAWDWEVDTENGNYDYLMYADIDMDHPEVVNELRNWGVWYTNTLGLDGFRIDAVKHIKYSFTRDWINHVRSATGKNMFAVAEFWKNDLGAIENYLQKTNWNHSVFDVPLHYNLYNASKSGGNYDMRNIFNGTVVQRHPSHAVTFVDNHDSQPEEALESFVEEWFKPLAYALTLTREQGYPSVFYGDYYGIPTHGVPAMRSKIDPILEARQKYAYGPQHDYLDHPDVIGWTREGDSSHPKSGLATLITDGPGGSKRMYAGTKNAGETWYDITGNRSDTVKIGSDGWGEFHVNDGSVSIYVQK

SEQ ID NO: 26885 - protein, 485 aa, Bacillus sp.
HHNGTNGTMMQYFEWYLPNDGNHWNRLNSDASNLKSKGITAVWIPPAWKGASQNDVGYGAYDLYDLGEFNQKGTVRTKYGTRSQLQAAVTSLKNNGIQVYGDVVMNHKGGADATEMVRAVEVNPNNRNQEVTGEYTIEAWTRFDFPGRGNTHSSFKWRWYHFDGVDWDQSRRLNNRIYKFRGHGKAWDWEVDTEFGNYDYLMYADYDMDHPEVVNELRNWGVWYTNTLGLDGFRIDAVKHIKYSFTRDWINHVRSATGKNMFAVAEFWKNDLGAIENYLQKTNWNHSVFDVPLHYNLYNASKSGGNYDMRNIFNGTVVQRHPSHAVTFVDNHDSQPEEALESFVEEWFKPLAYALTLTREQGYPSVFYGDYYGIPTHGVPAMRSKIDPILEARQKYAYGPQHDYLDHPDVIGWTREGDSSHPKSGLATLITDGPGGSKRMYAGLKKAGETWYDITGNRSDTVKIGSDGWGEFHVNDGSVSIYVQK

SEQ ID NO: 26886 - protein, 485 aa, Bacillus sp.
HHNGTNGTMMQYFEWYLPNDGNHWNRLNSDASNLKSKGITAVWIPPAWKGISQNDVGYGAYDLYDLGEFNQKGTVRTKYGTRSQLQAAVTSLKNNGIQVYGDVVMNHKGGADATEMVRAVEVNPNNRNQEVTGEYTIEAWTRFDFPGRGNTHSSFKWRWYHFDGVDWDQSREFNNRIYKFRGHGKAWDWEVDTEFGNYDYLMYADYDMDHPEVVNELRNWGVWYTNTLGLDGFRIDAVKHIKYSFTRDWINHVRSATGKNMFAVAEFWKNDLGAIENYLQKTNWNHSVFDVPLHYNLYNASKSGGNYDMRNIFNGTVVQRHPSHAVTFVDNHDSQPEEALESFVEEWFKPLAYALTLTREQGYPSVFYGDYYGIPTHGVPAMRSKIDPILEARQKYAYGPQHDYLDHPDVIGWTREGDSSHPKSGLATLITDGPGGSKRMYAGLKNAGETWYDITGNRSDTVKIGSDGWGEFHVNDGSVSIYVQK

SEQ ID NO: 26887 - protein, 483 aa, Bacillus sp.
HHNGTNGTMMQYFEWYLPNDGNHWNRLNSDASNLKSKGITAVWIPPAWKGASQNDVGYGAYDLYDLGEFNQKGTVRTKYGTRSQLQAAVTSLKNNGIQVYGDVVMNHKGGADATEMVRAVEVNPNNRNQEVTGEYTIEAWTRFDFPGRGNTHSSFKWRWYHFDGVDWDQSRQTSNRIYKFRGKAWDWEVDTEFGNYDYLMYADYDMDHPEVVNELRNWGVWYTNTLGLDGFRIDAVKHIKYSFTRDWINHVRSATGKNMFAVAEFWKNDLGAIENYLQKTNWNHSVFDVPLHYNLYNASKSGGNYDMRNIFNGTVVQRHPSHAVTFVDNHDSQPEEALESFVEEWFKPLAYALTLTREQGYPSVFYGDYYGIPTHGVPAMRSKIDPILEARQKYAYGPQHDYLDHPDVIGWTREGDSSHPKSGLATLITDGPGGSKRMYAGLKNAGETWYDITGNRSDTVKIGSDGWGEFHVNDGSVSIYVQK

SEQ ID NO: 26888 - protein, 483 aa, Synthetic construct
HHNGTNGTMMQYFEWYLPNDGNHWNRLNSDASNLKSKGITAVWIPPAWKGASQNDVGYGAYDLYDLGEFNQKGTVRTKYGTRSQLQAAVTSLKNNGIQVYGDVVMNHKGGADATEMVRAVEVNPNNRNQEVTGEYTIEAWTHFDFPGRGNTHSSFKWRWYHFDGVDWDQSRRLNNRIYKFRGKAWDWEVDTENGNYDYLMYADIDMDHPEVVNELRNWGVWYTNTLGLDGFRIDAVKHIKYSFTRDWINHVRSATGKNMFAVAEFWKNDLGAIENYLQKTNWNHSVFDVPLHYNLYNASKSGGNYDMRNIFNGTVVQRHPSHAVTFVDNHDSQPEEALESFVEEWFKPLAYALTLTREQGYPSVFYGDYYGIPTHGVPAMRSKIDPILEARQKYAYGPQHDYLDHPDVIGWTREGDSSHPKSGLATLITDGPGGSKRMYAGLKNAGETWYDITGNRSDTVKIGSDGWGEFHVNDGSVSIYVQK

SEQ ID NO: 26889 - protein, 483 aa, Synthetic construct
HHNGTNGTMMQYFEWYLPNDGNHWNRLNSDASNLKSKGITAVWIPPAWKGASQNDVGYGAYDLYDLGEFNQKGTVRTKYGTRSQLQAAVTSLKNNGIQVYGDVVMNHKGGADATEMVGAVEVNPNNRNQEVTGEYTIEAWTRFDFPGRGNTHSSFKWRWYHFDGVDWDQSRRLNNRIYKFRGKAWDWEVDTENGNYDYLMYADIDMDHPEVVNELRNWGVWYTNTLGLDGFRIDAVKHIKYSFTRDWINHVRSATGKNMFAVAEFWKNDLGAIENYLQKTNWNHSVFDVPLHYNLYNASKSGGNYDMRNIFNGTVVQRHPSHAVTFVDNHDSQPEEALESFVEEWFKPLAYALTLTREQGYPSVFYGDYYGIPTHGVPAMRSKIDPILEARQKYAYGPQHDYLDHPDVIGWTREGDSSHPKSGLATLITDGPGGSKRMYAGLKNAGETWYDITGNRSDTVKIGSDGWGEFHVNDGSVSIYVQK

SEQ ID NO: 26890 - protein, 485 aa, Bacillus sp.
HHNGTNGTMMQYFEWYLPNDGNHWNRLNSDASNLKSKGITAVWIPPAWKGTSQNDVGYGAYDLYDLGEFNQKGTVRTKYGTRSQLQAAVTSLKNNGIQVYGDVVMNHKGGADATEMVRAVEVNPNNRNQEVTGEYTIEAWTRFDFPGRGNTHSSFKWRWYHFDGVDWDQSRRTQNRIYKFRGHGKAWDWEVDTEFGNYDYLMYTDYDMDHPEVVNELRNWGVWYTNTLGLDGFRIDAVKHIKYSFTRDWINHVRSATGKNMFAVAEFWKNDLGAIENYLQKTNWNHSVFDVPLHYNLYNASKSGGNYDMRNIFNGTVVQRHPSHAVTFVDNHDSQPEEALESFVEEWFKPLAYALTLTREQGYPSVFYGDYYGIPTHGVPAMRSKIDPILEARQKYAYGPQHDYLDHPDVIGWTREGDSSHPKSGLATLITDGPGGSKRMYAGLKNAGETWYDITGNRSDTVKIGSDGWGEFHVNDGSVSIYVQK

SEQ ID NO: 26891 - protein, 485 aa, Synthetic construct
HHNGTNGTMMQYFEWYLPNDGNHWNRLNTDASNLKSKGITAVWIPPAWKGASQNDVGYGAYDLYDLGEFNQKGTVRTKYGTRSQLQAAVTSLKNNGIQVYGDVVMNHKGGADATEMVRAVEVNPNNRNQEVTGEYTIEAWTRFDFPGRGNTHSSFKWRWYHFDGVDWDQSRRLNNRIYKFRGHGKAWDWEVDTENGNYDYLMYADIDMDHPEVVNELRNWGVWYTNTLGLDGFRIDAVKHIKYSFTRDWINHVRSATGKNMFAVAEFWKNDLGAIENYLQKTNWNHSVFDVPLHYNLYNASKSGGNYDMRNIFNGTVVQRHPSHAVTFVDNHDSQPEEALESFVEEWFKPLAYALTLTREQGYPSVFYGDYYGIPTHGVPAMRSKIDPILEARQKYAYGPQHDYLDHPDVIGWTREGDSSHPKSGLATLITDGPGGSKRMYAGLKNAGETWYDITGNRSDTVKIGSDGWGEFHVNDGSVSIYVQK

SEQ ID NO: 26892 - protein, 485 aa, Bacillus sp.
HHNGTNGTMMQYFEWYLPNDGNHWNRLNSDASNLKSKGITAVWIPPAWKGASQNDVGYGAYDLYDLGEFNQKGTVRTKYGTRSQLQAAVTSLKNNGIQVYGDVVMNHKGGADATEMVRAVEVNPNNRNQEVTGEYTIEAWTRFDFPGRGNTHSSFKWRWYHFDGVDWDQSREFDNRIYKFRGHGKAWDWEVDTEFGNYDYLMYADYDMDHPEVVNELRNWGVWYTNTLGLDGFRIDAVKHIKYSFTRDWINHVRSATGKNMFAVAEFWKNDLGAIENYLQKTNWNHSVFDVPLHYNLYNASKSGGNYDMRNIFNGTVVQRHPSHAVTFVDNHDSQPEEALESFVEEWFKPLAYALTLTREQGYPSVFYGDYYGIPTHGVPAMRSKIDPILEARQKYAYGPQHDYLDHPDVIGWTREGDSSHPKSGLATLITDGPGGSKRMYAGLKNAGETWYDITGNRSDTVKIGSDGWGEFHVNDGSVSIYVQK

SEQ ID NO: 26893 - protein, 485 aa, Bacillus sp.
HHNGTNGTMMQYFEWYLPNDGNHWNRLNSDASNLKSKGITAVWIPPAWKGASQNDVGYGAYDLYDLGEFNQKGTVRTKYGTRSQLQAAVTSLKNNGIQVYGDVVMNHKGGADATEMVRAVEVNPNNRNQEVTGEYTIEAWTRFDFPGRGNTHSSFKWRWYHFDGVDWDQSRQLDNRIYKFRGHGKAWDWEVDTEFGNYDYLMYADYDMDHPEVVNELRNWGVWYTNTLGLDGFRIDAVKHIKYSFTRDWINHVRSATGKNMFAVAEFWKNDLGAIENYLQKTNWNHSVFDVPLHYNLYNASKSGGNYDMRNIFNGTVVQRHPSHAVTFVDNHDSQPEEALESFVEEWFKPLAYALTLTREQGYPSVFYGDYYGIPTHGVPAMRSKIDPILEARQKYAYGPQHDYLDHPDVIGWTREGDSSHPKSGLATLITDGPGGSKRMYAGLKNAGETWYDITGNRSDTVKIGSDGWGEFHVNDGSVSIYVQK

SEQ ID NO: 26894 - protein, 485 aa, Synthetic construct
HHNGTNGTMMQYFEWYLPNDGNHWNRLNSDASNLKSKGITAVWIPPAWKGASQNDVGYGAYDLYDLGEFNQKGTVRTKYGTRSQLQAAVTSLKNNGIQVYGDVVMNHKGGADATEMVRAVEVNPNNRNQEVTGEYTIEAWTRFDFPGRGNTHSSFKWRWYHFDGVDWDQSRRLNNRIYKFRGHGKAWDWEVDTENGNYDYLMYADIDMDHPEVVNELRNWGVWYTNTLGLDGFRIDAVKHIKYSFTRDWINHVRSATGKNMFAVAEFWKNDLGAIENYLQKTNWNHSVFDVPLHYNLYNASKSGGNYDMRNIFNGTVVQRHPSHAVTFVDNHDSQPEEALESFVEEWFKPLAYALTLTREQGYPSVFYGDYYGIPTHGVPAMRSKIDPILEARQKYAYGPQHDYLDHPDVIGWTREGDSSHPKSGLATLITDGPGGSKRMYAGLKNAGETWKDITGNRSDTVKIGSDGWGEFHVNDGSVSIYVQK

SEQ ID NO: 26895 - protein, 485 aa, Synthetic construct
HHNGTNGTMMQYFEWYLPNDGNHWNRLNSDASNLKSKGITAVWIPPAWKGASQNDVGYGAYDLYDLGEFNQKGTVRTKYGTRSQLQAAVTSLKNNGIQVYGDVVMNHKGGADATEMVNAVEVNPNNRNQEVTGEYTIEAWTRFDFPGRGNTHSSFKWRWYHFDGVDWDQSRRLNNRIYKFRGHGKAWDWEVDTENGNYDYLMYADIDMDHPEVVNELRNWGVWYTNTLGLDGFRIDAVKHIKYSFTRDWINHVRSATGKNMFAVAEFWKNDLGAIENYLQKTNWNHSVFDVPLHYNLYNASKSGGNYDMRNIFNGTVVQRHPSHAVTFVDNHDSQPEEALESFVEEWFKPLAYALTLTREQGYPSVFYGDYYGIPTHGVPAMRSKIDPILEARQKYAYGPQHDYLDHPDVIGWTREGDSSHPKSGLATLITDGPGGSKRMYAGLKNAGETWYDITGNRSDTVKIGSDGWGEFHVNDGSVSIYVQK

SEQ ID NO: 26896 - protein, 483 aa, Bacillus sp.
HHNGTNGTMMQYFEWYLPNDGNHWNRLNSDASNLKSKGITAVWIPPAWKAASQNDVGYGAYDLYDLGEFNQKGTVRTKYGTRSQLQAAVTSLKNNGIQVYGDVVMNHKGGADATEMVRAVEVNPNNRNQEVTGEYTIEAWTRFDFPGRGNTHSSFKWRWYHFDGVDWDQSREFQNRIYKFRGKAWDWEVDTEFGNYDYLMYADYDMDHPEVVNELRNWGVWYTNTLGLDGFRIDAVKHIKYSFTRDWINHVRSATGKNMFAVAEFWKNDLGAIENYLQKTNWNHSVFDVPLHYNLYNASKSGGNYDMRNIFNGTVVQRHPSHAVTFVDNHDSQPEEALESFVEEWFKPLAYALTLTREQGYPSVFYGDYYGIPTHGVPAMRSKIDPILEARQKYAYGPQHDYLDHPDVIGWTREGDSSHPKSGLATLITDGPGGSKRMYAGLKNAGETWYDITGNRSDTVKIGSDGWGEFHVNDGSVSIYVQK

SEQ ID NO: 26897 - protein, 485 aa, Bacillus sp.
HHNGTNGTMMQYFEWYLPNDGNHWNRLNSDASNLKSKGITAVWIPPAWKGASQNDVGYGAYDLYDLGEFNQKGTVRTKYGTRSQLQAAVTSLKNNGIQVYGDVVMNHKGGADATEMVRAVEVNPNNRNQEVTGEYTIEAWTRFDFPGRGNTHSSFKWRWYHFDGVDWDQSRQTDNRIYKFRGHGKAWDWEVDTEFGNYDYLMYADYDMDHPEVVNELRNWGVWYTNTLGLDGFRIDAVKHIKYSFTRDWINHVRSATGKNMFAVAEFWKNDLGAIENYLQKTNWNHSVFDVPLHYNLYNASKSGGNYDMRNIFNGTVVQRHPSHAVTFVDNHDSQPEEALESFVEEWFKPLAYALTLTREQGYPSVFYGDYYGIPTHGVPAMRSKIDPILEARQKYAYGPQHDYLDHPDVIGWTREGDSSHPKSGLATLITDGPGGSKRMYAGLKNAGETWYDITGNRSDTVKIGSDGWGEFHVNDGSVSIYVQK

SEQ ID NO: 26898 - protein, 485 aa, Bacillus sp.
HHNGTNGTMMQYFEWYLPNDGNHWNRLNSDASNLKSKGITAVWIPPAWKGASQNDVGYGAYDLYDLGEFNQKGTVRTKYGTRSQLQAAVTSLKNNGIQVYGDVVMNHKGGADATEMVRAVEVNPNNRNQEVTGEYTIEAWTRFDFPGRGNTHSSFKWRWYHFDGVDWDQSRRLNNRIYKFRGHGKAWDWEVDTEFGNYDYLMYADYDMDHPEVVNELRNWGVWYTNTLGLDGFRIDAVKHIKYSFTRDWINHVRSATGKNMFAVAEFWKNDLGAIENYLQKTNWNHSVFDVPLHYNLYNASNSGGNYDMRNIFNGTVVQRHPSHAVTFVDNHDSQPEEALESFVDEWFKPLAYALTLTREQGYPSVFYGDYYGIPTHGVPAMRSKIDPILEARQKYAYGPQHDYLDHPDVIGWTREGDSSHPKSGLATLITDGPGGSKRMYAGLKNAGETWYDITGNRSDTVKIGSDGWGEFHVNGKSVSIYVQK

SEQ ID NO: 26899 - protein, 485 aa, Bacillus sp.
HHNGTNGTMMQYFEWYLPNDGNHWNRLNSDASNLKSKGITAVWIPPAWKGASQNDVGYGAYDLYDLGEFNQKGTVRTKYGTRSQLQDAVTSLKNNGIQVYGDVVMNHKGGADATEMVRAVEVNPNNRNQEVTGEYTIEAWTRFDFPGRGNTHSSFKWRWYHFDGVDWDQSRRLNNRIYKFRGHGKAWDWEVDTEFGNYDYLMYADYDMDHPEVVNELRNWGVWYTNTLGLDGFRIDAVKHIKYSFTRDWINHVRSATGKNMFAVAEFWKNDLGAIENYLQKTNWNHSVFDVPLHYNLYNASKSGGNYDMRNIFNGTVVQSHPMHAVTFVDNHDSQPEEALESFVEEWFKPLAYALTLTREQGYPSVFYGDYYGIPTHGVPAMRSKIDPILEARQKYAYGPQHDYLDHPDVIGWTREGDSSHPKSGLATLITDGPGGSKRMYAGLKNAGETWYDITGNRSDTVKIGSDGWGEFHVNDGSVSIYVQK

SEQ ID NO: 26900 - protein, 483 aa, Synthetic construct
HHNGTNGTMMQYFEWYLPNDGNHWNRLNSDASNLKSKGITAVWIPPAWKGASQNDVGYGAYDLYDLGEFNQKGTVRTKYGTRSQLQAAVTSLKNNGIQVYGDVVMNHKGGADATEMVRAVEVNPNNRNQEVTGEYTIEAWTRFDFPGRGNTHSSFKWRWYHFDGVDWDQSRRLNNRIYKFRGKAWDWEVDTENGNYDYLMYADFDMDHPEVVNELRNWGVWYTNTLGLDGFRIDAVKHIKYSFTRDWINHVRSATGKNMFAVAEFWKNDLGAIENYLQKTNWNHSVFDVPLHYNLYNASKSGGNYDMRNIFNGTVVQRHPSHAVTFVDNHDSQPEEALESFVEEWFKPLAYALTLTREQGYPSVFYGDYYGIPTHGVPAMRSKIDPILEARQKYAYGPQHDYLDHPDVIGWTREGDSSHPKSGLATLITDGPGGSKRMYAGLKNAGETWYDITGNRSDTVKIGSDGWGEFHVNDGSVSIYVQK

SEQ ID NO: 26901 - protein, 485 aa, Synthetic construct
HHNGTNGTMMQYFEWYLPNDGNHWNRLNSDASNLKSKGITAVWIPPAWKGASQNDVGYGAYDLYDLGEFNQKGTVRTKYGTRSQLQAAVTSLKNNGIQVYGDVVMNHKGGADATEMVRAVEVNPNNRNQEVTGEYTIEAWTRFDFPGRGNTHSSFKWRWYHFDGVDWDQSRRLNNRIYKFRGHGKAWDWEVDTENGNYDYLMYADIDMDHPEVVNELRNWGVWYTNTLGLDGFRIDAVKHIKYSFTRDWINHVRSATGKNMFAVAEFWKNDLGAIENYLQKTNWNHSVFDVPLHYNLYNASKSGGNYDMRNIFNGTVVQRHPSHAVTFVDNHDSQPEEALESFVEEWFKPLAYALTLTREQGYPSVFYGDYYGIPTHGVPAMRSKIDPILEARQKYAYGPQHDYLDHPDVIGWTREGDSSHPKSGLATLITDGPGGSKRMYAGLSNAGETWYDITGNRSDTVKIGSDGWGEFHVNDGSVSIYVQK

SEQ ID NO: 26902 - protein, 485 aa, Bacillus sp.
HHNGTNGTMMQYFEWYLPNDGNHWNRLNSDASNLKSKGITAVWIPPAWKGASQNDVGYGAYDLYDLGEFNQKGTVRTKYGTRSQLQAAVTSLKNNGIQVYGDVVMNHKGGADATEMVRAVEVNPNNRNQEVTGEYTIEAWTRFDFPGRGNTHSSFKWRWYHFDGVDWDQSRKFQNRIYKFRGHGKAWDWEVDTEFGNYDYLMYVDYDMDHPEVVNELRNWGVWYTNTLGLDGFRIDAVKHIKYSFTRDWINHVRSATGKNMFAVAEFWKNDLGAIENYLQKTNWNHSVFDVPLHYNLYNASKSGGNYDMRNIFNGTVVQRHPSHAVTFVDNHDSQPEEALESFVEEWFKPLAYALTLTREQGYPSVFYGDYYGIPTHGVPAMRSKIDPILEARQKYAYGPQHDYLDHPDVIGWTREGDSSHPKSGLATLITDGPGGSKRMYAGLKNAGETWYDITGNRSDTVKIGSDGWGEFHVNDGSVSIYVQK

SEQ ID NO: 26903 - protein, 485 aa, Synthetic construct
HHNGTNGTMMQYFEWYLPNDGNHWNRLNSDASNLKSKGITAVWIPPAWKGASQNDVGYGAYDLYDLGEFNQKGTVRTKYGTRSQLQAAVTSLKNNGIQVYGDVVMNHKGGADATEMVRAVEVNPNNRNQEVTGEYTIEAWTRFDFPGRGNTHSSFKWRWYHFDGVDWDQSRRLNNRIYKFRGHGKAWDWEVDTENGNYDYLMYADIDMDHPEVVNELRNWGVWYTNTLGLDGFRIDAVKHIKYSFTRDWINHVRSATGKNMFAVAEFWKNDLGAIENYLQKTNWNHSVFDVPLHYNLYNASKSGGNYDMRNIFNGTVVQRHPSHAVTFVDNHDSQPEEALESFVEEWFKPLAYALTLTREQGYPSVFYGDYYGIPTHGVPAMRSKIDPILEARQKYAYGPQHDYLDHPDVIGWTREGDSSHPKSGLATLITDGPGGSKRMYAGLKNAGETWYDITGNRSDTVVIGSDGWGEFHVNDGSVSIYVQK

SEQ ID NO: 26904 - protein, 485 aa, Bacillus sp.
HHNGTNGTMMQYFEWYLPNDGNHWNRLNSDASNLKSKGITAVWIPPAWKGASQNDVGYGAYDLYDLGEFNQKGTVRTKYGTRSQLQAAVTSLKNNGIQVYGDVVMNHKGGADATEMVRAVEVNPNNRNQEVTGEYTIEAWTRFDFPGRGNTHSSFKWRWYHFDGVDWDQSRRLNNRIYKFRGHGKAWDWEVDTEFGNYDYLMYADYDMDHPEVVNELRNWGVWYTNTLGLDGFRIDAVKHIKYSFTRDWINHVRSATGKNMFAVAEFWKNDLGAIENYLQKTNWNHSVFDVPLHYNLYNASKSGGNYDMRNIFNGTVVQRHPSHAVTFVDNHDSQPEEALESFVEEWFKPLAYALTLTREQGYPSVFYGDYYGIPTHGVPAMRSKIDPILEARQKYAYGPQHDYLDHPDVIGWTREGNSSHPKSGLATLITDGPGGSKRMYAGLKNAGETWYDITGNRSDTVKIGSDGWGEFHVNDGSVSIYVQK

SEQ ID NO: 26905 - protein, 485 aa, Bacillus sp.
HHNGTNGTMMQYFEWYLPNDGNHWNRLNSDASNLKSKGITAVWIPPAWKATSQNDVGYGAYDLYDLGEFNQKGTVRTKYGTRSQLQAAVTSLKNNGIQVYGDVVMNHKGGADATEMVRAVEVNPNNRNQEVTGEYTIEAWTRFDFPGRGNTHSSFKWRWYHFDGVDWDQSRRFSNRIYKFRGHGKAWDWEVDTEFGNYDYLMYADYDMDHPEVVNELRNWGVWYTNTLGLDGFRIDAVKHIKYSFTRDWINHVRSATGKNMFAVAEFWKNDLGAIENYLQKTNWNHSVFDVPLHYNLYNASKSGGNYDMRNIFNGTVVQRHPSHAVTFVDNHDSQPEEALESFVEEWFKPLAYALTLTREQGYPSVFYGDYYGIPTHGVPAMRSKIDPILEARQKYAYGPQHDYLDHPDVIGWTREGDSSHPKSGLATLITDGPGGSKRMYAGLKNAGETWYDITGNRSDTVKIGSDGWGEFHVNDGSVSIYVQK

SEQ ID NO: 26906 - protein, 485 aa, Bacillus sp.
HHNGTNGTMMQYFEWYLPNDGNHWNRLNSDASNLKSKGITAVWIPPAWKGASQNDVGYGAYDLYDLGEFNQKGTVRTKYGTRSQLQAAVTSLKNNGIQVYGDVVMNHKGGADATEMVRAVEVNPNNRNQEVTGEYTIEAWTRFDFPGRGNTHSSFKWRWYHFDGVDWDQSRELQNRIYKFRGHGKAWDWEVDTEFGNYDYLMYADYDMDHPEVVNELRNWGVWYTNTLGLDGFRIDAVKHIKYSFTRDWINHVRSATGKNMFAVAEFWKNDLGAIENYLQKTNWNHSVFDVPLHYNLYNASKSGGNYDMRNIFNGTVVQRHPSHAVTFVDNHDSQPEEALESFVEEWFKPLAYALTLTREQGYPSVFYGDYYGIPTHGVPAMRSKIDPILEARQKYAYGPQHDYLDHPDVIGWTREGDSSHPKSGLATLITDGPGGSKRMYAGLKNAGETWYDITGNRSDTVKIGSDGWGEFHVNDGSVSIYVQK

SEQ ID NO: 26907 - protein, 483 aa, Bacillus sp.
HHNGTNGTMMQYFEWYLPNDGNHWNRLNSDASNLKSKGITAVWIPPAWKGASQNDVGYGAYDLYDLGEFNQKGTVRTKYGTRSQLQAAVTSLKNNGIQVYGDVVMNHKGGADATEMVRAVEVNPNNRNQEVTGEYTIEAWTRFDFPGRGNTHSSFKWRWYHFDGVDWDQSRRLNNRIYKFRGKAWDWEVDTEFGNYDYLMYADYDMDHPEVVNELRNWGVWYTNTLGLDGFRIDAVKHIKYSFTRDWINHVRSATGKNMFAVAEFWKNDLGAIENYLQKTNWNHSVFDVPLHYNLYNASKSGGNYDMRNIFNGTVVQRHPSHAVTFVDNHDSQPEEALESFVEEWFKPLAYALTLTREQGYPSVFYGDYYGIPTHGVPAMRSKIDPILEARQKYAYGPQHDYLDHPDVIGWTREGDSSHPKSGLATLITDGPGGSKRMYAGLKNAGETWYDITGNRSDTVKIGSDGWGNFHVNDGSVSIYVQK

SEQ ID NO: 26908 - protein, 485 aa, Synthetic construct
HHNGTNGTMMQYFEWYLPNDGNHWNRLNSDASNLKEKGITAVWIPPAWKGASQNDVGYGAYDLYDLGEFNQKGTVRTKYGTRSQLQAAVTSLKNNGIQVYGDVVMNHKGGADATEMVRAVEVNPNNRNQEVTGEYTIEAWTRFDFPGRGNTHSSFKWRWYHFDGVDWDQSRRLNNRIYKFRGHGKAWDWEVDTENGNYDYLMYADIDMDHPEVVNELRNWGVWYTNTLGLDGFRIDAVKHIKYSFTRDWINHVRSATGKNMFAVAEFWKNDLGAIENYLQKTNWNHSVFDVPLHYNLYNASKSGGNYDMRNIFNGTVVQRHPSHAVTFVDNHDSQPEEALESFVEEWFKPLAYALTLTREQGYPSVFYGDYYGIPTHGVPAMRSKIDPILEARQKYAYGPQHDYLDHPDVIGWTREGDSSHPKSGLATLITDGPGGSKRMYAGLKNAGETWYDITGNRSDTVKIGSDGWGEFHVNDGSVSIYVQK

SEQ ID NO: 26909 - protein, 485 aa, Synthetic construct
HHNGTNGTMMQYFEWYLPNDGNHWNRLNSDASNLKSKGITAVWIPPAWKGASQNDVGYGAYDLYDLGEFNQKGTVRTKYGTRSQLQAAVTSLKNNGIQVYGDVVMNHKGGADATEMVRAVEVNPNNRNQEVTGEYTIEAWTRFDFPGRGNTHSSFKWRWYHFDGVDWDQSRRLNNRIYKFRGHGKAWDWEVDTENGNYDYLMYADIDMDHPEVVNELRNWGVWYTNTLGLDGFRIDAVKHIKYSFTRDWINHVRSATGKNMFAVAEFWKNDLGAIENYLQKTNWNHSVFDVPLHYNLYNASTSGGNYDMRNIFNGTVVQRHPSHAVTFVDNHDSQPEEALESFVEEWFKPLAYALTLTREQGYPSVFYGDYYGIPTHGVPAMRSKIDPILEARQKYAYGPQHDYLDHPDVIGWTREGDSSHPKSGLATLITDGPGGSKRMYAGLKNAGETWYDITGNRSDTVKIGSDGWGEFHVNDGSVSIYVQK

SEQ ID NO: 26910 - protein, 485 aa, Bacillus sp.
HHNGTNGTMMQYFEWYLPNDGNHWNRLNSDASNLKSKGITAVWIPPAWKGASQNDVGYGAYDLYDLGEFNQKGTVRTKYGTRSQLQAAVTSLKNNGIQVYGDVVMNHKGGADATEMVRAVEVNPNNRNQEVTGEYTIEAWTRFDFPGRGNTHSSFKWRWYHFDGVDWDQSRRLNNRIYKFRGHGKAWDWEVDTEFGNYDYLMYADYDMDHPEVVNELRNWGVWYTNTLGLDGFRIDAVKHIKYSFTRDWINHVRSATGKNMFAVAEFWKNDLGAIENYLQKTNWNHSVFDVPLHYNLYNASKSGGNYDMRNIFNGTVVQKHPSHAVTFVDNHDSQPEEALESFVEEWFKPLAYALTLTREQGYPSVFYGDYYGIPTHGVPAMRSKIDPILEARQKYAYGPQHDYLDHPDVIGWTREGDSSHPKSGLATLITDGPGGSKRMYAGLKNAGETWYDITGNRSDTVKIGSDGWGEFHVNDGSVSIYVQK

SEQ ID NO: 26911 - protein, 483 aa, Bacillus sp.
HHNGTNGTMMQYFEWYLPNDGNHWNRLNSDASNLKSKGITAVWIPPAWKGASQNDVGYGAYDLYDLGEFNQKGTVRTKYGTRSQLQAAVTSLKNNGIQVYGDVVMNHKGGADATEMVRAVEVNPNNRNQEVTGEYTIEAWTRFDFPGRGNTHSSFKWRWYHFDGVDWDQSRRLNNRIYKFRGKAWDWEVDTEFGNYDYLMYADYDMDHPEVVNELRNWGVWYTNTLGLDGFRIDAVKHIKYSFTRDWINHVRSATGKNMFAVAEFWKNDLGAIENYLQKTNWNHSVFDVPLHYNLYNASKSGGNYDMRNIFNGTVVQRHPSHAVTFVDNHDSQPEEALESFVEEWFKPLAYALTLTREQGYPSVFYGDYYGIPTHGVPAMRSKIDPILEARQKYAYGPQHDYLDHPDVIGWTREGDSSHPKSGLATLMTDGPGGSKRMYAGLKNAGETWYDITGNRSDTVKIGSDGWGEFHVNDGSVSIYVQK

SEQ ID NO: 26912 - protein, 483 aa, Bacillus sp.
HHNGTNGTMMQYFEWYLPNDGNHWNRLNSDASNLKSKGITAVWIPPAWKGASQNDVGYGAYDLYDLGEFNQKGTVRTKYGTRSQLQAAVTSLKNNGIQVYGDVVMNHKGGADATEMVRAVEVNPNNRNQEVTGEYTIEAWTRFDFPGRGNTHSSFKWRWYHFDGVDWDQSRQLENRIYKFRGKAWDWEVDTEFGNYDYLMYADYDMDHPEVVNELRNWGVWYTNTLGLDGFRIDAVKHIKYSFTRDWINHVRSATGKNMFAVAEFWKNDLGAIENYLQKTNWNHSVFDVPLHYNLYNASKSGGNYDMRNIFNGTVVQRHPSHAVTFVDNHDSQPEEALESFVEEWFKPLAYALTLTREQGYPSVFYGDYYGIPTHGVPAMRSKIDPILEARQKYAYGPQHDYLDHPDVIGWTREGDSSHPKSGLATLITDGPGGSKRMYAGLKNAGETWYDITGNRSDTVKIGSDGWGEFHVNDGSVSIYVQK

SEQ ID NO: 26913 - protein, 485 aa, Bacillus sp.
HHNGTNGTMMQYFEWYLPNDGNHWNRLNSDASNLKSKGITAVWIPPAWKGASQNDVGYGAYDLYDLGEFNQKGTVRTKYGTRSQLQAAVTSLKNNGIQVYGDVVMNHKGGADATEMVRAVEVNPNNRNQEVTGEYTIEAWTRFDFPGRGNTHSSFKWRWYHFDGVDWDQSRQTNNRIYKFRGHGKAWDWEVDTEFGNYDYLMYADYDMDHPEVVNELRNWGVWYTNTLGLDGFRIDAVKHIKYSFTRDWINHVRSATGKNMFAVAEFWKNDLGAIENYLQKTNWNHSVFDVPLHYNLYNASKSGGNYDMRNIFNGTVVQVHPSHAVTFVDNHDSQPEEALESFVEEWFKPLAYALTLTREQGYPSVFYGDYYGIPTHGVPAMRSKIDPILEARQKYAYGPQHDYLDHPDVIGWTREGDSSHPKSGLATLITDGPGGSKRMYAGLKNAGETWYDITGNRSDTVKIGSDGWGEFHVNYGSVSIYVQK

SEQ ID NO: 26914 - protein, 485 aa, Synthetic construct
HHNGTNGTMMQYFEWYLPNDGNHWNRLNSDASNLKSKGITAVWIPPAWKGASQNDVGYGAYDLYDLGEFNQKGTVRTKYGTRSQLQAAVTSLKNNGIQVYGDVVMNHKGGADATEMVRAVEVNPNNRNQEVTGEYTIEAWTHFDFPGRGNTHSSFKWRWYHFDGVDWDQSRRLNNRIYKFRGHGKAWDWEVDTENGNYDYLMYADIDMDHPEVVNELRNWGVWYTNTLGLDGFRIDAVKHIKYSFTRDWINHVRSATGKNMFAVAEFWKNDLGAIENYLQKTNWNHSVFDVPLHYNLYNASKSGGNYDMRNIFNGTVVQRHPSHAVTFVDNHDSQPEEALESFVEEWFKPLAYALTLTREQGYPSVFYGDYYGIPTHGVPAMRSKIDPILEARQKYAYGPQHDYLDHPDVIGWTREGDSSHPKSGLATLITDGPGGSKRMYAGLKNAGETWYDITGNRSDTVKIGSDGWGEFHVNDGSVSIYVQK

SEQ ID NO: 26915 - protein, 485 aa, Synthetic construct
HHNGTNGTMMQYFEWYLPNDGNHWNRLNSDASNLKSKGITAVWIPPAWKGASQNDVGYGAYDLYDLGEFNQKGTVRTKYGTRSQLQAAVTSLKNNGIQVYGDVVMNHKGGADATEMVRAVEVNPNNRNQEVTGEYTIEAWTRFDFPGRGNTHSNFKWRWYHFDGVDWDQSRRLNNRIYKFRGHGKAWDWEVDTENGNYDYLMYADIDMDHPEVVNELRNWGVWYTNTLGLDGFRIDAVKHIKYSFTRDWINHVRSATGKNMFAVAEFWKNDLGAIENYLQKTNWNHSVFDVPLHYNLYNASKSGGNYDMRNIFNGTVVQRHPSHAVTFVDNHDSQPEEALESFVEEWFKPLAYALTLTREQGYPSVFYGDYYGIPTHGVPAMRSKIDPILEARQKYAYGPQHDYLDHPDVIGWTREGDSSHPKSGLATLITDGPGGSKRMYAGLKNAGETWYDITGNRSDTVKIGSDGWGEFHVNDGSVSIYVQK

SEQ ID NO: 26916 - protein, 485 aa, Synthetic construct
HHNGTNGTMMQYFEWYLPNDGNHWNRLNSDASNLKSKGITAVWIPPAWKGASQNDVGYGAYDLYDLGEFNQKGTVRTKYGTRSQLQAAVTSLKNNGIQVYGDVVMNHKGGADATEMVRAVEVNPNNRNQEVTGEYTIEAWTRFDFPGRGNTHSSFKWRWYHFDGVDWDQSRSLNNRIYKFRGHGKAWDWEVDTENGNYDYLMYADIDMDHPEVVNELRNWGVWYTNTLGLDGFRIDAVKHIKYSFTRDWINHVRSATGKNMFAVAEFWKNDLGAIENYLQKTNWNHSVFDVPLHYNLYNASKSGGNYDMRNIFNGTVVQRHPSHAVTFVDNHDSQPEEALESFVEEWFKPLAYALTLTREQGYPSVFYGDYYGIPTHGVPAMRSKIDPILEARQKYAYGPQHDYLDHPDVIGWTREGDSSHPKSGLATLITDGPGGSKRMYAGLKNAGETWYDITGNRSDTVKIGSDGWGEFHVNDGSVSIYVQK

SEQ ID NO: 26917 - protein, 483 aa, Bacillus sp.
HHNGTNGTMMQYFEWYLPNDGNHWNRLNSDASNLKSKGITAVWIPPAWKAASQNDVGYGAYDLYDLGEFNQKGTVRTKYGTRSQLQAAVTSLKNNGIQVYGDVVMNHKGGADATEMVRAVEVNPNNRNQEVTGEYTIEAWTRFDFPGRGNTHSSFKWRWYHFDGVDWDQSRQLQNRIYKFRGKAWDWEVDTEFGNYDYLMYADYDMDHPEVVNELRNWGVWYTNTLGLDGFRIDAVKHIKYSFTRDWINHVRSATGKNMFAVAEFWKNDLGAIENYLQKTNWNHSVFDVPLHYNLYNASKSGGNYDMRNIFNGTVVQRHPSHAVTFVDNHDSQPEEALESFVEEWFKPLAYALTLTREQGYPSVFYGDYYGIPTHGVPAMRSKIDPILEARQKYAYGPQHDYLDHPDVIGWTREGDSSHPKSGLATLITDGPGGSKRMYAGLKNAGETWYDITGNRSDTVKIGSDGWGEFHVNDGSVSIYVQK

SEQ ID NO: 26918 - protein, 485 aa, Bacillus sp.
HHNGTNGTMMQYFEWYLPNDGNHWNRLNSDASNLKSKGITAVWIPPAWKGASQNDVGYGAYDLYDLGEFNQKGTVRTKYGTRSQLQAAVTSLKNNGIQVYGDVVMNHKGGADATEMVRAVEVNPNNRNQEVTGEYTIEAWTRFDFPGRGNTHSSFKWRWYHFDGVDWDQSRRLNNRIYKFRGHGKAWDWEVDTEFGNYDYLMYADYDMDHPEVVNELRNWGVWYTNTLGLDGFRIDAVKHIKYSFTRDWINHVRSATGKNMFAVAEFWKNDLGAIENYLQKTNWNHSVFDVPLHYNLYNASKSGGNYDMRNIFNGTVVQRHPSHAVTFVDNHDSQPEEALESFVEEWFKPLAYALTLTREQGYPSVFYGDYYGIPTHGVPAMRSKIDPILEARQKYAYGPQHDYLDHPDVIGWTREGDSSHPKSGLATLMTDGPGGSKRMYAGLKNAGETWYDITGNRSDTVKIGSDGWGEFHVNDGSVSIYVQK

SEQ ID NO: 26919 - protein, 483 aa, Bacillus sp.
HHNGTNGTMMQYFEWYLPNDGNHWNRLNSDASNLKSKGITAVWIPPAWKGASQNDVGYGAYDLYDLGEFNQKGTVRTKYGTRSQLQDAVTSLKNNGIQVYGDVVMNHKGGADATEMVRAVEVNPNNRNQEVTGEYTIEAWTRFDFPGRGNTHSSFKWRWYHFDGVDWDQSRRLNNRIYKFRGKAWDWEVDTEFGNYDYLMYADYDMDHPEVVNELRNWGVWYTNTLGLDGFRIDAVKHIKYSFTRDWINHVRSATGKNMFAVAEFWKNDLGAIENYLQKTNWNHSVFDVPLHYNLYNASKSGGNYDMRNIFNGTVVQSHPMHAVTFVDNHDSQPEEALESFVEEWFKPLAYALTLTREQGYPSVFYGDYYGIPTHGVPAMRSKIDPILEARQKYAYGPQHDYLDHPDVIGWTREGDSSHPKSGLATLITDGPGGSKRMYAGLKNAGETWYDITGNRSDTVKIGSDGWGEFHVNDGSVSIYVQK

SEQ ID NO: 26920 - protein, 483 aa, Bacillus sp.
HHNGTNGTMMQYFEWYLPNDGNHWNRLNSDASNLKSKGITAVWIPPAWKGASQNDVGYGAYDLYDLGEFNQKGTVRTKYGTRSQLQAAVTSLKNNGIQVYGDVVMNHKGGADATEMVRAVEVNPNNRNQEVTGEYTIEAWTRFDFPGRGNTHSSFKWRWYHFDGVDWDQSREFDNRIYKFRGKAWDWEVDTEFGNYDYLMYADYDMDHPEVVNELRNWGVWYTNTLGLDGFRIDAVKHIKYSFTRDWINHVRSATGKNMFAVAEFWKNDLGAIENYLQKTNWNHSVFDVPLHYNLYNASKSGGNYDMRNIFNGTVVQAHPNHAVTFVDNHDSQPEEALESFVEEWFKPLAYALTLTREQGYPSVFYGDYYGIPTHGVPAMRSKIDPILEARQKYAYGPQHDYLDHPDVIGWTREGDSSHPKSGLATLITDGPGGSKRMYAGLKNAGETWYDITGNRSDTVKIGSDGWGEFHVNDGSVSIYVQK

SEQ ID NO: 26921 - protein, 485 aa, Synthetic construct
HHNGTNGTMMQYFEWYLPNDGNHWNRLNSDASNLKSKGITAVWIPPAWKGASQNDVGYGAYDLYDLGEFNQKGTVRTKYGTRSQLQAAVTSLKNNGIQVYGDVVMNHKGGADATEMVRAVEVNPNNRNQEVTGEYTIEAWTRFDFPGRGNTHSSFKWRWYHFDGVDWDQSRRLNNRIYKFRGHGKAWDWEVDTENGNYDYLMYADIDMDHPEVVNELRNWGVWYTNTLGLDGFRIDAVKHIKYSFTRDWINHVRSATGKNMFAVAEFWKNDLGAIENYLQKTNWNHSVFDVPLHYNLYNASKSGGNYDMRNIFNGTVVQRHPSHAVTFVDNHDSQPEEALESFVEEWFKPLAYALTLTREQGYPSVFYGDYYGIPTHGVPAMRSKIDPILEARQQYAYGPQHDYLDHPDVIGWTREGDSSHPKSGLATLITDGPGGSKRMYAGLKNAGETWYDITGNRSDTVKIGSDGWGEFHVNDGSVSIYVQK

SEQ ID NO: 26922 - protein, 485 aa, Synthetic construct
HHNGTNGTMMQYFEWYLPNDGNHWNRLNSDASNLKSKGITAVWIPPAWKGASQNDVGYGAYDLYDLGEFNQKGTVRTKYGTRSQLQAAVNSLKNNGIQVYGDVVMNHKGGADATEMVRAVEVNPNNRNQEVTGEYTIEAWTRFDFPGRGNTHSSFKWRWYHFDGVDWDQSRRLNNRIYKFRGHGKAWDWEVDTENGNYDYLMYADIDMDHPEVVNELRNWGVWYTNTLGLDGFRIDAVKHIKYSFTRDWINHVRSATGKNMFAVAEFWKNDLGAIENYLQKTNWNHSVFDVPLHYNLYNASKSGGNYDMRNIFNGTVVQRHPSHAVTFVDNHDSQPEEALESFVEEWFKPLAYALTLTREQGYPSVFYGDYYGIPTHGVPAMRSKIDPILEARQKYAYGPQHDYLDHPDVIGWTREGDSSHPKSGLATLITDGPGGSKRMYAGLKNAGETWYDITGNRSDTVKIGSDGWGEFHVNDGSVSIYVQK

SEQ ID NO: 26923 - protein, 485 aa, Synthetic construct
HHNGTNGTMMQYFEWYLPNDGNHWNRLNSDASNLKSVGITAVWIPPAWKGASQNDVGYGAYDLYDLGEFNQKGTVRTKYGTRSQLQAAVTSLKNNGIQVYGDVVMNHKGGADATEMVRAVEVNPNNRNQEVTGEYTIEAWTRFDFPGRGNTHSSFKWRWYHFDGVDWDQSRRLNNRIYKFRGHGKAWDWEVDTENGNYDYLMYADIDMDHPEVVNELRNWGVWYTNTLGLDGFRIDAVKHIKYSFTRDWINHVRSATGKNMFAVAEFWKNDLGAIENYLQKTNWNHSVFDVPLHYNLYNASKSGGNYDMRNIFNGTVVQRHPSHAVTFVDNHDSQPEEALESFVEEWFKPLAYALTLTREQGYPSVFYGDYYGIPTHGVPAMRSKIDPILEARQKYAYGPQHDYLDHPDVIGWTREGDSSHPKSGLATLITDGPGGSKRMYAGLKNAGETWYDITGNRSDTVKIGSDGWGEFHVNDGSVSIYVQK

SEQ ID NO: 26924 - protein, 483 aa, Synthetic construct
HHNGTNGTMMQYFEWYLPNDGNHWNRLNSDASNLKSKGITAVWIPPAWKGASQNDVGYGAYDLYDLGEFNQKGTVRTKYGTRSQLQAAVTSLKNNGIQVYGDVVMNHKGGADATEIVRAVEVNPNNRNQEVTGEYTIEAWTRFDFPGRGNTHSSFKWRWYHFDGVDWDQSRRLNNRIYKFRGKAWDWEVDTENGNYDYLMYADIDMDHPEVVNELRNWGVWYTNTLGLDGFRIDAVKHIKYSFTRDWINHVRSATGKNMFAVAEFWKNDLGAIENYLQKTNWNHSVFDVPLHYNLYNASKSGGNYDMRNIFNGTVVQRHPSHAVTFVDNHDSQPEEALESFVEEWFKPLAYALTLTREQGYPSVFYGDYYGIPTHGVPAMRSKIDPILEARQKYAYGPQHDYLDHPDVIGWTREGDSSHPKSGLATLITDGPGGSKRMYAGLKNAGETWYDITGNRSDTVKIGSDGWGEFHVNDGSVSIYVQK

SEQ ID NO: 26925 - protein, 483 aa, Bacillus sp.
HHNGTNGTMMQYFEWYLPNDGNHWNRLNSDASNLKSKGITAVWIPPAWKGASQNDVGYGAYDLYDLGEFNQKGTVRTKYGTRSQLQAAVTSLKNNGIQVYGDVVMNHKGGADATEMVRAVEVNPNNRNQEVTGEYTIEAWTRFDFPGRGNTHSSFKWRWYHFDGVDWDQSRRLNNRIYKFRGKAWDWEVDTEFGNYDYLMYADYDMDHPEVVNELRNWGVWYTNTLGLDGFRIDAVKHIKYSFTRDWINHVRSATGKNMFAVAEFWKNDLGAIENYLQKTNWNHSVFDVPLHYNLYNASKSGGNYDMRNIFNGTVVQRHPSHAVTFVDNHDSQPEEALESFVEEWFKPLAYALTLTREQGYPSVFYGDYYGIPTHGVPAMRSKIDPILEARQKYAYGPQHDYLDHPDVIGWTREGDSSHPKSGLATLITDGPGGSKRMYAGLKNAGETWYDITGNRSDTVKIGSDGWGEFHVNGGSVSIYVQK

SEQ ID NO: 26926 - protein, 483 aa, Bacillus sp.
HHNGTNGTMMQYFEWYLPNDGNHWNRLNSDASNLKSKGITAVWIPPAWKAASQNDVGYGAYDLYDLGEFNQKGTVRTKYGTRSQLQAAVTSLKNNGIQVYGDVVMNHKGGADATEMVRAVEVNPNNRNQEVTGEYTIEAWTRFDFPGRGNTHSSFKWRWYHFDGVDWDQSRDLDNRIYKFRGKAWDWEVDTEFGNYDYLMYADYDMDHPEVVNELRNWGVWYTNTLGLDGFRIDAVKHIKYSFTRDWINHVRSATGKNMFAVAEFWKNDLGAIENYLQKTNWNHSVFDVPLHYNLYNASKSGGNYDMRNIFNGTVVQAHPMHAVTFVDNHDSQPEEALESFVEEWFKPLAYALTLTREQGYPSVFYGDYYGIPTHGVPAMRSKIDPILEARQKYAYGPQHDYLDHPDVIGWTREGDSSHPKSGLATLITDGPGGSKRMYVGLKNAGETWYDITGNRSDTVKIGSDGWGEFHVNYGSVSIYVQK

SEQ ID NO: 26927 - protein, 485 aa, Bacillus sp.
HHNGTNGTMMQYFEWYLPNDGNHWNRLNSDASNLKSKGITAVWIPPAWKGASQNDVGYGAYDLYDLGEFNQKGTVRTKYGTRSQLQAAVTSLKNNGIQVYGDVVMNHKGGADATEMVRAVEVNPNNRNQEVTGEYTIEAWTRFDFPGRGNTHSSFKWRWYHFDGVDWDQSRRLNNRIYKFRGHGKAWDWEVDTEFGNYDYLMYADYDMDHPEVVNELRNWGVWYTNTLGLDGFRIDAVKHIKYSFTRDWINHVRSATGKNMFAVAEFWKNDLGAIENYLQKTNWNHSVFDVPLHYNLYNASKSGGNYDMRNIFNGTVVQRHPSHAVTFVDNHDSQPEEALESFVEEWFKPLAYALTLTREQGYPSVFYGDYYGIPTHGVPAMRSKIDPILEARQKYAYGPQHDYLDHPDVIGWTREGDSSHPKSGLATLITDGPGGSKRMYAGLKNAGETWYDITGNRSDTVKIGSDGWGEFHVNGGSVSIYVQK

SEQ ID NO: 26928 - protein, 483 aa, Bacillus sp.
HHNGTNGTMMQYFEWYLPNDGNHWNRLNSDASNLKSKGITAVWIPPAWKGASQNDVGYGAYDLYDLGEFNQKGTVRTKYGTRSQLQAAVTSLKNNGIQVYGDVVMNHKGGADATEMVRAVEVNPNNRNQEVTGEYTIEAWTRFDFPGRGNTHSSFKWRWYHFDGVDWDQSRQLNNRIYKFRGKAWDWEVDTEFGNYDYLMYADYDMDHPEVVNELRNWGVWYTNTLGLDGFRIDAVKHIKYSFTRDWINHVRSATGKNMFAVAEFWKNDLGAIENYLQKTNWNHSVFDVPLHYNLYNASKSGGNYDMRNIFNGTVVQRHPSHAVTFVDNHDSQPEEALESFVEEWFKPLAYALTLTREQGYPSVFYGDYYGIPTHGVPAMRSKIDPILEARQKYAYGPQHDYLDHPDVIGWTREGDSSHPKSGLATLITDGPGGSKRMYAGLKNAGETWYDITGNRSDTVKIGSDGWGEFHVNDGSVSIYVQK

SEQ ID NO: 26929 - protein, 485 aa, Synthetic construct
HHNGTNGTMMQYFEWYLPNDGNHWNRLNSDASNLKSKGITAVWIPPAWKGASQNDVGYGAYDLYDLGEFNQKGTVRTKYGTRSQLQAAVTSLKNNGIQVYGDVVMNHKGGADATEMVRAVEVNPNNRNQEVTGEYTIEAWTRFDFPGRGNTHSSFKWRWYHFDGVDWDQSRRLNNRIYKFRGHGKAWDWEVDTENGNYDYLMYADIDMDHPEVVNELRNWGVWYTNTLGLDGFRIDAVKHIKYSFTRDWINHVRSATGKNMFAVAEFWKNDLGAIENYLQKTNWNHSVFDVPLHYNLYNASKSGGNYDMRNIFNGTVVQRHPSHAVTFVDNHDSQPEEALESFVEEWFKPLAYALTLTREQGYPSVFYGDYYGIPTHGVPAMRSKIDPILEARQKYAYGPQHDYLDHPDVIGWTREGDSSHPKSGLATLITDGPGGAKRMYAGLKNAGETWYDITGNRSDTVKIGSDGWGEFHVNDGSVSIYVQK

SEQ ID NO: 26930 - protein, 483 aa, Bacillus sp.
HHNGTNGTMMQYFEWYLPNDGNHWNRLNSDASNLKSKGITAVWIPPAWKGASQNDVGYGAYDLYDLGEFNQKGTVRTKYGTRSQLQAAVTSLKNNGIQVYGDVVMNHKGGADATEMVDAVEVNPNNRNQEVTGEYTIEAWTRFDFPGRGNTHSSFKWRWYHFDGVDWDQSRQLDNRIYKFRGKAWDWEVDTEFGNYDYLMYADYDMDHPEVVNELRNWGVWYTNTLGLDGFRIDAVKHIKYSFTRDWINHVRSATGKNMFAVAEFWKNDLGAIENYLQKTNWNHSVFDVPLHYNLYNASKSGGNYDMRNIFNGTVVQRHPSHAVTFVDNHDSQPEEALESFVEEWFKPLAYALTLTREQGYPSVFYGDYYGIPTHGVPAMRSKIDPILEARQKYAYGPQHDYLDHPDVIGWTREGDSSHPKSGLATLITDGPGGSKRMYAGLKNAGETWYDITGNRSDTVKIGSDGWGEFHVNDGSVSIYVQK

SEQ ID NO: 26931 - protein, 485 aa, Bacillus sp.
HHNGTNGTMMQYFEWYLPNDGNHWNRLNSDASNLKSKGITAVWIPPAWKGASQNDVGYGAYDLYDLGEFNQKGTVRTKYGTRSQLQAAVTSLKNNGIQVYGDVVMNHKGGADATEMVSAVEVNPNNRNQEVTGDYTIEAWTRFDFPGRGNTHSSFKWRWYHFDGVDWDQSRRLNNRIYKFRSHGKAWDWEVDTEFGNYDYLMYADYDMDHPEVVNELRNWGVWYTNTLGLDGFRIDAVKHIKYSFTRDWINHVRSATGKNMFAVAEFWKNDLGAIENYLQKTNWNHSVFDVPLHYNLYNASKSGGNYDMRNIFNGTVVQRHPSHAVTFVDNHDSQPEEALESFVEEWFKPLAYALTLTREQGYPSVFYGDYYGIPTHGVPAMRSKIDPILEARQKYAYGPQHDYLDHPDVIGWTREGDSSHPKSGLATLITDGPGGSKRMYAGLKNAGETWYDITGNRSDTVKIGSDGWGEFHVNDGSVSIYVQK

SEQ ID NO: 26932 - protein, 485 aa, Bacillus sp.
HHNGTNGTMMQYFEWYLPNDGNHWNRLNSDASNLKSKGITAVWIPPAWKGASQNDVGYGAYDLYDLGEFNQKGTVRTKYGTRSQLQAAVTSLKNNGIQVYGDVVMNHKGGADATEMVRAVEVNPNNRNQEVTGEYTIEAWTRFDFPGRGNTHSSFKWRWYHFDGVDWDQSREFNNRIYKFRGHGKAWDWEVDTEFGNYDYLMYADYDMDHPEVVNELRNWGVWYTNTLGLDGFRIDAVKHIKYSFTRDWINHVRSATGKNMFAVAEFWKNDLGAIENYLQKTNWNHSVFDVPLHYNLYNASKSGGNYDMRNIFNGTVVQRHPSHAVTFVDNHDSQPEEALESFVEEWFKPLAYALTLTREQGYPSVFYGDYYGIPTHGVPAMRSKIDPILEARQKYAYGPQHDYLDHPDVIGWTREGDSSHPKSGLATLITDGPGGSKRMYAGLKNAGETWYDITGNRSDTVKIGSDGWGEFHVNDGSVSIYVQK

SEQ ID NO: 26933 - protein, 485 aa, Bacillus sp.
HHNGTNGTMMQYFEWYLPNDGNHWNRLNSDASNLKSKGITAVWIPPAWKGASQNDVGYGAYDLYDLGEFNQKGTVRTKYGTRSQLQAAVTSLKNNGIQVYGDVVMNHKGGADATEMVRAVEVNPNNRNQEVTGEYTIEAWTRFDFPGRGNTHSSFKWRWYHFDGVDWDQSRQITNRIYKFRGHGKAWDWEVDTEFGNYDYLMYADYDMDHPEVVNELRNWGVWYTNTLGLDGFRIDAVKHIKYSFTRDWINHVRSATGKNMFAVAEFWKNDLGAIENYLQKTNWNHSVFDVPLHYNLYNASKSGGNYDMRNIFNGTVVQRHPSHAVTFVDNHDSQPEEALESFVEEWFKPLAYALTLTREQGYPSVFYGDYYGIPTHGVPAMRSKIDPILEARQKYAYGPQHDYLDHPDVIGWTREGDSSHPKSGLATLITDGPGGSKRMYAGLKNAGETWYDITGNRSDTVKIGSDGWGEFHVNDGSVSIYVQK

SEQ ID NO: 26934 - protein, 485 aa, Bacillus sp.
HHNGTNGTMMQYFEWYLPNDGNHWNRLNSDASNLKSKGITAVWIPPAWKGASQNDVGYGAYDLYDLGEFNQKGTVRTKYGTRSQLQAAVTSLKNNGIQVYGDVVMNHKGGADATEMVLAVEVNPNNRNQEVTGEYTIEAWTRFDFPGRGNTHSSFKWRWYHFDGVDWDQSRRLNNRIYKFRGHGKAWDWEVDTEFGNYDYLMYADYDMDHPEVVNELRNWGVWYTNTLGLDGFRIDAVKHIKYSFTRDWINHVRSATGKNMFAVAEFWKNDLGAIENYLQKTNWNHSVFDVPLHYNLYNASKSGGNYDMRNIFNGTVVQRHPSHAVTFVDNHDSQPEEALESFVEEWFKPLAYALTLTREQGYPSVFYGDYYGIPTHGVPAMRSKIDPILEARQKYAYGPQHDYLDHPDVIGWTREGDSSHPKSGLATLITDGPGGSKRMYAGLKNAGETWYDITGNRSDTVKIGSDGWGEFHVNDGSVSIYVQK

SEQ ID NO: 26935 - protein, 483 aa, Bacillus sp.
HHNGTNGTMMQYFEWYLPNDGNHWNRLNSDASNLKSKGITAVWIPPAWKGASQNDVGYGAYDLYDLGEFNQKGTVRTKYGTRSQLQAAVTSLKNNGIQVYGDVVMNHKGGADATEMVLAVEVNPNNRNQEVTGEYTIEAWTRFDFPGRGNTHSSFKWRWYHFDGVDWDQSRRLNNRIYKFRGKAWDWEVDTEFGNYDYLMYADYDMDHPEVVNELRNWGVWYTNTLGLDGFRIDAVKHIKYSFTRDWINHVRSATGKNMFAVAEFWKNDLGAIENYLQKTNWNHSVFDVPLHYNLYNASKSGGNYDMRNIFNGTVVQRHPSHAVTFVDNHDSQPEEALESFVEEWFKPLAYALTLTREQGYPSVFYGDYYGIPTHGVPAMRSKIDPILEARQKYAYGPQHDYLDHPDVIGWTREGDSSHPKSGLATLITDGPGGSKRMYAGLKNAGETWYDITGNRSDTVKIGSDGWGEFHVNDGSVSIYVQK

SEQ ID NO: 26936 - protein, 483 aa, Bacillus sp.
HHNGTNGTMMQYFEWYLPNDGNHWNRLNSDASNLKSKGITAVWIPPAWKATSQNDVGYGAYDLYDLGEFNQKGTVRTKYGTRSQLQAAVTSLKNNGIQVYGDVVMNHKGGADATEMVRAVEVNPNNRNQEVTGEYTIEAWTRFDFPGRGNTHSSFKWRWYHFDGVDWDQSRQINNRIYKFRGKAWDWEVDTEFGNYDYLMYADYDMDHPEVVNELRNWGVWYTNTLGLDGFRIDAVKHIKYSFTRDWINHVRSATGKNMFAVAEFWKNDLGAIENYLQKTNWNHSVFDVPLHYNLYNASKSGGNYDMRNIFNGTVVQRHPSHAVTFVDNHDSQPEEALESFVEEWFKPLAYALTLTREQGYPSVFYGDYYGIPTHGVPAMRSKIDPILEARQKYAYGPQHDYLDHPDVIGWTREGDSSHPKSGLATLITDGPGGSKRMYAGLKNAGETWYDITGNRSDTVKIGSDGWGEFHVNDGSVSIYVQK

SEQ ID NO: 26937 - protein, 485 aa, Bacillus sp.
HHNGTNGTMMQYFEWYLPNDGNHWNRLNSDASNLKSKGITAVWIPPAWKGASQNDVGYGAYDLYDLGEFNQKGTVRTKYGTRSQLQAAVTSLKNNGIQVYGDVVMNHKGGADATEMVRAVEVNPNNRNQEVTGEYTIEAWTRFDFPGRGNTHSSFKWRWYHFDGVDWDQSRQTNNRIYKFRGHGKAWDWEVDTEFGNYDYLMYADYDMDHPEVVNELRNWGVWYTNTLGLDGFRIDAVKHIKYSFTRDWINHVRSATGKNMFAVAEFWKNDLGAIENYLQKTNWNHSVFDVPLHYNLYNASKSGGNYDMRNIFNGTVVQRHPSHAVTFVDNHDSQPEEALESFVEEWFKPLAYALTLTREQGYPSVFYGDYYGIPTHGVPAMRSKIDPILEARQKYAYGPQHDYLDHPDVIGWTREGDSSHPKSGLATLITDGPGGSKRMYAGLKNAGETWYDITGNRSDTVKIGSDGWGEFHVNDGSVSIYVQK

SEQ ID NO: 26938 - protein, 485 aa, Bacillus sp.
HHNGTNGTMMQYFEWYLPNDGNHWNRLNSDASNLKSKGITAVWIPPAWKGASQNDVGYGAYDLYDLGEFNQKGTVRTKYGTRSQLQAAVTSLKNNGIQVYGDVVMNHKGGADATEMVRAVEVNPNNRNQEVTGEYTIEAWTRFDFPGRGNTHSSFKWRWYHFDGVDWDQSRRLNNRIYKFRGHGKAWDWEVDTEFGNYDYLMYADYDMDHPEVVNELRNWGVWYTNTLGLDGFRIDAVKHIKYSFTRDWINHVRNATGKNMFAVAEFWKNDLGAIENYLQKTNWNHSVFDVPLHYNLYNASKSGGNYDMRNIFNGTVVQRHPSHAVTFVDNHDSQPEEALESFVEEWFKPLAYALTLTREQGYPSVFYGDYYGIPTHGVPAMRSKIDPILEARQKYAYGPQHDYLDHPDVIGWTREGDSSHPKSGLATLITDGPGGSKRMYAGLKNAGETWYDITGNRSDTVKIGSDGWGEFHVNDGSVSIYVQK

SEQ ID NO: 26939 - protein, 485 aa, Bacillus sp.
HHNGTNGTMMQYFEWYLPNDGNHWNRLNSDASNLKSKGITAVWIPPAWKGASQNDVGYGAYDLYDLGEFNQKGTVRTKYGTRSQLQAAVTSLKNNGIQVYGDVVMNHKGGADATEMVRAVEVNPNNRNQEVTGEYTIEAWTRFDFPGRGNTHSSFKWRWYHFDGVDWDQSRDFDNRIYKFRGHGKAWDWEVDTEFGNYDYLMYADYDMDHPEVVNELRNWGVWYTNTLGLDGFRIDAVKHIKYSFTRDWINHVRSATGKNMFAVAEFWKNDLGAIENYLQKTNWNHSVFDVPLHYNLYNASKSGGNYDMRNIFNGTVVQRHPSHAVTFVDNHDSQPEEALESFVEEWFKPLAYALTLTREQGYPSVFYGDYYGIPTHGVPAMRSKIDPILEARQKYAYGPQHDYLDHPDVIGWTREGDSSHPKSGLATLITDGPGGSKRMYAGLKNAGETWYDITGNRSDTVKIGSDGWGEFHVNDGSVSIYVQK

SEQ ID NO: 26940 - protein, 483 aa, Bacillus sp.
HHNGTNGTMMQYFEWYLPNDGNHWNRLNSDASNLKSKGITAVWIPPAWKGASQNDVGYGAYDLYDLGEFNQKGTVRTKYGTRSQLQAAVTSLKNNGIQVYGDVVMNHKGGADATEMVRAVEVNPNNRNQEVTGEYTIEAWTKFDFPGRGNTHSSFKWRWYHFDGVDWDQSRRLNNRIYKFRGKAWDWEVDTEFGNYDYLMYADYDMDHPEVVNELRNWGVWYTNTLGLDGFRIDAVKHIKYSFTRDWINHVRSATGKNMFAVAEFWKNDLGAIENYLQKTNWNHSVFDVPLHYNLYNASKSGGNYDMRNIFNGTVVQRHPSHAVTFVDNHDSQPEEALESFVEEWFKPLAYALTLTREQGYPSVFYGDYYGIPTHGVPAMRSKIDPILEARQKYAYGPQHDYLDHPDVIGWTREGDSSHPKSGLATLITDGPGGSKRMYAGLKNAGETWYDITGNRSDTVKIGSDGWGEFHVNDGSVSIYVQK

SEQ ID NO: 26941 - protein, 483 aa, Bacillus sp.
HHNGTNGTMMQYFEWYLPNDGNHWNRLNSDASNLKSKGITAVWIPPAWKGASQNDVGYGAYDLYDLGEFNQKGTVRTKYGTRSQLQAAVTSLKNNGIQVYGDVVMNHKGGADATEMVRAVEVNPNNRNQEVTGDYTIEAWTRFDFPGRGNTHSSFKWRWYHFDGVDWDQSRRLNNRIYKFRGKAWDWEVDTEFGNYDYLMYADYDMDHPEVVNELRNWGVWYTNTLGLDGFRIDAVKHIKYSFTRDWINHVRSATGKNMFAVAEFWKNDLGAIENYLQKTNWNHSVFDVPLHYNLYNASKSGGNYDMRNIFNGTVVQRHPSHAVTFVDNHDSQPEEALESFVEEWFKPLAYALTLTREQGYPSVFYGDYYGIPTHGVPAMRSKIDPILEARQKYAYGPQHDYLDHPDVIGWTREGDSSHPKSGLATLITDGPGGSKRMYAGLKNAGETWYDITGNRSDTVKIGSDGWGEFHVNDGSVSIYVQK

SEQ ID NO: 26942 - protein, 485 aa, Synthetic construct
HHNGTNGTMMQYFEWYLPNDGNHWNRLNSDASNLKSKGITAVWIPPAWKGASQNDVGYGAYDLYDLGEFNQKGTVRTKYGTRSQLQAAVTSLKNNGIQVYGDVVMNHKGGADATEMVRAVEVNPNNRNQEVTGEYTIEAWTRFDFPGRGNTHSSFKWRWYHFDGVDWDQSRRLNNRIYKFRGHGKAWDWEVDTENGNYDYLMYADIDMDHPEVVNELRNWGVWYTNTLGLDGFRIDAVKHIKYSFTRDWINHVRSATGKNMFAVAEFWKNDLGAIENYLQKTNWNHSVFDVPLHYNLYNASKSGGNYDMRNIFNGTVVQRHPLHAVTFVDNHDSQPEEALESFVEEWFKPLAYALTLTREQGYPSVFYGDYYGIPTHGVPAMRSKIDPILEARQKYAYGPQHDYLDHPDVIGWTREGDSSHPKSGLATLITDGPGGSKRMYAGLKNAGETWYDITGNRSDTVKIGSDGWGEFHVNDGSVSIYVQK

SEQ ID NO: 26943 - protein, 485 aa, Synthetic construct
HHNGTNGTMMQYFEWYLPNDGNHWNRLQSDASNLKSKGITAVWIPPAWKGASQNDVGYGAYDLYDLGEFNQKGTVRTKYGTRSQLQAAVTSLKNNGIQVYGDVVMNHKGGADATEMVRAVEVNPNNRNQEVTGEYTIEAWTRFDFPGRGNTHSSFKWRWYHFDGVDWDQSRRLNNRIYKFRGHGKAWDWEVDTENGNYDYLMYADIDMDHPEVVNELRNWGVWYTNTLGLDGFRIDAVKHIKYSFTRDWINHVRSATGKNMFAVAEFWKNDLGAIENYLQKTNWNHSVFDVPLHYNLYNASKSGGNYDMRNIFNGTVVQRHPSHAVTFVDNHDSQPEEALESFVEEWFKPLAYALTLTREQGYPSVFYGDYYGIPTHGVPAMRSKIDPILEARQKYAYGPQHDYLDHPDVIGWTREGDSSHPKSGLATLITDGPGGSKRMYAGLKNAGETWYDITGNRSDTVKIGSDGWGEFHVNDGSVSIYVQK

SEQ ID NO: 26944 - protein, 485 aa, Bacillus sp.
HHNGTNGTMMQYFEWYLPNDGNHWNRLNSDASNLKSKGITAVWIPPAWKGASQNDVGYGAYDLYDLGEFNQKGTVRTKYGTRSQLQSAVTSLKNNGIQVYGDVVMNHKGGADATEMVRAVEVNPNNRNQEVTGEYTIEAWTRFDFPGRGNTHSSFKWRWYHFDGVDWDQSRRLNNRIYKFRGHGKAWDWEVDTEFGNYDYLMYADYDMDHPEVVNELRNWGVWYTNTLGLDGFRIDAVKHIKYSFTRDWINHVRSATGKNMFAVAEFWKNDLGAIENYLQKTNWNHSVFDVPLHYNLYNASKSGGNYDMRNIFNGTVVQRHPSHAVTFVDNHDSQPEEALESFVEEWFKPLAYALTLTREQGYPSVFYGDYYGIPTHGVPAMRSKIDPILEARQKYAYGPQHDYLDHPDVIGWTREGDSSHPKSGLATLITDGPGGSKRMYAGLKNAGETWYDITGNRSDTVKIGSDGWGEFHVNDGSVSIYVQK

SEQ ID NO: 26945 - protein, 483 aa, Bacillus sp.
HHNGTNGTMMQYFEWYLPNDGNHWNRLNSDASNLKSKGITAVWIPPAWKGASQNDVGYGAYDLYDLGEFNQKGTVRTKYGTRSQLQAAVTSLKNNGIQVYGDVVMNHKGGADATEMVRAVEVNPNNRNQEVTGEYTIEAWTRFDFPGRGNTHSSFKWRWYHFDGVDWDQSRKFNNRIYKFRGKAWDWEVDTEFGNYDYLMYADYDMDHPEVVNELRNWGVWYTNTLGLDGFRIDAVKHIKYSFTRDWINHVRSATGKNMFAVAEFWKNDLGAIENYLQKTNWNHSVFDVPLHYNLYNASKSGGNYDMRNIFNGTVVQRHPSHAVTFVDNHDSQPEEALESFVEEWFKPLAYALTLTREQGYPSVFYGDYYGIPTHGVPAMRSKIDPILEARQKYAYGPQHDYLDHPDVIGWTREGDSSHPKSGLATLITDGPGGSKRMYAGLKNAGETWYDITGNRSDTVKIGSDGWGEFHVNDGSVSIYVQK

SEQ ID NO: 26946 - protein, 483 aa, Bacillus sp.
HHNGTNGTMMQYFEWYLPNDGNHWNRLNSDASNLKSKGITAVWIPPAWKGASQNDVGYGAYDLYDLGEFNQKGTVRTKYGTRSQLQAAVTSLKNNGIQVYGDVVMNHKGGADATEMVRAVEVNPNNRNQEVTGEYTIEAWTRFDFPGRGNTHSSFKWRWYHFDGVDWDQSRQLTNRIYKFRGKAWDWEVDTEFGNYDYLMYADYDMDHPEVVNELRNWGVWYTNTLGLDGFRIDAVKHIKYSFTRDWINHVRSATGKNMFAVAEFWKNDLGAIENYLQKTNWNHSVFDVPLHYNLYNASKSGGNYDMRNIFNGTVVQRHPSHAVTFVDNHDSQPEEALESFVEEWFKPLAYALTLTREQGYPSVFYGDYYGIPTHGVPAMRSKIDPILEARQKYAYGPQHDYLDHPDVIGWTREGDSSHPKSGLATLITDGPGGSKRMYAGLKNAGETWYDITGNRSDTVKIGSDGWGEFHVNDGSVSIYVQK

SEQ ID NO: 26947 - protein, 483 aa, Bacillus sp.
HHNGTNGTMMQYFEWYLPNDGNHWNRLNSDASNLKSKGITAVWIPPAWKGASQNDVGYGAYDLYDLGEFNQKGTVRTKYGTRSQLQAAVTSLKNNGIQVYGDVVMNHKGGADATEMVPAVEVNPNNRNQEVTGDYTIEAWTRFDFPGRGNTHSSFKWRWYHFDGVDWDQSRRLNNRIYKFRGKAWDWEVDTEFGNYDYLMYADYDMDHPEVVNELRNWGVWYTNTLGLDGFRIDAVKHIKYSFTRDWINHVRSATGKNMFAVAEFWKNDLGAIENYLQKTNWNHSVFDVPLHYNLYNASKSGGNYDMRNIFNGTVVQRHPSHAVTFVDNHDSQPEEALESFVEEWFKPLAYALTLTREQGYPSVFYGDYYGIPTHGVPAMRSKIDPILEARQKYAYGPQHDYLDHPDVIGWTREGDSSHPKSGLATLITDGPGGSKRMYAGLKNAGETWYDITGNRSDTVKIGSDGWGEFHVNDGSVSIYVQK

SEQ ID NO: 26948 - protein, 483 aa, Bacillus sp.
HHNGTNGTMMQYFEWYLPNDGNHWNRLNSDASNLKSKGITAVWIPPAWKGASQNDVGYGAYDLYDLGEFNQKGTVRTKYGTRSQLQAAVTSLKNNGIQVYGDVVMNHKGGADATEMVRAVEVNPNNRNQEVTGEYTIEAWTRFDFPGRGNTHSSFKWRWYHFDGVDWDQSRRLNNRIYKFRGKAWDWEVDTEFGNYDYLMYADYDMDHPEVVNELRNWGVWYTNTLGLDGFRIDAVKHIKYSFTRDWINHVRSATGKNMFAVAEFWKNDLGAIENYLQKTNWNHSVFDVPLHYNLYNASKSGGNYDMRNIFNGTVVQRHPSHAVTFVDNHDSQPEEALESFVEEWFKPLAYALTLTREQGYPSVFYGDYYGIPTHGVPAMRSKIDPILEARQKYAYGPQHDYLDHHDVIGWTREGDSSHPKSGLATLITDGPGGSKRMYAGLKNAGETWYDITGNRSDTVKIGSDGWGEFHVNDGSVSIYVQK

SEQ ID NO: 26949 - protein, 485 aa, unidentified
HHNGTNGTMMQYFEWYLPNDGNHWNRLNSDASNLKSKGITAVWIPPAWKGASQNDVGYGAYDLYDLGEFNQKGTVRTKYGTRSQLQAAVTSLKNNGIQVYGDVVMNHKGGADATEMVRAVEVNPNNRNQEVTGEYTIEAWTRFDFPGRGNTHSSFKWRWYHFDGVDWDQSRRLNNRIYKFRGHGKAWDWEVDTENGNYDYLMYADIDMDHPEVVNELRNWGVWYTNTLGLDGFRIDAVKHIKYSFTRDWINHVRSATGKNMFAVAEFWKNDLGAIENYLQKTNWNHSVFDVPLHYNLYNASKSGGNYDMRNIFNGTVVQRHPSHAVTFVDNHDSQPEEALESFVEEWFKPLAYALTLTREQGYPSVFYGDYYGIPTHGVPAMRSKIDPILEARQKYAYGPQHDYLDHPDVIGWTREGDSSHPKSGLATLITDGPGGSKRMYAGLKNAGETWYDITGNRSDTVKIGSDGWGEFHVNDGSVSIYVQK

SEQ ID NO: 26950 - protein, 483 aa, Synthetic construct
HHNGTNGTMMQYFEWYLPNDGNHWNRLNSDASNLKSKGITAVWIPPAWKGASQNDVGYGAYDLYDLGEFNQKGTVRTKYGTRSQLQAAVTSLKNNGIQVYGDVVMNHKGGADATEMVRAVEVNPNNRNQEVTGEYTIEAWTQFDFPGRGNTHSSFKWRWYHFDGVDWDQSRRLNNRIYKFRGKAWDWEVDTENGNYDYLMYADIDMDHPEVVNELRNWGVWYTNTLGLDGFRIDAVKHIKYSFTRDWINHVRSATGKNMFAVAEFWKNDLGAIENYLQKTNWNHSVFDVPLHYNLYNASKSGGNYDMRNIFNGTVVQRHPSHAVTFVDNHDSQPEEALESFVEEWFKPLAYALTLTREQGYPSVFYGDYYGIPTHGVPAMRSKIDPILEARQKYAYGPQHDYLDHPDVIGWTREGDSSHPKSGLATLITDGPGGSKRMYAGLKNAGETWYDITGNRSDTVKIGSDGWGEFHVNDGSVSIYVQK

SEQ ID NO: 26951 - protein, 485 aa, Synthetic construct
HHNGTNGTMMQYFEWYLPNDGNHWNRLNSDASNLKSKGITAVWIPPAWKGASQNDVGYGAYDLYDLGEFNQKGTVRTKYGTRSQLQAAVTSLKNNGIQVYGDVVMNHKGGADATEMVRAVEVNPNNRNQEVTGEYTIEAWTRFDFPGRGNTHSSFKWRWYHFDGVDWDQSRRLNNRIYKFRGHGKAWDWEVDTENGNYDYLMYADIDMDHPEVVNELRNWGVWYTNTLGLDGFRIDAVKHIKYSFTRDWINHVRSATGKNMFAVAEFWKNDLGAIENYLAKTNWNHSVFDVPLHYNLYNASKSGGNYDMRNIFNGTVVQRHPSHAVTFVDNHDSQPEEALESFVEEWFKPLAYALTLTREQGYPSVFYGDYYGIPTHGVPAMRSKIDPILEARQKYAYGPQHDYLDHPDVIGWTREGDSSHPKSGLATLITDGPGGSKRMYAGLKNAGETWYDITGNRSDTVKIGSDGWGEFHVNDGSVSIYVQK

SEQ ID NO: 26952 - protein, 463 aa, Archaea
GVIMQAFYWDVPSGGIWWDTIRQKIPEWYDAGISAIWIPPASKGMGGAYSMGYDPYDFFDLGEYDQKGTVETRFGSKQELVNMINTAHAYGMKVIADIVINHRAGGDLEWNPFVNDYTWTKFDFPGRGNTYSSFKWRWYHFDGVDWDESRKLSRIYKFRGIGKAWDWEVDTENGNYDYLMYADLDMDHPEVVTELKNWGKWYVNTTNIDGFRLDAVKHIKFSFFPDWLSYVRSQTGKPLFTVGEYWSYDINKLHNYITKTNGTMSLFDAPLHNKFYTASKSGGAFDMRTLMTNTLMKDQPTLAVTFVDNHDTEPGQALQSWVDPWFKPLAYAFILTRQEGYPCVFYGDYYGIPQYNIPSLKSKIDPLLIARRDYAYGTQHDYLDHSDIIGWTREGVTEKPGSGLAALITDGPGGSKWMYVGKQHAGKVFYDLTGNRSDTVTINSDGWGEFKVNGGSVSVWVPR

SEQ ID NO: 26953 - protein, 482 aa, Bacillus sp.
HHNGTNGTMMQYFEWYLPNDGNHWNRLNSDASNLKSKGITAVWIPPAWKAVSQNDVGYGAYDLYDLGEFNQKGTVRTKYGTRSQLQAAVTSLKNNGIQVYGDVVMNHKGGADATEMVRAVEVNPNNRNQEVTGEYTIEAWTRFDFPGRGNTHSSFKWRWYHFDGVDWDQSRRFNRIYKFRGKAWDWEVDTEFGNYDYLMYADYDMDHPEVVNELRNWGVWYTNTLGLDGFRIDAVKHIKYSFTRDWINHVRSATGKNMFAVAEFWKNDLGAIENYLQKTNWNHSVFDVPLHYNLYNASKSGGNYDMRNIFNGTVVQRHPSHAVTFVDNHDSQPEEALESFVEEWFKPLAYALTLTREQGYPSVFYGDYYGIPTHGVPAMRSKIDPILEARQKYAYGPQHDYLDHPDVIGWTREGDSSHPKSGLATLITDGPGGSKRMYAGLKNAGETWYDITGNRSDTVKIGSDGWGEFHVNDGSVSIYVQK

SEQ ID NO: 26954 - protein, 482 aa, Bacillus sp.
HHNGTNGTMMQYFEWYLPNDGNHWNRLNSDASNLKSKGITAVWIPPAWKGVSQNDVGYGAYDLYDLGEFNQKGTVRTKYGTRSQLQAAVTSLKNNGIQVYGDVVMNHKGGADATEMVRAVEVNPNNRNQEVTGEYTIEAWTRFDFPGRGNTHSSFKWRWYHFDGVDWDQSRELNRIYKFRGKAWDWEVDTEFGNYDYLMYADYDMDHPEVVNELRNWGVWYTNTLGLDGFRIDAVKHIKYSFTRDWINHVRSATGKNMFAVAEFWKNDLGAIENYLQKTNWNHSVFDVPLHYNLYNASKSGGNYDMRNIFNGTVVQRHPSHAVTFVDNHDSQPEEALESFVEEWFKPLAYALTLTREQGYPSVFYGDYYGIPTHGVPAMRSKIDPILEARQKYAYGPQHDYLDHPDVIGWTREGDSSHPKSGLATLITDGPGGSKRMYAGLKNAGETWYDITGNRSDTVKIGSDGWGEFHVNDGSVSIYVQK

SEQ ID NO: 26955 - protein, 484 aa, Bacillus sp.
HHNGTNGTMMQYFEWYLPNDGNHWNRLNSDASNLKSKGITAVWIPPAWKGSQNDVGYGAYDLYDLGEFNQKGTVRTKYGTRSQLQAAVTSLKNNGIQVYGDVVMNHKGGADATEMVRAVEVNPNNRNQEVTGEYTIEAWTRFDFPGRGNTHSSFKWRWYHFDGVDWDQSRDLTNRIYKFRGHGKAWDWEVDTEFGNYDYLMYADYDMDHPEVVNELRNWGVWYTNTLGLDGFRIDAVKHIKYSFTRDWINHVRSATGKNMFAVAEFWKNDLGAIENYLQKTNWNHSVFDVPLHYNLYNASKSGGNYDMRNIFNGTVVQRHPSHAVTFVDNHDSQPEEALESFVEEWFKPLAYALTLTREQGYPSVFYGDYYGIPTHGVPAMRSKIDPILEARQKYAYGPQHDYLDHPDVIGWTREGDSSHPKSGLATLITDGPGGSKRMYAGLKNAGETWYDITGNRSDTVKIGSDGWGEFHVNDGSVSIYVQK

SEQ ID NO: 26956 - protein, 484 aa, Bacillus sp.
HHNGTNGTMMQYFEWYLPNDGNHWNRLNSDASNLKSKGITAVWIPPAWKGASQNDVGYGAYDLYDLGEFNQKGTVRTKYGTRSQLQAAVTSLKNNGIQVYGDVVMNHKGGADATEMVRAVEVNPNNRNQEVTGEYTIEAWTRFDFPGRGNTHSSFKWRWYHFDGVDWDQSRLNNRIYKFRGHGKAWDWEVDTEFGNYDYLMYADYDMDHPEVVNELRNWGVWYTNTLGLDGFRIDAVKHIKYSFTRDWINHVRSATGKNMFAVAEFWKNDLGAIENYLQKTNWNHSVFDVPLHYNLYNASKSGGNYDMRNIFNGTVVQRHPSHAVTFVDNHDSQPEEALESFVEEWFKPLAYALTLTREQGYPSVFYGDYYGIPTHGVPAMRSKIDPILEARQKYAYGPQHDYLDHPDVIGWTREGDSSHPKSGLATLITDGPGGSKRMYAGLKNAGETWYDITGNRSDTVKIGSDGWGEFHVNDGSVSIYVQK

SEQ ID NO: 26957 - protein, 482 aa, Synthetic construct
HHNGTNGTMMQYFEWYLPNDGNHWNRLNSDASNLKSKGITAVWIPPAWKGASNDVGYGAYDLYDLGEFNQKGTVRTKYGTRSQLQAAVTSLKNNGIQVYGDVVMNHKGGADATEMVRAVEVNPNNRNQEVTGEYTIEAWTRFDFPGRGNTHSSFKWRWYHFDGVDWDQSRRLNNRIYKFRGKAWDWEVDTENGNYDYLMYADIDMDHPEVVNELRNWGVWYTNTLGLDGFRIDAVKHIKYSFTRDWINHVRSATGKNMFAVAEFWKNDLGAIENYLQKTNWNHSVFDVPLHYNLYNASKSGGNYDMRNIFNGTVVQRHPSHAVTFVDNHDSQPEEALESFVEEWFKPLAYALTLTREQGYPSVFYGDYYGIPTHGVPAMRSKIDPILEARQKYAYGPQHDYLDHPDVIGWTREGDSSHPKSGLATLITDGPGGSKRMYAGLKNAGETWYDITGNRSDTVKIGSDGWGEFHVNDGSVSIYVQK

SEQ ID NO: 26958 - protein, 484 aa, Bacillus sp.
HHNGTNGTMMQYFEWYLPNDGNHWNRLNSDASNLKSKGITAVWIPPAWKGVSQNDVGYGAYDLYDLGEFNQKGTVRTKYGTRSQLQAAVTSLKNNGIQVYGDVVMNHKGGADATEMVRAVEVNPNNRNQEVTGEYTIEAWTRFDFPGRGNTHSSFKWRWYHFDGVDWDQSRELNRIYKFRGHGKAWDWEVDTEFGNYDYLMYADYDMDHPEVVNELRNWGVWYTNTLGLDGFRIDAVKHIKYSFTRDWINHVRSATGKNMFAVAEFWKNDLGAIENYLQKTNWNHSVFDVPLHYNLYNASKSGGNYDMRNIFNGTVVQRHPSHAVTFVDNHDSQPEEALESFVEEWFKPLAYALTLTREQGYPSVFYGDYYGIPTHGVPAMRSKIDPILEARQKYAYGPQHDYLDHPDVIGWTREGDSSHPKSGLATLITDGPGGSKRMYAGLKNAGETWYDITGNRSDTVKIGSDGWGEFHVNDGSVSIYVQK

SEQ ID NO: 26959 - protein, 484 aa, Bacillus sp.
HHNGTNGTMMQYFEWYLPNDGNHWNRLNSDASNLKSKGITAVWIPPAWKAVSQNDVGYGAYDLYDLGEFNQKGTVRTKYGTRSQLQAAVTSLKNNGIQVYGDVVMNHKGGADATEMVRAVEVNPNNRNQEVTGEYTIEAWTRFDFPGRGNTHSSFKWRWYHFDGVDWDQSRRFNRIYKFRGHGKAWDWEVDTEFGNYDYLMYADYDMDHPEVVNELRNWGVWYTNTLGLDGFRIDAVKHIKYSFTRDWINHVRSATGKNMFAVAEFWKNDLGAIENYLQKTNWNHSVFDVPLHYNLYNASKSGGNYDMRNIFNGTVVQRHPSHAVTFVDNHDSQPEEALESFVEEWFKPLAYALTLTREQGYPSVFYGDYYGIPTHGVPAMRSKIDPILEARQKYAYGPQHDYLDHPDVIGWTREGDSSHPKSGLATLITDGPGGSKRMYAGLKNAGETWYDITGNRSDTVKIGSDGWGEFHVNDGSVSIYVQK

SEQ ID NO: 26960 - protein, 484 aa, Bacillus sp.
HHNGTNGTMMQYFEWYLPNDGNHWNRLNSDASNLKSKGITAVWIPPAWKGASQNDVGYGAYDLYDLGEFNQGTVRTKYGTRSQLQAAVTSLKNNGIQVYGDVVMNHKGGADATEMVSAVEVNPNNRNQEVTGDYTIEAWTRFDFPGRGNTHSSFKWRWYHFDGVDWDQSRRLNNRIYKFRAHGKAWDWEVDTEFGNYDYLMYADYDMDHPEVVNELRNWGVWYTNTLGLDGFRIDAVKHIKYSFTRDWINHVRSATGKNMFAVAEFWKNDLGAIENYLQKTNWNHSVFDVPLHYNLYNASKSGGNYDMRNIFNGTVVQRHPSHAVTFVDNHDSQPEEALESFVEEWFKPLAYALTLTREQGYPSVFYGDYYGIPTHGVPAMRSKIDPILEARQKYAYGPQHDYLDHPDVIGWTREGDSSHPKSGLATLITDGPGGSKRMYAGLKNAGETWYDITGNRSDTVKIGSDGWGEFHVNDGSVSIYVQK

SEQ ID NO: 26961 - protein, 484 aa, Synthetic construct
HNGTNGTMMQYFEWYLPNDGNHWNRLNSDASNLKSKGITAVWIPPAWKGASQNDVGYGAYDLYDLGEFNQKGTVRTKYGTRSQLQAAVTSLKNNGIQVYGDVVMNHKGGADATEMVRAVEVNPNNRNQEVTGEYTIEAWTRFDFPGRGNTHSSFKWRWYHFDGVDWDQSRRLNNRIYKFRGHGKAWDWEVDTENGNYDYLMYADIDMDHPEVVNELRNWGVWYTNTLGLDGFRIDAVKHIKYSFTRDWINHVRSATGKNMFAVAEFWKNDLGAIENYLQKTNWNHSVFDVPLHYNLYNASKSGGNYDMRNIFNGTVVQRHPSHAVTFVDNHDSQPEEALESFVEEWFKPLAYALTLTREQGYPSVFYGDYYGIPTHGVPAMRSKIDPILEARQKYAYGPQHDYLDHPDVIGWTREGDSSHPKSGLATLITDGPGGSKRMYAGLKNAGETWYDITGNRSDTVKIGSDGWGEFHVNDGSVSIYVQK

SEQ ID NO: 26962 - protein, 481 aa, Bacillus sp.
VNGTLMQYFEWYTPNDGQHWKRLQNDAEHLSDIGITAVWIPPAYKGTSQADVGYGAYDLYDLGEFHQKGTVRTKYGTKGELQSAIKSLHSRDINVYGDVVINHKGGADATEDVTAVEVDPADRNRVISGEHLIKAWTHFHFPGRGSTYSDFKWHWYHFDGTDWDESRKLNRIYKFQGKTWDWEVSNEFGNYDYLMYADIDYDHPDVVAEIKRWGTWYANELQLDGFRLDAVKHIKFSFLRDWVNHVREKTGKEMFTVAEYWSNDLGALENYLNKTNFNHSVFDVPLHYQFHAASTQGGGYDMRKLLNGTVVSKHPLKSVTFVDNHDTQPGQSLESTVQTWFKPLAYAFILTRESGYPQVFYGDMYGTKGDSQREIPALKHKIEPILKARKQYAYGAQHDYFDHHDIVGWTREGDSSVANSGLAALITDGPGGAKRMYVGRQNAGETWHDITGNRSEPVVINSEGWGEFHVNGGSVSIYVQR

SEQ ID NO: 26963 - protein, 481 aa, Bacillus amyloliquefaciens
VNGTLMQYFEWYTPNDGQHWKRLQNDAEHLSDIGITAVWIPPAYKGTSQADVGYGAYDLYDLGEFHQKGTVRTKYGTKGELQSAIKSLHSRDINVYGDVVINHKGGADATEDVTAVEVDPADRNRVISGEHLIKAWTHFHFPGRGSTYSDFKWHWYHFDGTDWDESRKLNRIYRFQGKAWDWEVSNENGNYDYLMYADFDYDNPDVAAEIKRWGTWYANELQLDGFRLDAVKHIKFSFLRDWVNHVREKTGKEMFTVAEYWQNDLGALENYLNKTNFNHSVFDVPLHYQFHAASTQGGGYDMRKLLNGTVVSKHPLKSVTFVDNHDTQPGQSLESTVQTWFKPLAYAFILTRESGYPQVFYGDMYGTKGDSQREIPALKHKIEPILKARKQYAYGAQHDYFDHHDIVGWTREGDSSVANSGLAALITDGPGGAKRMYVGRQNAGETWHDITGNRSEPVVINSEGWGEFHVNGGSVSIYVQR

SEQ ID NO: 26964 - protein, 481 aa, Bacillus licheniformis
LNGTLMQYFEWYTPNDGQHWKRLQNDSAYLAEHGITAVWIPPAYKGTSQADVGYGAYDLYDLGEFHQKGTVRTKYGTKGELQSAIKSLHSRDINVYGDVVINHKGGADATEDVTAVEVDPADRNRVISGEYLIKAWTHFHFPGRGNTYSDFKWHWYHFDGTDWDESRKLNRIYKFQGKAWDWEVSSENGNYDYLMYADIDYDHPDVVAEIKRWGTWYANELQLDGFRLDAVKHIKFSFLRDWVNHVREKTGKEMFTVAEYWQNDLGALENYLNKTNFNHSVFDVPLHYQFHAASTQGGGYDMRKLLNGTVVSKHPLKSVTFVDNHDTQPGQSLESTVQTWFKPLAYAFILTRESGYPQVFYGDMYGTKGDSQREIPSLKHKIEPILKARKQYAYGAQHDYFDHHDIVGWTREGDSSVANSGLAALITDGPGGAKRMYVGRQNAGETWHDITGNRSEPVVINSEGWGEFHVNGGSVSIYVQR

SEQ ID NO: 26965 - protein, 480 aa, unidentified
VNGTLMQYFEWYTPNDGQHWKRLQNDAEHLSDIGITAVWIPPAYKAISQADVGYGAYDLYDLGEFHQKGTVRTKYGTKGELQSAIKSLHSRDINVYGDVVINHKAGADATEDVTAVEVDPADRNRVISGEHLIKAWTHFHFPGRGSTYSDFKWYWYHFDGTDWDESRKLNRIYKFQGKTWDWEVSNEFGNYDYLMYADFDYDHPDVVAEIKRWGTWYANELQLDGFRLDAVKHIKFSFLRDWVNHVREKTGKEMFTVAEYWSNDLGALENYLNKTNFNHSVFDVPLHYQFHAASTQGGGYDMRKLLNGTVVSKHPLKSVTFVDNHDTQPGQSLESTVQTWFKPLAYAFILTRESGYPQVFYGDMYGTKGDSQREIPALKHKIEPILKARKQYAYGAQHDYFDHHDIVGWTREGDSSVANSGLAALITDGPGGAKRMYVGRQNAGETWHDITGNRSEPVVINSEGWGEFHVNGGSVSIYVQ

SEQ ID NO: 26966 - protein, 480 aa, unidentified
VNGTLMQYFEWYTPNDGQHWKRLQNDAEHLSDIGITAVWIPPAYKGTSQADVGYGAYDLYDLGEFHQKGTVRTKYGTKGELQSAIKSLHSRDINVYGDVVINHKGGADATEDVTAVEVDPADRNRVISGEHLIKAWTHFHFPGRGSTYSDFKWYWYHFDGTDWDESRKLNRIYKFQGKTWDWEVSNEFGNYDYLMYADIDYDHPDVVAEIKRWGTWYANELQLDGFRLDAVKHIKFSFLRDWVNHVREKTGKEMFTVAEYWSNDLGALENYLNKTNFNHSVFDVPLHYQFHAASTQGGGYDMRKLLNGTVVSKHPLKSVTFVDNHDTQPGQSLESTVQTWFKPLAYAFILTRESGYPQVFYGDMYGTKGDSQREIPALKHKIEPILKARKQYAYGAQHDYFDHHDIVGWTREGDSSVANSGLAALITDGPGGAKRMYVGRQNAGETWHDITGNRSEPVVINSEGWGEFHVNGGSVSIYVQ

SEQ ID NO: 26967 - protein, 480 aa, Bacillus sp.
APINETMMQYFEWDLPNDGTLWTKVKNEAANLSSLGITALWLPPAYKGTSQSDVGYGVYDLYDLGEFNQKGTIRTKYGTKTQLERAIRSLKANGIQVYADVVFNHKAGADQTEFVDAVEVDPSNRNQEVSGTYQIEAWTKFDFPGRGNTYSSFKWRWYHFDGTDWDESRKLNRIYKFRGKAWDWEVDTENGNYDYLMFADLDMDHPEVVTELKNWGTWYVNTTNIDGFRLDAVKHIKFSFMRDWLTYVRNQTGKNLFAVGEFWSYDVNKLHNYITKTNGSMSLFDAPLHNNFYTASKSSGYFDMRNLLNGTLVQRHPSLAVTLVDNHDTQPGQSLQSWVEPWFKPLAYAFILTRQEGYPCVFYGDYYGIPKYNIPGLKSKIDPLLIARRDYAYGTQRDYIDHQDIIGWTREGIDTKPNSGLAALITDGPGGSKWMYVGKKHAGKVFYDLTGNRSDTVTINADGWGEFKVNGGSVSIWVAK

SEQ ID NO: 26968 - protein, 480 aa, Bacillus sp.
APINETMMQYFEWDLPNDGTLWNRLHNNAQNLKNAGITALWLPPAYKGTSQSDVGYGVYDLYDLGEFNQKGTIRTKYGTKTQLERAIRSLKANGIQVYADVVFNHKAGADGTEFVDAVEVDPSNRNQETSGTYQIQAWTKFDFPGRGNTYSSFKWRWYHFDGTDWDESRKLNRIYKFRGKAWDWEVDTENGNYDYLMFADLDMDHPEVVTELKNWGTWYVNTTNIDGFRLDAVKHIKFSFMRDWLTYVRNQTGKNLFAVGEFWSYDVNKLHNYITKTNGSMSLFDAPLHNNFYTASKSSGYFDMRYLLNNTLMKDQPSLAVTLVDNHDTQPGQSLQSWVEPWFKPLAYAFILTRQEGYPCVFYGDYYGIPKYNIPGLKSKIDPLLIARRDYAYGTQRDYIDHQDIIGWTREGIDTKPNSGLAALITDGPGGSKWMYVGKKHAGKVFYDLTGNRSDTVTINADGWGEFKVNGGSVSIWVAK

SEQ ID NO: 26969 - protein, 480 aa, Bacillus sp.
APINETMMQYFEWDLPNDGTLWTKVKNEAANLSSLGITALWLPPAYKGTSQSDVGYGVYDLYDLGEFNQKGTIRTKYGTKTQLERAIRSLKANGIQVYADVVFNHKAGADGTEFVDAVEVDPSNRNQEVSGTYQIEAWTKFDFPGRGNTYSSFKWRWYHFDGTDWDESRKLNRIYKFRGKAWDWEVDTENGNYDYLMFADLDMDHPEVVTELKNWGTWYVNTTNIDGFRLDAVKHIKFSFMRDWLTYVRNQTGKNLFAVGEFWSYDVNKLHNYITKTNGSMSLFDAPLHNNFYTASKSSGYFDMRNLLNGTLVQRHPSHAVTLVDNHDTQPGQSLQSWVEPWFKPLAYAFILTRQEGYPCVFYGDYYGIPKYNIPGLKSKIDPLLIARRDYAYGTQRDYIDHQDIIGWTREGIDTKPNSGLAALITDGPGGSKWMYVGKKHAGKVFYDLTGNRSDTVTINADGWGEFKVNGGSVSIWVAK

SEQ ID NO: 26970 - protein, 480 aa, Bacillus sp.
APINETMMQYFEWDLPNDGTLWNRLHNNAQNLKNAGITALWLPPAYKGTSQSDVGYGVYDLYDLGEFNQKGTIRTKYGTKTQYIQAIQAAKAAGMQVYADVVFNHKAGADGTEFVDAVEVDPSNRNQEVSGTYQIEAWTKFDFPGRGNTYSSFKWRWYHFDGTDWDESRKLNRIYKFRGKAWDWEVDTENGNYDYLMFADLDMDHPEVVTELKNWGTWYVNTTNIDGFRLDAVKHIKFSFMRDWLTYVRNQTGKNLFAVGEFWSYDVNKLHNYITKTNGSMSLFDAPLHNNFYTASKSSGYFDMRNLLNGTLVQRHPSHAVTLVDNHDTQPGQSLQSWVEPWFKPLAYAFILTRQEGYPCVFYGDYYGIPKYNIPGLKSKIDPLLIARRDYAYGTQRDYIDHQDIIGWTREGIDTKPNSGLAALITDGPGGSKWMYVGKKHAGKVFYDLTGNRSDTVTINADGWGEFKVNGGSVSIWVAK

SEQ ID NO: 26971 - protein, 480 aa, Geobacillus stearothermophilus
NGTLMQYFEWYTPNDGQHWKRLQNDSAYLAEHGITAVWIPPAYKGTSQADVGYGAYDLYDLGEFHQKGTVRTKYGTKGELQSAIKSLHSRDINVYGDVVINHKGGADATEDVTAVEVDPADRNRVISGEYLIKAWTHFHFPGRGSTYSDFKWHWYHFDGTDWDESRKLNRIYKFQGKAWDWEVDTENGNYDYLMYADIDYDHPDVVAEIKRWGTWYANELQLDGFRLDAVKHIKFSFLRDWVNHVRSQTGKPLFTVGEYWSYDINKLHNYITKTNGTMSLFDAPLHNKFYTASKSGGAFDMRTLMTNTLMKDQPTLAVTFVDNHDTEPGQALQSWVDPWFKPLAYAFILTRQEGYPCVFYGDYYGIPQYNIPSLKSKIDPLLIARRDYAYGTQHDYLDHSDIIGWTREGVTEKPGSGLAALITDGPGGSKWMYVGKQHAGKVFYDLTGNRSDTVTINSDGWGEFKVNGGSVSVWVPRKTT

SEQ ID NO: 26972 - protein, 482 aa, Synthetic construct
APVNGTMMQYFEWDLPNDGTLWTKVKNEASSLSALGITALWLPPAYKGTSQADVGYGVYDLYDLGEFNQKGTIRTKYGTKTQYLQAIQAAKSAGMQVYADVVFNHKAGADYTENVTAVEVNPSNRNQETSGEYNIQAWTGFNFPGRGTTYSNFKWQWFHFDGTDWDQSRSLSRIFKFRGTGKAWDWEVSSENGNYDYLMYADIDMDHPEVVAELKNWGKWYVNTTNVDGFRLDAVKHIKYSFFPDWLSYVRNQTGKNLFAVGEFWGYDVNKLHNYITKTNGAMSLFDAPLHNNFYIASKSSGYFDMRYLLNNTLMKDQPALAVTLVDNHDTQPGQSLQSWVEPWFKPLAYAFILTRQEGYPCVFYGDYYGIPKYNIPGLKSKIDPLLIARRDYAYGTQRDYIDHQDIIGWTREGIDAKPNSGLAALITDGPGGSKWMYVGKRHAGKVFYDLTGNRSDTVTINADGWGEFKVNGGSVSIWVAK

SEQ ID NO: 26973 - protein, 535 aa, Anoxybacillus flavithermus
YTIIATLIISFFTPFSTAQANTAPVNGTMMQYFEWDLPNDGTLWTKVKNEASSLSALGITALWLPPAYKGTSQADVGYGVYDLYDLGEFNQKGTIRTKYGTKTQYLQAIQAAKSAGMQVYADVVFNHKAGADSTEWVDAVEVNPSNRNQETSGTYQIQAWTKFDFPGRGNTYSSFKWRWYHFDGTDWDESRKLNRIYKFRGTGKAWDWEVDTENGNYDYLMFADLDMDHPEVVAELKNWGKWYVNTTNVDGFRLDAVKHIKYSFFPDWLSYVRNQTGKNLFAVGEFWGYDVNKLHNYITKTNGAMSLFDAPLHNNFYIASKSSGYFDMRYLLNNTLMKDQPALAVTLVDNHDTQPGQSLQSWVEPWFKPLAYAFILTRQEGYPCVFYGDYYGIPKYNIPGLKSKIDPLLIARRDYAYGTQRDYIDHQDIIGWTREGIDAKPNSGLAALITDGPGGSKWMYVGKRHAGKVFYDLTGNRSDTVTINADGWGEFKVNGGSVSIWVAKTSNVTFTVNNATTVYGQNVYVVGNIPELGNW

SEQ ID NO: 26974 - protein, 478 aa, Cytophaga sp.
APINETMMQYFEWDLPNDGTLWTKVKNEAANLSSLGITALWLPPAYKGTSQSDVGYGVYDLYDLGEFNQKGTIRTKYGTKTQYIQAIQAAKAAGMQVYADVVFNHKAGADGTEFVDAVEVDPSNRNQETSGTYQIQAWTKFDFPGRGNTYSSFKWRWYHFDGTDWDESRKLNRIYKFTGKAWDWEVDTENGNYDYLMFADLDMDHPEVVTELKNWGTWYVNTTNIDGFRLDAVKHIKYTFFPDWLTYVRNQTGKNLFAVGEFWSYDVNKLHNYITKTNGSMSLFDAPLHNNFYTASKSSGYFDMRYLLNNTLMKDQPSLAVTLVDNHDTQPGQSLQSWVEPWFKPLAYAFILTRQEGYPCVFYGDYYGIPKYNIPGLKSKIDPLLIARRDYAYGTQRDYIDNPDVIGWTREGDSTKAKSGLATVITDGPGGSKRMYVGTSNAGEIWYDLTGNRTDKITIGSDGYATFPVNGGSVSVWV

SEQ ID NO: 26975 - protein, 478 aa, Aspergillus westerdijkiae
ATPAQWRSQSIYFLLTDRFARDDGSTTATCNTEDRKYCGGTWQGIIDQLDYIQGMGFTAIWITPVTAQLTEDTKYGDAYHGYWQQDIYSLNENYGTADDLKALADALHERDMYLMVDVVANHMGYAGAGDSVDYSVFNPFNSQDYFHSFCLIQDYNDQTQSEDCWLGDNSVSLPDLDTTKSEVQDIWYDWVGGLVSNYSIDGLRIDTVKHVQKEFWPGYNDAAGVYCIGEILDGDASYTCPYQEVLDGVLNYPIYYPLLNAFKSTSGSISDLYNMINTVKSDCPDSTLMGTFIENHDNPRFASYTDDIALAKNVAAFTILADGIPIVYAGQEQHYAGGEDPANREATWLGKYNTDSELYKLIAASNAIRNHAISTDKEYVNYKNYPIYKDDSTIAMRKGFDGAQIITVLSNQGSSGSSYTLSLGDTGFSSGDKLTEIYTCTAVTVDSDGKVPVPMDGGAPRALFPTEKLSGSSLCSGS

SEQ ID NO: 26976 - protein, 483 aa, Bacillus sp.
HHNGTNGTMMQYFEWYLPNDGNHWNRLNSDASNLKSKGITAVWIPPAWKGASQNDVGYGAYDLYDLGEFNQKGTVRTKYGTRSQLQAAVTSLKNNGIQVYGDVVMNHKGGADATEMVRAVEVNPNNRNQEVTGEYTIEAWTRFDFPGRGNTHSSFKWRWYHFDGVDFDQSRQLDNRIYKFRGKAWDWEVDTEFGNYDYLMYADYDMDHPEVVNELRNWGVWYTNTLGLDGFRIDAVKHIKYSFTRDWINHVRSATGKNMFAVAEFWKNDLGAIENYLQKTNWNHSVFDVPLHYNLYNASKSGGNYDMRNIFNGTVVQRHPSHAVTFVDNHDSQPEEALESFVEEWFKPLAYALTLTREQGYPSVFYGDYYGIPTHGVPAMRSKIDPILEARQKYAYGPQHDYLDHPDVIGWTREGDSSHPKSGLATLITDGPGGSKRMYAGLKNAGETWYDITGNRSDTVKIGSDGWGEFHVNDGSVSIYVQK

SEQ ID NO: 26977 - protein, 485 aa, Bacillus sp.
HHNGTNGTMMQYFEWYLPNDGNHWNRLNSDASNLKSKGITAVWIPPAWKGASQNDVGYGAYDLYDLGEFNQKGTVRTKYGTRSQLQAAVTSLKNNGIQVYGDVVMNHKGGADATEMVRAVEVNPNNRNQEVTGEYTIEAWTRFDFPGRGNTHSSFKWRWYHFDGVDWDQSRRLNNRIYKFRGHGKAWDWEVDTEFGNYDYLMYADYDMDHPEVVNELRNWGVWYTNTLGLDGFRIDAVKHIKYSFTRDWINHVRSATGKNMFAVAEFWKNDLGAIENYLQKTNWNHSVFDVPLHYNLYNASKSGGNYDMRNIFNGTVVQRHPSHAVTFVDNHDSQPEEALESFVDPWFKPLAYALTLTREQGYPSVFYGDYYGIPTHGVPAMRSKIDPILEARQKYAYGPQHDYLDHPDVIGWTREGDSSHPKSGLATLITDGPGGSKRMYAGLKNAGETWYDITGNRSDTVKIGSDGWGEFHVNGGSVSIYVQK

SEQ ID NO: 26978 - protein, 483 aa, Bacillus sp.
HHNGTNGTMMQYFEWYLPNDGNHWNRLNSDASNLKSKGITAVWIPPAWKGASQNDVGYGAYDLYDLGEFNQKGTVRTKYGTRSQLQAAVTSLKNNGIQVYGDVVMNHKGGADATEMVRAVEVNPNNRNQEVTGEYTIEAWTRFDFPGRGNTHSSFKWRWYHFDGVDWDQSRNVNNRIYKFRGKAWDWEVDTEFGNYDYLMYADYDMDHPEVVNELRNWGVWYTNTLGLDGFRIDAVKHIKYSFTRDWINHVRSATGKNMFAVAEFWKNDLGAIENYLQKTNWNHSVFDVPLHYNLYNASKSGGNYDMRNIFNGTVVQAHPNHAVTFVDNHDSQPEEALESFVEEWFKPLAYALTLTREQGYPSVFYGDYYGIPTHGVPAMRSKIDPILEARQKYAYGPQHDYLDHPDVIGWTREGDSSHPKSGLATLITDGPGGSKRMYAGLKNAGETWYDITGNRSDTVKIGSDGWGEFHVNDGSVSIYVQK

SEQ ID NO: 26979 - protein, 483 aa, Bacillus sp.
HHNGTNGTMMQYFEWYLPNDGNHWNRLNSDASNLKSKGITAVWIPPAWKGASQNDVGYGAYDLYDLGEFNQKGTVRTKYGTRSQLQAAVTSLKNNGIQVYGDVVMNHKGGADATEMVRAVEVNPNNRNQEVTGEYTIEAWTRFDFPGRGNTHSSFKWRWYHFDGVDWDQSRNVNNRIYKFRGKAWDWEVDTEFGNYDYLMYADYDMDHPEVVNELRNWGVWYTNTLGLDGFRIDAVKHIKYSFTRDWINHVRSATGKNMFAVAEFWKNDLGAIENYLQKTNWNHSVFDVPLHYNLYNASKSGGNYDMRNIFNGTVVQRHPSHAVTFVDNHDSQPEEALESFVEEWFKPLAYALTLTREQGYPSVFYGDYYGIPTHGVPAMRSKIDPILEARQKYAYGPQHDYLDHPDVIGWTREGDSSHPKSGLATLITDGPGGSKRMYAGLKNAGETWYDITGNRSDTVKIGSDGWGEFHVNDGSVSIYVQK

SEQ ID NO: 26980 - protein, 483 aa, Bacillus sp.
HHNGTNGTMMQYFEWYLPNDGNHWNRLNSDASNLKSKGITAVWIPPAWKASSQNDVGYGAYDLYDLGEFNQKGTVRTKYGTRSQLQAAVTSLKNNGIQVYGDVVMNHKGGADATEMVRAVEVNPNNRNQEVTGEYTIEAWTRFDFPGRGNTHSSFKWRWYHFDGVDWDQSRDLQNRIYKFRGKAWDWEVDTEFGNYDYLMYADYDMDHPEVVNELRNWGVWYTNTLGLDGFRIDAVKHIKYSFTRDWINHVRSATGKNMFAVAEFWKNDLGAIENYLQKTNWNHSVFDVPLHYNLYNASKSGGNYDMRNIFNGTVVQRHPSHAVTFVDNHDSQPEEALESFVEEWFKPLAYALTLTREQGYPSVFYGDYYGIPTHGVPAMRSKIDPILEARQKYAYGPQHDYLDHPDVIGWTREGDSSHPKSGLATLITDGPGGSKRMYAGLKNAGETWYDITGNRSDTVKIGSDGWGEFHVNDGSVSIYVQK

SEQ ID NO: 26981 - protein, 485 aa, Synthetic construct
HHNGTNGTMMQYFEWYLPNDGNHWNRLNSDASNLKSKGITAVWIPPAWKGASQNDVGYGAYDLYDLGEFNQKGTVRTKYGTRSQLQAAVTSLKNRGIQVYGDVVMNHKGGADATEMVRAVEVNPNNRNQEVTGEYTIEAWTRFDFPGRGNTHSSFKWRWYHFDGVDWDQSRRLNNRIYKFRGHGKAWDWEVDTENGNYDYLMYADIDMDHPEVVNELRNWGVWYTNTLGLDGFRIDAVKHIKYSFTRDWINHVRSATGKNMFAVAEFWKNDLGAIENYLQKTNWNHSVFDVPLHYNLYNASKSGGNYDMRNIFNGTVVQRHPSHAVTFVDNHDSQPEEALESFVEEWFKPLAYALTLTREQGYPSVFYGDYYGIPTHGVPAMRSKIDPILEARQKYAYGPQHDYLDHPDVIGWTREGDSSHPKSGLATLITDGPGGSKRMYAGLKNAGETWYDITGNRSDTVKIGSDGWGEFHVNDGSVSIYVQK

SEQ ID NO: 26982 - protein, 485 aa, Bacillus sp.
HHNGTNGTMMQYFEWYLPNDGNHWNRLNSDASNLKSKGITAVWIPPAWKGASQNDVGYGAYDLYDLGEFNQKGTVRTKYGTRSQLQAAVTSLKNNGIQVYGDVVMNHKGGADATEMVRAVEVNPNNRNQEVTGEYTIEAWTRFDFPGRGNTHSSFKWRWYHFDGVDWDQSRRLNNRIYKFRGHGKAWDWEVDTEFGNYDYLMYADYDMDHPEVVNELRNWGVWYTNTLGLDGFRIDAVKHIKYSFTRDWINHVRSATGKNMFAVAEFWKNDLGAIENYLQKTNWNHSVFDVPLHYNLYNASQSGGNYDMRNIFNGTVVQRHPSHAVTFVDNHDSQPEEALESFVEEWFKPLAYALTLTREQGYPSVFYGDYYGIPTHGVPAMRSKIDPILEARQKYAYGPQHDYLDHPDVIGWTREGDSSHPKSGLATLITDGPGGSKRMYAGLKNAGETWYDITGNRSDTVKIGSDGWGEFHVNGQSVSIYVQK

SEQ ID NO: 26983 - protein, 485 aa, Bacillus sp.
HHNGTNGTMMQYFEWYLPNDGNHWNRLNSDASNLKSKGITAVWIPPAWKGASQNDVGYGAYDLYDLGEFNQKGTVRTKYGTRSQLQAAVTSLKNNGIQVYGDVVMNHKGGADATEMVRAVEVNPNNRNQEVTGEYTIEAWTRFDFPGRGNTHSSFKWRWYHFDGVDWDQSRRLNNRIYKFRGHGKAWDWEVDMEFGNYDYLMYADYDMDHPEVVNELRNWGVWYTNTLGLDGFRIDAVKHIKYSFTRDWINHVRSATGKNMFAVAEFWKNDLGAIENYLQKTNWNHSVFDVPLHYNLYNASKSGGNYDMRNIFNGTVVQRHPSHAVTFVDNHDSQPEEALESFVEEWFKPLAYALTLTREQGYPSVFYGDYYGIPTHGVPAMRSKIDPILEARQKYAYGPQHDYLDHPDVIGWTREGDSSHPKSGLATLITDGPGGSKRMYAGLKNAGETWYDITGNRSDTVKIGSDGWGEFHVNDGSVSIYVQK

SEQ ID NO: 26984 - protein, 483 aa, Bacillus sp.
HHNGTNGTMMQYFEWYLPNDGNHWNRLNSDASNLKSKGITAVWIPPAWKGASQNDVGYGAYDLYDLGEFNQKGTVRTKYGTRSQLQAAVTSLKNNGIQVYGDVVMNHKGGADATEMVRAVEVNPNNRNQEVTGEYTIEAWTSFDFPGRGNTHSSFKWRWYHFDGVDWDQSRRLNNRIYKFRGKAWDWEVDTEFGNYDYLMYADYDMDHPEVVNELRNWGVWYTNTLGLDGFRIDAVKHIKYSFTRDWINHVRSATGKNMFAVAEFWKNDLGAIENYLQKTNWNHSVFDVPLHYNLYNASKSGGNYDMRNIFNGTVVQRHPSHAVTFVDNHDSQPEEALESFVEEWFKPLAYALTLTREQGYPSVFYGDYYGIPTHGVPAMRSKIDPILEARQKYAYGPQHDYLDHPDVIGWTREGDSSHPKSGLATLITDGPGGSKRMYAGLKNAGETWYDITGNRSDTVKIGSDGWGEFHVNDGSVSIYVQK

SEQ ID NO: 26985 - protein, 485 aa, Synthetic construct
HHNGTNGTMMQYFEWYLPNDGNHWNRLNSDASNLKSKGITAVWIPPAWKGASQNDVGYGAYDLYDLGEFNQKGTVRTKYGTRSQLQAAVTSLKNNGIQVYGDVVMNHKGGADATEMVRAVEVNPNNRNQEVTGEYTIEAWTRFDFPGRGNTHSSFKWRWYHFDGVDWDQSRRLNNRIYKFRGHGKAWDWEVDTENGNYDYLMYADIDMDHPEVVNELRNWGVWYTNTLGLDGFRIDAVKHIKYSFTRDWINHVRSATGKNMFAVAEFWKNDLGAIENYLQKTNWNHSVFDVPLHYNLYNASKSGGNYDMRNIFNGTVVSRHPSHAVTFVDNHDSQPEEALESFVEEWFKPLAYALTLTREQGYPSVFYGDYYGIPTHGVPAMRSKIDPILEARQKYAYGPQHDYLDHPDVIGWTREGDSSHPKSGLATLITDGPGGSKRMYAGLKNAGETWYDITGNRSDTVKIGSDGWGEFHVNDGSVSIYVQK

SEQ ID NO: 26986 - protein, 483 aa, Bacillus sp.
HHNGTNGTMMQYFEWYLPNDGNHWNRLNSDASNLKSKGITAVWIPPAWKGASQNDVGYGAYDLYDLGEFNQKGTVRTKYGTRSQLQAAVTSLKNNGIQVYGDVVMNHKGGADATEMVRAVEVNPNNRNQEVTGEYTIEAWTRFDFPGRGNTHSSFKWRWYHFDGVDWDQSREFNNRIYKFRGKAWDWEVDTEFGNYDYLMYVDYDMDHPEVVNELRNWGVWYTNTLGLDGFRIDAVKHIKYSFTRDWINHVRSATGKNMFAVAEFWKNDLGAIENYLQKTNWNHSVFDVPLHYNLYNASKSGGNYDMRNIFNGTVVQRHPSHAVTFVDNHDSQPEEALESFVEEWFKPLAYALTLTREQGYPSVFYGDYYGIPTHGVPAMRSKIDPILEARQKYAYGPQHDYLDHPDVIGWTREGDSSHPKSGLATLITDGPGGSKRMYAGLKNAGETWYDITGNRSDTVKIGSDGWGEFHVNDGSVSIYVQK

SEQ ID NO: 26987 - protein, 485 aa, Bacillus sp.
HHNGTNQTMMQYFEWYLPNDGNHWNRLNSDASNLKSKGITAVWIPPAWKGASQNDVGYGAYDLYDLGEFNQKGTVRTKYGTRSQLHAAVTSLKNNGIQVYGDVVMNHKGGADATEMVRAVEVNPNNRNQEVTGEYTIEAWTRFDFPGRGNTHSSFKWRWYHFDGVDWDQSRRLNNRIYKFRGHGKAWDWEVDTEFGNYDYLMYADYDMDHPEVVNELRNWGVWYTNTLGLDGFRIDAVKHIKYSFTRDWINHVRSATGKNMFAVAEFWKNDLGAIENYLQKTNWNHSVFDVPLHYNLYNASKSGGNYDMRNIFNGTVVQAHPMHAVTFVDNHDSQPEEALESFVEEWFKPLAYALTLTREQGYPSVFYGDYYGIPTHGVPAMRSKIDPILEARQKYAYGPQHDYLDHPDVIGWTREGDSSHPKSGLATLITDGPGGSKRMYAGLKNAGETWYDITGNRSDTVKIGSDGWGEFHVNDGSVSIYVQK

SEQ ID NO: 26988 - protein, 483 aa, Bacillus sp.
HHNGTNGTMMQYFEWYLPNDGNHWNRLNSDASNLKSKGITAVWIPPAWKAASQNDVGYGAYDLYDLGEFNQKGTVRTKYGTRSQLQAAVTSLKNNGIQVYGDVVMNHKGGADATEMVRAVEVNPNNRNQEVTGEYTIEAWTRFDFPGRGNTHSSFKWRWYHFDGVDWDQSRRFQNRIYKFRGKAWDWEVDTEFGNYDYLMYVDYDMDHPEVVNELRNWGVWYTNTLGLDGFRIDAVKHIKYSFTRDWINHVRSATGKNMFAVAEFWKNDLGAIENYLQKTNWNHSVFDVPLHYNLYNASKSGGNYDMRNIFNGTVVQRHPSHAVTFVDNHDSQPEEALESFVEEWFKPLAYALTLTREQGYPSVFYGDYYGIPTHGVPAMRSKIDPILEARQKYAYGPQHDYLDHPDVIGWTREGDSSHPKSGLATLITDGPGGSKRMYAGLKNAGETWYDITGNRSDTVKIGSDGWGEFHVNDGSVSIYVQK

SEQ ID NO: 26989 - protein, 485 aa, Bacillus sp.
HHNGTNGTMMQYFEWYLPNDGNHWNRLNSDASNLKSKGITAVWIPPAWKGASQNDVGYGAYDLYDLGEFNQKGTVRTKYGTRSQLQAAVTSLKNNGIQVYGDVVMNHKGGADATEMVRAVEVNPNNRNQEVTGEYTIEAWTRFDFPGRGNTHSSFKWRWYHFDGVDWDQSRELDNRIYKFRGHGKAWDWEVDTEFGNYDYLMYADYDMDHPEVVNELRNWGVWYTNTLGLDGFRIDAVKHIKYSFTRDWINHVRSATGKNMFAVAEFWKNDLGAIENYLQKTNWNHSVFDVPLHYNLYNASKSGGNYDMRNIFNGTVVQRHPSHAVTFVDNHDSQPEEALESFVEEWFKPLAYALTLTREQGYPSVFYGDYYGIPTHGVPAMRSKIDPILEARQKYAYGPQHDYLDHPDVIGWTREGDSSHPKSGLATLITDGPGGSKRMYAGLKNAGETWYDITGNRSDTVKIGSDGWGEFHVNDGSVSIYVQK

SEQ ID NO: 26990 - protein, 483 aa, Synthetic construct
HHNGTNGTMMQYFEWYLPNDGNHWNRLNSDASNLKSKGITAVWIPPAWKGASQNDVGYGAYDLYDLGEFNQKGTVRTKYGTRSQLQAAVTSLKNNGIQVYGDVVMNHKGGADATEMVRAVEVNPNNRNQEVTGEYTIEAWTRFDFPGRGNTHSSFKWRWYHFDGVDWDQSRRLNNRIYKFRGKAWDWEVDTEYGNYDYLMYADFDMDHPEVVNELRNWGVWYTNTLGLDGFRIDAVKHIKYSFTRDWINHVRSATGKNMFAVAEFWKNDLGAIENYLQKTNWNHSVFDVPLHYNLYNASKSGGNYDMRNIFNGTVVQRHPSHAVTFVDNHDSQPEEALESFVEEWFKPLAYALTLTREQGYPSVFYGDYYGIPTHGVPAMRSKIDPILEARQKYAYGPQHDYLDHPDVIGWTREGDSSHPKSGLATLITDGPGGSKRMYAGLKNAGETWYDITGNRSDTVKIGSDGWGEFHVNDGSVSIYVQK

SEQ ID NO: 26991 - protein, 485 aa, Bacillus sp.
HHNGTNGTMMQYFEWYLPNDGNHWNRLDSDASNLKSKGITAVWIPPAWKGASQNDVGYGAYDLYDLGEFNQKGTVRTKYGTRSQLQAAVTSLKNNGIQVYGDVVMNHKGGADATEMVRAVEVNPNNRNQEVTGEYTIEAWTRFDFPGRGNTHSSFKWRWYHFDGVDWDQSRRLNNRIYKFRGHGKAWDWEVDTEFGNYDYLMYADYDMDHPEVVNELRNWGVWYTNTLGLDGFRIDAVKHIKYSFTRDWINHVRSATGKNMFAVAEFWKNDLGAIENYLQKTNWNHSVFDVPLHYNLYNASKSGGNYDMRNIFNGTVVQRHPSHAVTFVDNHDSQPEEALESFVEEWFKPLAYALTLTREQGYPSVFYGDYYGIPTHGVPAMRSKIDPILEARQKYAYGPQHDYLDHPDVIGWTREGDSSHPKSGLATLITDGPGGSKRMYAGLKNAGETWYDITGNRSDTVKIGSDGWGEFHVNDGSVSIYVQK

SEQ ID NO: 26992 - protein, 485 aa, Bacillus sp.
HHNGTNGTMMQYFEWYLPNDGNHWNRLNSDASNLKSKGIIAVWIPPAWKGLSQNDVGYGAYDLYDLGEFNQKGTVRTKYGTRSQLQAAVTSLKNNGIQVYGDVVMNHKGGADATEMVRAVEVNPNNRNQEVTGEYTIEAWTRFDFPGRGNTHSSFKWRWYHFDGVDWDQSRDFNNRIYKFRGHGKAWDWEVDTEFGNYDYLMYADYDMDHPEVVNELRNWGVWYTNTLGLDGFRIDAVKHIKYSFTRDWINHVRSATGKNMFAVAEFWKNDLGAIENYLQKTNWNHSVFDVPLHYNLYNASKSGGNYDMRNIFNGTVVQRHPSHAVTFVDNHDSQPEEALESFVEEWFKPLAYALTLTREQGYPSVFYGDYYGIPTHGVPAMRSKIDPILEARQKYAYGPQHDYLDHPDVIGWTREGDSSHPKSGLATLITDGPGGSKRMYAGLKNAGETWYDITGNRSDTVKIGSDGWGEFHVNDGSVSIYVQK

SEQ ID NO: 26993 - protein, 485 aa, Bacillus sp.
HHNGTNGTMMQYFEWYLPNDGNHWNRLNSDASNLKSKGITAVWIPPAWKGASQNDVGYGAYDLYDLGEFNQKGTVRTKYGTRSQLQAAVTSLKNNGIQVYGDVVMNHKGGADATEMVRAVEVNPNNRNQEVTGEYTIEAWTRFDFPGRGNTHSSFKWRWYHFDGVDWDQSRRLNNRIYKFRGHGKAWDWEVDTEFGNYDYLMYADYDMDHPEVVNELRNWGVWYTNTLGLDGFRIDAVKHIKYSFTRDWINHVRSATGKNMFAVAEFWKNDLGAIENYLQKTNWNHSVFDVPLHYNLYNASKSGGNYDMRNIFNGTVVQRHPSHAVTFVDNHDSQPEEALESFVEEWFKPLAYALTLTREQGYPSVFYGDYYGIPTHGVPAMRSKIDPILEARQKYAYGPQHDYLDHPDVIGWTREGDSSHPKSGLATLITDGPGGSKRMYAGLKNAGETWYDITGNRSDTVRIGSDGWGEFHVNDGSVSIYVQK

SEQ ID NO: 26994 - protein, 483 aa, Synthetic construct
HHNGTNGTMMQYFEWYLPNDGNHWNRLNSDASNLKSKGITAVWIPPAWKGASQNDVGYGAYDLYDLGEFNQKGTVRTKYGTRSQLQAAVTSLKNNGIQVYGDVVLNHKGGADATEMVRAVEVNPNNRNQEVTGEYTIEAWTRFDFPGRGNTHSSFKWRWYHFDGVDWDQSRRLNNRIYKFRGKAWDWEVDTENGNYDYLMYADYDMDHPEVVNELRNWGVWYTNTLGLDGFRIDAVKHIKYSFTRDWINHVRSATGKNMFAVAEFWKNDLGAIENYLQKTNWNHSVFDVPLHYNLYNASKSGGNYDMRNIFNGTVVQRHPSHAVTFVDNHDSQPEEALESFVEEWFKPLAYALTLTREQGYPSVFYGDYYGIPTHGVPAMRSKIDPILEARQKYAYGPQHDYLDHPDVIGWTREGDSSHPKSGLATLITDGPGGSKRMYAGLKNAGETWYDITGNRSDTVKIGSDGWGEFHVNDGSVSIYVQK

SEQ ID NO: 26995 - protein, 485 aa, Bacillus sp.
HHNGTNGTMMQYFEWYLPNDGNHWNRLNSDASNLKSKGITAVWIPPAWKGASQNDVGYGAYDLYDLGEFNQKGTVRTKYGTRSQLQAAVTSLKNNGIQVYGDVVMNHKGGADATEMVRAVEVNPNNRNQEVTGEYTIEAWTRFDFPGRGNTHSSFKWRWYHFDGVDWDQSRRLNNRIYKFRGHGKAWDWEVDTEFGNYDYLMYADYDMDHPEVVNELRNWGVWYTNTLGLDGFRIDAVKHIKYSFTRDWINHVRSATGKNMFAVAEFWKNDLGAIENYLQKTNWNHSVFDVPLHYNLYNASKSGGNYDMRNIFNGTVVQVHPSHAVTFVDNHDSQPEEALESFVEEWFKPLAYALTLTREQGYPSVFYGDYYGIPTHGVPAMRSKIDPILEARQKYAYGPQHDYLDHPDVIGWTREGDSSHPKSGLATLITDGPGGSKRMYAGLKNAGETWYDITGNRSDTVKIGSDGWGEFHVNYGSVSIYVQK

SEQ ID NO: 26996 - protein, 485 aa, Synthetic construct
HHNGTNGTMMQYFEWYLPNDGNHWNRLNSDASNLKSKGITAVWIPPAWKGASQNDVGYGAYDLYDLGEFNQKGTVRTKYGTRSQLQAAVTSLKNNGIQVYGDVVMNHKGGADATEMVRAVEVNPNNRNQEVTGEYTIEAWTRFDFPGRGNTHSSFKWRWYHFDGVDWDQSRRLNNRIYKFRGHGKAWDWEVDTENGNYDYLMYADIDMDHPEVVNELRNWGVWYTNTLGLDGFRIDAVKHIKYSFTRDWINHVRSATGKNMFAVAEFWKNDLGAIENYLQKTNWNHSVFDVPLHYNLYNASKSGGNYDMRNIFNGTVVQRHPSHAVTFVDNHDSQPEEALESFVEEWFKPLAYALTLTREQGYPSVFYGDYYGIPTHGVPAMRSKIDPILEARQKYAYGPQHDYLDHPDVIGWTREGDSSHPKSGLATLITDGPGGSKRMYAGLKNAGETWYDITGNRSDTVKIGSDGYGEFHVNDGSVSIYVQK

SEQ ID NO: 26997 - protein, 485 aa, Synthetic construct
HHNGTNGTMMQYFEWYLPNDGNHWNRLNSDASNLKSKGITAVWIPPAWKGASQNDVGYGAYDLYDLGEFNQKGTVRTKYGTRSQLQAAVTSLKNNGIQVYGDVVMNHKGGADATEMVRAVEVNPNNRYQEVTGEYTIEAWTRFDFPGRGNTHSSFKWRWYHFDGVDWDQSRRLNNRIYKFRGHGKAWDWEVDTENGNYDYLMYADIDMDHPEVVNELRNWGVWYTNTLGLDGFRIDAVKHIKYSFTRDWINHVRSATGKNMFAVAEFWKNDLGAIENYLQKTNWNHSVFDVPLHYNLYNASKSGGNYDMRNIFNGTVVQRHPSHAVTFVDNHDSQPEEALESFVEEWFKPLAYALTLTREQGYPSVFYGDYYGIPTHGVPAMRSKIDPILEARQKYAYGPQHDYLDHPDVIGWTREGDSSHPKSGLATLITDGPGGSKRMYAGLKNAGETWYDITGNRSDTVKIGSDGWGEFHVNDGSVSIYVQK

SEQ ID NO: 26998 - protein, 485 aa, Bacillus sp.
HHNGTNGTMMQYFEWYLPNDGNHWNRLNSDASNLKSKGITAVWIPPAWKGASQNDVGYGAYDLYDLGEFNQKGTVRTKYGTRSQLQAAVTSLKNNGIQVYGDVVMNHKGGADATEMVRAVEVNPNNRNQEVTGEYTIEAWTSFDFPGRGNTHSSFKWRWYHFDGVDWDQSRRLNNRIYKFRGHGKAWDWEVDTEFGNYDYLMYADYDMDHPEVVNELRNWGVWYTNTLGLDGFRIDAVKHIKYSFTRDWINHVRSATGKNMFAVAEFWKNDLGAIENYLQKTNWNHSVFDVPLHYNLYNASKSGGNYDMRNIFNGTVVQRHPSHAVTFVDNHDSQPEEALESFVEEWFKPLAYALTLTREQGYPSVFYGDYYGIPTHGVPAMRSKIDPILEARQKYAYGPQHDYLDHPDVIGWTREGDSSHPKSGLATLITDGPGGSKRMYAGLKNAGETWYDITGNRSDTVKIGSDGWGEFHVNDGSVSIYVQK

SEQ ID NO: 26999 - protein, 485 aa, Synthetic construct
HHNGTNGTMMQYFEWYLPNDGNHWNRLNSDASNLKSKGITAVWIPPAWKGASQNDVGYGAYDLYDLGEFNQKGTVRTKYGTRSQLQAAVTSLKNNGIQVYGDVVMNHKGGADATEMVRAVEVNPNNRNQEVTGEYTIEAWTRFDFPGRGNTHSSFKWRWYHFDGVDWDQSRRLNNRIYKFRGHGKAWDWEVDTENGNYDYLMYADIDMDHPEVVNELRNWGVWYTNTLGLDGFRIDAVKHIKFSFTRDWINHVRSATGKNMFAVAEFWKNDLGAIENYLQKTNWNHSVFDVPLHYNLYNASKSGGNYDMRNIFNGTVVQRHPSHAVTFVDNHDSQPEEALESFVEEWFKPLAYALTLTREQGYPSVFYGDYYGIPTHGVPAMRSKIDPILEARQKYAYGPQHDYLDHPDVIGWTREGDSSHPKSGLATLITDGPGGSKRMYAGLKNAGETWYDITGNRSDTVKIGSDGWGEFHVNDGSVSIYVQK

SEQ ID NO: 27000 - protein, 485 aa, Bacillus sp.
HHNGTNGTMMQYFEWYLPNDGNHWNRLNSDASNLKSKGITAVWIPPAWKGASQNDVGYGAYDLYDLGEFNQKGTVRTKYGTRSQLQAAVTSLKNNGIQVYGDVVMNHKGGADATEMVRAVEVNPNNRNQEVTGEYTIEAWTRFDFPGRGNTHSSFKWRWYHFDGVDWDQSRRLNNRIYKFRGHGKAWDWEVDTEFGNYDYLMYADYDMDHPEVVNELRNWGVWYTNTLGLDGFRIDAVKHIKYSFTRDWINHVRSATGKNMFAVAEFWKNDLGAIENYLQKTNWNHSVFDVPLHYNLYNASKSGGNYDMRNIFNGTVVQRHPSHAVTFVDNHDSQPEEALESFVEEWFKPLAYALTLTREQGYPSVFYGDYYGIPTHGVPAMRSKIDPILEARQKYAYGPQHDYLDHPDVIGWTREGDSSHPHSGLATLITDGPGGSKRMYAGLKNAGETWYDITGNRSDTVKIGSDGWGEFHVNDGSVSIYVQK

SEQ ID NO: 27001 - protein, 483 aa, Bacillus sp.
HHNGTNGTMMQYFEWYLPNDGNHWNRLNSDASNLKSKGITAVWIPPAWKGASQNDVGYGAYDLYDLGEFNQKGTVRTKYGTRSQLQAAVTSLKNNGIQVYGDVVMNHKGGADATEMVRAVEVNPNNRNQEVTGEYTIEAWTRFDFPGRGNTHSSFKWRWYHFDGVDWDQSRRLYNRIYKFRGKAWDWEVDTEFGNYDYLMYADYDMDHPEVVNELRNWGVWYTNTLGLDGFRIDAVKHIKYSFTRDWINHVRSATGKNMFAVAEFWKNDLGAIENYLQKTNWNHSVFDVPLHYNLYNASKSGGNYDMRNIFNGTVVQRHPSHAVTFVDNHDSQPEEALESFVEEWFKPLAYALTLTREQGYPSVFYGDYYGIPTHGVPAMRSKIDPILEARQKYAYGPQHDYLDHPDVIGWTREGDSSHPKSGLATLITDGPGGSKRMYAGLKNAGETWYDITGNRSDTVKIGSDGWGEFHVNDGSVSIYVQK

SEQ ID NO: 27002 - protein, 485 aa, Bacillus sp.
HHNGTNGTMMQYFEWYLPNDGNHWNRLNSDASNLKSKGITAVWIPPAWKAASQNDVGYGAYDLYDLGEFNQKGTVRTKYGTRSQLQAAVTSLKNNGIQVYGDVVMNHKGGADATEMVRAVEVNPNNRNQEVTGEYTIEAWTRFDFPGRGNTHSSFKWRWYHFDGVDWDQSRDLQNRIYKFRGHGKAWDWEVDTEFGNYDYLMYADYDMDHPEVVNELRNWGVWYTNTLGLDGFRIDAVKHIKYSFTRDWINHVRSATGKNMFAVAEFWKNDLGAIENYLQKTNWNHSVFDVPLHYNLYNASKSGGNYDMRNIFNGTVVQAHPNHAVTFVDNHDSQPEEALESFVEEWFKPLAYALTLTREQGYPSVFYGDYYGIPTHGVPAMRSKIDPILEARQKYAYGPQHDYLDHPDVIGWTREGDSSHPKSGLATLITDGPGGSKRMYAGLKNAGETWYDITGNRSDTVKIGSDGWGEFHVNDGSVSIFVQK

SEQ ID NO: 27003 - protein, 483 aa, Bacillus sp.
HHNGTNGTMMQYFEWYLPNDGNHWNRLNSDASNLKSKGITAVWIPPAWKAASQNDVGYGAYDLYDLGEFNQKGTVRTKYGTRSQLQAAVTSLKNNGIQVYGDVVMNHKGGADATEMVRAVEVNPNNRNQEVTGEYTIEAWTRFDFPGRGNTHSSFKWRWYHFDGVDWDQSRQLDNRIYKFRGKAWDWEVDTEFGNYDYLMYADYDMDHPEVVNELRNWGVWYTNTLGLDGFRIDAVKHIKYSFTRDWINHVRSATGKNMFAVAEFWKNDLGAIENYLQKTNWNHSVFDVPLHYNLYNASKSGGNYDMRNIFNGTVVQRHPSHAVTFVDNHDSQPEEALESFVEEWFKPLAYALTLTREQGYPSVFYGDYYGIPTHGVPAMRSKIDPILEARQKYAYGPQHDYLDHPDVIGWTREGDSSHPKSGLATLITDGPGGSKRMYAGLKNAGETWYDITGNRSDTVKIGSDGWGEFHVNDGSVSIYVQK

SEQ ID NO: 27004 - protein, 483 aa, Bacillus sp.
HHNGTNGTMMQYFEWYLPNDGNHWNRLNSDASNLKSKGITAVWIPPAWKGASQNDVGYGAYDLYDLGEFNQKGTVRTKYGTRSQLQAAVTSLKNNGIQVYGDVVMNHKGGADATEMVRAVEVNPNNRQQEVTGEYTIEAWTRFDFPGRGNTHSSFKWRWYHFDGVDWDQSRRLNNRIYKFRGKAWDWEVDTEFGNYDYLMYADYDMDHPEVVNELRNWGVWYTNTLGLDGFRIDAVKHIKYSFTRDWINHVRSATGKNMFAVAEFWKNDLGAIENYLQKTNWNHSVFDVPLHYNLYNASKSGGNYDMRNIFNGTVVQRHPSHAVTFVDNHDSQPEEALESFVEEWFKPLAYALTLTREQGYPSVFYGDYYGIPTHGVPAMRSKIDPILEARQKYAYGPQHDYLDHPDVIGWTREGDSSHPKSGLATLITDGPGGSKRMYVGLKNAGETWYDITGNRSDTVKIGSDGWGEFHVNDGSVSIYVQK

SEQ ID NO: 27005 - protein, 485 aa, Bacillus sp.
HHNGTNGTMMQYFEWYLPNDGNHWNRLNSDASNLKSKGITAVWIPPAWKGISQNDVGYGAYDLYDLGEFNQKGTVRTKYGTRSQLQAAVTSLKNNGIQVYGDVVMNHKGGADATEMVRAVEVNPNNRNQEVTGEYTIEAWTRFDFPGRGNTHSSFKWRWYHFDGVDWDQSRRLDNRIYKFRGHGKAWDWEVDTEFGNYDYLMYADYDMDHPEVVNELRNWGVWYTNTLGLDGFRIDAVKHIKYSFTRDWINHVRSATGKNMFAVAEFWKNDLGAIENYLQKTNWNHSVFDVPLHYNLYNASKSGGNYDMRNIFNGTVVQRHPSHAVTFVDNHDSQPEEALESFVEEWFKPLAYALTLTREQGYPSVFYGDYYGIPTHGVPAMRSKIDPILEARQKYAYGPQHDYLDHPDVIGWTREGDSSHPKSGLATLITDGPGGSKRMYAGLKNAGETWYDITGNRSDTVKIGSDGWGEFHVNDGSVSIYVQK

SEQ ID NO: 27006 - protein, 485 aa, Bacillus sp.
HHNGTNGTMMQYFEWYLPNDGNHWNRLNSDASNLKSKGITAVWIPPAWKAQSQNDVGYGAYDLYDLGEFNQKGTVRTKYGTRSQLQAAVTSLKNNGIQVYGDVVMNHKGGADATEMVRAVEVNPNNRNQEVTGEYTIEAWTRFDFPGRGNTHSSFKWRWYHFDGVDWDQSRQLNNRIYKFRGHGKAWDWEVDTEFGNYDYLMYADYDMDHPEVVNELRNWGVWYTNTLGLDGFRIDAVKHIKYSFTRDWINHVRSATGKNMFAVAEFWKNDLGAIENYLQKTNWNHSVFDVPLHYNLYNASKSGGNYDMRNIFNGTVVQRHPSHAVTFVDNHDSQPEEALESFVEEWFKPLAYALTLTREQGYPSVFYGDYYGIPTHGVPAMRSKIDPILEARQKYAYGPQHDYLDHPDVIGWTREGDSSHPKSGLATLITDGPGGSKRMYAGLKNAGETWYDITGNRSDTVKIGSDGWGEFHVNDGSVSIYVQK

SEQ ID NO: 27007 - protein, 485 aa, Bacillus sp.
HHNGTNGTMMQYFEWYLPNDGNHWNRLNSDASNLKSKGITAVWIPPAWKAASQNDVGYGAYDLYDLGEFNQKGTVRTKYGTRSQLQAAVTSLKNNGIQVYGDVVMNHKGGADATEMVRAVEVNPNNRNQEVTGEYTIEAWTRFDFPGRGNTHSSFKWRWYHFDGVDWDQSRQLSNRIYKFRGHGKAWDWEVDTEFGNYDYLMYADYDMDHPEVVNELRNWGVWYTNTLGLDGFRIDAVKHIKYSFTRDWINHVRSATGKNMFAVAEFWKNDLGAIENYLQKTNWNHSVFDVPLHYNLYNASKSGGNYDMRNIFNGTVVQRHPSHAVTFVDNHDSQPEEALESFVEEWFKPLAYALTLTREQGYPSVFYGDYYGIPTHGVPAMRSKIDPILEARQKYAYGPQHDYLDHPDVIGWTREGDSSHPKSGLATLITDGPGGSKRMYAGLKNAGETWYDITGNRSDTVKIGSDGWGEFHVNDGSVSIYVQK

SEQ ID NO: 27008 - protein, 483 aa, Bacillus sp.
HHNGTNGTMMQYFEWYLPNDGNHWNRLNSDASNLKSKGITAVWIPPAWKAASQNDVGYGAYDLYDLGEFNQKGTVRTKYGTRSQLQAAVTSLKNNGIQVYGDVVMNHKGGADATEMVRAVEVNPNNRNQEVTGEYTIEAWTRFDFPGRGNTHSSFKWRWYHFDGVDWDQSREFDNRIYKFRGKAWDWEVDTEFGNYDYLMYADYDMDHPEVVNELRNWGVWYTNTLGLDGFRIDAVKHIKYSFTRDWINHVRSATGKNMFAVAEFWKNDLGAIENYLQKTNWNHSVFDVPLHYNLYNASKSGGNYDMRNIFNGTVVQRHPSHAVTFVDNHDSQPEEALESFVEEWFKPLAYALTLTREQGYPSVFYGDYYGIPTHGVPAMRSKIDPILEARQKYAYGPQHDYLDHPDVIGWTREGDSSHPKSGLATLITDGPGGSKRMYAGLKNAGETWYDITGNRSDTVKIGSDGWGEFHVNDGSVSIYVQK

SEQ ID NO: 27009 - protein, 485 aa, Bacillus sp.
HHNGTNGTMMQYFEWYLPNDGNHWNRLNSDASNLKSKGITAVWIPPAWKGASQNDVGYGAYDLYDLGEFNQKGTVRTKYGTRSQLQAAVTSLKNNGIQVYGDVVMNHKGGADATEMVRAVEVNPNNRNQEVTGEYTIEAWTRFDFPGRGNTHSSFKWRWYHFDGVDWDQSRRLNNRIYKFRGHGKAWDWEVDTEFGNYDYLMYADYDMDHPEVVNELRNWGVWYTNTLGLDGFRIDAVKHIKYSFTRDWINHVRSATGKNMFAVAEFWKNDLGAIENYLQKTNWNHSVFDVPLHYNLYNASKSGGNYDMRNIFNGTVVQRHPRHAVTFVDNHDSQPEEALESFVEEWFKPLAYALTLTREQGYPSVFYGDYYGIPTHGVPAMRSKIDPILEARQKYAYGPQHDYLDHPDVIGWTREGDSSHPKSGLATLITDGPGGSKRMYAGLKNAGETWYDITGNRSDTVKIGSDGWGEFHVNDGSVSIYVQK

SEQ ID NO: 27010 - protein, 485 aa, Bacillus sp.
HHNGTNGTMMQYFEWYLPNDGNHWNRLNSDASNLKSKGITAVWIPPAWKAASQNDVGYGAYDLYDLGEFNQKGTVRTKYGTRSQLQAAVTSLKNNGIQVYGDVVMNHKGGADATEMVRAVEVNPNNRNQEVTGEYTIEAWTRFDFPGRGNTHSSFKWRWYHFDGVDWDQSRDFNNRIYKFRGHGKAWDWEVDTEFGNYDYLMYADYDMDHPEVVNELRNWGVWYTNTLGLDGFRIDAVKHIKYSFTRDWINHVRSATGKNMFAVAEFWKNDLGAIENYLQKTNWNHSVFDVPLHYNLYNASKSGGNYDMRNIFNGTVVQRHPSHAVTFVDNHDSQPEEALESFVEEWFKPLAYALTLTREQGYPSVFYGDYYGIPTHGVPAMRSKIDPILEARQKYAYGPQHDYLDHPDVIGWTREGDSSHPKSGLATLITDGPGGSKRMYAGLKNAGETWYDITGNRSDTVKIGSDGWGKFHVNDGSVSIYVQK

SEQ ID NO: 27011 - protein, 483 aa, Bacillus sp.
HHNGTNGTMMQYFEWYLPNDGNHWNRLNSDASNLKSKGITAVWIPPAWKGASQNDVGYGAYDLYDLGEFNQKGTVRTKYGTRSQLQAAVTSLKNNGIQVYGDVVMNHKGGADATEMVRAVEVNPNNRNQEVTGEYTIEAWTRFDFPGRGNTHSSFKWRWYHFDGVDWDQSRRVTNRIYKFRGKAWDWEVDTEFGNYDYLMYADYDMDHPEVVNELRNWGVWYTNTLGLDGFRIDAVKHIKYSFTRDWINHVRSATGKNMFAVAEFWKNDLGAIENYLQKTNWNHSVFDVPLHYNLYNASKSGGNYDMRNIFNGTVVQRHPSHAVTFVDNHDSQPEEALESFVEEWFKPLAYALTLTREQGYPSVFYGDYYGIPTHGVPAMRSKIDPILEARQKYAYGPQHDYLDHPDVIGWTREGDSSHPKSGLATLITDGPGGSKRMYAGLKNAGETWYDITGNRSDTVKIGSDGWGEFHVNDGSVSIYVQK

SEQ ID NO: 27012 - protein, 483 aa, Bacillus sp.
HHNGTNGTMMQYFEWYLPNDGNHWNRLNSDASNLKSKGITAVWIPPAWKATSQNDVGYGAYDLYDLGEFNQKGTVRTKYGTRSQLQAAVTSLKNNGIQVYGDVVMNHKGGADATEMVRAVEVNPNNRNQEVTGEYTIEAWTRFDFPGRGNTHSSFKWRWYHFDGVDWDQSRQLNNRIYKFRGKAWDWEVDTEFGNYDYLMYVDYDMDHPEVVNELRNWGVWYTNTLGLDGFRIDAVKHIKYSFTRDWINHVRSATGKNMFAVAEFWKNDLGAIENYLQKTNWNHSVFDVPLHYNLYNASKSGGNYDMRNIFNGTVVQRHPSHAVTFVDNHDSQPEEALESFVEEWFKPLAYALTLTREQGYPSVFYGDYYGIPTHGVPAMRSKIDPILEARQKYAYGPQHDYLDHPDVIGWTREGDSSHPKSGLATLITDGPGGSKRMYAGLKNAGETWYDITGNRSDTVKIGSDGWGEFHVNDGSVSIYVQK

SEQ ID NO: 27013 - protein, 485 aa, Bacillus sp.
HHNGTNGTMMQYFEWYLPNDGNHWNRLNSDASNLKSKGITAVWIPPAWKGISQNDVGYGAYDLYDLGEFNQKGTVRTKYGTRSQLQAAVTSLKNNGIQVYGDVVMNHKGGADATEMVRAVEVNPNNRNQEVTGEYTIEAWTRFDFPGRGNTHSSFKWRWYHFDGVDWDQSRDLNNRIYKFRGHGKAWDWEVDTEFGNYDYLMYADYDMDHPEVVNELRNWGVWYTNTLGLDGFRIDAVKHIKYSFTRDWINHVRSATGKNMFAVAEFWKNDLGAIENYLQKTNWNHSVFDVPLHYNLYNASKSGGNYDMRNIFNGTVVQRHPSHAVTFVDNHDSQPEEALESFVEEWFKPLAYALTLTREQGYPSVFYGDYYGIPTHGVPAMRSKIDPILEARQKYAYGPQHDYLDHPDVIGWTREGDSSHPKSGLATLITDGPGGSKRMYAGLKNAGETWYDITGNRSDTVKIGSDGWGEFHVNDGSVSIYVQK

SEQ ID NO: 27014 - protein, 485 aa, Bacillus sp.
HHNGTNLTMMQYFEWYLPNDGNHWNRLNSDASNLKSKGITAVWIPPAWKGASQNDVGYGAYDLYDLGEFNQKGTVRTKYGTRSQLQAAVTSLKNNGIQVYGDVVMNHKGGADATEMVRAVEVNPNNRNQEVTGEYTIEAWTRFDFPGRGNTHSSFKWRWYHFDGVDWDQSRRLNNRIYKFRGHGKAWDWEVDTEFGNYDYLMYADYDMDHPEVVNELRNWGVWYTNTLGLDGFRIDAVKHIKYSFTRDWINHVRSATGKNMFAVAEFWKNDLGAIENYLQKTNWNHSVFDVPLHYNLYNASKSGGNYDMRNIFNGTVVQSHPMHAVTFVDNHDSQPEEALESFVEEWFKPLAYALTLTREQGYPSVFYGDYYGIPTHGVPAMRSKIDPILEARQKYAYGPQHDYLDHPDVIGWTREGDSSHPKSGLATLITDGPGGSKRMYAGLKNAGETWYDITGNRSDTVKIGSDGWGEFHVNDGSVSIYVQK

SEQ ID NO: 27015 - protein, 485 aa, Bacillus sp.
HHNGTNGTMMQYFEWYLPNDGNHWNRLNSDASNLKSKGITAVWIPPAWKGVSQNDVGYGAYDLYDLGEFNQKGTVRTKYGTRSQLQAAVTSLKNNGIQVYGDVVMNHKGGADATEMVRAVEVNPNNRNQEVTGEYTIEAWTRFDFPGRGNTHSSFKWRWYHFDGVDWDQSRRLSNRIYKFRGHGKAWDWEVDTEFGNYDYLMYADYDMDHPEVVNELRNWGVWYTNTLGLDGFRIDAVKHIKYSFTRDWINHVRSATGKNMFAVAEFWKNDLGAIENYLQKTNWNHSVFDVPLHYNLYNASKSGGNYDMRNIFNGTVVQVHPSHAVTFVDNHDSQPEEALESFVEEWFKPLAYALTLTREQGYPSVFYGDYYGIPTHGVPAMRSKIDPILEARQKYAYGPQHDYLDHPDVIGWTREGDSSHPKSGLATLITDGPGGSKRMYAGLKNAGETWYDITGNRSDTVKIGSDGWGEFHVNYGSVSIYVQK

SEQ ID NO: 27016 - protein, 485 aa, Bacillus sp.
HHNGTNGTMMQYFEWYLPNDGNHWNRLNSDASNLKSKGITAVWIPPAWKGASQNDVGYGAYDLYDLGEFNQKGTVRTKYGTRSQLQAAVTSLKNNGIQVYGDVVMNHKGGADATEMVPAVEVNPNNRNQEVTGEYTIEAWTRFDFPGRGNTHSSFKWRWYHFDGVDWDQSRRLNNRIYKFRAHGKAWDWEVDTEFGNYDYLMYADYDMDHPEVVNELRNWGVWYTNTLGLDGFRIDAVKHIKYSFTRDWINHVRSATGKNMFAVAEFWKNDLGAIENYLQKTNWNHSVFDVPLHYNLYNASKSGGNYDMRNIFNGTVVQRHPSHAVTFVDNHDSQPEEALESFVEEWFKPLAYALTLTREQGYPSVFYGDYYGIPTHGVPAMRSKIDPILEARQKYAYGPQHDYLDHPDVIGWTREGDSSHPKSGLATLITDGPGGSKRMYAGLKNAGETWYDITGNRSDTVKIGSDGWGEFHVNDGSVSIYVQK

SEQ ID NO: 27017 - protein, 483 aa, Synthetic construct
HHNGTNGTMMQYFEWYLPNDGNHWNRLNSDASNLKSKGITAVWIPPAWKGASQNDVGYGAYDLYDLGEFNQKGTVRTKYGTRSQLQAAVTSLKNNGIQVYGDVVMNHKGGADATEMVRAVEVNPNNRNQEVTGEYTIEAWTRFDFPGRGNTHSSFKWRWYHFDGVDWDQSRRLNNRIYKFRGKAWDWEVDTENGNYDYLMYADIDMDHPRVVNELRNWGVWYTNTLGLDGFRIDAVKHIKYSFTRDWINHVRSATGKNMFAVAEFWKNDLGAIENYLQKTNWNHSVFDVPLHYNLYNASKSGGNYDMRNIFNGTVVQRHPSHAVTFVDNHDSQPEEALESFVEEWFKPLAYALTLTREQGYPSVFYGDYYGIPTHGVPAMRSKIDPILEARQKYAYGPQHDYLDHPDVIGWTREGDSSHPKSGLATLITDGPGGSKRMYAGLKNAGETWYDITGNRSDTVKIGSDGWGEFHVNDGSVSIYVQK

SEQ ID NO: 27018 - protein, 483 aa, Synthetic construct
HHNGTNGTMMQYFEWYLPNDGNHWNRLNSDASNLKSKGITAVWIPPAWKGASQNDVGYGAYDLYDLGEFNQKGTVRTKYGTRSQLQAAVTSLKNNGIQVYGDVVMNHKGGADATEMVRAVEVNPNNRNQEVTGEYTIEAWTRFDFPGRGNTHSSFKWRWYHFDGVDWDQSRRLNNRIYKFRGKAWDWEVDTENGNYDYLMYADIDMDHPEVTNELRNWGVWYTNTLGLDGFRIDAVKHIKYSFTRDWINHVRSATGKNMFAVAEFWKNDLGAIENYLQKTNWNHSVFDVPLHYNLYNASKSGGNYDMRNIFNGTVVQRHPSHAVTFVDNHDSQPEEALESFVEEWFKPLAYALTLTREQGYPSVFYGDYYGIPTHGVPAMRSKIDPILEARQKYAYGPQHDYLDHPDVIGWTREGDSSHPKSGLATLITDGPGGSKRMYAGLKNAGETWYDITGNRSDTVKIGSDGWGEFHVNDGSVSIYVQK

SEQ ID NO: 27019 - protein, 485 aa, Bacillus sp.
HHNGTNGTMMQYFEWYLPNDGNHWNRLNSDASNLKSKGITAVWIPPAWKGASQNDVGYGAYDLYDLGEFNQKGTVRTKYGTRSQLQAAVTSLKNNGIQVYGDVVMNHKGGADATEMVRAVEVNPNNRNQEVTGEYTIEAWTRFDFPGRGNTHSSFKWRWYHFDGVDWDQSRRLNNRIYKFRGHGKAWDWEVDTEFGNYDYLMYADYDMDHPEVVNELRNWGVWYTNTLGLDGFRIDAVKHIKYSFTRDWINHVRSATGKNMFAVAEFWKNDLGAIENYLQKTNWNHSVFDVPLHYNLYNASKSGGNYDMRNIFNGTVVQAHPMLAVTFVDNHDSQPEEALESFVEEWFKPLAYALTLTREQGYPSVFYGDYYGIPTHGVPAMRSKIDPILEARQKYAYGPQHDYLDHPDVIGWTREGDSSHPKSGLATLITDGPGGSKRMYAGLKNAGETWYDITGNRSDTVKIGSDGWGEFHVNDGSVSIYVQK

SEQ ID NO: 27020 - protein, 483 aa, Synthetic construct
HHNGTNGTMMQYFEWYLPNDGNHWNRLNSDASNLKSKGITAVWIPPAWKGASQNDVGYGAYDLYDLGEFNQKGTVRTKYGTRSQLQAAVTSLKNNGIQVYGDVVMNHKGGADATEMVRAVEVNPNNRNQEVTGEYTIEAWTRFDFPGRGNTHSSFKWRWYHFDGVDWDQSRRLNNRIYKFRGKAWDWEVDTENGNYDYLMYADYDMDHPEGVNELRNWGVWYTNTLGLDGFRIDAVKHIKYSFTRDWINHVRSATGKNMFAVAEFWKNDLGAIENYLQKTNWNHSVFDVPLHYNLYNASKSGGNYDMRNIFNGTVVQRHPSHAVTFVDNHDSQPEEALESFVEEWFKPLAYALTLTREQGYPSVFYGDYYGIPTHGVPAMRSKIDPILEARQKYAYGPQHDYLDHPDVIGWTREGDSSHPKSGLATLITDGPGGSKRMYAGLKNAGETWYDITGNRSDTVKIGSDGWGEFHVNDGSVSIYVQK

SEQ ID NO: 27021 - protein, 485 aa, Bacillus sp.
HHNGTNGTMMQYFEWYLPNDGNHWNRLNSDASNLKSKGITAVWIPPAWKGQSQNDVGYGAYDLYDLGEFNQKGTVRTKYGTRSQLQAAVTSLKNNGIQVYGDVVMNHKGGADATEMVRAVEVNPNNRNQEVTGEYTIEAWTRFDFPGRGNTHSSFKWRWYHFDGVDWDQSRRLNNRIYKFRGHGKAWDWEVDTEFGNYDYLMYADYDMDHPEVVNELRNWGVWYTNTLGLDGFRIDAVKHIKYSFTRDWINHVRSATGKNMFAVAEFWKNDLGAIENYLQKTNWNHSVFDVPLHYNLYNASKSGGNYDMRNIFNGTVVQRHPSHAVTFVDNHDSQPEEALESFVEEWFKPLAYALTLTREQGYPSVFYGDYYGIPTHGVPAMRSKIDPILEARQKYAYGPQHDYLDHPDVIGWTREGDSSHPKSGLATLITDGPGGSKRMYAGLKNAGETWYDITGNRSDTVKIGSDGWGEFHVNDGSVSIYVQK

SEQ ID NO: 27022 - protein, 485 aa, Synthetic construct
HHNGTNGTMMQYFEWYLPNDGNHWNRLNSDASNLKSKGITAVWIPPAWKGASQNDVGYGAYDLYDLGEFNQKGTVRTKYGTRSQLQAAVTSLKNNGIQVYGDVVMNHKGGADATEMVRAVEVNPNNRNQEVTGEYTIEAWTRFDFPGRGNTHSSFKWRWYHFDGVDWDESRRLNNRIYKFRGHGKAWDWEVDTENGNYDYLMYADIDMDHPEVVNELRNWGVWYTNTLGLDGFRIDAVKHIKYSFTRDWINHVRSATGKNMFAVAEFWKNDLGAIENYLQKTNWNHSVFDVPLHYNLYNASKSGGNYDMRNIFNGTVVQRHPSHAVTFVDNHDSQPEEALESFVEEWFKPLAYALTLTREQGYPSVFYGDYYGIPTHGVPAMRSKIDPILEARQKYAYGPQHDYLDHPDVIGWTREGDSSHPKSGLATLITDGPGGSKRMYAGLKNAGETWYDITGNRSDTVKIGSDGWGEFHVNDGSVSIYVQK

SEQ ID NO: 27023 - protein, 483 aa, Bacillus sp.
HHNGTNGTMMQYFEWYLPNDGNHWNRLNSDASNLKSKGITAVWIPPAWKGASQNDVGYGAYDLYDLGEFNQKGTVRTKYGTRSQLQAAVTSLKNNGIQVYGDVVMNHKGGADATEMVRAVEVNPNNRNQEVTGEYTIEAWTRFDFPGRGNTHSSFKWRWYHFDGVDWDQSRELTNRIYKFRGKAWDWEVDTEFGNYDYLMYADYDMDHPEVVNELRNWGVWYTNTLGLDGFRIDAVKHIKYSFTRDWINHVRSATGKNMFAVAEFWKNDLGAIENYLQKTNWNHSVFDVPLHYNLYNASKSGGNYDMRNIFNGTVVQRHPSHAVTFVDNHDSQPEEALESFVEEWFKPLAYALTLTREQGYPSVFYGDYYGIPTHGVPAMRSKIDPILEARQKYAYGPQHDYLDHPDVIGWTREGDSSHPKSGLATLITDGPGGSKRMYAGLKNAGETWYDITGNRSDTVKIGSDGWGEFHVNDGSVSIYVQK

SEQ ID NO: 27024 - protein, 485 aa, Bacillus sp.
HHNGTNGTMMQYFEWYLPNDGNHWNRLNSDASNLKSKGITAVWIPPAWKATSQNDVGYGAYDLYDLGEFNQKGTVRTKYGTRSQLQAAVTSLKNNGIQVYGDVVMNHKGGADATEMVRAVEVNPNNRNQEVTGEYTIEAWTRFDFPGRGNTHSSFKWRWYHFDGVDWDQSRDLNNRIYKFRGHGKAWDWEVDTEFGNYDYLMYADYDMDHPEVVNELRNWGVWYTNTLGLDGFRIDAVKHIKYSFTRDWINHVRSATGKNMFAVAEFWKNDLGAIENYLQKTNWNHSVFDVPLHYNLYNASKSGGNYDMRNIFNGTVVQRHPSHAVTFVDNHDSQPEEALESFVEEWFKPLAYALTLTREQGYPSVFYGDYYGIPTHGVPAMRSKIDPILEARQKYAYGPQHDYLDHPDVIGWTREGDSSHPKSGLATLITDGPGGSKRMYAGLKNAGETWYDITGNRSDTVKIGSDGWGEFHVNDGSVSIYVQK

SEQ ID NO: 27025 - protein, 485 aa, Bacillus sp.
HHNGTNGTMMQYFEWYLPNDGNHWNRLNSDASNLKSKGITAVWIPPAWKGASQNDVGYGAYDLYDLGEFNQKGTVRTKYGTRSQLQAAVTSLKNNGIQVYGDVVMNHKGGADATEMVRAVEVNPNNRNQEVTGEYTIEAWTRFDFPGRGNTHSSFKWRWYHFDGVDWDQSRRLNNRIYKFRGHGKAWDWEVDTEFGNYDYLMYADYDMDHPEVVNELRNWGVWYTNTLGLDGFRIDAVKHIKYSFTRDWINHVRSATGKNMFAVAEFWKNDLGAIENYLQKTNWNHSVFDVPLHYNLYNASKSGGNYDMRNIFNGTVVQRHPSHAVTFVDNHDSQPEEALESFVEEWFKPLAYALTLTREQGYPSVFYGDYYGIPTHGVPAMRSKIDPILEARQKYAYGPQHDYLDHPDVIGWTREGDSSHPKSGLATLITDGPGGSKRMYAGLKNAGETWYDITGNRSDTVKIGSDGWGEFHVNDGSVSIFVQK

SEQ ID NO: 27026 - protein, 485 aa, Bacillus sp.
HHNGTNGTMMQYFEWYLPNDGNHWNRLNSDASNLKSKGITAVWIPPAWKGASQNDVGYGAYDLYDLGEFNQKGTVRTKYGTRSQLQAAVTSLKNNGIQVYGDVVMNHKGGADATEMVRAVEVNPNNRNQEVTGEYTIEAWTRFDFPGRGNTHSSFKWRWYHFDGVDWDQSRDVDNRIYKFRGHGKAWDWEVDTEFGNYDYLMYADYDMDHPEVVNELRNWGVWYTNTLGLDGFRIDAVKHIKYSFTRDWINHVRSATGKNMFAVAEFWKNDLGAIENYLQKTNWNHSVFDVPLHYNLYNASKSGGNYDMRNIFNGTVVQRHPSHAVTFVDNHDSQPEEALESFVEEWFKPLAYALTLTREQGYPSVFYGDYYGIPTHGVPAMRSKIDPILEARQKYAYGPQHDYLDHPDVIGWTREGDSSHPKSGLATLITDGPGGSKRMYAGLKNAGETWYDITGNRSDTVKIGSDGWGEFHVNDGSVSIYVQK

SEQ ID NO: 27027 - protein, 485 aa, Bacillus sp.
HHNGTNGTMMQYFEWYLPNDGNHWNRLNSDASNLKSKGITAVWIPPAWKGASQNDVGYGAYDLYDLGEFNQKGTVRTKYGTRSQLQAAVTSLKNNGIQVYGDVVMNHKGGADATEMVRAVEVNPNNRNQEVTGEYTIEAWTRFDFPGRGNTHSSFKWRWYHFDGVDWDQSRRLTNRIYKFRGHGKAWDWEVDTEFGNYDYLMYADYDMDHPEVVNELRNWGVWYTNTLGLDGFRIDAVKHIKYSFTRDWINHVRSATGKNMFAVAEFWKNDLGAIENYLQKTNWNHSVFDVPLHYNLYNASKSGGNYDMRNIFNGTVVQRHPSHAVTFVDNHDSQPEEALESFVEEWFKPLAYALTLTREQGYPSVFYGDYYGIPTHGVPAMRSKIDPILEARQKYAYGPQHDYLDHPDVIGWTREGDSSHPKSGLATLITDGPGGSKRMYAGLKNAGETWYDITGNRSDTVKIGSDGWGEFHVNDGSVSIYVQK

SEQ ID NO: 27028 - protein, 485 aa, Bacillus sp.
HHNGTNGTMMQYFEWYLPNDGNHWNRLNSDASNLKSKGITAVWIPPAWKGASQNDVGYGAYDLYDLGEFNQKGTVRTKYGTRSQLQAAVTSLKNNGIQVYGDVVMNHKGGADATEMVRAVEVNPNNRNQEVTGEYTIEAWTRFDFPGRGNTHSSFKWRWYHFDGVDWDQSRRLNNRIYKFRGHGKAWDWEVDTEFGNYDYLMYADYDMDHPEVVNELRNWGVWYTNTLGLDGFRIDAVKHIKYSFTRDWINHVRSATGKNMFAVAEFWKNDLGAIENYLQKTNWNHSVFDVPLHYNLYNASKSGGNYDMRNIFNGTVVQRHPSHAVTFVDNHDSQPEEALESFVEEWFKPLAYALTLTREQGYPSVFYGDYYGIPTHGVPAMRSKIDPILEARQKYAYGPQHDYLDHQDVIGWTREGDSSHPKSGLATLITDGPGGSKRMYAGLKNAGETWYDITGNRSDTVKIGSDGWGEFHVNDGSVSIYVQK

SEQ ID NO: 27029 - protein, 485 aa, Bacillus sp.
HHNGTNGTMMQYFEWYLPNDGNHWNRLNSDASNLKSKGITAVWIPPAWKGASQNDVGYGAYDLYDLGEFNQKGTVRTKYGTRSQLQAAVTSLKNNGIQVYGDVVMNHKGGADATEMVRAVEVNPNNRNQEVTGEYTIEAWTRFDFPGRGNTHSSFKWRWYHFDGVDWDQSRRLNNRIYKFRGHGKAWDWEVDTEFGNYDYLMYADYDMDHPEVVNELRNWGVWYTNTLGLDGFRIDAVKHIKYSFTRDWINHVRSATGKNMFAVAEFWKNDLGAIENYLQKTNWNHSVFDVPLHYNLYNASKSGGNYDMRNIFNGTVVQRHPSHAVTFVDNHDSQPEEALESFVEEWFKPLAYALTLTREQGYPSVFYGDYYGIPTHGVPAMRSKIDPILEARQKYAYGPQHDYLDHPDVIGWTREGDSSHPKSGLATLITDGPGGSKRMYAGLKNAGETWYDITGNRSDTVKIGSDGWGEFHVNDGSVSIYVQK

SEQ ID NO: 27030 - protein, 485 aa, Synthetic construct
HHNGTNGTMMQYFEWYLPNDGNHWNRLNSDASNLKSKGITAVWIPPAWKGASQNDVGYGAYDLYDLGEFNQKGTVRTKYGTRSQLQAAVTSLKNNGIQVYGDVVMNHKGGADATEMVRAVEVNPNNRNQEVTGEYTIEAWTRFDFPGRGNTHSSFKWRWYHFDGVDWDQSRRLNNRIYKFRGHGKAWDWEVDTENGNYDYLMYADIDMDHPEVVNELRNWGVWYTNTLGLDGFRIDAVKHIKYSFTRDWINHVRSQTGKNMFAVAEFWKNDLGAIENYLQKTNWNHSVFDVPLHYNLYNASKSGGNYDMRNIFNGTVVQRHPSHAVTFVDNHDSQPEEALESFVEEWFKPLAYALTLTREQGYPSVFYGDYYGIPTHGVPAMRSKIDPILEARQKYAYGPQHDYLDHPDVIGWTREGDSSHPKSGLATLITDGPGGSKRMYAGLKNAGETWYDITGNRSDTVKIGSDGWGEFHVNDGSVSIYVQK

SEQ ID NO: 27031 - protein, 485 aa, Synthetic construct
HHNGTNGTMMQYFEWYLPNDGNHWNRLNSDASNLKSKGITAVWIPPAWKGASQNDVGYGAYDLYDLGEFNQKGTVRTKYGTRSQLQAAVTSLKNNGIQVYGDVVMNHKGGADATEMVRAVEVNPNNRNQEVTGEYTIEAWTRFDFPGRGNTHSSFKWRWYHFDGVDWDQSRRLNNRIYKFRGHGKAWDWEVDTENGNYDYLMYADIDMDHPEVVNELRNWGVWYTNTLGLDGFRIDAVKHIKYSFTRDWINHVRSATGKNMFAVAEFWKNDLGAIENYLQKTNWNHSVFDVPLHYNLYNASKSGGNYDMRNIFNGTVVQRHPSHAVTFVENHDSQPEEALESFVEEWFKPLAYALTLTREQGYPSVFYGDYYGIPTHGVPAMRSKIDPILEARQKYAYGPQHDYLDHPDVIGWTREGDSSHPKSGLATLITDGPGGSKRMYAGLKNAGETWYDITGNRSDTVKIGSDGWGEFHVNDGSVSIYVQK

SEQ ID NO: 27032 - protein, 485 aa, Bacillus sp.
HHNGTNGTMMQYFEWYLPNDGNHWNRLNSDASNLKSKGITAVWIPPAWKGASQNDVGYGAYDLYDLGEFNQKGTVRTKYGTRSQLQAAVTSLKNNGIQVYGDVVMNHKGGADATEMVRAVEVNPNNRNQEVTGEYTIEAWTRFDFPGRGNTHSSFKWRWYHFDGVDWDQSRNVNNRIYKFRGHGKAWDWEVDTEFGNYDYLMYADYDMDHPEVVNELRNWGVWYTNTLGLDGFRIDAVKHIKYSFTRDWINHVRSATGKNMFAVAEFWKNDLGAIENYLQKTNWNHSVFDVPLHYNLYNASKSGGNYDMRNIFNGTVVQRHPSHAVTFVDNHDSQPEEALESFVDPWFKPLAYALTLTREQGYPSVFYGDYYGIPTHGVPAMRSKIDPILEARQKYAYGPQHDYLDHPDVIGWTREGDSSHPKSGLATLITDGPGGSKRMYAGLKNAGETWYDITGNRSDTVKIGSDGWGEFHVNGGSVSIYVQK

SEQ ID NO: 27033 - protein, 485 aa, Bacillus sp.
HHNGTNGTMMQYFEWYLPNDGNHWNRLNSDASNLKSKGITAVWIPPAWKAASQNDVGYGAYDLYDLGEFNQKGTVRTKYGTRSQLQAAVTSLKNNGIQVYGDVVMNHKGGADATEMVRAVEVNPNNRNQEVTGEYTIEAWTRFDFPGRGNTHSSFKWRWYHFDGVDWDQSRDLQNRIYKFRGHGKAWDWEVDTEFGNYDYLMYADYDMDHPEVVNELRNWGVWYTNTLGLDGFRIDAVKHIKYSFTRDWINHVRSATGKNMFAVAEFWKNDLGAIENYLQKTNWNHSVFDVPLHYNLYNASKSGGNYDMRNIFNGTVVQRHPSHAVTFVDNHDSQPEEALESFVEEWFKPLAYALTLTREQGYPSVFYGDYYGIPTHGVPAMRSKIDPILEARQKYAYGPQHDYLDHPDVIGWTREGDSSHPKSGLATLITDGPGGSKRMYAGLKNAGETWYDITGNRSDTVKIGSDGWGEFHVNDGSVSIYVQK

SEQ ID NO: 27034 - protein, 485 aa, Bacillus sp.
HHNGTNGTMMQYFEWYLPNDGNHWNRLNSDASNLKSKGITAVWIPPAWKGLSQNDVGYGAYDLYDLGEFNQKGTVRTKYGTRSQLQAAVTSLKNNGIQVYGDVVMNHKGGADATEMVRAVEVNPNNRNQEVTGEYTIEAWTRFDFPGRGNTHSSFKWRWYHFDGVDWDQSRDLNNRIYKFRGHGKAWDWEVDTEFGNYDYLMYADYDMDHPEVVNELRNWGVWYTNTLGLDGFRIDAVKHIKYSFTRDWINHVRSATGKNMFAVAEFWKNDLGAIENYLQKTNWNHSVFDVPLHYNLYNASKSGGNYDMRNIFNGTVVQRHPSHAVTFVDNHDSQPEEALESFVEEWFKPLAYALTLTREQGYPSVFYGDYYGIPTHGVPAMRSKIDPILEARQKYAYGPQHDYLDHPDVIGWTREGDSSHPKSGLATLITDGPGGSKRMYAGLKNAGETWYDITGNRSDTVKIGSDGWGEFHVNDGSVSIYVQK

SEQ ID NO: 27035 - protein, 483 aa, Synthetic construct
HHNGTNGTMMQYFEWYLPNDGNHWNRLNSDASNLKSKGITAVWIPPAWKGASQNDVGYGAYDLYDLGEFNQKGTVRTKYGTRSQLQAAVTSLKNNGIQVYGDVVMNHKGGADATEMVRAVEVNPNNRNQEVTGEYTIEAWTRFDFPGRGNTHSSFKWRWYHFDGVDWDQSRRLNNRIYKFRGKAWDWEVDTENGNYDYLMYADIDMDFPEVVNELRNWGVWYTNTLGLDGFRIDAVKHIKYSFTRDWINHVRSATGKNMFAVAEFWKNDLGAIENYLQKTNWNHSVFDVPLHYNLYNASKSGGNYDMRNIFNGTVVQRHPSHAVTFVDNHDSQPEEALESFVEEWFKPLAYALTLTREQGYPSVFYGDYYGIPTHGVPAMRSKIDPILEARQKYAYGPQHDYLDHPDVIGWTREGDSSHPKSGLATLITDGPGGSKRMYAGLKNAGETWYDITGNRSDTVKIGSDGWGEFHVNDGSVSIYVQK

SEQ ID NO: 27036 - protein, 483 aa, Bacillus sp.
HHNGTNGTMMQYFEWYLPNDGNHWNRLNSDASNLKSKGITAVWIPPAWKGASQNDVGYGAYDLYDLGEFNQKGTVRTKYGTRSQLQAAVTSLKNNGIQVYGDVVMNHKGGADATEMVRAVEVNPNNRNQEVTGEYTIEAWTRFDFPGRGNTHSSFKWRWYHFDGVDWDQSRRLNNRIYKFRGKAWDWEVDTEFGNYDYLMYADYDMDHPEVVNELRNWGVWYTNTLGLDGFRIDAVKHIKYSFTRDWINHVRSATGKNMFAVAEFWKNDLGAIENYLQKTNWNHSVFDVPLHYNLYNASKSGGNYDMRNIFNGTVVQRHPSHAVTFVDNHDSQPEEALESFVSEWFKPLAYALTLTREQGYPSVFYGDYYGIPTHGVPAMRSKIDPILEARQKYAYGPQHDYLDHPDVIGWTREGDSSHPKSGLATLITDGPGGSKRMYAGLKNAGETWYDITGNRSDTVKIGSDGWGEFHVNDGSVSIYVQK

SEQ ID NO: 27037 - protein, 483 aa, Bacillus sp.
HHNGTNGTMMQYFEWYLPNDGNHWNRLNSDASNLKSKGITAVWIPPAWKGASQNDVGYGAYDLYDLGEFNQKGTVRTKYGTRSQLQAAVTSLKNNGIQVYGDVVMNHKGGADATEMVRAVEVNPNNRNQEVTGEYTIEAWTRFDFPGRGNTHSSFKWRWYHFDGVDWDQSRRLNNRIYKFRGKAWDWEVDTEFGNYDYLMYADYDMDHPEVVNELRNWGVWYTNTLGLDGFRIDAVKHIKYSFTRDWINHVRSATGKNMFAVAEFWKNDLGAIENYLQKTNWNHSVFDVPLHYNLYNASKSGGNYDMRNIFNGTVVQRHPSHAVTFVDNHDSQPEEALESFVEEWFKPLAYALTLTREQGYPSVFYGDYYGIPTHGVPAMRSKIDPILEARQKYAYGPQHDYLDHPDVIGWTREGDSSHPKSGLATLITDGPGGSKRMYAGLKNAGETWYDITGNRSDTVKIGSDGWGEFHVNDGSVSIYVQK

SEQ ID NO: 27038 - protein, 485 aa, Bacillus sp.
HHNGTNGTMMQYFEWYLPNDGNHWNRLNSDASNLKSKGITAVWIPPAWKGTSQNDVGYGAYDLYDLGEFNQKGTVRTKYGTRSQLQAAVTSLKNNGIQVYGDVVMNHKGGADATEMVRAVEVNPNNRNQEVTGEYTIEAWTRFDFPGRGNTHSSFKWRWYHFDGVDWDQSRRTSNRIYKFRGHGKAWDWEVDTEFGNYDYLMYTDYDMDHPEVVNELRNWGVWYTNTLGLDGFRIDAVKHIKYSFTRDWINHVRSATGKNMFAVAEFWKNDLGAIENYLQKTNWNHSVFDVPLHYNLYNASKSGGNYDMRNIFNGTVVQRHPSHAVTFVDNHDSQPEEALESFVEEWFKPLAYALTLTREQGYPSVFYGDYYGIPTHGVPAMRSKIDPILEARQKYAYGPQHDYLDHPDVIGWTREGDSSHPKSGLATLITDGPGGSKRMYAGLKNAGETWYDITGNRSDTVKIGSDGWGEFHVNDGSVSIYVQK

SEQ ID NO: 27039 - protein, 485 aa, Synthetic construct
HHNGTNGTMMQYFEWYLPNDGNHWNRLNSDASNLKSKGITAVWIPPAWKGASQNDVGYGAYDLYDLGEFNQKGTVRTKYGTRSQLQAAVTSLKNNGIQVYGDVVMNHKGGADATEMVRAVEVNPNNRNQEVTGEYTIEAWTRFDFPGRGNTHSSFKWRWYHFDGVDWDQSRRLNNRIYKFRGHGKAWDWEVDTENGNYDYLMYADIDMDHPEVVNELRNWGVWYTNTLGLDGFRIDAVKHIKYSFTRDWINHVRSATGKNMFAVAEFWKNDLGAIENYLQKVNWNHSVFDVPLHYNLYNASKSGGNYDMRNIFNGTVVQRHPSHAVTFVDNHDSQPEEALESFVEEWFKPLAYALTLTREQGYPSVFYGDYYGIPTHGVPAMRSKIDPILEARQKYAYGPQHDYLDHPDVIGWTREGDSSHPKSGLATLITDGPGGSKRMYAGLKNAGETWYDITGNRSDTVKIGSDGWGEFHVNDGSVSIYVQK

SEQ ID NO: 27040 - protein, 485 aa, Bacillus sp.
HHNGTNGTMMQYFEWYLPNDGNHWNRLNSDASNLKSKGITAVWIPPAWKGASQNDVGYGAYDLYDLGEFNQKGTVRTKYGTRSQLQAAVTSLKNNGIQVYGDVVMNHKGGADATEMVRAVEVNPNNRNQEVTGEYTIEAWTRFDFPGRGNTHSSFKWRWYHFDGVDWDQSRNTQNRIYKFRGHGKAWDWEVDTEFGNYDYLMYADYDMDHPEVVNELRNWGVWYTNTLGLDGFRIDAVKHIKYSFTRDWINHVRSATGKNMFAVAEFWKNDLGAIENYLQKTNWNHSVFDVPLHYNLYNASKRGGNYDMRNIFNGTVVQRHPSHAVTFVDNHDSQPEEALESFVEEWFKPLAYALTLTREQGYPSVFYGDYYGIPTHGVPAMRSKIDPILEARQKYAYGPQHDYLDHPDVIGWTREGDSSHPKSGLATLITDGPGGSKRMYAGLKNAGETWYDITGNRSDTVKIGSDGWGEFHVNDGSVSIYVQK

SEQ ID NO: 27041 - protein, 483 aa, Bacillus sp.
HHNGTNGTMMQYFEWYLPNDGNHWNRLNSDASNLKSKGITAVWIPPAWKGASQNDVGYGAYDLYDLGEFNQKGTVRTKYGTRSQLQAAVTSLKNNGIQVYGDVVMNHKGGADATEMVRAVEVNPNNRNQEVTGEYTIEAWTRFDFPGRGNTHSSFKWRWYHFDGVDWDQSRVLNNRIYKFRGKAWDWEVDTEFGNYDYLMYADYDMDHPEVVNELRNWGVWYTNTLGLDGFRIDAVKHIKYSFTRDWINHVRSATGKNMFAVAEFWKNDLGAIENYLQKTNWNHSVFDVPLHYNLYNASKSGGNYDMRNIFNGTVVQRHPSHAVTFVDNHDSQPEEALESFVEEWFKPLAYALTLTREQGYPSVFYGDYYGIPTHGVPAMRSKIDPILEARQKYAYGPQHDYLDHPDVIGWTREGDSSHPKSGLATLITDGPGGSKRMYAGLKNAGETWYDITGNRSDTVKIGSDGWGEFHVNDGSVSIYVQK

SEQ ID NO: 27042 - protein, 483 aa, Synthetic construct
HHNGTNGTMMQYFEWYLPNDGNHWNRLNSDASNLKSKGITAVWIPPAWKGASQNDVGYGAYDLYDLGEFNQKGTVRTKYGTRSQLQAAVTSLKNNGIQVYGDVVINHKGGADATEMVRAVEVNPNNRNQEVTGEYTIEAWTRFDFPGRGNTHSSFKWRWYHFDGVDWDQSRRLNNRIYKFRGKAWDWEVDTENGNYDYLMYADYDMDHPEVVNELRNWGVWYTNTLGLDGFRIDAVKHIKYSFTRDWINHVRSATGKNMFAVAEFWKNDLGAIENYLQKTNWNHSVFDVPLHYNLYNASKSGGNYDMRNIFNGTVVQRHPSHAVTFVDNHDSQPEEALESFVEEWFKPLAYALTLTREQGYPSVFYGDYYGIPTHGVPAMRSKIDPILEARQKYAYGPQHDYLDHPDVIGWTREGDSSHPKSGLATLITDGPGGSKRMYAGLKNAGETWYDITGNRSDTVKIGSDGWGEFHVNDGSVSIYVQK

SEQ ID NO: 27043 - protein, 485 aa, Bacillus sp.
HHNGTNGTMMQYFEWYLPNDGNHWNRLNSDASNLKSKGITAVWIPPAWKGASQNDVGYGAYDLYDLGEFNQKGTVRTKYGTRSQLQAAVTSLKNNGIQVYGDVVMNHKGGADATEMVRAVEVNPNNRNQEVTGEYTIEAWTRFDFPGRGNTHSSFKWRWYHFDGVDWDQSRRLNNRIYKFRNHGKAWDWEVDTEFGNYDYLMYADYDMDHPEVVNELRNWGVWYTNTLGLDGFRIDAVKHIKYSFTRDWINHVRSATGKNMFAVAEFWKNDLGAIENYLQKTNWNHSVFDVPLHYNLYNASKSGGNYDMRNIFNGTVVQRHPSHAVTFVDNHDSQPEEALESFVEEWFKPLAYALTLTREQGYPSVFYGDYYGIPTHGVPAMRSKIDPILEARQKYAYGPQHDYLDHPDVIGWTREGDSSHPKSGLATLITDGPGGSKRMYAGLKNAGETWYDITGNRSDTVKIGSDGWGEFHVNDGSVSIYVQK

SEQ ID NO: 27044 - protein, 485 aa, Synthetic construct
HHNGTNGTMMQYFEWYLPNDGNHWNRLNSDASNLKSKGITAVWIPPAWKGASQNDVGYGAYDLYDLGEFNQKGTVRTKYGTRSQLQAAVTSLKNNGIQVYGDVVMNHKGGADATEMVRAVEVNPNNRNQEVTGEYTIEAWTRFDFPGRGNTHSSFKWRWYHFDGVDWDQSRRLNNRIYKFRGHGKAWDWEVDTENGNYDYLMYADIDMDHPEVVNELRNWGVWYTNTLGLDGFRIDAVKHIKYSFTRDWINHVRSATGKNMFAVAEFWKNDLGAIENYLQKTNWNHSVFDVPLHYNLYNASKSGGNYDMRNIFNGTVVQRHPSHAVTFVDNHDSQPEEALESFVEEWFKPLAYALTLTREQGYPSVFYGDYYGIPTHGVPSMRSKIDPILEARQKYAYGPQHDYLDHPDVIGWTREGDSSHPKSGLATLITDGPGGSKRMYAGLKNAGETWYDITGNRSDTVKIGSDGWGEFHVNDGSVSIYVQK

SEQ ID NO: 27045 - protein, 485 aa, Bacillus sp.
HHNGTNGTMMQYFEWYLPNDGNHWNRLNSDASNLKSKGITAVWIPPAWKGASQNDVGYGAYDLYDLGEFNQKGTVRTKYGTRSQLQAAVTSLKNNGIQVYGDVVMNHKGGADATEMVRAVEVNPNNRNQEVTGEYTIEAWTQFDFPGRGNTHSSFKWRWYHFDGVDWDQSRRLNNRIYKFRGHGKAWDWEVDTEFGNYDYLMYADYDMDHPEVVNELRNWGVWYTNTLGLDGFRIDAVKHIKYSFTRDWINHVRSATGKNMFAVAEFWKNDLGAIENYLQKTNWNHSVFDVPLHYNLYNASKSGGNYDMRNIFNGTVVQRHPSHAVTFVDNHDSQPEEALESFVEEWFKPLAYALTLTREQGYPSVFYGDYYGIPTHGVPAMRSKIDPILEARQKYAYGPQHDYLDHPDVIGWTREGDSSHPKSGLATLITDGPGGSKRMYAGLKNAGETWYDITGNRSDTVKIGSDGWGEFHVNDGSVSIYVQK

SEQ ID NO: 27046 - protein, 483 aa, Synthetic construct
HHNGTNGTMMQYFEWYLPNDGNHWNRLNSDASNLKSKGITAVWIPPAWKGASQNDVGYGAYDLYDLGEFNQKGTVRTKYGTRSQLQAAVTSLKNNGIQVYGDVVMNHKGGADATEMVRAVEVNPNNRNQEVTGEYTIEAWTRFDFPGRGNTHSSFKWRWYHFDGVDWDQSRRLNNRIYKFRGKAWDWEVDTENGNYDYLMYADYDMDHPESVNELRNWGVWYTNTLGLDGFRIDAVKHIKYSFTRDWINHVRSATGKNMFAVAEFWKNDLGAIENYLQKTNWNHSVFDVPLHYNLYNASKSGGNYDMRNIFNGTVVQRHPSHAVTFVDNHDSQPEEALESFVEEWFKPLAYALTLTREQGYPSVFYGDYYGIPTHGVPAMRSKIDPILEARQKYAYGPQHDYLDHPDVIGWTREGDSSHPKSGLATLITDGPGGSKRMYAGLKNAGETWYDITGNRSDTVKIGSDGWGEFHVNDGSVSIYVQK

SEQ ID NO: 27047 - protein, 485 aa, Bacillus sp.
HHNGTNGTMMQYFEWYLPNDGNHWNRLNSDASNLKSKGITAVWIPPAWKGASQNDVGYGAYDLYDLGEFNQKGTVRTKYGTRSQLQAAVTSLKNNGIQVYGDVVMNHKGGADATEMVRAVEVNPNNRNQEVTGEYTIEAWTRFDFPGRGNTHSSFKWRWYHFDGVDWDQSRKISNRIYKFRGHGKAWDWEVDTEFGNYDYLMYADYDMDHPEVVNELRNWGVWYTNTLGLDGFRIDAVKHIKYSFTRDWINHVRSATGKNMFAVAEFWKNDLGAIENYLQKTNWNHSVFDVPLHYNLYNASKSGGNYDMRNIFNGTVVQRHPSHAVTFVDNHDSQPEEALESFVEEWFKPLAYALTLTREQGYPSVFYGDYYGIPTHGVPAMRSKIDPILEARQKYAYGPQHDYLDHPDVIGWTREGDSSHPKSGLATLITDGPGGSKRMYAGLKNAGETWYDITGNRSDTVKIGSDGWGEFHVNDGSVSIYVQK

SEQ ID NO: 27048 - protein, 485 aa, Synthetic construct
HHNGTNGTMMQYFEWYLPNDGNHWNRLNSDASNLKSKGITAVWIPPAWKGASQNDVGYGAYDLYDLGEFNQKGTVRTKYGTRSQLQAAVTSLKNNGIQVYGDVVMNHKGGADATEMVRAVEVNPNNRNQEVTGEYTIEAWTRFDFPGRGSTHSSFKWRWYHFDGVDWDQSRRLNNRIYKFRGHGKAWDWEVDTENGNYDYLMYADIDMDHPEVVNELRNWGVWYTNTLGLDGFRIDAVKHIKYSFTRDWINHVRSATGKNMFAVAEFWKNDLGAIENYLQKTNWNHSVFDVPLHYNLYNASKSGGNYDMRNIFNGTVVQRHPSHAVTFVDNHDSQPEEALESFVEEWFKPLAYALTLTREQGYPSVFYGDYYGIPTHGVPAMRSKIDPILEARQKYAYGPQHDYLDHPDVIGWTREGDSSHPKSGLATLITDGPGGSKRMYAGLKNAGETWYDITGNRSDTVKIGSDGWGEFHVNDGSVSIYVQK

SEQ ID NO: 27049 - protein, 483 aa, Bacillus sp.
HHNGTNGTMMQYFEWYLPNDGNHWNRLNSDASNLKSKGITAVWIPPAWKGASQNDVGYGAYDLYDLGEFNQKGTVRTKYGTRSQLQAAVTSLKNNGIQVYGDVVMNHKGGADATEMVRAVEVNPNNRNQEVTGEYTIEAWTRFDFPGRGNTHSSFKWRWYHFDGVDWDQSRNLDNRIYKFRGKAWDWEVDTEFGNYDYLMYADYDMDHPEVVNELRNWGVWYTNTLGLDGFRIDAVKHIKYSFTRDWINHVRSATGKNMFAVAEFWKNDLGAIENYLQKTNWNHSVFDVPLHYNLYNASKSGGNYDMRNIFNGTVVQRHPSHAVTFVDNHDSQPEEALESFVEEWFKPLAYALTLTREQGYPSVFYGDYYGIPTHGVPAMRSKIDPILEARQKYAYGPQHDYLDHPDVIGWTREGDSSHPKSGLATLITDGPGGSKRMYAGLKNAGETWYDITGNRSDTVKIGSDGWGEFHVNDGSVSIYVQK

SEQ ID NO: 27050 - protein, 483 aa, Bacillus sp.
HHNGTNGTMMQYFEWYLPNDGNHWNRLNSDASNLKSKGITAVWIPPAWKGASQNDVGYGAYDLYDLGEFNQKGTVRTKYGTRSQLQAAVTSLKNNGIQVYGDVVMNHKGGADATEMVRAVEVNPNNRNQEVTGEYTIEAWTRFDFPGRGNTHSSFKWRWYHFDGVDWDQSRRLNNRIYKFRGKAWDWEVDNEFGNYDYLMYADYDMDHPEVVNELRNWGVWYTNTLGLDGFRIDAVKHIKYSFTRDWINHVRSATGKNMFAVAEFWKNDLGAIENYLQKTNWNHSVFDVPLHYNLYNASKSGGNYDMRNIFNGTVVQRHPSHAVTFVDNHDSQPEEALESFVEEWFKPLAYALTLTREQGYPSVFYGDYYGIPTHGVPAMRSKIDPILEARQKYAYGPQHDYLDHPDVIGWTREGDSSHPKSGLATLITDGPGGSKRMYAGLKNAGETWYDITGNRSDTVKIGSDGWGEFHVNDGSVSIYVQK

SEQ ID NO: 27051 - protein, 485 aa, Bacillus sp.
HHNGTNGTMMQYFEWYLPNDGNHWNRLNSDASNLKSKGITAVWIPPAWKGASQNDVGYGAYDLYDLGEFNQKGTVRTKYGTRSQLQAAVTSLKNNGIQVYGDVVMNHKGGADATEMVRAVEVNPNNRNQEVTGEYTIEAWTRFDFPGRGNTHSSFKWRWYHFDGVDWDQSRRLNNRIYKFRGHGKAWDWEVDTEFGNYDYLMYADYDMDHPEVVNELRNWGVWYTNTLGLDGFRIDAVKHIKYSFTRDWINHVRSATGKNMFAVAEFWKNDLGAIENYLQKTNWNHSVFDVPLHYNLYNASKSGGNYDMREIFNGTVVQRHPSHAVTFVDNHDSQPEEALESFVEEWFKPLAYALTLTREQGYPSVFYGDYYGIPTHGVPAMRSKIDPILEARQKYAYGPQHDYLDHPDVIGWTREGDSSHPKSGLATLITDGPGGSKRMYAGLKNAGETWYDITGNRSDTVKIGSDGWGEFHVNDGSVSIYVQK

SEQ ID NO: 27052 - protein, 483 aa, Bacillus sp.
HHNGTNGTMMQYFEWYLPNDGNHWNRLNSDASNLKSKGITAVWIPPAWKGASQNDVGYGAYDLYDLGEFNQKGTVRTKYGTRSQLQAAVTSLKNNGIQVYGDVVMNHKGGADATEMVRAVEVNPNNRNQEVTGEYTIEAWTRFDFPGRGNTHSSFKWRWYHFDGVDWDQSRRLNNRIYKFRGKAWDWEVDAEFGNYDYLMYADYDMDHPEVVNELRNWGVWYTNTLGLDGFRIDAVKHIKYSFTRDWINHVRSATGKNMFAVAEFWKNDLGAIENYLQKTNWNHSVFDVPLHYNLYNASKSGGNYDMRNIFNGTVVQRHPSHAVTFVDNHDSQPEEALESFVEEWFKPLAYALTLTREQGYPSVFYGDYYGIPTHGVPAMRSKIDPILEARQKYAYGPQHDYLDHPDVIGWTREGDSSHPKSGLATLITDGPGGSKRMYAGLKNAGETWYDITGNRSDTVKIGSDGWGEFHVNDGSVSIYVQK

SEQ ID NO: 27053 - protein, 483 aa, Bacillus sp.
HHNGTNGTMMQYFEWYLPNDGNHWNRLNSDASNLKSKGITAVWIPPAWKGASQNDVGYGAYDLYDLGEFNQKGTVRTKYGTRSQLQAAVTSLKNNGIQVYGDVVMNHKGGADATEMVRAVEVNPNNRNQEVTGEYTIEAWTRFDFPGRGNTHSSFKWRWYHFDGVDWDQSRRLNNRIYKFRGKAWDWEVDTEFGNYDYLMYADYDMDHPEVVNELRNWGVWYTNTLGLDGFRIDAVKHIKYSFTRDWINHVRSATGKNMFAVAEFWKNDLGAIENYLQKTNWNHSVFDVPLHYNLYNASKSGGNYDMREIFNGTVVQRHPSHAVTFVDNHDSQPEEALESFVEEWFKPLAYALTLTREQGYPSVFYGDYYGIPTHGVPAMRSKIDPILEARQKYAYGPQHDYLDHPDVIGWTREGDSSHPKSGLATLITDGPGGSKRMYAGLKNAGETWYDITGNRSDTVKIGSDGWGEFHVNDGSVSIYVQK

SEQ ID NO: 27054 - protein, 483 aa, Bacillus sp.
HHNGTNGTMMQYFEWYLPNDGNHWNRLNSDASNLKSKGITAVWIPPAWKATSQNDVGYGAYDLYDLGEFNQKGTVRTKYGTRSQLQAAVTSLKNNGIQVYGDVVMNHKGGADATEMVRAVEVNPNNRNQEVTGEYTIEAWTRFDFPGRGNTHSSFKWRWYHFDGVDWDQSRELNNRIYKFRGKAWDWEVDTEFGNYDYLMYADYDMDHPEVVNELRNWGVWYTNTLGLDGFRIDAVKHIKYSFTRDWINHVRSATGKNMFAVAEFWKNDLGAIENYLQKTNWNHSVFDVPLHYNLYNASKSGGNYDMRNIFNGTVVQRHPSHAVTFVDNHDSQPEEALESFVEEWFKPLAYALTLTREQGYPSVFYGDYYGIPTHGVPAMRSKIDPILEARQKYAYGPQHDYLDHPDVIGWTREGDSSHPKSGLATLITDGPGGSKRMYAGLKNAGETWYDITGNRSDTVKIGSDGWGEFHVNDGSVSIYVQK

SEQ ID NO: 27055 - protein, 483 aa, Bacillus sp.
HHNGTNGTMMQYFEWYLPNDGNHWNRLNSDASNLKSKGITAVWIPPALKGTSQNDVGYGAYDLYDLGEFNQKGTVRTKYGTRSQLQAAVTSLKNNGIQVYGDVVMNHKGGADATEMVRAVEVNPNNRNQEVTGEYTIEAWTRFDFPGRGNTHSSFKWRWYHFDGVDWDQSRQLSNRIYKFRGKAWDWEVDTEFGNYDYLMYTDYDMDHPEVVNELRNWGVWYTNTLGLDGFRIDAVKHIKYSFTRDWINHVRSATGKNMFAVAEFWKNDLGAIENYLQKTNWNHSVFDVPLHYNLYNASKSGGNYDMRNIFNGTVVQRHPSHAVTFVDNHDSQPEEALESFVEEWFKPLAYALTLTREQGYPSVFYGDYYGIPTHGVPAMRSKIDPILEARQKYAYGPQHDYLDHPDVIGWTREGDSSHPKSGLATLITDGPGGSKRMYAGLKNAGETWYDITGNRSDTVKIGSDGWGEFHVNDGSVSIYVQK

SEQ ID NO: 27056 - protein, 485 aa, Bacillus sp.
HHNGTNGTMMQYFEWYLPNDGNHWNRLNSDASNLKSKGITAVWIPPAWKGASQNDVGYGAYDLYDLGEFNQKVTVRTKYGTRSQLQAAVTSLKNNGIQVYGDVVMNHKGGADATEMVRAVEVNPNNRNQEVTGEYTIEAWTRFDFPGRGNTHSSFKWRWYHFDGVDWDQSRQLENRIYKFRGHGKAWDWEVDTEFGNYDYLMYADYDMDHPEVVNELRNWGVWYTNTLGLDGFRIDAVKHIKYSFTRDWINHVRSATGKNMFAVAEFWKNDLGAIENYLQKTNWNHSVFDVPLHYNLYNASKSGGNYDMRNIFNGTVVQRHPSHAVTFVDNHDSQPEEALESFVEEWFKPLAYALTLTREQGYPSVFYGDYYGIPTHGVPAMRSKIDPILEARQKYAYGPQHDYLDHPDVIGWTREGDSSHPKSGLATLITDGPGGSKRMYAGLKNAGETWYDITGNRSDTVKIGSDGWGEFHVNDGSVSIYVQK

SEQ ID NO: 27057 - protein, 485 aa, Bacillus sp.
HHNGTNGTMMQYFEWYLPNDGNHWNRLNSDASNLKSKGITAVWIPPAWKGASQNDVGYGAYDLYDLGEFNQKGTVRTKYGTRSQLQAAVTSLKNNGIQVYGDVVMNHKGGADATEMVRAVEVNPNNRNQEVTGEYTIEAWTRFDFPGRGNTHSSFKWRWYHFDGVDWDQSRRLNNRIYKFRGHGKAWDWEVDTEFGNYDYLMYADYDMDHPEVVNELRNWGVWYTNTLGLDGFRIDAVKHIKYSFTRDWINHVRSATGKNMFAVAEFWKNDLGAIENYLQKTNWNHSVFDVPLHYNLYNASKSGGNYDMRNIFNGTVVQTHPSHAVTFVDNHDSQPEEALESFVEEWFKPLAYALTLTREQGYPSVFYGDYYGIPTHGVPAMRSKIDPILEARQKYAYGPQHDYLDHPDVIGWTREGDSSHPKSGLATLITDGPGGSKRMYAGLKNAGETWYDITGNRSDTVKIGSDGWGEFHVNDGSVSIYVQK

SEQ ID NO: 27058 - protein, 485 aa, Bacillus sp.
HHNGTNGTMMQYFEWYLPNDGNHWNRLNSDASNLKSKGITAVWIPPAWKGTSQNDVGYGAYDLYDLGEFNQKGTVRTKYGTRSQLQAAVTSLKNNGIQVYGDVVMNHKGGADATEMVRAVEVNPNNRNQEVTGEYTIEAWTRFDFPGRGNTHSSFKWRWYHFDGVDWDQSRNLNNRIYKFRGHGKAWDWEVDTEFGNYDYLMYVDYDMDHPEVVNELRNWGVWYTNTLGLDGFRIDAVKHIKYSFTRDWINHVRSATGKNMFAVAEFWKNDLGAIENYLQKTNWNHSVFDVPLHYNLYNASKSGGNYDMRNIFNGTVVQRHPSHAVTFVDNHDSQPEEALESFVEEWFKPLAYALTLTREQGYPSVFYGDYYGIPTHGVPAMRSKIDPILEARQKYAYGPQHDYLDHPDVIGWTREGDSSHPKSGLATLITDGPGGSKRMYAGLKNAGETWYDITGNRSDTVKIGSDGWGEFHVNDGSVSIYVQK

SEQ ID NO: 27059 - protein, 485 aa, Bacillus sp.
HHNGTNGTMMQYFEWYLPNDGNHWNRLNSDASNLKSKGITAVWIPPAWKAVSQNDVGYGAYDLYDLGEFNQKGTVRTKYGTRSQLQAAVTSLKNNGIQVYGDVVMNHKGGADATEMVRAVEVNPNNRNQEVTGEYTIEAWTRFDFPGRGNTHSSFKWRWYHFDGVDWDQSRRFDNRIYKFRGHGKAWDWEVDTEFGNYDYLMYADYDMDHPEVVNELRNWGVWYTNTLGLDGFRIDAVKHIKYSFTRDWINHVRSATGKNMFAVAEFWKNDLGAIENYLQKTNWNHSVFDVPLHYNLYNASKSGGNYDMRNIFNGTVVQRHPSHAVTFVDNHDSQPEEALESFVDPWFKPLAYALTLTREQGYPSVFYGDYYGIPTHGVPAMRSKIDPILEARQKYAYGPQHDYLDHPDVIGWTREGDSSHPKSGLATLITDGPGGSKRMYAGLKNAGETWYDITGNRSDTVKIGSDGWGEFHVNGGSVSIYVQK

SEQ ID NO: 27060 - protein, 485 aa, Synthetic construct
HHNGTNGTMMQYFEWYLPNDGNHWNRLNSDASNLKSKGITAVWIPPAWKGASQNDVGYGAYDLYDLGEFNQKGTVRTKYGTRSQLQAAVTSLKNNGIQVYGDVVMNHKGGADATEMVRAVEVNPNNRNQEVTGEYTIEAWTRFDFPGRGNTHSSFKWRWYHFDGVDWDQSRRLNNRIYKFRGHGKAWDWEVDTENGNYDYLMYADIDMDHPEVVNELRNWGVWYTNTLGLDGFRIDAVKHIKYSFTRDWINHVRSATGKNMFAVAEFWKNDLGAIENYLQKTNWNHSVFDVPLHYNLYNASKSGGNYDMRNIFNGTVVQRHPSHAVTFVDNHDSQPEEALESFVEEWFKPLAYALTLTREQGYPSVFYGDYYGIPTRGVPAMRSKIDPILEARQKYAYGPQHDYLDHPDVIGWTREGDSSHPKSGLATLITDGPGGSKRMYAGLKNAGETWYDITGNRSDTVKIGSDGWGEFHVNDGSVSIYVQK

SEQ ID NO: 27061 - protein, 483 aa, Bacillus sp.
HHNGTNGTMMQYFEWYLPNDGNHWNRLNSDASNLKSKGITAVWIPPAWKGVSQNDVGYGAYDLYDLGEFNQKGTVRTKYGTRSQLQAAVTSLKNNGIQVYGDVVMNHKGGADATEMVRAVEVNPNNRNQEVTGEYTIEAWTRFDFPGRGNTHSSFKWRWYHFDGVDWDQSRRLQNRIYKFRGKAWDWEVDTEFGNYDYLMYVDYDMDHPEVVNELRNWGVWYTNTLGLDGFRIDAVKHIKYSFTRDWINHVRSATGKNMFAVAEFWKNDLGAIENYLQKTNWNHSVFDVPLHYNLYNASKSGGNYDMRNIFNGTVVQRHPSHAVTFVDNHDSQPEEALESFVEEWFKPLAYALTLTREQGYPSVFYGDYYGIPTHGVPAMRSKIDPILEARQKYAYGPQHDYLDHPDVIGWTREGDSSHPKSGLATLITDGPGGSKRMYAGLKNAGETWYDITGNRSDTVKIGSDGWGEFHVNDGSVSIYVQK

SEQ ID NO: 27062 - protein, 485 aa, Bacillus sp.
HHNGTNGTMMQYFEWYLPNDGNHWNRLNSDASNLKSKGITAVWIPPAWKGASQNDVGYGAYDLYDLGEFNQKGTVRTKYGTRSQLQAAVTSLKNNGIQVYGDVVMNHKGGADATEMVRAVEVNPNNRNQEVTGEYTIEAWTRFDFPGRGNTHSSFKWRWYHFDGVDWDQSRRLNNRIYKFRGHGKAWDWEVDTEFGNYDYLMYADYDMDHPEVVNELRNWGVWYTNTLGLDGFRIDAVKHIKYSFTRDWINHVRSATGKNMFAVAEFWKNDLGAIENYLRKTNWNHSVFDVPLHYNLYNASKSGGNYDMRNIFNGTVVQRHPSHAVTFVDNHDSQPEEALESFVEEWFKPLAYALTLTREQGYPSVFYGDYYGIPTHGVPAMRSKIDPILEARQKYAYGPQHDYLDHPDVIGWTREGDSSHPKSGLATLITDGPGGSKRMYAGLKNAGETWYDITGNRSDTVKIGSDGWGEFHVNDGSVSIYVQK

SEQ ID NO: 27063 - protein, 485 aa, Bacillus sp.
HHNGTNGTMMQYFEWYLPNDGNHWNRLNSDASNLKSKGITAVWIPPAWKGASQNDVGYGAYDLYDLGEFNQKGTVRTKYGTRSQLQAAVTSLKNNGIQVYGDVVMNHKGGADATEMVRAVEVNPNNRNQEVTGEYTIEAWTRFDFPGRGNTHSSFKWRWYHFDGVDWDQSRRLNNRIYKFRGHGKAWDWEVDTEFGNYDYLMYADYDMDHPEVVNELRNWGVWYTNTLGLDGFRIDAVKHIKYSFTRDWINHVRSATGKNMFAVAEFWKNDLGAIENYLQKTNWNHSVFDVPLHYNLYNASKSGGNYDMRNIFNGTVVQRHPSHAVTFVDNHDSQPEEALESFVDTWFKPLAYALTLTREQGYPSVFYGDYYGIPTHGVPAMRSKIDPILEARQKYAYGPQHDYLDHPDVIGWTREGDSSHPKSGLATLITDGPGGSKRMYAGLKNAGETWYDITGNRSDTVKIGSDGWGEFHVNGGSVSIYVQK

SEQ ID NO: 27064 - protein, 483 aa, Bacillus sp.
HHNGTNGTMMQYFEWYLPNDGNHWNRLNSDASNLKSKGITAVWIPPAWKGTSQNDVGYGAYDLYDLGEFNQKGTVRTKYGTRSQLQAAVTSLKNNGIQVYGDVVMNHKGGADATEMVRAVEVNPNNRNQEVTGEYTIEAWTRFDFPGRGNTHSSFKWRWYHFDGVDWDQSRRTSNRIYKFRGKAWDWEVDTEFGNYDYLMYTDYDMDHPEVVNELRNWGVWYTNTLGLDGFRIDAVKHIKYSFTRDWINHVRSATGKNMFAVAEFWKNDLGAIENYLQKTNWNHSVFDVPLHYNLYNASKSGGNYDMRNIFNGTVVQRHPSHAVTFVDNHDSQPEEALESFVEEWFKPLAYALTLTREQGYPSVFYGDYYGIPTHGVPAMRSKIDPILEARQKYAYGPQHDYLDHPDVIGWTREGDSSHPKSGLATLITDGPGGSKRMYAGLKNAGETWYDITGNRSDTVKIGSDGWGEFHVNDGSVSIYVQK

SEQ ID NO: 27065 - protein, 483 aa, Bacillus sp.
HHNGTNGTMMQYFEWYLPNDGNHWNRLNSDASNLKSKGITAVWIPPAWKGASQNDVGYGAYDLYDLGEFNQKGTVRTKYGTRSQLQAAVTSLKNNGIQVYGDVVMNHKGGADATEMVRAVEVNPNNRNQEVTGEYTIEAWTRFDFPGRGNTHSSFKWRWYHFDGVDWDQSRDVDNRIYKFRGKAWDWEVDTEFGNYDYLMYADYDMDHPEVVNELRNWGVWYTNTLGLDGFRIDAVKHIKYSFTRDWINHVRSATGKNMFAVAEFWKNDLGAIENYLQKTNWNHSVFDVPLHYNLYNASKSGGNYDMRNIFNGTVVQRHPSHAVTFVDNHDSQPEEALESFVEEWFKPLAYALTLTREQGYPSVFYGDYYGIPTHGVPAMRSKIDPILEARQKYAYGPQHDYLDHPDVIGWTREGDSSHPKSGLATLITDGPGGSKRMYAGLKNAGETWYDITGNRSDTVKIGSDGWGEFHVNDGSVSIYVQK

SEQ ID NO: 27066 - protein, 485 aa, Synthetic construct
HHNGTNGTMMQYFEWYLPNDGNHWNRLNSDASNLKSKGITAVWIPPAWKGASQNDVGYGAYDLYDLGEFNQKGTVRTKYGTRSQLQAAVTSLKNNGIQVYGDVVMNHKGGADATEMVRAVEVNPNNRNQEVTGEYTIEAWTRFDFPGRGNTHSSFKWRWYHFDGVDWDQSRRLNNRIYKFRGHGKAWDWEVDTENGNYDYLMYADIDMDHPEVVNELRNWGVWYTNTLGLDGFRIDAVKHIKYSFTRDWINHVRSATGKNMFAVAEFWKNDLGAIENYLQKTNWNHSVFDVPLHYNLYNASKSGGNYDMRNIFNGTVVQRHPSHAVTFVDNHDSQPEEALESFVEEWFKPLAYALTLTRESGYPSVFYGDYYGIPTHGVPAMRSKIDPILEARQKYAYGPQHDYLDHPDVIGWTREGDSSHPKSGLATLITDGPGGSKRMYAGLKNAGETWYDITGNRSDTVKIGSDGWGEFHVNDGSVSIYVQK

SEQ ID NO: 27067 - protein, 485 aa, Bacillus sp.
HHNGTNGTMMQYFEWYLPNDGNHWNRLNSDASNLKSKGITAVWIPPAWKGASQNDVGYGAYDLYDLGEFNQKGTVRTKYGTRSQLQAAVTSLKNNGIQVYGDVVMNHKGGADATEMVRAVEVNPNNRNQEVTGEYTIEAWTRFDFPGRGNTHSSFKWRWYHFDGVDWDQSRRLNNRIYKFRGHGKAWDWEVDTEFGNYDYLMYADYDMDHPEVVNELRNWGVWYTNTLGLDGFRIDAVKHIKYSFTRDWINHVRSATGKNMFAVAEFWKNDLGAIENYLQKTNWNHSVFDVPLHYNLYNASKSGGNYDMRNIFNGTVVQRHPSHAVTFVDNHDSQPEEALESFVEEWFKPLAYALTLTREQGYPSVFYGDYYGIPTHGVPAMRSKIDPILEARQKYAYGPQHDYLDHPDVIGWTREGDSSHPKSGLATLETDGPGGSKRMYAGLKNAGETWYDITGNRSDTVKIGSDGWGEFHVNDGSVSIYVQK

SEQ ID NO: 27068 - protein, 486 aa, Bacillus sp.
HHNGTNGTMMQYFEWYLPNDGNHWNRLNSDASNLKSKGITAVWIPPAWKGASQNDVGYGAYDLYDLGEFNQKGTVRTKYGTRSQLQAAVTSLKNNGIQVYGDVVMNHKGGADATEMVRAVEVNPNNRNQEVTGEYTIEAWTRFDFPGRGNTHSSFKWRWYHFDGVDWDQSRRLNNRIYKFRGHGKAWDWEVDTEFGNYDYLMYADYDMDHPEVVNELRNWGVWYTNTLGLDGFRIDAVKHIKYSFTRDWINHVRSATGKNMFAVAEFWKNDLGAIENYLQKTNWNHSVFDVPLHYNLYNASKSGGNYDMRNIFNGTVVQRHPSHAVTFVDNHDSQHGEEALESFVEEWFKPLAYALTLTREQGYPSVFYGDYYGIPTHGVPAMRSKIDPILEARQKYAYGPQHDYLDHPDVIGWTREGDSSHPKSGLATLITDGPGGSKRMYAGLKNAGETWYDITGNRSDTVKIGSDGWGEFHVNDGSVSIYVQK

SEQ ID NO: 27069 - protein, 485 aa, Bacillus sp.
HHNGTNGTMMQYFEWYLPNDGNHWNRLNSDASNLKSKGITAVWIPPAWKGASQNDVGYGAYDLYDLGEFNQKGTVRTKYGTRSQLQAAVTSLKNNGIQVYGDVVMNHKGGADATEMVRAVEVNPNNRNQEVTGEYTIEAWTRFDFPGRGNTHSSFKWRWYHFDGVDWDQSRKFNNRIYKFRGHGKAWDWEVDTEFGNYDYLMYTDYDMDHPEVVNELRNWGVWYTNTLGLDGFRIDAVKHIKYSFTRDWINHVRSATGKNMFAVAEFWKNDLGAIENYLQKTNWNHSVFDVPLHYNLYNASKSGGNYDMRNIFNGTVVQRHPSHAVTFVDNHDSQPEEALESFVEEWFKPLAYALTLTREQGYPSVFYGDYYGIPTHGVPAMRSKIDPILEARQKYAYGPQHDYLDHPDVIGWTREGDSSHPKSGLATLITDGPGGSKRMYAGLKNAGETWYDITGNRSDTVKIGSDGWGEFHVNDGSVSIYVQK

SEQ ID NO: 27070 - protein, 485 aa, Bacillus sp.
HHNGTNGTMMQYFEWYLPNDGNHWNRLNSDASNLKSKGITAVWIPPAWKATSQNDVGYGAYDLYDLGEFNQKGTVRTKYGTRSQLQAAVTSLKNNGIQVYGDVVMNHKGGADATEMVRAVEVNPNNRNQEVTGEYTIEAWTRFDFPGRGNTHSSFKWRWYHFDGVDWDQSRNVNNRIYKFRGHGKAWDWEVDTEFGNYDYLMYADYDMDHPEVVNELRNWGVWYTNTLGLDGFRIDAVKHIKYSFTRDWINHVRSATGKNMFAVAEFWKNDLGAIENYLQKTNWNHSVFDVPLHYNLYNASKSGGNYDMRNIFNGTVVQRHPSHAVTFVDNHDSQPEEALESFVEEWFKPLAYALTLTREQGYPSVFYGDYYGIPTHGVPAMRSKIDPILEARQKYAYGPQHDYLDHPDVIGWTREGDSSHPKSGLATLITDGPGGSKRMYAGLKNAGETWYDITGNRSDTVKIGSDGWGEFHVNDGSVSIYVQK

SEQ ID NO: 27071 - protein, 485 aa, Bacillus sp.
HHNGTNGTMMQYFEWYLPNDGNHWNRLNSDASNLKSKGITAVWIPPAWKGASQNDVGYGAYDLYDLGEFNQKGTVRTKYGTRSQLQAAVTSLKNNGIQVYGDVVMNHKGGADATEMVRAVEVNPNNRNQEVTGEYTIEAWTRFDFPGRGNTHSSFKWRWYHFDGVDWDQSRYLNNRIYKFRGHGKAWDWEVDTEFGNYDYLMYADYDMDHPEVVNELRNWGVWYTNTLGLDGFRIDAVKHIKYSFTRDWINHVRSATGKNMFAVAEFWKNDLGAIENYLQKTNWNHSVFDVPLHYNLYNASKSGGNYDMRNIFNGTVVQRHPSHAVTFVDNHDSQPEEALESFVEEWFKPLAYALTLTREQGYPSVFYGDYYGIPTHGVPAMRSKIDPILEARQKYAYGPQHDYLDHPDVIGWTREGDSSHPKSGLATLITDGPGGSKRMYAGLKNAGETWYDITGNRSDTVKIGSDGWGEFHVNDGSVSIYVQK

SEQ ID NO: 27072 - protein, 485 aa, Bacillus sp.
HHNGTNGTMMQYFEWYLPNDGNHWNRLNSDASNLKSKGITAVWIPPAWKGASQNDVGYGAYDLYDLGEFNQKGTVRTKYGTRSQLQAAVTSLKNNGIQVYGDVVMNHKGGADATEMVSAVEVNPNNRNQEVTGEYTIEAWTRFDFPGRGNTHSSFKWRWYHFDGVDWDQSRRLNNRIYKFRAHGKAWDWEVDKEFGNYDYLMYADYDMDHPEVVNELRNWGVWYTNTLGLDGFRIDAVKHIKYSFTRDWINHVRSATGKNMFAVAEFWKNDLGAIENYLQKTNWNHSVFDVPLHYNLYNASKSGGNYDMRNIFNGTVVQRHPSHAVTFVDNHDSQPEEALESFVEEWFKPLAYALTLTREQGYPSVFYGDYYGIPTHGVPAMRSKIDPILEARQKYAYGPQHDYLDHPDVIGWTREGDSSHPKSGLATLITDGPGGSKRMYAGLKNAGETWYDITGNRSDTVKIGSDGWGEFHVNDGSVSIYVQK

SEQ ID NO: 27073 - protein, 485 aa, Bacillus sp.
HHNGTNGTMMQYFEWYLPNDGNHWNRLNSDASNLKSKGITAVWIPPAWKGASQNDVGYGAYDLYDLGEFNQKGTVRTKYGTRSQLQAAVTSLKNNGIQVYGDVVMNHKGGADATEMVRAVEVNPNNRNQEVTGEYTIEAWTRFDFPGRGNTHSSFKWRWYHFDGVDWDQSRQLNNRIYKFRGHGKAWDWEVDTEFGNYDYLMYVDYDMDHPEVVNELRNWGVWYTNTLGLDGFRIDAVKHIKYSFTRDWINHVRSATGKNMFAVAEFWKNDLGAIENYLQKTNWNHSVFDVPLHYNLYNASKSGGNYDMRNIFNGTVVQRHPSHAVTFVDNHDSQPEEALESFVEEWFKPLAYALTLTREQGYPSVFYGDYYGIPTHGVPAMRSKIDPILEARQKYAYGPQHDYLDHPDVIGWTREGDSSHPKSGLATLITDGPGGSKRMYAGLKNAGETWYDITGNRSDTVKIGSDGWGEFHVNDGSVSIYVQK

SEQ ID NO: 27074 - protein, 485 aa, Synthetic construct
HHNGTNGTMMQYFEWYMPNDGNHWNRLNSDASNLKSKGITAVWIPPAWKGASQNDVGYGAYDLYDLGEFNQKGTVRTKYGTRSQLQAAVTSLKNNGIQVYGDVVMNHKGGADATEMVRAVEVNPNNRNQEVTGEYTIEAWTRFDFPGRGNTHSSFKWRWYHFDGVDWDQSRRLNNRIYKFRGHGKAWDWEVDTENGNYDYLMYADIDMDHPEVVNELRNWGVWYTNTLGLDGFRIDAVKHIKYSFTRDWINHVRSATGKNMFAVAEFWKNDLGAIENYLQKTNWNHSVFDVPLHYNLYNASKSGGNYDMRNIFNGTVVQRHPSHAVTFVDNHDSQPEEALESFVEEWFKPLAYALTLTREQGYPSVFYGDYYGIPTHGVPAMRSKIDPILEARQKYAYGPQHDYLDHPDVIGWTREGDSSHPKSGLATLITDGPGGSKRMYAGLKNAGETWYDITGNRSDTVKIGSDGWGEFHVNDGSVSIYVQK

SEQ ID NO: 27075 - protein, 485 aa, Synthetic construct
HHNGTNGTMMQYFEWYLPNDGNHWNRLNSDASNLKSKGITAVWIPPAWKGASQNDVGYGPYDLYDLGEFNQKGTVRTKYGTRSQLQAAVTSLKNNGIQVYGDVVMNHKGGADATEMVRAVEVNPNNRNQEVTGEYTIEAWTRFDFPGRGNTHSSFKWRWYHFDGVDWDQSRRLNNRIYKFRGHGKAWDWEVDTENGNYDYLMYADIDMDHPEVVNELRNWGVWYTNTLGLDGFRIDAVKHIKYSFTRDWINHVRSATGKNMFAVAEFWKNDLGAIENYLQKTNWNHSVFDVPLHYNLYNASKSGGNYDMRNIFNGTVVQRHPSHAVTFVDNHDSQPEEALESFVEEWFKPLAYALTLTREQGYPSVFYGDYYGIPTHGVPAMRSKIDPILEARQKYAYGPQHDYLDHPDVIGWTREGDSSHPKSGLATLITDGPGGSKRMYAGLKNAGETWYDITGNRSDTVKIGSDGWGEFHVNDGSVSIYVQK

SEQ ID NO: 27076 - protein, 485 aa, Synthetic construct
HHNGTNGTMMQYFEWYLPNDGNHWNRLNSDASNLKSKGITAVWIPPAWKGASQNDVGYGAYDLYDLGEFNQKGTVRTKYGTRSQLQAAVTSLKNNGIQVYGDVVMNHKGGADATEMVRAVEVNPNNRNQEVTGEYTIEAWTRFDFPGRGNTHSSFKWRWYHFDGVDWDQSRRLNNRIYKFRGHGKAWDWEVDTENGNYDYLMYADIDMDHPEVVNELRNWGVWYTNTLGLDGFRIDAVKHIKYSFTRDWINHVRSATGKNMFAVAEFWKNDLGAIENYLQKTNWNHSVFDVPLHYQLYNASKSGGNYDMRNIFNGTVVQRHPSHAVTFVDNHDSQPEEALESFVEEWFKPLAYALTLTREQGYPSVFYGDYYGIPTHGVPAMRSKIDPILEARQKYAYGPQHDYLDHPDVIGWTREGDSSHPKSGLATLITDGPGGSKRMYAGLKNAGETWYDITGNRSDTVKIGSDGWGEFHVNDGSVSIYVQK

SEQ ID NO: 27077 - protein, 483 aa, Bacillus sp.
HHNGTNGTMMQYFEWYLPNDGNHWNRLNSDASNLKSKGITAVWIPPAWKGASQNDVGYGAYDLYDLGEFNQKGTVRTKYGTRSQLQAAVTSLKNNGIQVYGDVVMNHKGGADATEMVRAVEVNPNNRNQEVTGEYTIEAWTRFDFPGRGNTHSSFKWRWYHFDGVDWDQSRRLNNRIYKFRGKAWDWEVDTEFGNYDYLMYADYDMDHPEVVNELRNWGVWYTNTLGLDGFRIDAVKHIKYSFTRDWINHVRSATGKNMFAVAEFWKNDLGAIENYLQKTNWNHSVFDVPLHYNLYNASKSGGNYDMRNIFNGTVVQRHPSHAVTFVDNHDSQPEEALESFVDEWFKPLAYALTLTREQGYPSVFYGDYYGIPTHGVPAMRSKIDPILEARQKYAYGPQHDYLDHPDVIGWTREGDSSHPKSGLATLITDGPGGSKRMYAGLKNAGETWYDITGNRSDTVKIGSDGWGEFHVNQGSVSIYVQK

SEQ ID NO: 27078 - protein, 483 aa, Synthetic construct
HHNGTNGTMMQYFEWYLPNDGNHWNRLNSDASNLKSKGITAVWIPPAWKGASQNDVGYGAYDLYDLGEFNQKGTVRTKYGTRSQLQAAVTSLKNNGIQVYGDVVMNHKGGADATEMVRAVEVNPNNRNQEVTGEYTIEAWTRFDFPGRGNTHSSFKWRWYHFDGVDWDQSRRLNNRIYKFRGKAWDWEVDTENGNYDYLMYADIDMDHVEVVNELRNWGVWYTNTLGLDGFRIDAVKHIKYSFTRDWINHVRSATGKNMFAVAEFWKNDLGAIENYLQKTNWNHSVFDVPLHYNLYNASKSGGNYDMRNIFNGTVVQRHPSHAVTFVDNHDSQPEEALESFVEEWFKPLAYALTLTREQGYPSVFYGDYYGIPTHGVPAMRSKIDPILEARQKYAYGPQHDYLDHPDVIGWTREGDSSHPKSGLATLITDGPGGSKRMYAGLKNAGETWYDITGNRSDTVKIGSDGWGEFHVNDGSVSIYVQK

SEQ ID NO: 27079 - protein, 483 aa, Synthetic construct
HHNGTNGTMMQYFEWYLPNDGNHWNRLNSDASNLKSKGITAVWIPPAWKGASQNDVGYGAYDLYDLGEFNQKGTVRTKYGTRSQLQAAVTSLKNNGIQVYGDVVFNHKGGADATEMVRAVEVNPNNRNQEVTGEYTIEAWTRFDFPGRGNTHSSFKWRWYHFDGVDWDQSRRLNNRIYKFRGKAWDWEVDTENGNYDYLMYADYDMDHPEVVNELRNWGVWYTNTLGLDGFRIDAVKHIKYSFTRDWINHVRSATGKNMFAVAEFWKNDLGAIENYLQKTNWNHSVFDVPLHYNLYNASKSGGNYDMRNIFNGTVVQRHPSHAVTFVDNHDSQPEEALESFVEEWFKPLAYALTLTREQGYPSVFYGDYYGIPTHGVPAMRSKIDPILEARQKYAYGPQHDYLDHPDVIGWTREGDSSHPKSGLATLITDGPGGSKRMYAGLKNAGETWYDITGNRSDTVKIGSDGWGEFHVNDGSVSIYVQK

SEQ ID NO: 27080 - protein, 483 aa, Bacillus sp.
HHNGTNGTMMQYFEWYLPNDGNHWNRLNSDASNLKSKGITAVWIPPAWKGASQNDVGYGAYDLYDLGEFNQKGTVRTKYGTRSQLQAAVTSLKNNGIQVYGDVVMNHKGGADATEMVRAVEVNPNNRNQEVTGEYTIEAWTRFDFPGRGNTHSSFKWRWYHFDGVDWDQSRYLNNRIYKFRGKAWDWEVDTEFGNYDYLMYADYDMDHPEVVNELRNWGVWYTNTLGLDGFRIDAVKHIKYSFTRDWINHVRSATGKNMFAVAEFWKNDLGAIENYLQKTNWNHSVFDVPLHYNLYNASKSGGNYDMRNIFNGTVVQRHPSHAVTFVDNHDSQPEEALESFVEEWFKPLAYALTLTREQGYPSVFYGDYYGIPTHGVPAMRSKIDPILEARQKYAYGPQHDYLDHPDVIGWTREGDSSHPKSGLATLITDGPGGSKRMYAGLKNAGETWYDITGNRSDTVKIGSDGWGEFHVNDGSVSIYVQK

SEQ ID NO: 27081 - protein, 485 aa, Bacillus sp.
HHNGTNGTMMQYFEWYLPNDGNHWNRLNSDASNLKSKGITAVWIPPAWKAVSQNDVGYGAYDLYDLGEFNQKGTVRTKYGTRSQLQAAVTSLKNNGIQVYGDVVMNHKGGADATEMVRAVEVNPNNRNQEVTGEYTIEAWTRFDFPGRGNTHSSFKWRWYHFDGVDWDQSRQLNNRIYKFRGHGKAWDWEVDTEFGNYDYLMYADYDMDHPEVVNELRNWGVWYTNTLGLDGFRIDAVKHIKYSFTRDWINHVRSATGKNMFAVAEFWKNDLGAIENYLQKTNWNHSVFDVPLHYNLYNASKSGGNYDMRNIFNGTVVQRHPSHAVTFVDNHDSQPEEALESFVEEWFKPLAYALTLTREQGYPSVFYGDYYGIPTHGVPAMRSKIDPILEARQKYAYGPQHDYLDHPDVIGWTREGDSSHPKSGLATLITDGPGGSKRMYAGLKNAGETWYDITGNRSDTVKIGSDGWGEFHVNDGSVSIYVQK

SEQ ID NO: 27082 - protein, 485 aa, Bacillus sp.
HHNGTNGTMMQYFEWYLPNDGNHWNRLNSDASNLKSKGITAVWIPPAWKGASQNDVGYGAYDLYDLGEFNQKGTVRTKYGTRSQLQAAVTSLKNNGIQVYGDVVMNHKGGADATEMVRAVEVNPNNRNQEVTGEYTIEAWTRFDFPGRGNTHSSFKWRWYHFDGVDWDQSRRLNNRIYKFRGHGKAWDWEVDTEFGNYDYLMYADYDMDHPEVVNELRNWGVWYTNTLGLDGFRIDAVKHIKYSFTRDWINHVRSATGKNMFAVAEFWKNDLGAIENYLQKTNWNHSVFDVPLHYNLYNASKSGGNYDMRNIFNGTVVQRHPSHAVTFVDNHDSQPEEALESFVDEWFKPLAYALTLTREQGYPSVFYGDYYGIPTHGVPAMRSKIDPILEARQKYAYGPQHDYLDHPDVIGWTREGDSSHPKSGLATLITDGPGGSKRMYAGLKNAGETWYDITGNRSDTVKIGSDGWGEFHVNDGSVSIYVQK

SEQ ID NO: 27083 - protein, 483 aa, Bacillus sp.
HHNGTNGTMMQYFEWYLPNDGNHWNRLNSDASNLKSKGITAVWIPPAWKAVSQNDVGYGAYDLYDLGEFNQKGTVRTKYGTRSQLQAAVTSLKNNGIQVYGDVVMNHKGGADATEMVRAVEVNPNNRNQEVTGEYTIEAWTRFDFPGRGNTHSSFKWRWYHFDGVDWDQSRRFENRIYKFRGKAWDWEVDTEFGNYDYLMYADYDMDHPEVVNELRNWGVWYTNTLGLDGFRIDAVKHIKYSFTRDWINHVRSATGKNMFAVAEFWKNDLGAIENYLQKTNWNHSVFDVPLHYNLYNASKSGGNYDMRNIFNGTVVQRHPSHAVTFVDNHDSQPEEALESFVEEWFKPLAYALTLTREQGYPSVFYGDYYGIPTHGVPAMRSKIDPILEARQKYAYGPQHDYLDHPDVIGWTREGDSSHPKSGLATLITDGPGGSKRMYAGLKNAGETWYDITGNRSDTVKIGSDGWGKFHVNDGSVSIYVQK

SEQ ID NO: 27084 - protein, 485 aa, Synthetic construct
HHNGTNGTMMQYFEWYLPNDGNHWNRLNSDASNLKSKGITAVWIPPAWKGASQNDVGYGAYDLYDLGEFNQKGTVRTKYGTRSQLQAAVTSLKNNGIQVYGDVVMNHKGGADATEMVRAVEVNPNNRNQEVTGEYTIEAWTRFDFPGRGNTHSSFKWRWYHFDGVDWDQSRRLNNRIYKFRGHGKAWDWEVDTENGNYDYLMYADIDMDHPEVVNELRNWGVWYTNTLGLDGFRIDAVKHIKYSFTRDWINHVRSATGKNMFAVAEFWKNDLGAIENYLQKTNWNHSVFDVPLHYNLYNASKSGGNYDMRNIFNGTVVQRHPSHAVTFVDNHDSQPEEALESFVEEWFKPLAYALTLTREQGYPSVFYGDYYGIPSHGVPAMRSKIDPILEARQKYAYGPQHDYLDHPDVIGWTREGDSSHPKSGLATLITDGPGGSKRMYAGLKNAGETWYDITGNRSDTVKIGSDGWGEFHVNDGSVSIYVQK

SEQ ID NO: 27085 - protein, 483 aa, Bacillus sp.
HHNGTNGTMMQYFEWYLPNDGNHWNRLNSDASNLKSKGITAVWIPPAWKGASQNDVGYGAYDLYDLGEFNQKGTVRTKYGTRSQLQAAVTSLKNNGIQVYGDVVMNHKGGADATEMVRAVEVNPNNRNQEVTGEYTIEAWTRFDFPGRGNTHSSFKWRWYHFDGVDWDQSRETSNRIYKFRGKAWDWEVDTEFGNYDYLMYADYDMDHPEVVNELRNWGVWYTNTLGLDGFRIDAVKHIKYSFTRDWINHVRSATGKNMFAVAEFWKNDLGAIENYLQKTNWNHSVFDVPLHYNLYNASKSGGNYDMRNIFNGTVVQRHPSHAVTFVDNHDSQPEEALESFVEEWFKPLAYALTLTREQGYPSVFYGDYYGIPTHGVPAMRSKIDPILEARQKYAYGPQHDYLDHPDVIGWTREGDSSHPKSGLATLITDGPGGSKRMYAGLKNAGETWYDITGNRSDTVKIGSDGWGEFHVNDGSVSIYVQK

SEQ ID NO: 27086 - protein, 485 aa, Bacillus sp.
HHNGTNGTMMQYFEWYLPNDGNHWNRLNSDASNLKSKGITAVWIPPAWKATSQNDVGYGAYDLYDLGEFNQKGTVRTKYGTRSQLQAAVTSLKNNGIQVYGDVVMNHKGGADATEMVRAVEVNPNNRNQEVTGEYTIEAWTRFDFPGRGNTHSSFKWRWYHFDGVDWDQSRNVNNRIYKFRGHGKAWDWEVDTEFGNYDYLMYADYDMDHPEVVNELRNWGVWYTNTLGLDGFRIDAVKHIKYSFTRDWINHVRSATGKNMFAVAEFWKNDLGAIENYLQKTNWNHSVFDVPLHYNLYNASKSGGNYDMRNIFNGTVVQRHPSHAVTFVDNHDSQPEEALESFVDPWFKPLAYALTLTREQGYPSVFYGDYYGIPTHGVPAMRSKIDPILEARQKYAYGPQHDYLDHPDVIGWTREGDSSHPKSGLATLITDGPGGSKRMYAGLKNAGETWYDITGNRSDTVKIGSDGWGEFHVNGGSVSIYVQK

SEQ ID NO: 27087 - protein, 483 aa, Bacillus sp.
HHNGTNGTMMQYFEWYLPNDGNHWNRLNSDASNLKSKGITAVWIPPAWKAASQNDVGYGAYDLYDLGEFNQKGTVRTKYGTRSQLQAAVTSLKNNGIQVYGDVVMNHKGGADATEMVDAVEVNPNNRNQEVTGEYTIEAWTRFDFPGRGNTHSSFKWRWYHFDGVDWDQSRQLNNRIYKFRGKAWDWEVDTEFGNYDYLMYADYDMDHPEVVNELRNWGVWYTNTLGLDGFRIDAVKHIKYSFTRDWINHVRSATGKNMFAVAEFWKNDLGAIENYLQKTNWNHSVFDVPLHYNLYNASKSGGNYDMRNIFNGTVVQRHPSHAVTFVDNHDSQPEEALESFVEEWFKPLAYALTLTREQGYPSVFYGDYYGIPTHGVPAMRSKIDPILEARQKYAYGPQHDYLDHPDVIGWTREGDSSHPKSGLATLITDGPGGSKRMYAGLKNAGETWYDITGNRSDTVKIGSDGWGEFHVNDGSVSIYVQK

SEQ ID NO: 27088 - protein, 483 aa, Bacillus sp.
HHNGTNGTMMQYFEWYLPNDGNHWNRLNSDASNLKSKGITAVWIPPAWKAASQNDVGYGAYDLYDLGEFNQKGTVRTKYGTRSQLQAAVTSLKNNGIQVYGDVVMNHKGGADATEMVRAVEVNPNNRNQEVTGEYTIEAWTRFDFPGRGNTHSSFKWRWYHFDGVDWDQSRQTDNRIYKFRGKAWDWEVDTEFGNYDYLMYADYDMDHPEVVNELRNWGVWYTNTLGLDGFRIDAVKHIKYSFTRDWINHVRSATGKNMFAVAEFWKNDLGAIENYLQKTNWNHSVFDVPLHYNLYNASKSGGNYDMRNIFNGTVVQRHPSHAVTFVDNHDSQPEEALESFVEEWFKPLAYALTLTREQGYPSVFYGDYYGIPTHGVPAMRSKIDPILEARQKYAYGPQHDYLDHPDVIGWTREGDSSHPKSGLATLITDGPGGSKRMYAGLKNAGETWYDITGNRSDTVKIGSDGWGEFHVNDGSVSIYVQK

SEQ ID NO: 27089 - protein, 483 aa, Bacillus sp.
HHNGTNGTMMQYFEWYLPNDGNHWNRLNSDASNLKSKGITAVWIPPAWKGASQNDVGYGAYDLYDLGEFNQKGTVRTKYGTRSQLQAAVTSLKNNGIQVYGDVVMNHKGGADATEMVRAVEVNPNNRNQEVTGEYTIEAWTRFDFPGRGNTHSSFKWRWYHFDGVDWDQSRRLNNRIYKFRGKAWDWEVDTEFGNYDYLMYADYDMDHPEVVNELRNWGVWYTNTLGLDGFRIDAVKHIKYSFTRDWINHVRSATGKNMFAVAEFWKNDLGAIENYLQKTNWNHSVFDVPLHYNLYNASKSGGNYDMRNIFNGTVVQRHPSHAVTFVDNHDSQPEEALESFVEEWFKPLAYALTLTREQGYPSVFYGDYYGIPTHGVPAMRSKIDPILEARQKYAYGPQHDYLDHPDRIGWTREGDSSHPKSGLATLITDGPGGSKRMYAGLKNAGETWYDITGNRSDTVKIGSDGWGEFHVNDGSVSIYVQK

SEQ ID NO: 27090 - protein, 483 aa, Synthetic construct
HHNGTNGTMMQYFEWYLPNDGNHWNRLNSDASNLKSKGITAVWIPPAWKGASQNDVGYGAYDLYDLGEFNQKGTVRTKYGTRSQLQAAVTSLKNNGIQVYGDVVMNHKGGADATEMVRAVEVNPNNRNQEVTGEYTIEAWTRFDFPGRGNTHSSFKWRWYHFDGVDWDQSRRLNNRIYKFRGKAWDWEVDTENGNYDYLMYADIDMDHPEVVNELRNWGVWYTNTLGLDGFRIDAVKHIKYQFTRDWINHVRSATGKNMFAVAEFWKNDLGAIENYLQKTNWNHSVFDVPLHYNLYNASKSGGNYDMRNIFNGTVVQRHPSHAVTFVDNHDSQPEEALESFVEEWFKPLAYALTLTREQGYPSVFYGDYYGIPTHGVPAMRSKIDPILEARQKYAYGPQHDYLDHPDVIGWTREGDSSHPKSGLATLITDGPGGSKRMYAGLKNAGETWYDITGNRSDTVKIGSDGWGEFHVNDGSVSIYVQK

SEQ ID NO: 27091 - protein, 485 aa, Bacillus sp.
HHNGTNGTMMQYFEWYLPNDGNHWNRLNSDASNLKSKGITAVWIPPAWKGASQNDVGYGAYDLYDLGEFNQKGTVRTKYGTRSQLQAAVTSLKNNGIQVYGDVVMNHKGGADATEMVRAVEVNPNNRNQEVTGEYTIEAWTRFDFPGRGNTHSSFKWRWYHFDGVDWDQSRVLNNRIYKFRGHGKAWDWEVDTEFGNYDYLMYADYDMDHPEVVNELRNWGVWYTNTLGLDGFRIDAVKHIKYSFTRDWINHVRSATGKNMFAVAEFWKNDLGAIENYLQKTNWNHSVFDVPLHYNLYNASKSGGNYDMRNIFNGTVVQRHPSHAVTFVDNHDSQPEEALESFVEEWFKPLAYALTLTREQGYPSVFYGDYYGIPTHGVPAMRSKIDPILEARQKYAYGPQHDYLDHPDVIGWTREGDSSHPKSGLATLITDGPGGSKRMYAGLKNAGETWYDITGNRSDTVKIGSDGWGEFHVNDGSVSIYVQK

SEQ ID NO: 27092 - protein, 485 aa, Synthetic construct
HHNGTNGTMMQYFEWYLPNDGNHWNRLNSDASNLKSKGITAVWIPPAWKGASQNDVGYGAYDLYDLGEFNQKGTVRTKYGTRSQLQAAVTSLKNNGIQVYGDVVMNHKGGADATEMVRAVEVNPNNRNQEVTGEYNIEAWTRFDFPGRGNTHSSFKWRWYHFDGVDWDQSRRLNNRIYKFRGHGKAWDWEVDTENGNYDYLMYADIDMDHPEVVNELRNWGVWYTNTLGLDGFRIDAVKHIKYSFTRDWINHVRSATGKNMFAVAEFWKNDLGAIENYLQKTNWNHSVFDVPLHYNLYNASKSGGNYDMRNIFNGTVVQRHPSHAVTFVDNHDSQPEEALESFVEEWFKPLAYALTLTREQGYPSVFYGDYYGIPTHGVPAMRSKIDPILEARQKYAYGPQHDYLDHPDVIGWTREGDSSHPKSGLATLITDGPGGSKRMYAGLKNAGETWYDITGNRSDTVKIGSDGWGEFHVNDGSVSIYVQK

SEQ ID NO: 27093 - protein, 483 aa, Bacillus sp.
HHNGTNGTMMQYFEWYLPNDGNHWNRLNSDASNLKSKGITAVWIPPAWKATSQNDVGYGAYDLYDLGEFNQKGTVRTKYGTRSQLQAAVTSLKNNGIQVYGDVVMNHKGGADATEMVRAVEVNPNNRNQEVTGEYTIEAWTRFDFPGRGNTHSSFKWRWYHFDGVDWDQSREINNRIYKFRGKAWDWEVDTEFGNYDYLMYADYDMDHPEVVNELRNWGVWYTNTLGLDGFRIDAVKHIKYSFTRDWINHVRSATGKNMFAVAEFWKNDLGAIENYLQKTNWNHSVFDVPLHYNLYNASKSGGNYDMRNIFNGTVVQRHPSHAVTFVDNHDSQPEEALESFVEEWFKPLAYALTLTREQGYPSVFYGDYYGIPTHGVPAMRSKIDPILEARQKYAYGPQHDYLDHPDVIGWTREGDSSHPKSGLATLITDGPGGSKRMYAGLKNAGETWYDITGNRSDTVKIGSDGWGEFHVNDGSVSIYVQK

SEQ ID NO: 27094 - protein, 483 aa, Bacillus sp.
HHNGTNGTMMQYFEWYLPNDGNHWNRLNSDASNLKSKGITAVWIPPAWKGASQNDVGYGAYDLYDLGEFNQKGTVRTKYGTRSQLQAAVTSLKNNGIQVYGDVVMNHKGGADATEMVRAVEVNPNNRNQEVTGEYTIEAWTRFDFPGRGNTHSSFKWRWYHFDGVDWDQSRRLNNRIYKFRGKAWDWEVDTEFGNYDYLMYADYDMDHPEVVNELRNWGVWYTNTLGLDGFRIDAVKHIKYSFTRDWINHVRSATGKNMFAVAEFWKNDLGAIENYLQKTNWNHSVFDVPLHYNLYNASKSGGNYDMRLIFNGTVVQRHPSHAVTFVDNHDSQPEEALESFVEEWFKPLAYALTLTREQGYPSVFYGDYYGIPTHGVPAMRSKIDPILEARQKYAYGPQHDYLDHPDVIGWTREGDSSHPKSGLATLITDGPGGSKRMYAGLKNAGETWYDITGNRSDTVKIGSDGWGEFHVNDGSVSIYVQK

SEQ ID NO: 27095 - protein, 485 aa, Bacillus sp.
HHNGTNGTMMQYFEWYLPNDGNHWNRLNSDASNLKSKGITAVWIPPAWKGASQNDVGYGAYDLYDLGEFNQKGTVRTKYGTRSQLQAAVTSLKNNGIQVYGDVVMNHKGGADATEMVRAVEVNPNNRNQEVTGEYTIEAWTRFDFPGRGNTHSSFKWRWYHFDGVDWDQSRRLNNRIYKFRGHGKAWDWEVDTEFGNYDYLMYADYDMDHPEVVNELRNWGVWYTNTLGLDGFRIDAVKHIKYSFTRDWINHVRSATGKNMFAVAEFWKNDLGAIENYLQKTNWNHSVFDVPLHYNLYNASKSGGNYDMRNIFNGTVVQRHPSHAVTFVDNHDSQPEEALESFVEEWFKPLAYALTLTREQGYPSVFYGDYYGIPTHGVPAMRSKIDPILEARQKYAYGPQHDYLDHPDVIGWTREGDSSHPKSGLATLITDGPGGSKRMYAGLKNAGGTWYDITGNRSDTVKIGSDGWGEFHVNDGSVSIYVQK

SEQ ID NO: 27096 - protein, 485 aa, Bacillus sp.
HHNGTNGTMMQYFEWYLPNDGNHWNRLNSDASNLKSKGITAVWIPPAWKGASQNDVGYGAYDLYDLGEFNQKGTVRTKYGTRSQLQAAVTSLKNNGIQVYGDVVMNHKGGADATEMVRAVEVNPNNRNQEVTGEYTIEAWTRFDFPGRGNTHSSFKWRWYHFDGVDWDQSRRLNNRIYKFRGHGKAWDWEVDTEFGNYDYLMYADYDMDHPEVVNELRNWGVWYTNTLGLDGFRIDAVKHIKYSFTRDWINHVRSATGKNMFAVAEFWKNDLGAIENYLQKTNWNHSVFDVPLHYNLYNASKSGGNYDMRNIFNGTVVQRHPSHAVTFVDNHDSQPEEALESFVDEWFKPLAYALTLTREQGYPSVFYGDYYGIPTHGVPAMRSKIDPILEARQKYAYGPQHDYLDHPDVIGWTREGDSSHPKSGLATLITDGPGGSKRMYAGLKNAGETWYDITGNRSDTVKIGSDGWGEFHVNGQSVSIYVQK

SEQ ID NO: 27097 - protein, 483 aa, Synthetic construct
HHNGTNGTMMQYFEWYLPNDGNHWNRLNSDASNLKSKGITAVWIPPAWKGASQNDVGYGAYDLYDLGEFNQKGTVRTKYGTRSQLQAAVTSLKNNGIQVYGDVVMNHKGGADATEMVRAVEVNPNNRNQEVTGEYTIEAWTRFDFPGRGNTHSSFKWRWYHFDGVDWDQSRRLNNRIYKFRGKAWDWEVDTENGNYDYLMYADIDMDHPYVVNELRNWGVWYTNTLGLDGFRIDAVKHIKYSFTRDWINHVRSATGKNMFAVAEFWKNDLGAIENYLQKTNWNHSVFDVPLHYNLYNASKSGGNYDMRNIFNGTVVQRHPSHAVTFVDNHDSQPEEALESFVEEWFKPLAYALTLTREQGYPSVFYGDYYGIPTHGVPAMRSKIDPILEARQKYAYGPQHDYLDHPDVIGWTREGDSSHPKSGLATLITDGPGGSKRMYAGLKNAGETWYDITGNRSDTVKIGSDGWGEFHVNDGSVSIYVQK

SEQ ID NO: 27098 - protein, 483 aa, Synthetic construct
HHNGTNGTMMQYFEWYLPNDGNHWNRLNSDASNLKSKGITAVWIPPAWKGASQNDVGYGAYDLYDLGEFNQKGTVRTKYGTRSQLQAAVTSLKNNGIQVYGDVVMNHKGGADATEMVRAVEVNPNNRNQEVTGEYTIEAWTRFDFPGRGNTHSSFKWRWYHFDGVDWDQSRRLNNRIYKFRGKAWDWEVDTENGNYDYLMYADIDMDHWEVVNELRNWGVWYTNTLGLDGFRIDAVKHIKYSFTRDWINHVRSATGKNMFAVAEFWKNDLGAIENYLQKTNWNHSVFDVPLHYNLYNASKSGGNYDMRNIFNGTVVQRHPSHAVTFVDNHDSQPEEALESFVEEWFKPLAYALTLTREQGYPSVFYGDYYGIPTHGVPAMRSKIDPILEARQKYAYGPQHDYLDHPDVIGWTREGDSSHPKSGLATLITDGPGGSKRMYAGLKNAGETWYDITGNRSDTVKIGSDGWGEFHVNDGSVSIYVQK

SEQ ID NO: 27099 - protein, 485 aa, Synthetic construct
HHNGTNGTMMQYFEWYLPNDGNHWNRLNSDASNLKSKGITAVWIPPAWKGASQNDVGYGAYDLYDLGEFNQKGTVRTKYGTRSQLQAAVTSLKNNGIQVYGDVVMNHKGGADATEMVRAVEVNPNNRNQEVTGEYTIEAWTRFDFPGRGNTHSSFKWRWYHFDGVDWDQSRRLNNRIYKFRGHGKAWDWEVDTENGNYDYLMYADIDMDHPEVVNELRNWGVWYTNTLGLDGFRIDAVKHIKYSFTRDWINHVRSATGKNMFAVAEFWKNDLGAIENYLQKTNWNHSVFDVPLHYNLYNASKSGGNYDMRNIFNGTVVQRHPSHAVTFVDNHDSQPEEALESFVEEWFKPLAYALTLTREQGYPSVFYGDYYGIPTHGVPAMRSKIDPILEARQKYAYGPQHDYLDHPDVIGWTREGDSSHPKSGLATLITDGPGGSKRMYAGLKNAGETWYDITGNRSDTVKIGSDGWGEFHVNDGSVSVYVQK

SEQ ID NO: 27100 - protein, 485 aa, Bacillus sp.
HHNGTNETMMQYFEWYLPNDGNHWNRLNSDASNLKSKGITAVWIPPAWKGASQNDVGYGAYDLYDLGEFNQKGTVRTKYGTRSQLQAAVTSLKNNGIQVYGDVVMNHKGGADATEMVRAVEVNPNNRNQEVTGEYTIEAWTRFDFPGRGNTHSSFKWRWYHFDGVDWDQSRRLNNRIYKFRGHGKAWDWEVDTEFGNYDYLMYADYDMDHPEVVNELRNWGVWYTNTLGLDGFRIDAVKHIKYSFTRDWINHVRSATGKNMFAVAEFWKNDLGAIENYLQKTNWNHSVFDVPLHYNLYNASKSGGNYDMRNIFNGTVVQAHPMHAVTFVDNHDSQPEEALESFVEEWFKPLAYALTLTREQGYPSVFYGDYYGIPTHGVPAMRSKIDPILEARQKYAYGPQHDYLDHPDVIGWTREGDSSHPKSGLATLITDGPGGSKRMYAGLKNAGETWYDITGNRSDTVKIGSDGWGEFHVNDGSVSIYVQK

SEQ ID NO: 27101 - protein, 483 aa, Bacillus sp.
HHNGTNGTMMQYFEWYLPNDGNHWNRLNSDASNLKSKGITAVWIPPAWKGASQNDVGYGAYDLYDLGEFNQKGTVRTKYGTRSQLQAAVTSLKNNGIAVYGDVVMNHKGGADATEMVRAVEVNPNNRNQEVTGEYTIEAWTRFDFPGRGNTHSSFKWRWYHFDGVDWDQSRRLNNRIYKFRGKAWDWEVDTEFGNYDYLMYADYDMDHPEVVNELRNWGVWYTNTLGLDGFRIDAVKHIKYSFTRDWINHVRSATGKNMFAVAEFWKNDLGAIENYLQKTNWNHSVFDVPLHYNLYNASKSGGNYDMRNIFNGTVVQSHPMHAVTFVDNHDSQPEEALESFVEEWFKPLAYALTLTREQGYPSVFYGDYYGIPTHGVPAMRSKIDPILEARQKYAYGPQHDYLDHPDVIGWTREGDSSHPKSGLATLITDGPGGSKRMYAGLKNAGETWYDITGNRSDTVKIGSDGWGEFHVNDGSVSIYVQK

SEQ ID NO: 27102 - protein, 485 aa, Synthetic construct
HHNGTNGTMMQYFEWYLPNDGNHWNRLNSDASNLKSKGITAVWIPPAWKGASQNDVGYGAYDLYDLGEFNQKGTVRTKYGTRSQLQAAVTSLKNNGIQVYGDVVMNHKGGADATEMVRAVEVNPNNRNQEVTGEYTIEAWTRFDFPGRGNTHSSFKWRWYHFDGVDFDQSRRLNNRIYKFRGHGKAWDWEVDTENGNYDYLMYADIDMDHPEVVNELRNWGVWYTNTLGLDGFRIDAVKHIKYSFTRDWINHVRSATGKNMFAVAEFWKNDLGAIENYLQKTNWNHSVFDVPLHYNLYNASKSGGNYDMRNIFNGTVVQRHPSHAVTFVDNHDSQPEEALESFVEEWFKPLAYALTLTREQGYPSVFYGDYYGIPTHGVPAMRSKIDPILEARQKYAYGPQHDYLDHPDVIGWTREGDSSHPKSGLATLITDGPGGSKRMYAGLKNAGETWYDITGNRSDTVKIGSDGWGEFHVNDGSVSIYVQK

SEQ ID NO: 27103 - protein, 483 aa, Synthetic construct
HHNGTNGTMMQYFEWYLPNDGNHWNRLNSDASNLKSKGITAVWIPPAWKGASQNDVGYGAYDLYDLGEFNQKGTVRTKYGTRSQLQAAVTSLKNNGIQVYGDVVMNHKGGADATEMVRAVEVNPNNRNQEVTGEYTIEAWTRFDFPGRGNTHSSFKWRWYHFDGVDWDQSRRLNNRIYKFRGKAWDWEVDTENGNYDYLMYADYDMDLPEVVNELRNWGVWYTNTLGLDGFRIDAVKHIKYSFTRDWINHVRSATGKNMFAVAEFWKNDLGAIENYLQKTNWNHSVFDVPLHYNLYNASKSGGNYDMRNIFNGTVVQRHPSHAVTFVDNHDSQPEEALESFVEEWFKPLAYALTLTREQGYPSVFYGDYYGIPTHGVPAMRSKIDPILEARQKYAYGPQHDYLDHPDVIGWTREGDSSHPKSGLATLITDGPGGSKRMYAGLKNAGETWYDITGNRSDTVKIGSDGWGEFHVNDGSVSIYVQK

SEQ ID NO: 27104 - protein, 483 aa, Synthetic construct
HHNGTNGTMMQYFEWYLPNDGNHWNRLNSDASNLKSKGITAVWIPPAWKGASQNDVGYGAYDLYDLGEFNQKGTVRTKYGTRSQLQAAVTSLKNNGIQVYGDVVMNHKGGADATEMVRAVEVNPNNRNQEVTGEYTIEAWTRFDFPGRGNTHSSFKWRWYHFDGVDWDQSRRLNNRIYKFRGKAWDWEVDTENGNYDYLMYADIDMDEPEVVNELRNWGVWYTNTLGLDGFRIDAVKHIKYSFTRDWINHVRSATGKNMFAVAEFWKNDLGAIENYLQKTNWNHSVFDVPLHYNLYNASKSGGNYDMRNIFNGTVVQRHPSHAVTFVDNHDSQPEEALESFVEEWFKPLAYALTLTREQGYPSVFYGDYYGIPTHGVPAMRSKIDPILEARQKYAYGPQHDYLDHPDVIGWTREGDSSHPKSGLATLITDGPGGSKRMYAGLKNAGETWYDITGNRSDTVKIGSDGWGEFHVNDGSVSIYVQK

SEQ ID NO: 27105 - protein, 483 aa, Bacillus sp.
HHNGTNGTMMQYFEWYLPNDGNHWNRLNSDASNLKSKGITAVWIPPAWKGTSQNDVGYGAYDLYDLGEFNQKGTVRTKYGTRSQLQAAVTSLKNNGIQVYGDVVMNHKGGADATEMVRAVEVNPNNRNQEVTGEYTIEAWTRFDFPGRGNTHSSFKWRWYHFDGVDWDQSRDLQNRIYKFRGKAWDWEVDTEFGNYDYLMYADYDMDHPEVVNELRNWGVWYTNTLGLDGFRIDAVKHIKYSFTRDWINHVRSATGKNMFAVAEFWKNDLGAIENYLQKTNWNHSVFDVPLHYNLYNASKSQGNYDMRNIFNGTVVQRHPSHAVTFVDNHDSQPEEALESFVDTWFKPLAYALTLTREQGYPSVFYGDYYGIPTHGVPAMRSKIDPILEARQKYAYGPQHDYLDHPDVIGWTREGDSSHPKSGLATLITDGPGGSKRMYAGLKNAGETWYDITGNRSDTVKIGSDGWGEFHVNGSSVSIYVQK

SEQ ID NO: 27106 - protein, 485 aa, Synthetic construct
HHNGTNGTMMQYFEWYLPNDGNHWNRLNSDASNLKSKGITAVWIPPAWKGASQNDVGYGAYDLYDLGEFNQKGTVRTKYGTRSQLQAAVTSLKNNGIQVYGDVVMNHKGGADATEMVRAVEVNPNNRNQEVTGEYTIEAWTRFDFPGRGNTHSSFKWRWYHFDGVDWDQSRRLNNRIYKFRGHGKAWDWEVDTENGNYDYLMYADIDMDHPEVVNELRNWGVWYTNTLGLDGFRIDAVKHIKYSFTRDWINHVRSATGKNMFAVAEFWKNDLGAIENYLQKTNWNHSVFDVPLHYNLYNASKSGGNYDMRNIFNGTVVQRHPSHAVTFVDNHDSQPEEALESTVEEWFKPLAYALTLTREQGYPSVFYGDYYGIPTHGVPAMRSKIDPILEARQKYAYGPQHDYLDHPDVIGWTREGDSSHPKSGLATLITDGPGGSKRMYAGLKNAGETWYDITGNRSDTVKIGSDGWGEFHVNDGSVSIYVQK

SEQ ID NO: 27107 - protein, 485 aa, Synthetic construct
HHNGTNGTMMQYFEWYLPNDGNHWNRLNSDASNLKSKGITAVWIPPAWKGASQNDVGYGAYDLYDLGEFNQKGTVRTKYGTRSQLQAAVTSLKNNGIQVYGDVVFNHKGGADATEMVRAVEVNPNNRNQEVTGEYTIEAWTRFDFPGRGNTHSSFKWRWYHFDGVDWDQSRRLNNRIYKFRGHGKAWDWEVDTENGNYDYLMYADYDMDHPEVVNELRNWGVWYTNTLGLDGFRIDAVKHIKYSFTRDWINHVRSATGKNMFAVAEFWKNDLGAIENYLQKTNWNHSVFDVPLHYNLYNASKSGGNYDMRNIFNGTVVQRHPSHAVTFVDNHDSQPEEALESFVEEWFKPLAYALTLTREQGYPSVFYGDYYGIPTHGVPAMRSKIDPILEARQKYAYGPQHDYLDHPDVIGWTREGDSSHPKSGLATLITDGPGGSKRMYAGLKNAGETWYDITGNRSDTVKIGSDGWGEFHVNDGSVSIYVQK

SEQ ID NO: 27108 - protein, 485 aa, Synthetic construct
HHNGTNGTMMQYFEWYLPNDGNHWNRLNSDASNLKSKGITAVWIPPAWKGASQNDVGYGAYDLYDLGEFNQKGTVRTKYGTRSQLQAAVTSLKNNGIQVYGDVVMNHKGGADATEMVRAVEVNPNNRNQEVTGEYTIEAWTRFDFPGRGNTHSSFKWRWYHFDGVDWDQSRRLNNRIYKFRGHGKAWDWEVDTENGNYDYLMYADIDMDHPEVVNELRNWGVWYTNTLGLDGFRIDAVKHIKYSFTRDWINHVRSATGKNMFAVAEFWKNDLGAIENYLQKTNWNHSVFDVPLHYNLYNASKGGGNYDMRNIFNGTVVQRHPSHAVTFVDNHDSQPEEALESFVEEWFKPLAYALTLTREQGYPSVFYGDYYGIPTHGVPAMRSKIDPILEARQKYAYGPQHDYLDHPDVIGWTREGDSSHPKSGLATLITDGPGGSKRMYAGLKNAGETWYDITGNRSDTVKIGSDGWGEFHVNDGSVSIYVQK

SEQ ID NO: 27109 - protein, 483 aa, Bacillus sp.
HHNGTNGTMMQYFEWYLPNDGNHWNRLNSDASNLKSKGITAVWIPPAWKATSQNDVGYGAYDLYDLGEFNQKGTVRTKYGTRSQLQAAVTSLKNNGIQVYGDVVMNHKGGADATEMVRAVEVNPNNRNQEVTGEYTIEAWTRFDFPGRGNTHSSFKWRWYHFDGVDWDQSRRLENRIYKFRGKAWDWEVDTEFGNYDYLMYADYDMDHPEVVNELRNWGVWYTNTLGLDGFRIDAVKHIKYSFTRDWINHVRSATGKNMFAVAEFWKNDLGAIENYLQKTNWNHSVFDVPLHYNLYNASKSGGNYDMRNIFNGTVVQRHPSHAVTFVDNHDSQPEEALESFVEEWFKPLAYALTLTREQGYPSVFYGDYYGIPTHGVPAMRSKIDPILEARQKYAYGPQHDYLDHPDVIGWTREGDSSHPKSGLATLITDGPGGSKRMYAGLKNAGETWYDITGNRSDTVKIGSDGWGEFHVNDGSVSIYVQK

SEQ ID NO: 27110 - protein, 485 aa, Bacillus sp.
HHNGTNGTMMQYFEWYLPNDGNHWNRLNSDASNLKSKGITAVWIPPAWKAASQNDVGYGAYDLYDLGEFNQKGTVRTKYGTRSQLQAAVTSLKNNGIQVYGDVVMNHKGGADATEMVDAVEVNPNNRNQEVTGEYTIEAWTRFDFPGRGNTHSSFKWRWYHFDGVDWDQSRDLQNRIYKFRGHGKAWDWEVDTEFGNYDYLMYADYDMDHPEVVNELRNWGVWYTNTLGLDGFRIDAVKHIKYSFTRDWINHVRSATGKNMFAVAEFWKNDLGAIENYLQKTNWNHSVFDVPLHYNLYNASKSGGNYDMRNIFNGTVVQRHPSHAVTFVDNHDSQPEEALESFVEEWFKPLAYALTLTREQGYPSVFYGDYYGIPTHGVPAMRSKIDPILEARQKYAYGPQHDYLDHPDVIGWTREGDSSHPKSGLATLITDGPGGSKRMYAGLKNAGETWYDITGNRSDTVKIGSDGWGEFHVNDGSVSIYVQK

SEQ ID NO: 27111 - protein, 485 aa, Bacillus sp.
HHNGTNQTMMQYFEWYLPNDGNHWNRLNSDASNLKSKGITAVWIPPAWKGASQNDVGYGAYDLYDLGEFNQKGTVRTKYGTRSQLQAAVTSLKNNGIQVYGDVVMNHKGGADATEMVRAVEVNPNNRNQEVTGEYTIEAWTRFDFPGRGNTHSSFKWRWYHFDGVDWDQSRRLNNRIYKFRGHGKAWDWEVDTEFGNYDYLMYADYDMDHPEVVNELRNWGVWYTNTLGLDGFRIDAVKHIKYSFTRDWINHVRSATGKNMFAVAEFWKNDLGAIENYLQKTNWNHSVFDVPLHYNLYNASKSGGNYDMRNIFNGTVVQSHPMHAVTFVDNHDSQPEEALESFVEEWFKPLAYALTLTREQGYPSVFYGDYYGIPTHGVPAMRSKIDPILEARQKYAYGPQHDYLDHPDVIGWTREGDSSHPKSGLATLITDGPGGSKRMYAGLKNAGETWYDITGNRSDTVKIGSDGWGEFHVNDGSVSIYVQK

SEQ ID NO: 27112 - protein, 485 aa, Bacillus sp.
HHNGTNGTMMQYFEWYLPNDGNHWNRLNSDASNLKSKGITAVWIPPAWKGASQNDVGYGAYDLYDLGEFNQKGTVRTKYGTRSQLQAAVTSLKNNGIQVYGDVVMNHKGGADATEMVRAVEVNPNNRNQEVTGEYTIEAWTRFDFPGRGNTHSSFKWRWYHFDGVDWDQSRRLNNRIYKFRGHGKAWDWEVDTEFGNYDYLMYADYDMDHPEVVNELRNWGVWYTNTLGLDGFRIDAVKHIKYSFTRDWINHVRSATGKNMFAVAEFWKNDLGAIENYLQKTNWNHSVFDVPLHYNLYNASKSGGNYDMRNIFNGTVVQRHPSHAVTFVDNHDSQPEEALESFVEEWFKPLAYALTLTREQGYPSVFYGDYYGIPTHGVPAMRSKIDPILEARQKYAYGPQHDYLDHPDVIGWTREGDSSHPKSGLATLITDGPGGSKRMYAGLKNAGETWYDITGNRSDTVKIGFDGWGEFHVNDGSVSIYVQK

SEQ ID NO: 27113 - protein, 485 aa, Synthetic construct
HHNGTNGTMMQYFEWYLPNDGNHWNRLNSDASNLKSKGITAVWIPPAWKGASQNDVGYGAYDLYDLGEFNQKGTVRTKYGTRSQLQAAVTSLKNNGIQVYGDVVMNHKGGADATEMVRAVEVNPNNRNQEVTGEYTIEAWTRFDFPGRGNTHSSFKWRWYHFDGVDWDQSRRLNNRIYKFRGHGKAWDWEVDTENGNYDYLMYADIDMDHPEVVNELRNWGVWYTNTLGLDGFRIDAVKHIKYSFTRDWINHVRSATGKNMFAVAEFWKNDLGAIENYLQKTNWNHSVFDVPLHYNLYNASKSGGNYDMRNIFNGTVVQRHPSHAVTFVDNHDSQPEEALESFVEEWFKPLAYALTLTREQGYPSVFYGDYYGIPQHGVPAMRSKIDPILEARQKYAYGPQHDYLDHPDVIGWTREGDSSHPKSGLATLITDGPGGSKRMYAGLKNAGETWYDITGNRSDTVKIGSDGWGEFHVNDGSVSIYVQK

SEQ ID NO: 27114 - protein, 485 aa, Bacillus sp.
HHNGTNGTMMQYFEWYLPNDGNHWNRLNSDASNLKSKGITAVWIPPAWKGASQNDVGYGAYDLYDLGEFNQKGTVRTKYGTRSQLQAAVTSLKNNGIQVYGDVVMNHKGGADATEMVRAVEVNPNNRNQEVTGEYTIEAWTRFDFPGRGNTHSSFKWRWYHFDGVDWDQSRRLNNRIYKFRGHGKAWDWEVDTEFGNYDYLMYADYDMDHPEVVNELRNWGVWYTNTLGLDGFRIDAVKHIKYSFTRDWINHVRSATGKNMFAVAEFWKNDLGAIENYLQKTNWNHSVFDVPLHYNLYNASKSGGNYDMRNIFNGTVVQRHPSHAVTFVDNHDSQPEEALESFVAEWFKPLAYALTLTREQGYPSVFYGDYYGIPTHGVPAMRSKIDPILEARQKYAYGPQHDYLDHPDVIGWTREGDSSHPKSGLATLITDGPGGSKRMYAGLKNAGETWYDITGNRSDTVKIGSDGWGEFHVNDGSVSIYVQK

SEQ ID NO: 27115 - protein, 485 aa, Bacillus sp.
HHNGTNGTMMQYFEWYLPNDGNHWNRLNSDASNLKSKGITAVWIPPAWKATSQNDVGYGAYDLYDLGEFNQKGTVRTKYGTRSQLQAAVTSLKNNGIQVYGDVVMNHKGGADATEMVRAVEVNPNNRNQEVTGEYTIEAWTRFDFPGRGNTHSSFKWRWYHFDGVDWDQSRRLENRIYKFRGHGKAWDWEVDTEFGNYDYLMYADYDMDHPEVVNELRNWGVWYTNTLGLDGFRIDAVKHIKYSFTRDWINHVRSATGKNMFAVAEFWKNDLGAIENYLQKTNWNHSVFDVPLHYNLYNASKSGGNYDMRNIFNGTVVQRHPSHAVTFVDNHDSQPEEALESFVEEWFKPLAYALTLTREQGYPSVFYGDYYGIPTHGVPAMRSKIDPILEARQKYAYGPQHDYLDHPDVIGWTREGDSSHPKSGLATLITDGPGGSKRMYAGLKNAGETWYDITGNRSDTVKIGSDGWGEFHVNDGSVSIYVQK

SEQ ID NO: 27116 - protein, 483 aa, Bacillus sp.
HHNGTNGTMMQYFEWYLPNDGNHWNRLNSDASNLKSKGITAVWIPPAWKATSQNDVGYGAYDLYDLGEFNQKGTVRTKYGTRSQLQAAVTSLKNNGIQVYGDVVMNHKGGADATEMVRAVEVNPNNRNQEVTGEYTIEAWTRFDFPGRGNTHSSFKWRWYHFDGVDWDQSRDLNNRIYKFRGKAWDWEVDTEFGNYDYLMYADYDMDHPEVVNELRNWGVWYTNTLGLDGFRIDAVKHIKYSFTRDWINHVRSATGKNMFAVAEFWKNDLGAIENYLQKTNWNHSVFDVPLHYNLYNASKSGGNYDMRNIFNGTVVQRHPSHAVTFVDNHDSQPEEALESFVDPWFKPLAYALTLTREQGYPSVFYGDYYGIPTHGVPAMRSKIDPILEARQKYAYGPQHDYLDHPDVIGWTREGDSSHPKSGLATLITDGPGGSKRMYAGLKNAGETWYDITGNRSDTVKIGSDGWGEFHVNGGSVSIYVQK

SEQ ID NO: 27117 - protein, 484 aa, Bacillus sp.
HHNGTNGTMMQYFEWYLPNDGNHWNRLNSDASNLKSKGITAVWIPPAWKGASQNDVGYGAYDLYDLGEFNQKGTVRTKYGTRSQLQAAVTSLKNNGIQVYGDVVMNHKGGADATEMVRAVEVNPNNRNQEVTGEYTIEAWTRFDFPGRGNTHSSFKWRWYHFDGVDWDQSRRLNNRIYKFRGHKAWDWEVDTEFGNYDYLMYADYDMDHPEVVNELRNWGVWYTNTLGLDGFRIDAVKHIKYSFTRDWINHVRSATGKNMFAVAEFWKNDLGAIENYLQKTNWNHSVFDVPLHYNLYNASKSGGNYDMRNIFNGTVVQRHPSHAVTFVDNHDSQPEEALESFVEEWFKPLAYALTLTREQGYPSVFYGDYYGIPTHGVPAMRSKIDPILEARQKYAYGPQHDYLDHPDVIGWTREGDSSHPKSGLATLITDGPGGSKRMYAGLKNAGETWYDITGNRSDTVKIGSDGWGEFHVNDGSVSIYVQK

SEQ ID NO: 27118 - protein, 485 aa, Bacillus sp.
HHNGTNQTMMQYFEWYLPNDGNHWNRLNSDASNLKSKGITAVWIPPAWKGASQNDVGYGAYDLYDLGEFNQKGTVRTKYGTRSQLQAAVTSLKNNGIQVYGDVVMNHKGGADATEMVRAVEVNPNNRNQEVTGEYTIEAWTRFDFPGRGNTHSSFKWRWYHFDGVDWDQSRRLNNRIYKFRGHGKAWDWEVDTEFGNYDYLMYADYDMDHPEVVNELRNWGVWYTNTLGLDGFRIDAVKHIKYSFTRDWINHVRSATGKNMFAVAEFWKNDLGAIENYLQKTNWNHSVFDVPLHYNLYNASKSGGNYDMRNIFNGTVVQAHPMHAVTFVDNHDSQPEEALESFVEEWFKPLAYALTLTREQGYPSVFYGDYYGIPTHGVPAMRSKIDPILEARQKYAYGPQHDYLDHPDVIGWTREGDSSHPKSGLATLITDGPGGSKRMYAGLKNAGETWYDITGNRSDTVKIGSDGWGEFHVNDGSVSIYVQK

SEQ ID NO: 27119 - protein, 485 aa, Bacillus sp.
HHNGTNGTMMQYFEWYLPNDGNHWNRLNSDASNLKSKGITAVWIPPAWKGASQNDVGYGAYDLYDLGEFNQKGTVRTKYGTRSQLQAAVTSLKNNGIQVYGDVVMNHKGGADATEMVRAVEVNPNNRNQEVTGEYTIEAWTRFDFPGRGNTHSSFKWRWYHFDGVDWDQSRNFQNRIYKFRGHGKAWDWEVDTEFGNYDYLMYADYDMDHPEVVNELRNWGVWYTNTLGLDGFRIDAVKHIKYSFTRDWINHVRSATGKNMFAVAEFWKNDLGAIENYLQKTNWNHSVFDVPLHYNLYNASKSQGNYDMRNIFNGTVVQRHPSHAVTFVDNHDSQPEEALESFVDTWFKPLAYALTLTREQGYPSVFYGDYYGIPTHGVPAMRSKIDPILEARQKYAYGPQHDYLDHPDVIGWTREGDSSHPKSGLATLITDGPGGSKRMYAGLKNAGETWYDITGNRSDTVKIGSDGWGEFHVNGSSVSIYVQK

SEQ ID NO: 27120 - protein, 485 aa, Bacillus sp.
HHNGTNGTMMQYFEWYLPNDGNHWNRLNSDASNLKSKGITAVWIPPAWKGASQNDVGYGAYDLYDLGEFNQKGTVRTKYGTRSQLQAAVTSLKNNGIQVYGDVVMNHKGGADATEMVRAVEVNPNNRNQEVTGEYTIEAWTRFDFPGRGNTHSSFKWRWYHFDGVDWDQSRRLNNRIYKFRGHGKAWDWEVDTEFGNYDYLMYADYDMDHPEVVNELRNWGVWYTNTLGLDGFRIDAVKHIKYSFTRDWINHVRSATGKNMFAVAEFWKNDLGAIENYLQKTNWNHSVFDVPLHYNLYNASKSGGNYDMRNIFNGTVVQRHPSHAVTFVDNHDSQPEEALESFVEEWFKPLAYALTLTREQGYPSVFYGDYYGIPTHGVPAMRSKIDPILEARQKYAYGPQHDYLDHPDVIGWTREGLSSHPKSGLATLITDGPGGSKRMYAGLKNAGETWYDITGNRSDTVKIGSDGWGEFHVNDGSVSIYVQK

SEQ ID NO: 27121 - protein, 485 aa, Bacillus sp.
HHNGTNGTMMQYFEWYLPNDGNHWNRLNSDASNLKSKGITAVWIPPAWKAASQNDVGYGAYDLYDLGEFNQKGTVRTKYGTRSQLQAAVTSLKNNGIQVYGDVVMNHKGGADATEMVRAVEVNPNNRNQEVTGEYTIEAWTRFDFPGRGNTHSSFKWRWYHFDGVDWDQSRKLQNRIYKFRGHGKAWDWEVDTEFGNYDYLMYADYDMDHPEVVNELRNWGVWYTNTLGLDGFRIDAVKHIKYSFTRDWINHVRSATGKNMFAVAEFWKNDLGAIENYLQKTNWNHSVFDVPLHYNLYNASKSGGNYDMRNIFNGTVVQRHPSHAVTFVDNHDSQPEEALESFVEEWFKPLAYALTLTREQGYPSVFYGDYYGIPTHGVPAMRSKIDPILEARQKYAYGPQHDYLDHPDVIGWTREGDSSHPKSGLATLITDGPGGSKRMYAGLKNAGETWYDITGNRSDTVKIGSDGWGEFHVNDGSVSIYVQK

SEQ ID NO: 27122 - protein, 485 aa, Synthetic construct
HHNGTNGTMMQYFEWYLPNDGNHWNRLNSDASNLKSKGITAVWIPPAWKGASQNDVGYGAYDLYDLGEFNQKGTVRTKYGTRSQLQAAVTSLKNNGIQVYGDVVMNHKGGADATEMVRAVEVNPNNRNQEVTGEYTIEAWTRFDFPGRGNTHSSFKWRWYHFDGVDWDQSRRLNNRIYKFRGHGKAWDWEVDTEFGNYDYLMYADHDMDHPEVVNELRNWGVWYTNTLGLDGFRIDAVKHIKYSFTRDWINHVRSATGKNMFAVAEFWKNDLGAIENYLQKTNWNHSVFDVPLHYNLYNASKSGGNYDMRNIFNGTVVQRHPSHAVTFVDNHDSQPEEALESFVEEWFKPLAYALTLTREQGYPSVFYGDYYGIPTHGVPAMRSKIDPILEARQKYAYGPQHDYLDHPDVIGWTREGDSSHPKSGLATLITDGPGGSKRMYAGLKNAGETWYDITGNRSDTVKIGSDGWGEFHVNDGSVSIYVQK

SEQ ID NO: 27123 - protein, 485 aa, Bacillus sp.
HHNGKNGTMMQYFEWYLPNDGNHWNRLNSDASNLKSKGITAVWIPPAWKGASQNDVGYGAYDLYDLGEFNQKGTVRTKYGTRSQLQAAVTSLKNNGIQVYGDVVMNHKGGADATEMVRAVEVNPNNRNQEVTGEYTIEAWTRFDFPGRGNTHSSFKWRWYHFDGVDWDQSREFNNRIYKFRGHGKAWDWEVDTEFGNYDYLMYADYDMDHPEVVNELRNWGVWYTNTLGLDGFRIDAVKHIKYSFTRDWINHVRSATGKNMFAVAEFWKNDLGAIENYLQKTNWNHSVFDVPLHYNLYNASKSGGNYDMRNIFNGTVVQRHPSHAVTFVDNHDSQPEEALESFVEEWFKPLAYALTLTREQGYPSVFYGDYYGIPTHGVPAMRSKIDPILEARQKYAYGPQHDYLDHPDVIGWTREGDSSHPKSGLATLITDGPGGSKRMYAGLKNAGETWYDITGNRSDTVKIGSDGWGEFHVNDGSVSIYVQK

SEQ ID NO: 27124 - protein, 485 aa, Bacillus sp.
HHNGTNGTMMQYFEWYLPNDGNHWNRLNSDASNLKSKGITAVWIPPALKGTSQNDVGYGAYDLYDLGEFNQKGTVRTKYGTRSQLQAAVTSLKNNGIQVYGDVVMNHKGGADATEMVRAVEVNPNNRNQEVTGEYTIEAWTRFDFPGRGNTHSSFKWRWYHFDGVDWDQSRQLSNRIYKFRGHGKAWDWEVDTEFGNYDYLMYTDYDMDHPEVVNELRNWGVWYTNTLGLDGFRIDAVKHIKYSFTRDWINHVRSATGKNMFAVAEFWKNDLGAIENYLQKTNWNHSVFDVPLHYNLYNASKSGGNYDMRNIFNGTVVQRHPSHAVTFVDNHDSQPEEALESFVEEWFKPLAYALTLTREQGYPSVFYGDYYGIPTHGVPAMRSKIDPILEARQKYAYGPQHDYLDHPDVIGWTREGDSSHPKSGLATLITDGPGGSKRMYAGLKNAGETWYDITGNRSDTVKIGSDGWGEFHVNDGSVSIYVQK

SEQ ID NO: 27125 - protein, 483 aa, Synthetic construct
HHNGTNGTMMQYFEWYLPNDGNHWNRLNSDASNLKSKGITAVWIPPAWKGASQNDVGYGAYDLYDLGEFNQKGTVRTKYGTRSQLQAAVTSLKNNGIQVYGDVVMNHKGGADATEMVRAVEVNPNNRNQEVTGEYTIEAWTRFDFPGRGNTHSSFKWRWYHFDGVDWDQSRRLNNRIYKFRGKAWDWEVDTENGNYDYLMYADIDMDHQEVVNELRNWGVWYTNTLGLDGFRIDAVKHIKYSFTRDWINHVRSATGKNMFAVAEFWKNDLGAIENYLQKTNWNHSVFDVPLHYNLYNASKSGGNYDMRNIFNGTVVQRHPSHAVTFVDNHDSQPEEALESFVEEWFKPLAYALTLTREQGYPSVFYGDYYGIPTHGVPAMRSKIDPILEARQKYAYGPQHDYLDHPDVIGWTREGDSSHPKSGLATLITDGPGGSKRMYAGLKNAGETWYDITGNRSDTVKIGSDGWGEFHVNDGSVSIYVQK

SEQ ID NO: 27126 - protein, 485 aa, Bacillus sp.
HHNGTNGTMMQYFEWYLPNDGNHWNRLNSDASNLKSKGITAVWIPPAWKGASQNDVGYGAYDLYDLGEFNQKGTVRTKYGTRSQLQAAVTSLKNNGIQVYGDVVMNHKGGADATEMVRAVEVNPNNRNQEVTGEYTIEAWTRFDFPGRGNTHSSFKWRWYHFDGVDWDQSRNLSNRIYKFRGHGKAWDWEVDTEFGNYDYLMYADYDMDHPEVVNELRNWGVWYTNTLGLDGFRIDAVKHIKYSFTRDWINHVRSATGKNMFAVAEFWKNDLGAIENYLQKTNWNHSVFDVPLHYNLYNASKSGGNYDMRNIFNGTVVQRHPSHAVTFVDNHDSQPEEALESFVEEWFKPLAYALTLTREQGYPSVFYGDYYGIPTHGVPAMRSKIDPILEARQKYAYGPQHDYLDHPDVIGWTREGDSSHPKSGLATLITDGPGGSKRMYAGLKNAGETWYDITGNRSDTVKIGSDGWGEFHVNDGSVSIYVQK

SEQ ID NO: 27127 - protein, 485 aa, Synthetic construct
HHNGTNGTMMQYFEWYLPNDGNHWNRLNSDASNLKSKGITAVWIPPAWKGASQNDVGYGAYDLYDLGEFNQKGTVRTKYGTRSQLQAAVTSLKNNGIQVYGDVVMNHKGGADATEMVRAVEVNPNNRNQEVTGEYTIEAWTRFDFPGRGNTHSSFKWRWYHFDGVDWDQSRRLNNRIYKFRGHGKAWDWEVDTENGNYDYLMYADIDMDHPEVVNELRNWGVWYTNTLGLDGFRIDAVKHIKYSFTRDWINHVRSATGKNMFAVAEFWKNDLGAIENYLQKTNWTHSVFDVPLHYNLYNASKSGGNYDMRNIFNGTVVQRHPSHAVTFVDNHDSQPEEALESFVEEWFKPLAYALTLTREQGYPSVFYGDYYGIPTHGVPAMRSKIDPILEARQKYAYGPQHDYLDHPDVIGWTREGDSSHPKSGLATLITDGPGGSKRMYAGLKNAGETWYDITGNRSDTVKIGSDGWGEFHVNDGSVSIYVQK

SEQ ID NO: 27128 - protein, 485 aa, Bacillus sp.
HHNGTNGTMMQYFEWYLPNDGNHWNRLNSDASNLKSKGITAVWIPPAWKGASQNDVGYGAYDLYDLGEFNQKGTVRTKYGTRSQLQAAVTSLKNNGIQVYGDVVMNHKGGADATEMVRAVEVNPNNRNQEVTGEYTIEAWTRFDFPGRGNTHSSFKWRWYHFDGVDWDQSRRFNNRIYKFRGHGKAWDWEVDTEFGNYDYLMYTDYDMDHPEVVNELRNWGVWYTNTLGLDGFRIDAVKHIKYSFTRDWINHVRSATGKNMFAVAEFWKNDLGAIENYLQKTNWNHSVFDVPLHYNLYNASKSGGNYDMRNIFNGTVVQRHPSHAVTFVDNHDSQPEEALESFVEEWFKPLAYALTLTREQGYPSVFYGDYYGIPTHGVPAMRSKIDPILEARQKYAYGPQHDYLDHPDVIGWTREGDSSHPKSGLATLITDGPGGSKRMYAGLKNAGETWYDITGNRSDTVKIGSDGWGEFHVNDGSVSIYVQK

SEQ ID NO: 27129 - protein, 485 aa, Bacillus sp.
HHNGTNGTMMQYFEWYLPNDGNHWNRLNSDASNLKSKGITAVWIPPAWKGASQNDVGYGAYDLYDLGEFNQKGTVRTKYGTRSQLQAAVTSLKNNGIQVYGDVVMNHKGGADATEMVRAVEVNPNNRNQEVTGEYTIEAWTRFDFPGRGNTHSSFKWRWYHFDGVDFDQSRQLDNRIYKFRGHGKAWDWEVDTEFGNYDYLMYADYDMDHPEVVNELRNWGVWYTNTLGLDGFRIDAVKHIKYSFTRDWINHVRSATGKNMFAVAEFWKNDLGAIENYLQKTNWNHSVFDVPLHYNLYNASKSGGNYDMRNIFNGTVVQRHPSHAVTFVDNHDSQPEEALESFVEEWFKPLAYALTLTREQGYPSVFYGDYYGIPTHGVPAMRSKIDPILEARQKYAYGPQHDYLDHPDVIGWTREGDSSHPKSGLATLITDGPGGSKRMYAGLKNAGETWYDITGNRSDTVKIGSDGWGEFHVNDGSVSIYVQK

SEQ ID NO: 27130 - protein, 485 aa, Bacillus sp.
HHNGTNGTMMQYFEWYLPNDGNHWNRLNSDASNLKSKGITAVWIPPAWKGASQNDVGYGAYDLYDLGEFNQKGTVRTKYGTRSQLQAAVTSLKNNGIQVYGDVVMNHKGGADATEMVRAVEVNPNNRNQEVTGEYTIEAWTRFDFPGRGNTHSSFKWRWYHFDGVDWDQSRETTNRIYKFRGHGKAWDWEVDTEFGNYDYLMYADYDMDHPEVVNELRNWGVWYTNTLGLDGFRIDAVKHIKYSFTRDWINHVRSATGKNMFAVAEFWKNDLGAIENYLQKTNWNHSVFDVPLHYNLYNASKSGGNYDMRNIFNGTVVQRHPSHAVTFVDNHDSQPEEALESFVEEWFKPLAYALTLTREQGYPSVFYGDYYGIPTHGVPAMRSKIDPILEARQKYAYGPQHDYLDHPDVIGWTREGDSSHPKSGLATLITDGPGGSKRMYAGLKNAGETWYDITGNRSDTVKIGSDGWGEFHVNDGSVSIYVQK

SEQ ID NO: 27131 - protein, 485 aa, Synthetic construct
HHNGTNGTMMQYFEWYLPNDGNHWNRLNSDASNLKSKGITAVWIPPAWKGASQNDVGYGAYDLYDLGEFNQKGTVRTKYGTRSQLQAAVTSLKNNGIQVYGDVVMNHKGGADATEMVRAVEVNPNNRNQEVTGEYTIEAWTRFDFPGRGNTHSSFKWRWYHFDGVDWDQSRRLNNRIYKFRGHGKAWDWEVDTENGNYDYLMYADYDMDHPEVVNEIRNWGVWYTNTLGLDGFRIDAVKHIKYSFTRDWINHVRSATGKNMFAVAEFWKNDLGAIENYLQKTNWNHSVFDVPLHYNLYNASKSGGNYDMRNIFNGTVVQRHPSHAVTFVDNHDSQPEEALESFVEEWFKPLAYALTLTREQGYPSVFYGDYYGIPTHGVPAMRSKIDPILEARQKYAYGPQHDYLDHPDVIGWTREGDSSHPKSGLATLITDGPGGSKRMYAGLKNAGETWYDITGNRSDTVKIGSDGWGEFHVNDGSVSIYVQK

SEQ ID NO: 27132 - protein, 485 aa, Synthetic construct
HHNGTNGTMMQYFEWYLPNDGNHWNRLNSDASNLKSKGITAVWIPPAWKGASQNDVGYGAYDLYDLGEFNQKGTVRTKYGTRSQLQAAVTSLKNNGIQVYGDVVMNHKGGADATEMVRAVEVNPNNRNQEVTGEYTIEAWTRFDFPGRGNTHSSFKWRWYHFDGVDWDQSRRLNNRIYKFRGHGKAWDWEVDTENGNYDYLMYADIDMDHPEVVNELRNWGVWYTNTLGLDGFRIDAVKHIKYSFTRDWINHVRSATGKNMFAVAEFWKNDLGAIENYLQKTNWNHSVFDVPLHYNLYNASKSGGNYDMRNIFNGTVVQRHPSHAVTFVDNHDSQPEEALESFVEEWFKPLAYALTLTREQGYPSVFYGDYYGIPTHGVPAMRSKIDPILEARQKYAYGPQHDYLDHPDVIGWTREGDSSHPKSGLATLITDGPGGSKRMYAGLKNAGETWYDLTGNRSDTVKIGSDGWGEFHVNDGSVSIYVQK

SEQ ID NO: 27133 - protein, 485 aa, Bacillus sp.
HHNGTNGTMMQYFEWYLPNDGNHWNRLNSDASNLKSKGITAVWIPPAWKGASQNDVGYGAYDLYDLGEFNQKGTVRTKYGTRSQLQAAVTSLKNNGIQVYGDVVMNHKGGADATEMVRAVEVNPNNRNQEVTGEYTIEAWTRFDFPGRGNTHSSFKWRWYHFDGVDWDQSRRLNNRIYKFRGHGKAWDWEVDTEFGNYDYLMYADYDMDHPEVVNELRNWGVWYTNTLGLDGFRIDAVKHIKYSFTRDWINHVRSATGKNMFAVAEFWKNDLGAIENYLQKTNWNHSVFDVPLHYNLYNASKSGGNYDMRNIFNGTVVQRHPSHAVTFVDNHDSQPEEALESFVEEWFKPLAYALTLTREQGYPSVFYGDYYGIPTHGVPAMRSKIDPILEARQKYAYGPQHDYVDHPDVIGWTREGDSSHPKSGLATLITDGPGGSKRMYAGLKNAGETWYDITGNRSDTVKIGSDGWGEFHVNDGSVSIYVQK

SEQ ID NO: 27134 - protein, 485 aa, Bacillus sp.
HHNGTNGTMMQYFEWYLPNDGNHWNRLNSDASNLKSKGITAVWIPPAWKGASQNDVGYGAYDLYDLGEFNQKGTVRTKYGTRSQLQAAVTSLKNNGIQVYGDVVMNHKGGADATEMVRAVEVNPNNRNQEVTGEYTIEAWTRFDFPGRGNTHSSFKWRWYHFDGVDWDQSRRLNNRIYKFRGHGKAWDWEVDTEFGNYDYLMYADYDMDHPEVVNELRNWGVWYTNTLGLDGFRIDAVKHIKYSFTRDWINHVRSATGKNMFAVAEFWKNDLGAIENYLQKTNWNHSVFDVPLHYNLYNASNSGGNYDMRNIFNGTVVQRHPSHAVTFVDNHDSQPEEALESFVDEWFKPLAYALTLTREQGYPSVFYGDYYGIPTHGVPAMRSKIDPILEARQKYAYGPQHDYLDHPDVIGWTREGDSSHPKSGLATLITDGPGGSKRMYAGLKNAGETWYDITGNRSDTVKIGSDGWGEFHVNKSSVSIYVQK

SEQ ID NO: 27135 - protein, 485 aa, Synthetic construct
HHNGTNGTMMQYFEWYLPNDGNHWNRLNSDASNLKSKGITAVWIPPAWKGASQNDVGYGAYDLYDLGEFNQKGTVRTKYGTRSQLQAAVTSLKNNGIQVYGDVVMNHKGGADATEMVRAVEVNPNNRNQEVTGEYTIEAWTRFDFPGRGNTHSSFKWRWYHFDGVDWDQSRRLNNRIYKFRGHGKAWDWEVDTENGNYDYLMYADIDMDHPEVVNELRNWGVWYTNTLGLDGFRIDAVKHIKYSFTRDWINHVRSATGKNMFAVAEFWQNDLGAIENYLQKTNWNHSVFDVPLHYNLYNASKSGGNYDMRNIFNGTVVQRHPSHAVTFVDNHDSQPEEALESFVEEWFKPLAYALTLTREQGYPSVFYGDYYGIPTHGVPAMRSKIDPILEARQKYAYGPQHDYLDHPDVIGWTREGDSSHPKSGLATLITDGPGGSKRMYAGLKNAGETWYDITGNRSDTVKIGSDGWGEFHVNDGSVSIYVQK

SEQ ID NO: 27136 - protein, 483 aa, Bacillus sp.
HHNGTNGTMMQYFEWYLPNDGNHWNRLNSDASNLKSKGITAVWIPPAWKGASQNDVGYGAYDLYDLGEFNQKGTVRTKYGTRSQLQAAVTSLKNNGIQVYGDVVMNHKGGADATEMVRAVEVNPNNRNQEVTGEYTIEAWTRFDFPGRGNTHSSFKWRWYHFDGVDWDQSRDTDNRIYKFRGKAWDWEVDTEFGNYDYLMYADYDMDHPEVVNELRNWGVWYTNTLGLDGFRIDAVKHIKYSFTRDWINHVRSATGKNMFAVAEFWKNDLGAIENYLQKTNWNHSVFDVPLHYNLYNASKSGGNYDMRNIFNGTVVQRHPSHAVTFVDNHDSQPEEALESFVEEWFKPLAYALTLTREQGYPSVFYGDYYGIPTHGVPAMRSKIDPILEARQKYAYGPQHDYLDHPDVIGWTREGDSSHPKSGLATLITDGPGGSKRMYAGLKNAGETWYDITGNRSDTVKIGSDGWGEFHVNDGSVSIYVQK

SEQ ID NO: 27137 - protein, 485 aa, Bacillus sp.
HHNGTNGTMMQYFEWYLPNDGNHWNRLNSDASNLKSKGITAVWIPPAWKGASQNDVGYGAYDLYDLGEFNQKGTVRTKYGTRSQLQAAVTSLKNNGIQVYGDVVMNHKGGADATEMVRAVEVNPNNRNQEVTGEYTIEAWTRFDFPGRGNTHSSFKWRWYHFDGVDWDQSRRLNNRIYKFRGHGKAWDWEVDTEFGNYDYLMYADYDMDHPEVVNELRNWGVWYTNTLGLDGFRIDAVKHIKYSFTRDWINHVRSATGKNMFAVAEFWKNDLGAIENYLQKTNWNHSVFDVPLHYNLYNASKSGGNYDMRNIFNGTVVQRHPSHAVTFVDNHDSQPEEALESFVEEWFKPLAYALTLTREQGYPSVFYGDYYGIPTHGVPAMRSKIDPILEARQKYAYGPQHDYLDHPDVIGWTREGDSSHPKSGLATLIPDGPGGSKRMYAGLKNAGETWYDITGNRSDTVKIGSDGWGEFHVNDGSVSIYVQK

SEQ ID NO: 27138 - protein, 485 aa, Synthetic construct
HHNGTNGTMMQYFEWYLPNDGNHWNRLNSDASNLKSKGITAVWIPPAWKGASQNDVGYGAYDLYDLGEFNQKGTVRTKYGTRSQLQAAVTSLKNNGIQVYGDVVINHKGGADATEMVRAVEVNPNNRNQEVTGEYTIEAWTRFDFPGRGNTHSSFKWRWYHFDGVDWDQSRRLNNRIYKFRGHGKAWDWEVDTENGNYDYLMYADIDMDHPEVVNELRNWGVWYTNTLGLDGFRIDAVKHIKYSFTRDWINHVRSATGKNMFAVAEFWKNDLGAIENYLQKTNWNHSVFDVPLHYNLYNASKSGGNYDMRNIFNGTVVQRHPSHAVTFVDNHDSQPEEALESFVEEWFKPLAYALTLTREQGYPSVFYGDYYGIPTHGVPAMRSKIDPILEARQKYAYGPQHDYLDHPDVIGWTREGDSSHPKSGLATLITDGPGGSKRMYAGLKNAGETWYDITGNRSDTVKIGSDGWGEFHVNDGSVSIYVQK

SEQ ID NO: 27139 - protein, 483 aa, Bacillus sp.
HHNGTNGTMMQYFEWYLPNDGNHWNRLNSDASNLKSKGITAVWIPPAWKGVSQNDVGYGAYDLYDLGEFNQKGTVRTKYGTRSQLQAAVTSLKNNGIQVYGDVVMNHKGGADATEMVRAVEVNPNNRNQEVTGEYTIEAWTRFDFPGRGNTHSSFKWRWYHFDGVDWDQSRQLSNRIYKFRGKAWDWEVDTEFGNYDYLMYVDYDMDHPEVVNELRNWGVWYTNTLGLDGFRIDAVKHIKYSFTRDWINHVRSATGKNMFAVAEFWKNDLGAIENYLQKTNWNHSVFDVPLHYNLYNASKSGGNYDMRNIFNGTVVQRHPSHAVTFVDNHDSQPEEALESFVEEWFKPLAYALTLTREQGYPSVFYGDYYGIPTHGVPAMRSKIDPILEARQKYAYGPQHDYLDHPDVIGWTREGDSSHPKSGLATLITDGPGGSKRMYAGLKNAGETWYDITGNRSDTVKIGSDGWGEFHVNDGSVSIYVQK

SEQ ID NO: 27140 - protein, 485 aa, Bacillus sp.
HHNGTNGTMMQYFEWYLPNDGNHWNRLNSDASNLKSKGITAVWIPPAWKGASQNDVGYGAYDLYDLGEFNQKGTVRTKYGTRSQLQAAVTSLKNNGIQVYGDVVMNHKGGADATEMVRAVEVNPNNRNQEVTGEYTIEAWTRFDFPGRGNTHSSFKWRWYHFDGVDWDQSRRLNNRIYKFRGHGKAWDWEVDTEFGNYDYLMYADYDMDHPEVVNELRNWGVWYTNTLGLDGFRIDAVKHIKYSFTRDWINHVRSATGKNMFAVAEFWKNDLGAIENYLQKTNWNHSVFDVPLHYNLYNASQSGGNYDMRNIFNGTVVQRHPSHAVTFVDNHDSQPEEALESFVEEWFKPLAYALTLTREQGYPSVFYGDYYGIPTHGVPAMRSKIDPILEARQKYAYGPQHDYLDHPDVIGWTREGDSSHPKSGLATLITDGPGGSKRMYAGLKNAGETWYDITGNRSDTVKIGSDGWGEFHVNDGSVSIYVQK

SEQ ID NO: 27141 - protein, 483 aa, Bacillus sp.
HHNGTNGTMMQYFEWYLPNDGNHWNRLNSDASNLKSKGITAVWIPPAWKAVSQNDVGYGAYDLYDLGEFNQKGTVRTKYGTRSQLQAAVTSLKNNGIQVYGDVVMNHKGGADATEMVDAVEVNPNNRNQEVTGEYTIEAWTRFDFPGRGNTHSSFKWRWYHFDGVDWDQSRDFNNRIYKFRGKAWDWEVDTEFGNYDYLMYADYDMDHPEVVNELRNWGVWYTNTLGLDGFRIDAVKHIKYSFTRDWINHVRSATGKNMFAVAEFWKNDLGAIENYLQKTNWNHSVFDVPLHYNLYNASKSGGNYDMRNIFNGTVVQRHPSHAVTFVDNHDSQPEEALESFVEEWFKPLAYALTLTREQGYPSVFYGDYYGIPTHGVPAMRSKIDPILEARQKYAYGPQHDYLDHPDVIGWTREGDSSHPKSGLATLITDGPGGSKRMYAGLKNAGETWYDITGNRSDTVKIGSDGWGEFHVNDGSVSIYVQK

SEQ ID NO: 27142 - protein, 485 aa, Bacillus sp.
HHNGTNGTMMQYFEWYLPNDGNHWNRLNSDASNLKSKGITAVWIPPAWKGASQNDVGYGAYDLYDLGEFNQKGTVRTKYGTRSQLQAAVTSLKNNGIQVYGDVVMNHKGGADATEMVRAVEVNPNNRNQEVTGEYTIEAWTRFDFPGRGNTHSSFKWRWYHFDGVDWDQSRRLNNRIYKFRGHGKAWDWEVDTEFGNYDYLMYADYDMDHPEVVNELRNWGVWYTNTLGLDGFRIDAVKHIKYSFTRDWINHVRSATGKNMFAVAEFWKNDLGAIENYLQKTNWNHSVFDVPLHYNLYNASKSGGNYDMRNIFNGTVVQRHPSHAVTFVDNHDSQPEEALESFVEEWFKPLAYALTLTREQGYPSVFYGDYYGIPTHGVPAMRSKIDPILEARQKYAYGPQHDYLDHPDVIGWTREGDSSHPWSGLATLITDGPGGSKRMYAGLKNAGETWYDITGNRSDTVKIGSDGWGEFHVNDGSVSIYVQK

SEQ ID NO: 27143 - protein, 485 aa, Synthetic construct
HHNGTNGTMMQYFEWYLPNDGNHWNRLNSDASNLKSKGITAVWIPPAWKGASQNDVGYGAYDLYDLGEFNQKGTVRTKYGTRSQLQAAVTSLKNNGIQVYGDVVMNHKGGADATEMVRAVEVNPNNRNQEVTGEYTIEAWTRFDFPGRGNTHSSFKWRWYHFDGVDWDQSRRLNNRIYKFRGHGKAWDWEVDTENGNYDYLMYADIDMDHPEVVNELRNWGVWYTNTLGLDGFRIDAVKHIKYSFTRDWINHVRSATGKNMFAVAEFWKNDLGAIENYLQKTNWNHSVFDVPLHYNLYNASKSGGNYDMRNIFNGTVVQRHPSHAVTLVDNHDSQPEEALESFVEEWFKPLAYALTLTREQGYPSVFYGDYYGIPTHGVPAMRSKIDPILEARQKYAYGPQHDYLDHPDVIGWTREGDSSHPKSGLATLITDGPGGSKRMYAGLKNAGETWYDITGNRSDTVKIGSDGWGEFHVNDGSVSIYVQK

SEQ ID NO: 27144 - protein, 485 aa, Synthetic construct
HHNGTNGTMMQYFEWYLPNDGNHWNRLNSDASNLKSKGITAVWIPPAWKGASQNDVGYGAYDLYDLGEFNQKGTVRTKYGTRSQLQAAVTSLKNNGIQVYGDVVINHKGGADATEMVRAVEVNPNNRNQEVTGEYTIEAWTRFDFPGRGNTHSSFKWRWYHFDGVDWDQSRRLNNRIYKFRGHGKAWDWEVDTENGNYDYLMYADYDMDHPEVVNELRNWGVWYTNTLGLDGFRIDAVKHIKYSFTRDWINHVRSATGKNMFAVAEFWKNDLGAIENYLQKTNWNHSVFDVPLHYNLYNASKSGGNYDMRNIFNGTVVQRHPSHAVTFVDNHDSQPEEALESFVEEWFKPLAYALTLTREQGYPSVFYGDYYGIPTHGVPAMRSKIDPILEARQKYAYGPQHDYLDHPDVIGWTREGDSSHPKSGLATLITDGPGGSKRMYAGLKNAGETWYDITGNRSDTVKIGSDGWGEFHVNDGSVSIYVQK

SEQ ID NO: 27145 - protein, 485 aa, Synthetic construct
HHNGTNGTMMQYFEWYLPNDGNHWNRLNSDASNLKSKGITAVWTPPAWKGASQNDVGYGAYDLYDLGEFNQKGTVRTKYGTRSQLQAAVTSLKNNGIQVYGDVVMNHKGGADATEMVRAVEVNPNNRNQEVTGEYTIEAWTRFDFPGRGNTHSSFKWRWYHFDGVDWDQSRRLNNRIYKFRGHGKAWDWEVDTENGNYDYLMYADIDMDHPEVVNELRNWGVWYTNTLGLDGFRIDAVKHIKYSFTRDWINHVRSATGKNMFAVAEFWKNDLGAIENYLQKTNWNHSVFDVPLHYNLYNASKSGGNYDMRNIFNGTVVQRHPSHAVTFVDNHDSQPEEALESFVEEWFKPLAYALTLTREQGYPSVFYGDYYGIPTHGVPAMRSKIDPILEARQKYAYGPQHDYLDHPDVIGWTREGDSSHPKSGLATLITDGPGGSKRMYAGLKNAGETWYDITGNRSDTVKIGSDGWGEFHVNDGSVSIYVQK

SEQ ID NO: 27146 - protein, 483 aa, Bacillus sp.
HHNGTNGTMMQYFEWYLPNDGNHWNRLNSDASNLKSKGITAVWIPPAWKAASQNDVGYGAYDLYDLGEFNQKGTVRTKYGTRSQLQAAVTSLKNNGIQVYGDVVMNHKGGADATEMVRAVEVNPNNRNQEVTGEYTIEAWTRFDFPGRGNTHSSFKWRWYHFDGVDWDQSRRFSNRIYKFRGKAWDWEVDTEFGNYDYLMYADYDMDHPEVVNELRNWGVWYTNTLGLDGFRIDAVKHIKYSFTRDWINHVRSATGKNMFAVAEFWKNDLGAIENYLQKTNWNHSVFDVPLHYNLYNASKSGGNYDMRNIFNGTVVQRHPSHAVTFVDNHDSQPEEALESFVEEWFKPLAYALTLTREQGYPSVFYGDYYGIPTHGVPAMRSKIDPILEARQKYAYGPQHDYLDHPDVIGWTREGDSSHPKSGLATLITDGPGGSKRMYAGLKNAGETWYDITGNRSDTVKIGSDGWGEFHVNDGSVSIYVQK

SEQ ID NO: 27147 - protein, 483 aa, Bacillus sp.
HHNGTNGTMMQYFEWYLPNDGNHWNRLNSDASNLKSKGITAVWIPPAWKAISQNDVGYGAYDLYDLGEFNQKGTVRTKYGTRSQLQAAVTSLKNNGIQVYGDVVMNHKGGADATEMVRAVEVNPNNRNQEVTGEYTIEAWTRFDFPGRGNTHSSFKWRWYHFDGVDWDQSRRFNNRIYKFRGKAWDWEVDTEFGNYDYLMYADYDMDHPEVVNELRNWGVWYTNTLGLDGFRIDAVKHIKYSFTRDWINHVRSATGKNMFAVAEFWKNDLGAIENYLQKTNWNHSVFDVPLHYNLYNASKSGGNYDMRNIFNGTVVQRHPSHAVTFVDNHDSQPEEALESFVEEWFKPLAYALTLTREQGYPSVFYGDYYGIPTHGVPAMRSKIDPILEARQKYAYGPQHDYLDHPDVIGWTREGDSSHPKSGLATLITDGPGGSKRMYAGLKNAGETWYDITGNRSDTVKIGSDGWGEFHVNDGSVSIYVQK

SEQ ID NO: 27148 - protein, 485 aa, Synthetic construct
HHNGTNGTMMQYFEWYLPNDGNHWNRLNSDASNLKSKGITAVWIPPAWKGASQNDVGYGAYDLYDLGEFNQKGTVRTKYGTRSQLQAAVTSLKNNGIQVYGDVVMNHKGGADATEMVRAVEVNPNNRNQEVTGEYTIEAWTRFDFPGRGNTHSSFKWRWYHFDGVDWDQSRRLNNRIYKFRGHGKAWDWEVDTENGNYDYLMYADIDMDHPEVVNELRNWGVWYTNTLGLDGFRIDAVKHIKYSFTRDWINHVRSATGKNMFAVAEFWKNDLGAIENYLQKTNWNHSVFDVPLHYNLYNASKSGGNYDMRNIFNGTVVQRHPSHAVTFVDNHDSQPEEALESFVEEWFKPLAYALTLTREQGYPSVFYGDYYGIPTDGVPAMRSKIDPILEARQKYAYGPQHDYLDHPDVIGWTREGDSSHPKSGLATLITDGPGGSKRMYAGLKNAGETWYDITGNRSDTVKIGSDGWGEFHVNDGSVSIYVQK

SEQ ID NO: 27149 - protein, 483 aa, Bacillus sp.
HHNGTNGTMMQYFEWYLPNDGNHWNRLNSDASNLKSKGITAVWIPPAWKGASQNDVGYGAYDLYDLGEFNQKGTVRTKYGTRSQLQAAVTSLKNNGIQVYGDVVMNHKGGADATEMVRAVEVNPNNRNQEVTGEYTIEAWTRFDFPGRGNTHSSFKWRWYHFDGVDWDQSRRLDNRIYKFRGKAWDWEVDTEFGNYDYLMYADYDMDHPEVVNELRNWGVWYTNTLGLDGFRIDAVKHIKYSFTRDWINHVRSATGKNMFAVAEFWKNDLGAIENYLQKTNWNHSVFDVPLHYNLYNASKSGGNYDMRNIFNGTVVQRHPSHAVTFVDNHDSQPEEALESFVEEWFKPLAYALTLTREQGYPSVFYGDYYGIPTHGVPAMRSKIDPILEARQKYAYGPQHDYLDHPDVIGWTREGDSSHPKSGLATLITDGPGGSKRMYAGLKNAGETWYDITGNRSDTVKIGSDGWGEFHVNDGSVSIYVQK

SEQ ID NO: 27150 - protein, 485 aa, Bacillus sp.
HHNGTNGTMMQYFEWYLPNDGNHWNRLNSDASNLKSKGITAVWIPPAWKGASQNDVGYGAYDLYDLGEFNQKGTVRTKYGTRSQLQAAVTSLKNNGIQVYGDVVMNHKGGADATEMVRAVEVNPNNRNQEVTGEYTIEAWTRFDFPGRGNTHSSFKWRWYHFDGVDWDQSRRLNNRIYKFRAHGKAWDWEVDTEFGNYDYLMYADYDMDHPEVVNELRNWGVWYTNTLGLDGFRIDAVKHIKYSFTRDWINHVRSATGKNMFAVAEFWKNDLGAIENYLQKTNWNHSVFDVPLHYNLYNASKSGGNYDMRNIFNGTVVQRHPSHAVTFVDNHDSQPEEALESFVEEWFKPLAYALTLTREQGYPSVFYGDYYGIPTHGVPAMRSKIDPILEARQKYAYGPQHDYLDHPDVIGWTREGDSSHPKSGLATLITDGPGGSKRMYAGLKNAGETWYDITGNRSDTVKIGSDGWGEFHVNDGSVSIYVQK

SEQ ID NO: 27151 - protein, 483 aa, Bacillus sp.
HHNGTNGTMMQYFEWYLPNDGNHWNRLNSDASNLKSKGITAVWIPPAWKGASQNDVGYGAYDLYDLGEFNQKGTVRTKYGTRSQLQAAVTSLKNNGIQVYGDVVMNHKGGADATEMVRAVEVNPNNRNQEVTGEYTIEAWTRFDFPGRGNTHSSFKWRWYHFDGVDWDQSRNFQNRIYKFRGKAWDWEVDTEFGNYDYLMYADYDMDHPEVVNELRNWGVWYTNTLGLDGFRIDAVKHIKYSFTRDWINHVRSATGKNMFAVAEFWKNDLGAIENYLQKTNWNHSVFDVPLHYNLYNASKSQGNYDMRNIFNGTVVQRHPSHAVTFVDNHDSQPEEALESFVDTWFKPLAYALTLTREQGYPSVFYGDYYGIPTHGVPAMRSKIDPILEARQKYAYGPQHDYLDHPDVIGWTREGDSSHPKSGLATLITDGPGGSKRMYAGLKNAGETWYDITGNRSDTVKIGSDGWGEFHVNGSSVSIYVQK

SEQ ID NO: 27152 - protein, 485 aa, Synthetic construct
HHNGTNGTMMQYFEWYLPNDGNHWNRLNSDASNLKSKGITAVWIPPAWKGASQNDVGYGAYDLYDLGEFNQKGTVRTKYGTRSQLQAAVTSLKNNGIQVYGDVVMNHKGGADATEMVRAVEVNPNNRNQEVTGEYTIEAWTRFDFPGRGNTHSSFKWRWFHFDGVDWDQSRRLNNRIYKFRGHGKAWDWEVDTENGNYDYLMYADIDMDHPEVVNELRNWGVWYTNTLGLDGFRIDAVKHIKYSFTRDWINHVRSATGKNMFAVAEFWKNDLGAIENYLQKTNWNHSVFDVPLHYNLYNASKSGGNYDMRNIFNGTVVQRHPSHAVTFVDNHDSQPEEALESFVEEWFKPLAYALTLTREQGYPSVFYGDYYGIPTHGVPAMRSKIDPILEARQKYAYGPQHDYLDHPDVIGWTREGDSSHPKSGLATLITDGPGGSKRMYAGLKNAGETWYDITGNRSDTVKIGSDGWGEFHVNDGSVSIYVQK

SEQ ID NO: 27153 - protein, 483 aa, Bacillus sp.
HHNGTNGTMMQYFEWYLPNDGNHWNRLNSDASNLKSKGITAVWIPPAWKGASQNDVGYGAYDLYDLGEFNQKGTVRTKYGTRSQLQAAVTSLKNNGIQVYGDVVMNHKGGADATEMVRAVEVNPNNRNQEVTGEYTIEAWTRFDFPGRGNTHSSFKWRWYHFDGVDWDQSRRFNNRIYKFRGKAWDWEVDTEFGNYDYLMYTDYDMDHPEVVNELRNWGVWYTNTLGLDGFRIDAVKHIKYSFTRDWINHVRSATGKNMFAVAEFWKNDLGAIENYLQKTNWNHSVFDVPLHYNLYNASKSGGNYDMRNIFNGTVVQRHPSHAVTFVDNHDSQPEEALESFVEEWFKPLAYALTLTREQGYPSVFYGDYYGIPTHGVPAMRSKIDPILEARQKYAYGPQHDYLDHPDVIGWTREGDSSHPKSGLATLITDGPGGSKRMYAGLKNAGETWYDITGNRSDTVKIGSDGWGEFHVNDGSVSIYVQK

SEQ ID NO: 27154 - protein, 485 aa, Synthetic construct
HHNGTNGTMMQYFEWYLPNDGNHWNRLNSDASNLKSKGITAVWIPPAWKGASQNDVGYGAYDLYDLGEFNQKGTVRTKYGTRSQLQAAVTSLKNNGIQVYGDVVMNHKGGADATEMVRAVEVNPNNRNQEVTGEYTIEAWTRFDFPGRGNTHSSFKWRWYHFDGVDWDQSRRLNNRIYKFRGHGKAWDWEVDTENGNYDYLMYADIDMDHPEVVNELRNWGVWYTNTLGLDGFRIDAVKHIKYSFTRDWINHVRSATGKNMFTVAEFWKNDLGAIENYLQKTNWNHSVFDVPLHYNLYNASKSGGNYDMRNIFNGTVVQRHPSHAVTFVDNHDSQPEEALESFVEEWFKPLAYALTLTREQGYPSVFYGDYYGIPTHGVPAMRSKIDPILEARQKYAYGPQHDYLDHPDVIGWTREGDSSHPKSGLATLITDGPGGSKRMYAGLKNAGETWYDITGNRSDTVKIGSDGWGEFHVNDGSVSIYVQK

SEQ ID NO: 27155 - protein, 483 aa, Bacillus sp.
HHNGTNGTMMQYFEWYLPNDGNHWNRLNSDASNLKSKGITAVWIPPAWKAASQNDVGYGAYDLYDLGEFNQKGTVRTKYGTRSQLQAAVTSLKNNGIQVYGDVVMNHKGGADATEMVRAVEVNPNNRNQEVTGEYTIEAWTRFDFPGRGNTHSSFKWRWYHFDGVDWDQSRDFSNRIYKFRGKAWDWEVDTEFGNYDYLMYADYDMDHPEVVNELRNWGVWYTNTLGLDGFRIDAVKHIKYSFTRDWINHVRSATGKNMFAVAEFWKNDLGAIENYLQKTNWNHSVFDVPLHYNLYNASKSGGNYDMRNIFNGTVVQRHPSHAVTFVDNHDSQPEEALESFVEEWFKPLAYALTLTREQGYPSVFYGDYYGIPTHGVPAMRSKIDPILEARQKYAYGPQHDYLDHPDVIGWTREGDSSHPKSGLATLITDGPGGSKRMYAGLKNAGETWYDITGNRSDTVKIGSDGWGEFHVNDGSVSIYVQK

SEQ ID NO: 27156 - protein, 483 aa, Synthetic construct
HHNGTNGTMMQYFEWYLPNDGNHWNRLNSDASNLKSKGITAVWIPPAWKGASQNDVGYGAYDLYDLGEFNQKGTVRTKYGTRSQLQAAVTSLKNNGIQVYGDVVLNHKGGADATEMVRAVEVNPNNRNQEVTGEYTIEAWTRFDFPGRGNTHSSFKWRWYHFDGVDWDQSRRLNNRIYKFRGKAWDWEVDTENGNYDYLMYADFDMDHPEVVNELRNWGVWYTNTLGLDGFRIDAVKHIKYSFTRDWINHVRSATGKNMFAVAEFWKNDLGAIENYLQKTNWNHSVFDVPLHYNLYNASKSGGNYDMRNIFNGTVVQRHPSHAVTFVDNHDSQPEEALESFVEEWFKPLAYALTLTREQGYPSVFYGDYYGIPTHGVPAMRSKIDPILEARQKYAYGPQHDYLDHPDVIGWTREGDSSHPKSGLATLITDGPGGSKRMYAGLKNAGETWYDITGNRSDTVKIGSDGWGEFHVNDGSVSIYVQK

SEQ ID NO: 27157 - protein, 483 aa, Bacillus sp.
HHNGTNGTMMQYFEWYLPNDGNHWNRLNSDASNLKSKGITAVWIPPAWKATSQNDVGYGAYDLYDLGEFNQKGTVRTKYGTRSQLQAAVTSLKNNGIQVYGDVVMNHKGGADATEMVRAVEVNPNNRNQEVTGEYTIEAWTRFDFPGRGNTHSSFKWRWYHFDGVDWDQSRDLNNRIYKFRGKAWDWEVDTEFGNYDYLMYADYDMDHPEVVNELRNWGVWYTNTLGLDGFRIDAVKHIKYSFTRDWINHVRSATGKNMFAVAEFWKNDLGAIENYLQKTNWNHSVFDVPLHYNLYNASKSGGNYDMRNIFNGTVVQAHPNHAVTFVDNHDSQPEEALESFVEEWFKPLAYALTLTREQGYPSVFYGDYYGIPTHGVPAMRSKIDPILEARQKYAYGPQHDYLDHPDVIGWTREGDSSHPKSGLATLITDGPGGSKRMYAGLKNAGETWYDITGNRSDTVKIGSDGWGEFHVNDGSVSIYVQK

SEQ ID NO: 27158 - protein, 483 aa, Bacillus sp.
HHNGTNQTMMQYFEWYLPNDGNHWNRLNSDASNLKSKGITAVWIPPAWKGASQNDVGYGAYDLYDLGEFNQKGTVRTKYGTRSQLQAAVTSLKNNGIQVYGDVVMNHKGGADATEMVRAVEVNPNNRNQEVTGEYTIEAWTRFDFPGRGNTHSSFKWRWYHFDGVDWDQSRRLNNRIYKFRGKAWDWEVDTEFGNYDYLMYADYDMDHPEVVNELRNWGVWYTNTLGLDGFRIDAVKHIKYSFTRDWINHVRSATGKNMFAVAEFWKNDLGAIENYLQKTNWNHSVFDVPLHYNLYNASKSGGNYDMRNIFNGTVVQAHPMHAVTFVDNHDSQPEEALESFVEEWFKPLAYALTLTREQGYPSVFYGDYYGIPTHGVPAMRSKIDPILEARQKYAYGPQHDYLDHPDVIGWTREGDSSHPKSGLATLITDGPGGSKRMYAGLKNAGETWYDITGNRSDTVKIGSDGWGEFHVNDGSVSIYVQK

SEQ ID NO: 27159 - protein, 483 aa, Bacillus sp.
HHNGTNGTMMQYFEWYLPNDGNHWNRLNSDASNLKSKGITAVWIPPAWKGASQNDVGYGAYDLYDLGEFNQKGTVRTKYGTRSQLQAAVTSLKNNGIAVYGDVVMNHKGGADATEMVRAVEVNPNNRNQEVTGEYTIEAWTRFDFPGRGNTHSSFKWRWYHFDGVDWDQSRRLNNRIYKFRGKAWDWEVDTEFGNYDYLMYADYDMDHPEVVNELRNWGVWYTNTLGLDGFRIDAVKHIKYSFTRDWINHVRSATGKNMFAVAEFWKNDLGAIENYLQKTNWNHSVFDVPLHYNLYNASKSGGNYDMRNIFNGTVVQAHPMHAVTFVDNHDSQPEEALESFVEEWFKPLAYALTLTREQGYPSVFYGDYYGIPTHGVPAMRSKIDPILEARQKYAYGPQHDYLDHPDVIGWTREGDSSHPKSGLATLITDGPGGSKRMYAGLKNAGETWYDITGNRSDTVKIGSDGWGEFHVNDGSVSIYVQK

SEQ ID NO: 27160 - protein, 483 aa, Bacillus sp.
HHNGTNGTMMQYFEWYLPNDGNHWNRLNSDASNLKSKGITAVWIPPAWKGASQNDVGYGAYDLYDLGEFNQKGTVRTKYGTRSQLQAAVTSLKNNGIQVYGDVVMNHKGGADATEMVRAVEVNPNNRNQEVTGEYTIEAWTRFDFPGRGNTHSSFKWRWYHFDGVDWDQSRNLSNRIYKFRGKAWDWEVDTEFGNYDYLMYADYDMDHPEVVNELRNWGVWYTNTLGLDGFRIDAVKHIKYSFTRDWINHVRSATGKNMFAVAEFWKNDLGAIENYLQKTNWNHSVFDVPLHYNLYNASKSGGNYDMRNIFNGTVVQRHPSHAVTFVDNHDSQPEEALESFVEEWFKPLAYALTLTREQGYPSVFYGDYYGIPTHGVPAMRSKIDPILEARQKYAYGPQHDYLDHPDVIGWTREGDSSHPKSGLATLITDGPGGSKRMYAGLKNAGETWYDITGNRSDTVKIGSDGWGEFHVNDGSVSIYVQK

SEQ ID NO: 27161 - protein, 483 aa, Synthetic construct
HHNGTNGTMMQYFEWYLPNDGNHWNRLNSDASNLKSKGITAVWIPPAWKGASQNDVGYGAYDVYDLGEFNQKGTVRTKYGTRSQLQAAVTSLKNNGIQVYGDVVMNHKGGADATEMVRAVEVNPNNRNQEVTGEYTIEAWTRFDFPGRGNTHSSFKWRWYHFDGVDWDQSRRLNNRIYKFRGKAWDWEVDTENGNYDYLMYADFDMDHPEVVNELRNWGVWYTNTLGLDGFRIDAVKHIKYSFTRDWINHVRSATGKNMFAVAEFWKNDLGAIENYLQKTNWNHSVFDVPLHYNLYNASKSGGNYDMRNIFNGTVVQRHPSHAVTFVDNHDSQPEEALESFVEEWFKPLAYALTLTREQGYPSVFYGDYYGIPTHGVPAMRSKIDPILEARQKYAYGPQHDYLDHPDVIGWTREGDSSHPKSGLATLITDGPGGSKRMYAGLKNAGETWYDITGNRSDTVKIGSDGWGEFHVNDGSVSIYVQK

SEQ ID NO: 27162 - protein, 485 aa, Synthetic construct
HHNGTNGTMMQYFEWYLPNDGNHWNRLNSDASNLKSKGITAVWIPPAWKGASQNDVGYGAYDLYDLGEFNQKGTVRTKYGTRSQLQAAVTSLKNNGIQVYGDVVMNHKGGADATEMVRAVEVNPNNRNQEVTGEYTIEAWTRFDFPGRGNTHSSFKWRWYHFDGVDWDQSRRLNNRIYKFRGHGKAWDWEVDTENGNYDYLMYADIDMDHPEVVNELRNWGVWYTNTLGLDGFRIDAVKHIKYSFTRDWINHVRSATGKNMFAVAEFWKNDLGAIENYLQKTNWNHSVFDVPLHYNLYNASKSGGNYDMRNIFNGTVVQRHPSHAVTFVDNHDSQPEEALESFVEEWFKPLAYALTLTREQGYPSVFYGDYYGIPTHGVPAMRSKIDPILEARQKYAYGPQHDYLDHPDVIGWTREGDSSHPKSGLATLITDGPGGSKRMYAGLKNAGETFYDITGNRSDTVKIGSDGWGEFHVNDGSVSIYVQK

SEQ ID NO: 27163 - protein, 485 aa, Synthetic construct
HHNGTNGTMMQYFEWYLPNDGNHWNRLNSDASNLKSKGITAVWIPPAWKGASQNDVGYGAYDLYDLGEFNQKGTVRTKYGTRSQLQAAVTSLKNNGIQVYGDVVMNHKGGADATEMVRAVEVNPNNRNQEVTGEYTIEAWTRFDFPGRGTTHSSFKWRWYHFDGVDWDQSRRLNNRIYKFRGHGKAWDWEVDTENGNYDYLMYADIDMDHPEVVNELRNWGVWYTNTLGLDGFRIDAVKHIKYSFTRDWINHVRSATGKNMFAVAEFWKNDLGAIENYLQKTNWNHSVFDVPLHYNLYNASKSGGNYDMRNIFNGTVVQRHPSHAVTFVDNHDSQPEEALESFVEEWFKPLAYALTLTREQGYPSVFYGDYYGIPTHGVPAMRSKIDPILEARQKYAYGPQHDYLDHPDVIGWTREGDSSHPKSGLATLITDGPGGSKRMYAGLKNAGETWYDITGNRSDTVKIGSDGWGEFHVNDGSVSIYVQK

SEQ ID NO: 27164 - protein, 483 aa, Bacillus sp.
HHNGTNGTMMQYFEWYLPNDGNHWNRLNSDASNLKSKGITAVWIPPAWKAVSQNDVGYGAYDLYDLGEFNQKGTVRTKYGTRSQLQAAVTSLKNNGIQVYGDVVMNHKGGADATEMVRAVEVNPNNRNQEVTGEYTIEAWTRFDFPGRGNTHSSFKWRWYHFDGVDWDQSRDFNNRIYKFRGKAWDWEVDTEFGNYDYLMYADYDMDHPEVVNELRNWGVWYTNTLGLDGFRIDAVKHIKYSFTRDWINHVRSATGKNMFAVAEFWKNDLGAIENYLQKTNWNHSVFDVPLHYNLYNASKSGGNYDMRNIFNGTVVQRHPSHAVTFVDNHDSQPEEALESFVEEWFKPLAYALTLTREQGYPSVFYGDYYGIPTHGVPAMRSKIDPILEARQKYAYGPQHDYLDHPDVIGWTREGDSSHPKSGLATLITDGPGGSKRMYAGLKNAGETWYDITGNRSDTVKIGSDGWGEFHVNDGSVSIYVQK

SEQ ID NO: 27165 - protein, 485 aa, Synthetic construct
HHNGTNGTMMQYFEWYLPNDGNHWNRLNSDASNLKSKGITAVWIPPAWKGASQNDVGYGAYDLYDLGEFNQKGTVRTKYGTRSQLQAAVTSLKNNGIQVYGDVVMNHKGGADATEMVRAVEVNPNNRNQEVTGEYTIEAWTRFDFPGRGNTHSSFKWRWYHFDGVDWDQSRRLNNRIYKFRGHGKAWDWEVDTENGNYDYLMYADIDMDHPEVVNELRNWGVWYTNTLGLDGFRIDAVKHIKYSFTRDWINHVRSATGKNMFAVAEFWKNDLGAIENYLQKTNWNHSVFDVPLHYNLYNASKSGGNYDMRNIFNGTVVQRHPSHAVTFVDNHDSQPEEALESFVEEWFKPLAYAFTLTREQGYPSVFYGDYYGIPTHGVPAMRSKIDPILEARQKYAYGPQHDYLDHPDVIGWTREGDSSHPKSGLATLITDGPGGSKRMYAGLKNAGETWYDITGNRSDTVKIGSDGWGEFHVNDGSVSIYVQK

SEQ ID NO: 27166 - protein, 485 aa, Synthetic construct
HHNGTNGTMMQYFEWYLPNDGNHWNRLNSDASNLKSKGITAVWIPPAWKGASQNDVGYGAYDLYDLGEFNQKGTVRTKYGTRSQLQAAVTSLKNNGIQVYGDVVMNHKGGADATEMVRAVEVNPNNRNQEVTGEYTIEAWTRFDFPGRGNTHSSFKWRWYHFDGVDWDQSRRLNNRIYKFRGHGKAWDWEVDTENGNYDYLMYADYDMDHPEVVNELRNWGVWYTNTLGLDGFRIDAVKHIKYSFVRDWINHVRSATGKNMFAVAEFWKNDLGAIENYLQKTNWNHSVFDVPLHYNLYNASKSGGNYDMRNIFNGTVVQRHPSHAVTFVDNHDSQPEEALESFVEEWFKPLAYALTLTREQGYPSVFYGDYYGIPTHGVPAMRSKIDPILEARQKYAYGPQHDYLDHPDVIGWTREGDSSHPKSGLATLITDGPGGSKRMYAGLKNAGETWYDITGNRSDTVKIGSDGWGEFHVNDGSVSIYVQK

SEQ ID NO: 27167 - protein, 483 aa, Bacillus sp.
HHNGTNGTMMQYFEWYLPNDGNHWNRLNSDASNLKSKGITAVWIPPAWKGASQNDVGYGAYDLYDLGEFNQKGTVRTKYGTRSQLQAAVTSLKNNGIQVYGDVVMNHKGGADATEMVRAVEVNPNNRNQEVTGEYTIEAWTRFDFPGRGNTHSSFKWRWYHFDGVDWDQSRRLNNRIYKFRGKAWDWEVDTEFGNYDYLMYADYDMDHPEVVNELRNWGVWYTNTLGLDGFRIDAVKHIKYSFTRDWINHVRSATGKNMFAVAEFWKNDLGAIENYLQKTNWNHSVFDVPLHYNLYNASKSGGNYDMRNIFNGTVVQRHPSHAVTFVDNHDSQPEEALESFVEEWFKPLAYALTLTREQGYPSVFYGDYYGIPTHGVPAMRSKIDPILEARQKYAYGPQHDYLDHPDVIGWTREGDSSHPTSGLATLITDGPGGSKRMYAGLKNAGETWYDITGNRSDTVKIGSDGWGEFHVNDGSVSIYVQK

SEQ ID NO: 27168 - protein, 483 aa, Bacillus sp.
HHNGTNLTMMQYFEWYLPNDGNHWNRLNSDASNLKSKGITAVWIPPAWKGSSQNDVGYGAYDLYDLGEFNQKGTVRTKYGTRSQLQAAVTSLKNNGIQVYGDVVMNHKGGADATEMVRAVEVNPNNRNQEVTGEYTIEAWTRFDFPGRGNTHSSFKWRWYHFDGVDWDQSRRLNNRIYKFRGKAWDWEVDTEFGNYDYLMYADYDMDHPEVVNELRNWGVWYTNTLGLDGFRIDAVKHIKYSFTRDWINHVRSATGKNMFAVAEFWKNDLGAIENYLQKTNWNHSVFDVPLHYNLYNASKSGGNYDMRNIFNGTVVQSHPMHAVTFVDNHDSQPEEALESFVEEWFKPLAYALTLTREQGYPSVFYGDYYGIPTHGVPAMRSKIDPILEARQKYAYGPQHDYLDHPDVIGWTREGDSSHPKSGLATLITDGPGGSKRMYAGLKNAGETWYDITGNRSDTVKIGSDGWGEFHVNDGSVSIYVQK

SEQ ID NO: 27169 - protein, 483 aa, Bacillus sp.
HHNGTNGTMMQYFEWYLPNDGNHWNRLNSDASNLKSKGITAVWIPPAWKGASQNDVGYGAYDLYDLGEFNQKGTVRTKYGTRSQLQAAVTSLKNNGIQVYGDVVMNHKGGADATEMVSAVEVNPNNRNQEVTGDYTIEAWTRFDFPGRGNTHSSFKWRWYHFDGVDWDQSRRLNNRIYKFRSKAWDWEVDTEFGNYDYLMYADYDMDHPEVVNELRNWGVWYTNTLGLDGFRIDAVKHIKYSFTRDWINHVRSATGKNMFAVAEFWKNDLGAIENYLQKTNWNHSVFDVPLHYNLYNASKSGGNYDMRNIFNGTVVQRHPSHAVTFVDNHDSQPEEALESFVEEWFKPLAYALTLTREQGYPSVFYGDYYGIPTHGVPAMRSKIDPILEARQKYAYGPQHDYLDHPDVIGWTREGDSSHPKSGLATLITDGPGGSKRMYAGLKNAGETWYDITGNRSDTVKIGSDGWGEFHVNDGSVSIYVQK

SEQ ID NO: 27170 - protein, 485 aa, Synthetic construct
HHNGTNGTMMQYFEWYLPNDGNHWNRLNSDASNLKSKGITAVWIPPAWKGASQNDVGYGAYDLYDLGEFNQKGTVRTKYGTRSQLQAAVTSLKNNGIQVYGDVVMNHKGGADATEMVRAVEVNPNNRNQEVTGEYTIEAWTRFDFPGRGNTHSSFKWRWYHFDGVDWDQSRRLNNRIYKFRGHGKAWDWEVDTENGNYDYLMYADIDMDHPEVVNELRNWGVWYTNTLGLDGFRIDAVKHIKYSFTRDWINHVRSATGKNMFAVAEFWKNDLGAIENYLQKTNWNHSVFDVPLHYNLYNASKSGGNYDMRNIFNGTVVARHPSHAVTFVDNHDSQPEEALESFVEEWFKPLAYALTLTREQGYPSVFYGDYYGIPTHGVPAMRSKIDPILEARQKYAYGPQHDYLDHPDVIGWTREGDSSHPKSGLATLITDGPGGSKRMYAGLKNAGETWYDITGNRSDTVKIGSDGWGEFHVNDGSVSIYVQK

SEQ ID NO: 27171 - protein, 483 aa, Bacillus sp.
HHNGTNGTMMQYFEWYLPNDGNHWNRLNSDASNLKSKGITAVWIPPAWKATSQNDVGYGAYDLYDLGEFNQKGTVRTKYGTRSQLQAAVTSLKNNGIQVYGDVVMNHKGGADATEMVRAVEVNPNNRNQEVTGEYTIEAWTRFDFPGRGNTHSSFKWRWYHFDGVDWDQSRNVNNRIYKFRGKAWDWEVDTEFGNYDYLMYADYDMDHPEVVNELRNWGVWYTNTLGLDGFRIDAVKHIKYSFTRDWINHVRSATGKNMFAVAEFWKNDLGAIENYLQKTNWNHSVFDVPLHYNLYNASKSGGNYDMRNIFNGTVVQVHPSHAVTFVDNHDSQPEEALESFVEEWFKPLAYALTLTREQGYPSVFYGDYYGIPTHGVPAMRSKIDPILEARQKYAYGPQHDYLDHPDVIGWTREGDSSHPKSGLATLITDGPGGSKRMYAGLKNAGETWYDITGNRSDTVKIGSDGWGEFHVNYGSVSIYVQK

SEQ ID NO: 27172 - protein, 483 aa, Bacillus sp.
HHNGTNGTMMQYFEWYLPNDGNHWNRLNSDASNLKSKGITAVWIPPAWKATSQNDVGYGAYDLYDLGEFNQKGTVRTKYGTRSQLQAAVTSLKNNGIQVYGDVVMNHKGGADATEMVRAVEVNPNNRNQEVTGEYTIEAWTRFDFPGRGNTHSSFKWRWYHFDGVDWDQSRQVNNRIYKFRGKAWDWEVDTEFGNYDYLMYVDYDMDHPEVVNELRNWGVWYTNTLGLDGFRIDAVKHIKYSFTRDWINHVRSATGKNMFAVAEFWKNDLGAIENYLQKTNWNHSVFDVPLHYNLYNASKSGGNYDMRNIFNGTVVQRHPSHAVTFVDNHDSQPEEALESFVEEWFKPLAYALTLTREQGYPSVFYGDYYGIPTHGVPAMRSKIDPILEARQKYAYGPQHDYLDHPDVIGWTREGDSSHPKSGLATLITDGPGGSKRMYAGLKNAGETWYDITGNRSDTVKIGSDGWGEFHVNDGSVSIYVQK

SEQ ID NO: 27173 - protein, 485 aa, Synthetic construct
HHNGTNGTMMQYFEWYLPNDGNHWNRLNSDASNLKSKGITAVWIPPAWKGASQNDVGYGAYDLYDLGEFNQKGTVRTKYGTRSQLQAAVTSLKNNGIQVYGDVVMNHKGGADATEMVRAVEVNPNNRNQEVTGEYTIEAWTRFDFPGRGNTHSSFKWRWYHFDGVDWDQSRRLNNRIYKFRGHGKAWDWEVDTENGNYDYLMYADIDMDHPEVVNELRNWGVWYTNTLGLDGFRIDAVKHIKYSFTRDWINHVRSATGKNMFAVAEFWKNDLGAIENYLQKTNWNHSVFDAPLHYNLYNASKSGGNYDMRNIFNGTVVQRHPSHAVTFVDNHDSQPEEALESFVEEWFKPLAYALTLTREQGYPSVFYGDYYGIPTHGVPAMRSKIDPILEARQKYAYGPQHDYLDHPDVIGWTREGDSSHPKSGLATLITDGPGGSKRMYAGLKNAGETWYDITGNRSDTVKIGSDGWGEFHVNDGSVSIYVQK

SEQ ID NO: 27174 - protein, 485 aa, Synthetic construct
HHNGTNGTMMQYFEWYLPNDGNHWNRLNSDASNLKSKGITAVWIPPAWKGASQNDVGYGAYDLYDLGEFNQKGTVRTKYGTRSQLQAAVTSLKNNGIQVYGDVVMNHKGGADATEMVRAVEVNPNNRNQEVTGEYTIEAWTRFDFPGRGNTHSSFKWRWYHFDGVDWDQSRRLNNRIYKFRGHGKAWDWEVDTENGNYDYLMYADIDMDHPEVVNELRNWGVWYTNELGLDGFRIDAVKHIKYSFTRDWINHVRSATGKNMFAVAEFWKNDLGAIENYLQKTNWNHSVFDVPLHYNLYNASKSGGNYDMRNIFNGTVVQRHPSHAVTFVDNHDSQPEEALESFVEEWFKPLAYALTLTREQGYPSVFYGDYYGIPTHGVPAMRSKIDPILEARQKYAYGPQHDYLDHPDVIGWTREGDSSHPKSGLATLITDGPGGSKRMYAGLKNAGETWYDITGNRSDTVKIGSDGWGEFHVNDGSVSIYVQK

SEQ ID NO: 27175 - protein, 485 aa, Bacillus sp.
HHNGTNGTMMQYFEWYLPNDGNHWNRLNSDASNLKSKGITAVWIPPAWKGASQNDVGYGAYDLYDLGEFNQKGTVRTKYGTRSQLQAAVTSLKNNGIQVYGDVVMNHKGGADATEMVRAVEVNPNNRNQEVTGEYTIEAWTRFDFPGRGNTHSSFKWRWYHFDGVDWDQSRDLTNRIYKFRGHGKAWDWEVDTEFGNYDYLMYADYDMDHPEVVNELRNWGVWYTNTLGLDGFRIDAVKHIKYSFTRDWINHVRSATGKNMFAVAEFWKNDLGAIENYLQKTNWNHSVFDVPLHYNLYNASKSGGNYDMRNIFNGTVVQRHPSHAVTFVDNHDSQPEEALESFVEEWFKPLAYALTLTREQGYPSVFYGDYYGIPTHGVPAMRSKIDPILEARQKYAYGPQHDYLDHPDVIGWTREGDSSHPKSGLATLITDGPGGSKRMYAGLKNAGETWYDITGNRSDTVKIGSDGWGEFHVNDGSVSIYVQK

SEQ ID NO: 27176 - protein, 483 aa, Bacillus sp.
HHNGTNGTMMQYFEWYLPNDGNHWNRLNSDASNLKSKGITAVWIPPAWKGASQNDVGYGAYDLYDLGEFNQKGTVRTKYGTRSQLQAAVTSLKNNGIQVYGDVVMNHKGGADATEMVRAVEVNPNNRNQEVTGEYTIEAWTRFDFPGRGNTHSSFKWRWYHFDGVDWDQSRRLNNRIYKFRGKAWDWEVDTENGNYDYLMYADIDFDHPEVVNELRIWGVWYTNTLGLDGFRIDAVKHIKYSFTRDWINHVRSATGKNMFAVAEFWKNDLGAIENYLQKTNWNHSVFDVPLHYNLYNASKSGGNYDMRNIFNGTVVQRHPSHAVTFVDNHDSQPEEALESFVEEWFKPLAYALTLTREQGYPSVFYGDYYGIPTHGVPAMRSKIDPILEARQKYAYGPQHDYLDHPDVIGWTREGDSSHPKSGLATLITDGPGGSKRMYAGLKNAGETWYDITGNRSDTVKIGSDGWGEFHVNDGSVSIYVQK

SEQ ID NO: 27177 - protein, 483 aa, Bacillus sp.
HHNGTNGTMMQYFEWYLPNDGNHWNRLNSDASNLKSKGITAVWIPPAWKGASQNDVGYGAYDLYDLGEFNQKGTVRTKYGTRSQLQAAVTSLKNNGIQVYGDVVMNHKGGADATEMVRAVEVNPNNRNQEVTGEYTIEAWTRFDFPGRGNTHSSFKWRWYHFDGVDWDQSRELSNRIYKFRGKAWDWEVDTEFGNYDYLMYADYDMDHPEVVNELRNWGVWYTNTLGLDGFRIDAVKHIKYSFTRDWINHVRSATGKNMFAVAEFWKNDLGAIENYLQKTNWNHSVFDVPLHYNLYNASKSGGNYDMRNIFNGTVVQRHPSHAVTFVDNHDSQPEEALESFVEEWFKPLAYALTLTREQGYPSVFYGDYYGIPTHGVPAMRSKIDPILEARQKYAYGPQHDYLDHPDVIGWTREGDSSHPKSGLATLITDGPGGSKRMYAGLKNAGETWYDITGNRSDTVKIGSDGWGEFHVNDGSVSIYVQK

SEQ ID NO: 27178 - protein, 485 aa, Bacillus sp.
HHNGTNGTMMQYFEWYLPNDGNHWNRLNSDASNLKSKGITAVWIPPAWKAASQNDVGYGAYDLYDLGEFNQKGTVRTKYGTRSQLQAAVTSLKNNGIQVYGDVVMNHKGGADATEMVDAVEVNPNNRNQEVTGEYTIEAWTRFDFPGRGNTHSSFKWRWYHFDGVDWDQSRQLNNRIYKFRGHGKAWDWEVDTEFGNYDYLMYADYDMDHPEVVNELRNWGVWYTNTLGLDGFRIDAVKHIKYSFTRDWINHVRSATGKNMFAVAEFWKNDLGAIENYLQKTNWNHSVFDVPLHYNLYNASKSGGNYDMRNIFNGTVVQRHPSHAVTFVDNHDSQPEEALESFVEEWFKPLAYALTLTREQGYPSVFYGDYYGIPTHGVPAMRSKIDPILEARQKYAYGPQHDYLDHPDVIGWTREGDSSHPKSGLATLITDGPGGSKRMYAGLKNAGETWYDITGNRSDTVKIGSDGWGEFHVNDGSVSIYVQK

SEQ ID NO: 27179 - protein, 483 aa, Bacillus sp.
HHNGTNGTMMQYFEWYLPNDGNHWNRLNSDASNLKSKGITAVWIPPAWKAASQNDVGYGAYDLYDLGEFNQKGTVRTKYGTRSQLQAAVTSLKNNGIQVYGDVVMNHKGGADATEMVRAVEVNPNNRNQEVTGEYTIEAWTRFDFPGRGNTHSSFKWRWYHFDGVDWDQSRKLQNRIYKFRGKAWDWEVDTEFGNYDYLMYADYDMDHPEVVNELRNWGVWYTNTLGLDGFRIDAVKHIKYSFTRDWINHVRSATGKNMFAVAEFWKNDLGAIENYLQKTNWNHSVFDVPLHYNLYNASKSGGNYDMRNIFNGTVVQRHPSHAVTFVDNHDSQPEEALESFVEEWFKPLAYALTLTREQGYPSVFYGDYYGIPTHGVPAMRSKIDPILEARQKYAYGPQHDYLDHPDVIGWTREGDSSHPKSGLATLITDGPGGSKRMYAGLKNAGETWYDITGNRSDTVKIGSDGWGEFHVNDGSVSIYVQK

SEQ ID NO: 27180 - protein, 483 aa, Synthetic construct
HHNGTNGTMMQYFEWYLPNDGNHWNRLNSDASNLKSKGITAVWIPPAWKGASQNDVGYGAYDLYDLGEFNQKGTVRTKYGTRSQLQAAVTSLKNNGIQVYGDVVMNHKGGADATEMVRAVEVNPNNRNQEVTGEYTIEAWTRFDFPGRGNTHSSFKWRWYHFDGVDWDQSRRLNNRIYKFRGKAWDWEVDTENGNYDYLMYADIDMDHPGVVNELRNWGVWYTNTLGLDGFRIDAVKHIKYSFTRDWINHVRSATGKNMFAVAEFWKNDLGAIENYLQKTNWNHSVFDVPLHYNLYNASKSGGNYDMRNIFNGTVVQRHPSHAVTFVDNHDSQPEEALESFVEEWFKPLAYALTLTREQGYPSVFYGDYYGIPTHGVPAMRSKIDPILEARQKYAYGPQHDYLDHPDVIGWTREGDSSHPKSGLATLITDGPGGSKRMYAGLKNAGETWYDITGNRSDTVKIGSDGWGEFHVNDGSVSIYVQK

SEQ ID NO: 27181 - protein, 483 aa, Bacillus sp.
HHNGTNGTMMQYFEWYLPNDGNHWNRLNSDASNLKSKGITAVWIPPAWKGASQNDVGYGAYDLYDLGEFNQKGTVRTKYGTRSQLQAAVTSLKNNGIQVYGDVVMNHKGGADATEMVRAVEVNPNNRNQEVTGEYTIEAWTRFDFPGRGNTHSSFKWRWYHFDGVDWDQSRRLNNRIYKFRGKAWDWEVDTEFGNYDYLMYADYDMDHPEVVNELRNWGVWYTNTLGLDGFRIDAVKHIKYSFTRDWINHVRSATGKNMFAVAEFWKNDLGAIENYLQKTNWNHSVFDVPLHYNLYNASKSGGNYDMRNIFNGTVVQMHPMQAVTFVDNHDSQPEEALESFVEEWFKPLAYALTLTREQGYPSVFYGDYYGIPTHGVPAMRSKIDPILEARQKYAYGPQHDYLDHPDVIGWTREGDSSHPKSGLATLITDGPGGSKRMYAGLKNAGETWYDITGNRSDTVKIGSDGWGEFHVNDGSVSIYVQK

SEQ ID NO: 27182 - protein, 483 aa, Bacillus sp.
HHNGTNGTMMQYFEWYLPNDGNHWNRLNSDASNLKSKGITAVWIPPAWKGASQNDVGYGAYDLYDLGEFNQKGTVRTKYGTRSQLQAAVTSLKNNGIQVYGDVVMNHKGGADATEMVRAVEVNPNNRNQEVTGEYTIEAWTRFDFPGRGNTHSSFKWRWYHFDGVDWDQSRRSNNRIYKFRGKAWDWEVDTEFGNYDYLMYADYDMDHPEVVNELRNWGVWYTNTLGLDGFRIDAVKHIKYSFTRDWINHVRSATGKNMFAVAEFWKNDLGAIENYLQKTNWNHSVFDVPLHYNLYNASKSGGNYDMRNIFNGTVVQRHPSHAVTFVDNHDSQPEEALESFVEEWFKPLAYALTLTREQGYPSVFYGDYYGIPTHGVPAMRSKIDPILEARQKYAYGPQHDYLDHPDVIGWTREGDSSHPKSGLATLITDGPGGSKRMYAGLKNAGETWYDITGNRSDTVKIGSDGWGEFHVNDGSVSIYVQK

SEQ ID NO: 27183 - protein, 483 aa, Bacillus sp.
HHNGTNGTMMQYFEWYLPNDGNHWNRLNSDASNLKSKGITAVWIPPAWKAASQNDVGYGAYDLYDLGEFNQKGTVRTKYGTRSQLQAAVTSLKNNGIQVYGDVVMNHKGGADATEMVRAVEVNPNNRNQEVTGEYTIEAWTRFDFPGRGNTHSSFKWRWYHFDGVDWDQSRRFNNRIYKFRGKAWDWEVDTEFGNYDYLMYADYDMDHPEVVNELRNWGVWYTNTLGLDGFRIDAVKHIKYSFTRDWINHVRSATGKNMFAVAEFWKNDLGAIENYLQKTNWNHSVFDVPLHYNLYNASKSGGNYDMRNIFNGTVVQRHPSHAVTFVDNHDSQPEEALESFVEEWFKPLAYALTLTREQGYPSVFYGDYYGIPTHGVPAMRSKIDPILEARQKYAYGPQHDYLDHPDVIGWTREGDSSHPKSGLATLITDGPGGSKRMYAGLKNAGETWYDITGNRSDTVKIGSDGWGEFHVNDGSVSIYVQK

SEQ ID NO: 27184 - protein, 483 aa, Bacillus sp.
HYNGTNGTMMQYFEWYLPNDGNHWNRLNSDASNLKSKGITAVWIPPAWKGASQNDVGYGAYDLYDLGEFNQKGTVRTKYGTRSQLQAAVTSLKNNGIQVYGDVVMNHKGGADATEMVRAVEVNPNNRNQEVTGEYTIEAWTRFDFPGRGNTHSSFKWRWYHFDGVDWDQSRRLNNRIYKFRGKAWDWEVDTEFGNYDYLMYADYDMDHPEVVNELRNWGVWYTNTLGLDGFRIDAVKHIKYSFTRDWINHVRSATGKNMFAVAEFWKNDLGAIENYLQKTNWNHSVFDVPLHYNLYNASKSGGNYDMRNIFNGTVVQAHPMHAVTFVDNHDSQPEEALESFVEEWFKPLAYALTLTREQGYPSVFYGDYYGIPTHGVPAMRSKIDPILEARQKYAYGPQHDYLDHPDVIGWTREGDSSHPKSGLATLITDGPGGSKRMYAGLKNAGETWYDITGNRSDTVKIGSDGWGEFHVNDGSVSIYVQK

SEQ ID NO: 27185 - protein, 483 aa, Bacillus sp.
HHNGTNGTMMQYFEWYLPNDGNHWNRLNSDASNLKSKGITAVWIPPAWKGASQNDVGYGAYDLYDLGEFNQKGTVRTKYGTRSQLQAAVTSLKNNGIQVYGDVVMNHKGGADATEMVRAVEVNPNNRNQEVTGEYTIEAWTRFDFPGRGNTHSSFKWRWYHFDGVDWDQSRKLSNRIYKFRGKAWDWEVDTEFGNYDYLMYADYDMDHPEVVNELRNWGVWYTNTLGLDGFRIDAVKHIKYSFTRDWINHVRSATGKNMFAVAEFWKNDLGAIENYLQKTNWNHSVFDVPLHYNLYNASKSGGNYDMRNIFNGTVVQRHPSHAVTFVDNHDSQPEEALESFVEEWFKPLAYALTLTREQGYPSVFYGDYYGIPTHGVPAMRSKIDPILEARQKYAYGPQHDYLDHPDVIGWTREGDSSHPKSGLATLITDGPGGSKRMYAGLKNAGETWYDITGNRSDTVKIGSDGWGEFHVNDGSVSIYVQK

SEQ ID NO: 27186 - protein, 483 aa, Synthetic construct
HHNGTNGTMMQYFEWYLPNDGNHWNRLNSDASNLKSKGITAVWIPPAWKGASQNDVGYGAYDLYDLGEFNQKGTVRTKYGTRSQLQAAVTSLKNNGIQVYGDVVMNHKGGADATEMVRAVEVNPNNRNQEVTGEYTIEAWTRFDFPGRGNTHSSFKWRWYHFDGVDWDQSRRLNNRIYKFRGKAWDWEVDTENGNYDYLMYTDIDMDHPEVVNELRNWGVWYTNTLGLDGFRIDAVKHIKYSFTRDWINHVRSATGKNMFAVAEFWKNDLGAIENYLQKTNWNHSVFDVPLHYNLYNASKSGGNYDMRNIFNGTVVQRHPSHAVTFVDNHDSQPEEALESFVEEWFKPLAYALTLTREQGYPSVFYGDYYGIPTHGVPAMRSKIDPILEARQKYAYGPQHDYLDHPDVIGWTREGDSSHPKSGLATLITDGPGGSKRMYAGLKNAGETWYDITGNRSDTVKIGSDGWGEFHVNDGSVSIYVQK

SEQ ID NO: 27187 - protein, 485 aa, Synthetic construct
HHNGTNGTMMQYFEWYLPNDGNHWNRLNSDASNLKSKGITAVWIPPAWKGASQADVGYGAYDLYDLGEFNQKGTVRTKYGTRSQLQAAVTSLKNNGIQVYGDVVMNHKGGADATEMVRAVEVNPNNRNQEVTGEYTIEAWTRFDFPGRGNTHSSFKWRWYHFDGVDWDQSRRLNNRIYKFRGHGKAWDWEVDTENGNYDYLMYADIDMDHPEVVNELRNWGVWYTNTLGLDGFRIDAVKHIKYSFTRDWINHVRSATGKNMFAVAEFWKNDLGAIENYLQKTNWNHSVFDVPLHYNLYNASKSGGNYDMRNIFNGTVVQRHPSHAVTFVDNHDSQPEEALESFVEEWFKPLAYALTLTREQGYPSVFYGDYYGIPTHGVPAMRSKIDPILEARQKYAYGPQHDYLDHPDVIGWTREGDSSHPKSGLATLITDGPGGSKRMYAGLKNAGETWYDITGNRSDTVKIGSDGWGEFHVNDGSVSIYVQK

SEQ ID NO: 27188 - protein, 485 aa, Synthetic construct
HHNGTNGTMMQYFEWYLPNDGNHWNRLNSDASNLKSKGITAVWIPPAWKGASQNDVGYGAYDLYDLGEFNQKGTVRTKYGTRSQLQAAVTSLKNNGIQVYGDVVMNHKGGADATEMVRAVEVNPNNRNQEVTGEYTIEAWTRFDFPGRGNTHSSFKWRWYHFDGVDWDQSRRLNNRIYKFRGHGKAWDWEVDTENGNYDYLMYADIDMDHPEVVNELRNWGVWYTNTLGLDGFRIDAVKHIKYSFTRDWINHVRSATGKNMFAVAEFWKNDLGAIENYLQKTNFNHSVFDVPLHYNLYNASKSGGNYDMRNIFNGTVVQRHPSHAVTFVDNHDSQPEEALESFVEEWFKPLAYALTLTREQGYPSVFYGDYYGIPTHGVPAMRSKIDPILEARQKYAYGPQHDYLDHPDVIGWTREGDSSHPKSGLATLITDGPGGSKRMYAGLKNAGETWYDITGNRSDTVKIGSDGWGEFHVNDGSVSIYVQK

SEQ ID NO: 27189 - protein, 485 aa, Synthetic construct
HHNGTNGTMMQYFEWYLPNDGNHWNRLNSDASNLKSKGITAVWIPPAWKGASQNDVGYGAYDLYDLGEFNQKGTVRTKYGTRSQLQAAVTSLKNNGIQVYGDVVMNHKGGADATEMVRAVEVNPNNRNQEVTGEYTIEAWTRFDFPGRGNTHSSFKWRWYHFDGVDWDQSRRLNNRIYKFRGHGKAWDWEVDTENGNYDYLMYADIDMDHPEVVNELRNWGVWYTNTLGLDGFRIDAVKHIKYSFTRDWINHVRSATGKNMFAVAEFWKNDLGAIENYLQKTNWNHSVFDVPLHYNLYNASKSGGNYDMRNIFNGTVVQRHPSHAVTFVDNHDSQPEEALESFVEEWFKPLAYALTLTREQGYPSVFYGDYYGTPTHGVPAMRSKIDPILEARQKYAYGPQHDYLDHPDVIGWTREGDSSHPKSGLATLITDGPGGSKRMYAGLKNAGETWYDITGNRSDTVKIGSDGWGEFHVNDGSVSIYVQK

SEQ ID NO: 27190 - protein, 483 aa, Bacillus sp.
HHNGTNGTMMQYFEWYLPNDGNHWNRLNSDASNLKSKGITAVWIPPAWKGASQNDVGYGAYDLYDLGEFNQKGTVRTKYGTRSQLQAAVTSLKNNGIQVYGDVVMNHKGGADATEMVRAVEVNPNNRNQEVTGEYTIEAWTRFDFPGRGNTHSSFKWRWYHFDGVDWDQSRLLNNRIYKFRGKAWDWEVDTEFGNYDYLMYADYDMDHPEVVNELRNWGVWYTNTLGLDGFRIDAVKHIKYSFTRDWINHVRSATGKNMFAVAEFWKNDLGAIENYLQKTNWNHSVFDVPLHYNLYNASKSGGNYDMRNIFNGTVVQRHPSHAVTFVDNHDSQPEEALESFVEEWFKPLAYALTLTREQGYPSVFYGDYYGIPTHGVPAMRSKIDPILEARQKYAYGPQHDYLDHPDVIGWTREGDSSHPKSGLATLITDGPGGSKRMYAGLKNAGETWYDITGNRSDTVKIGSDGWGEFHVNDGSVSIYVQK

SEQ ID NO: 27191 - protein, 485 aa, Synthetic construct
HHNGTNGTMMQYFEWYLPNDGNHWNRLNSDASNLKSKGITAVWIPPAWKGASQNDVGYGAYDLYDLGEFNQKGTIRTKYGTRSQLQAAVTSLKNNGIQVYGDVVMNHKGGADATEMVRAVEVNPNNRNQEVTGEYTIEAWTRFDFPGRGNTHSSFKWRWYHFDGVDWDQSRRLNNRIYKFRGHGKAWDWEVDTENGNYDYLMYADIDMDHPEVVNELRNWGVWYTNTLGLDGFRIDAVKHIKYSFTRDWINHVRSATGKNMFAVAEFWKNDLGAIENYLQKTNWNHSVFDVPLHYNLYNASKSGGNYDMRNIFNGTVVQRHPSHAVTFVDNHDSQPEEALESFVEEWFKPLAYALTLTREQGYPSVFYGDYYGIPTHGVPAMRSKIDPILEARQKYAYGPQHDYLDHPDVIGWTREGDSSHPKSGLATLITDGPGGSKRMYAGLKNAGETWYDITGNRSDTVKIGSDGWGEFHVNDGSVSIYVQK

SEQ ID NO: 27192 - protein, 483 aa, Bacillus sp.
HHNGTNGTMMQYFEWYLPNDGNHWNRLNSDASNLKSKGITAVWIPPAWKSASQNDVGYGAYDLYDLGEFNQKGTVRTKYGTRSQLQAAVTSLKNNGIQVYGDVVMNHKGGADATEMVRAVEVNPNNRNQEVTGEYTIEAWTRFDFPGRGNTHSSFKWRWYHFDGVDWDQSRNLQNRIYKFRGKAWDWEVDTEFGNYDYLMYADYDMDHPEVVNELRNWGVWYTNTLGLDGFRIDAVKHIKYSFTRDWINHVRSATGKNMFAVAEFWKNDLGAIENYLQKTNWNHSVFDVPLHYNLYNASKSGGNYDMRNIFNGTVVQRHPSHAVTFVDNHDSQPEEALESFVDPWFKPLAYALTLTREQGYPSVFYGDYYGIPTHGVPAMRSKIDPILEARQKYAYGPQHDYLDHPDVIGWTREGDSSHPKSGLATLITDGPGGSKRMYAGLKNAGETWYDITGNRSDTVKIGSDGWGEFHVNGGSVSIYVQK

SEQ ID NO: 27193 - protein, 485 aa, Synthetic construct
HHNGTNGTMMQYFEWYLPNDGNHWNRLNSDASNLKSKGITAVWIPPAWKGASQNDVGYGAYDLYDLGEFNQKGTVRTKYGTRSQLQAAVTSLKNNGIQVYGDVVMNHKGGADATEMVRAVEVNPNNRNQEVTGEYTIEAWTRFDFPGRGNTHSSFKWRWYHFDGVDWDQSRRLNNRIYKFRGHGKAWDWEVDTENGNYDYLMYADFDMDHPEVVNELRNWGVWYTNTLGLDGFRIDAVKHIKYSFVRDWINHVRSATGKNMFAVAEFWKNDLGAIENYLQKTNWNHSVFDVPLHYNLYNASKSGGNYDMRNIFNGTVVQRHPSHAVTFVDNHDSQPEEALESFVEEWFKPLAYALTLTREQGYPSVFYGDYYGIPTHGVPAMRSKIDPILEARQKYAYGPQHDYLDHPDVIGWTREGDSSHPKSGLATLITDGPGGSKRMYAGLKNAGETWYDITGNRSDTVKIGSDGWGEFHVNDGSVSIYVQK

SEQ ID NO: 27194 - protein, 483 aa, Bacillus sp.
HHNGTNGTMMQYFEWYLPNDGNHWNRLNSDASNLKSKGITAVWIPPAWKGASQNDVGYGAYDLYDLGEFNQKGTVRTKYGTRSQLQAAVTSLKNNGIQVYGDVVMNHKGGADATEMVSAVEVNPNNRNQEVTGDYTIEAWTRFDFPGRGNTHSSFKWRWYHFDGVDWDQSRRLNNRIYKFRAKAWDWEVDTEFGNYDYLMYADYDMDHPEVVNELRNWGVWYTNTLGLDGFRIDAVKHIKYSFTRDWINHVRSATGKNMFAVAEFWKNDLGAIENYLQKTNWNHSVFDVPLHYNLYNASKSGGNYDMRNIFNGTVVQRHPSHAVTFVDNHDSQPEEALESFVEEWFKPLAYALTLTREQGYPSVFYGDYYGIPTHGVPAMRSKIDPILEARQKYAYGPQHDYLDHPDVIGWTREGDSSHPKSGLATLITDGPGGSKRMYAGLKNAGETWYDITGNRSDTVKIGSDGWGEFHVNDGSVSIYVQK

SEQ ID NO: 27195 - protein, 483 aa, Bacillus sp.
HHNGKNGTMMQYFEWYLPNDGNHWNRLNSDASNLKSKGITAVWIPPAWKGASQNDVGYGAYDLYDLGEFNQKGTVRTKYGTRSQLQAAVTSLKNNGIQVYGDVVMNHKGGADATEMVRAVEVNPNNRNQEVTGEYTIEAWTRFDFPGRGNTHSSFKWRWYHFDGVDWDQSREFNNRIYKFRGKAWDWEVDTEFGNYDYLMYADYDMDHPEVVNELRNWGVWYTNTLGLDGFRIDAVKHIKYSFTRDWINHVRSATGKNMFAVAEFWKNDLGAIENYLQKTNWNHSVFDVPLHYNLYNASKSGGNYDMRNIFNGTVVQAHPNHAVTFVDNHDSQPEEALESFVEEWFKPLAYALTLTREQGYPSVFYGDYYGIPTHGVPAMRSKIDPILEARQKYAYGPQHDYLDHPDVIGWTREGDSSHPKSGLATLITDGPGGSKRMYAGLKNAGETWYDITGNRSDTVKIGSDGWGEFHVNDGSVSIYVQK

SEQ ID NO: 27196 - protein, 485 aa, Synthetic construct
HHNGTNGTMMQYFEWYLPNDGNHWNRLNSDASNLKSKGITAVWIPPAWKGASQNDVGYGAYDLYDLGEFNQKGTVRTKYGTRSQLQAAVTSLKNNGIQVYGDVVLNHKGGADATEMVRAVEVNPNNRNQEVTGEYTIEAWTRFDFPGRGNTHSSFKWRWYHFDGVDWDQSRRLNNRIYKFRGHGKAWDWEVDTENGNYDYLMYADYDMDHPEVVNELRNWGVWYTNTLGLDGFRIDAVKHIKYSFTRDWINHVRSATGKNMFAVAEFWKNDLGAIENYLQKTNWNHSVFDVPLHYNLYNASKSGGNYDMRNIFNGTVVQRHPSHAVTFVDNHDSQPEEALESFVEEWFKPLAYALTLTREQGYPSVFYGDYYGIPTHGVPAMRSKIDPILEARQKYAYGPQHDYLDHPDVIGWTREGDSSHPKSGLATLITDGPGGSKRMYAGLKNAGETWYDITGNRSDTVKIGSDGWGEFHVNDGSVSIYVQK

SEQ ID NO: 27197 - protein, 483 aa, Bacillus sp.
HHNGTNGTMMQYFEWYLPNDGNHWNRLNSDASNLKSKGITAVWIPPAWKGASQNDVGYGAYDLYDLGEFNQKGTVRTKYGTRSQLQAAVTSLKNNGIQVYGDVVMNHKGGADATEMVRAVEVNPNNRNQEVTGEYTIEAWTRFDFPGRGNTHSSFKWRWYHFDGVDWDQSRRLNNRIYKFRGKAWDWEVDTEFGNYDYLMYADYDMDHPEVVNELRNWGVWYTNTLGLDGFRIDAVKHIKYSFTRDWINHVRSATGKNMFAVAEFWKNDLGAIENYLQKTNWNHSVFDVPLHYNLYNASKSGGNYDMRWIFNGTVVQRHPSHAVTFVDNHDSQPEEALESFVEEWFKPLAYALTLTREQGYPSVFYGDYYGIPTHGVPAMRSKIDPILEARQKYAYGPQHDYLDHPDVIGWTREGDSSHPKSGLATLITDGPGGSKRMYAGLKNAGETWYDITGNRSDTVKIGSDGWGEFHVNDGSVSIYVQK

SEQ ID NO: 27198 - protein, 485 aa, Synthetic construct
HHNGTNGTMMQYFEWYLPNDGNHWNRLNSDASNLKSKGITAVWIPPAWKGASQNDVGYGAYDLYDLGEFNQKGTVRTKYGTRSQLQAAVTSLKNNGIQVYGDVVMNHKGGADATEMVRAVEVNPNNRNQEVTGEYTIQAWTRFDFPGRGNTHSSFKWRWYHFDGVDWDQSRRLNNRIYKFRGHGKAWDWEVDTENGNYDYLMYADIDMDHPEVVNELRNWGVWYTNTLGLDGFRIDAVKHIKYSFTRDWINHVRSATGKNMFAVAEFWKNDLGAIENYLQKTNWNHSVFDVPLHYNLYNASKSGGNYDMRNIFNGTVVQRHPSHAVTFVDNHDSQPEEALESFVEEWFKPLAYALTLTREQGYPSVFYGDYYGIPTHGVPAMRSKIDPILEARQKYAYGPQHDYLDHPDVIGWTREGDSSHPKSGLATLITDGPGGSKRMYAGLKNAGETWYDITGNRSDTVKIGSDGWGEFHVNDGSVSIYVQK

SEQ ID NO: 27199 - protein, 483 aa, Synthetic construct
HHNGTNGTMMQYFEWYLPNDGNHWNRLNSDASNLKSKGITAVWIPPAWKGASQNDVGYGAYDLYDLGEFNQKGTVRTKYGTRSQLQAAVTSLKNNGIQVYGDVVMNHKGGADATEMVRAVEVNPNNRNQEVTGEYTIEAWTRFDFPGRGNTHSSFKWRWYHFDGVDWDQSRRLNNRIYKFRGKAWDWEVDTELGNYDYLMYADIDMDHPEVVNELRNWGVWYTNTLGLDGFRIDAVKHIKYSFTRDWINHVRSATGKNMFAVAEFWKNDLGAIENYLQKTNWNHSVFDVPLHYNLYNASKSGGNYDMRNIFNGTVVQRHPSHAVTFVDNHDSQPEEALESFVEEWFKPLAYALTLTREQGYPSVFYGDYYGIPTHGVPAMRSKIDPILEARQKYAYGPQHDYLDHPDVIGWTREGDSSHPKSGLATLITDGPGGSKRMYAGLKNAGETWYDITGNRSDTVKIGSDGWGEFHVNDGSVSIYVQK

SEQ ID NO: 27200 - protein, 483 aa, Bacillus sp.
HHNGTNGTMMQYFEWYLPNDGNHWNRLNSDASNLKSKGITAVWIPPAWKGASQNDVGYGAYDLYDLGEFNQKGTVRTKYGTRSQLQAAVTSLKNNGIQVYGDVVMNHKGGADATEMVRAVEVNPNNRNQEVTGEYTIEAWTRFDFPGRGNTHSSFKWRWYHFDGVDWDQSRQLTNRIYKFRGKAWDWEVDTEFGNYDYLMYTDYDMDHPEVVNELRNWGVWYTNTLGLDGFRIDAVKHIKYSFTRDWINHVRSATGKNMFAVAEFWKNDLGAIENYLQKTNWNHSVFDVPLHYNLYNASKSGGNYDMRNIFNGTVVQRHPSHAVTFVDNHDSQPEEALESFVEEWFKPLAYALTLTREQGYPSVFYGDYYGIPTHGVPAMRSKIDPILEARQKYAYGPQHDYLDHPDVIGWTREGDSSHPKSGLATLITDGPGGSKRMYAGLKNAGETWYDITGNRSDTVKIGSDGWGEFHVNDGSVSIYVQK

SEQ ID NO: 27201 - protein, 485 aa, Synthetic construct
HHNGTNGTMMQYFEWYLPNDGNHWNRLNSDASNLKSKGINAVWIPPAWKGASQNDVGYGAYDLYDLGEFNQKGTVRTKYGTRSQLQAAVTSLKNNGIQVYGDVVMNHKGGADATEMVRAVEVNPNNRNQEVTGEYTIEAWTRFDFPGRGNTHSSFKWRWYHFDGVDWDQSRRLNNRIYKFRGHGKAWDWEVDTENGNYDYLMYADIDMDHPEVVNELRNWGVWYTNTLGLDGFRIDAVKHIKYSFTRDWINHVRSATGKNMFAVAEFWKNDLGAIENYLQKTNWNHSVFDVPLHYNLYNASKSGGNYDMRNIFNGTVVQRHPSHAVTFVDNHDSQPEEALESFVEEWFKPLAYALTLTREQGYPSVFYGDYYGIPTHGVPAMRSKIDPILEARQKYAYGPQHDYLDHPDVIGWTREGDSSHPKSGLATLITDGPGGSKRMYAGLKNAGETWYDITGNRSDTVKIGSDGWGEFHVNDGSVSIYVQK

SEQ ID NO: 27202 - protein, 485 aa, Synthetic construct
HHNGTNGTMMQYFEWYVPNDGNHWNRLNSDASNLKSKGITAVWIPPAWKGASQNDVGYGAYDLYDLGEFNQKGTVRTKYGTRSQLQAAVTSLKNNGIQVYGDVVMNHKGGADATEMVRAVEVNPNNRNQEVTGEYTIEAWTRFDFPGRGNTHSSFKWRWYHFDGVDWDQSRRLNNRIYKFRGHGKAWDWEVDTENGNYDYLMYADIDMDHPEVVNELRNWGVWYTNTLGLDGFRIDAVKHIKYSFTRDWINHVRSATGKNMFAVAEFWKNDLGAIENYLQKTNWNHSVFDVPLHYNLYNASKSGGNYDMRNIFNGTVVQRHPSHAVTFVDNHDSQPEEALESFVEEWFKPLAYALTLTREQGYPSVFYGDYYGIPTHGVPAMRSKIDPILEARQKYAYGPQHDYLDHPDVIGWTREGDSSHPKSGLATLITDGPGGSKRMYAGLKNAGETWYDITGNRSDTVKIGSDGWGEFHVNDGSVSIYVQK

SEQ ID NO: 27203 - protein, 483 aa, Synthetic construct
HHNGTNGTMMQYFEWYLPNDGNHWNRLNSDASNLKSKGITAVWIPPAWKGASQNDVGYGAYDLYDLGEFNQKGTVRTKYGTRSQLQAAVTSLKNNGIQVYGDVVMNHKGGADATEMVRAVEVNPNNRNQEVTGEYTIEAWTRFDFPGRGNTHSSFKWRWYHFDGVDWDQSRRLNNRIYKFRGKAWDWEVDTENGNYDYLMYADIDMDQPEVVNELRNWGVWYTNTLGLDGFRIDAVKHIKYSFTRDWINHVRSATGKNMFAVAEFWKNDLGAIENYLQKTNWNHSVFDVPLHYNLYNASKSGGNYDMRNIFNGTVVQRHPSHAVTFVDNHDSQPEEALESFVEEWFKPLAYALTLTREQGYPSVFYGDYYGIPTHGVPAMRSKIDPILEARQKYAYGPQHDYLDHPDVIGWTREGDSSHPKSGLATLITDGPGGSKRMYAGLKNAGETWYDITGNRSDTVKIGSDGWGEFHVNDGSVSIYVQK

SEQ ID NO: 27204 - protein, 483 aa, Bacillus sp.
HHNGTNGTMMQYFEWYLPNDGNHWNRLNSDASNLKSKGITAVWIPPAWKGASQNDVGYGAYDLYDLGEFNQKGTVRTKYGTRSQLQAAVTSLKNNGIQVYGDVVMNHKGGADATEMVRAVEVNPNNRNQEVTGEYTIEAWTRFDFPGRGNTHSSFKWRWYHFDGVDWDQSRRLNNRIYKFRGKAWDWEVDTENGFYDYLMYADIDMDHPEVVNELRNWGVWYTNTLGLDGFRIDAVKHIKYSFTRDWINHVRSATGKNMFAVAEFWKNDLGAIENYLQKTNWNHSVFDVPLHYNLYNASKSGGNYDMRNIFNGTVVQRHPSHAVTFVDNHDSQPEEALESFVEEWFKPLAYALTLTREQGYPSVFYGDYYGIPTHGVPAMRSKIDPILEARQKYAYGPQHDYLDHPDVIGWTREGDSSHPKSGLATLITDGPGGSKRMYAGLKNAGETWYDITGNRSDTVKIGSDGWGEFHVNDGSVSIYVQK

SEQ ID NO: 27205 - protein, 485 aa, Bacillus sp.
HHNGTNGTMMQYFEWYLPNDGNHWNRLNSDASNLKSKGITAVWIPPAWKGASQNDVGYGAYDLYDLGEFNQKGTVRTKYGTRSQLQAAVTSLKNNGIQVYGDVVMNHKGGADATEMVRAVEVNPNNRNQEVTGEYTIEAWTRFDFPGRGNTHSSFKWRWYHFDGVDWDQSRRLNNRIYKFRGHGKAWDWEVDTEFGNYDYLMYADYDMDHPEVVNELRNWGVWYTNTLGLDGFRIDAVKHIKYSFTRDWINHVRSATGKNMFAVAEFWKNDLGAIENYLQKTNWNHSVFDVPLHYNLYNASKSGGNYDMRNIFNGTVVQRHPSHAVTFVDNHDSQPEEALESFVEEWFKPLAYALTLTREQGYPSVFYGDYYGIPTHGVPAMRSKIDPILEARQKYAYGPQHDYLDHPDVIGWTREGDSSHPKSGLATLITDGPGGSKRMYAGLKNAGETWYDITGNRSDTVKIGFDGWGEFHVNKGSVSIYVQK

SEQ ID NO: 27206 - protein, 483 aa, Bacillus sp.
HHNGTNGTMMQYFEWYLPNDGNHWNRLNSDASNLKSKGITAVWIPPAWKGASQNDVGYGAYDLYDLGEFNQKGTVRTKYGTRSQLQAAVTSLKNNGIQVYGDVVMNHKGGADATEMVPAVEVNPNNRNQEVTGDYTIEAWTRFDFPGRGNTHSSFKWRWYHFDGVDWDQSRRLNNRIYKFRAKAWDWEVDTEFGNYDYLMYADYDMDHPEVVNELRNWGVWYTNTLGLDGFRIDAVKHIKYSFTRDWINHVRSATGKNMFAVAEFWKNDLGAIENYLQKTNWNHSVFDVPLHYNLYNASKSGGNYDMRNIFNGTVVQRHPSHAVTFVDNHDSQPEEALESFVEEWFKPLAYALTLTREQGYPSVFYGDYYGIPTHGVPAMRSKIDPILEARQKYAYGPQHDYLDHPDVIGWTREGDSSHPKSGLATLITDGPGGSKRMYAGLKNAGETWYDITGNRSDTVKIGSDGWGEFHVNDGSVSIYVQK

SEQ ID NO: 27207 - protein, 485 aa, Synthetic construct
HHNNTNGTMMQYFEWYLPNDGNHWNRLNSDASNLKSKGITAVWIPPAWKGASQNDVGYGAYDLYDLGEFNQKGTVRTKYGTRSQLQAAVTSLKNNGIQVYGDVVMNHKGGADATEMVRAVEVNPNNRNQEVTGEYTIEAWTRFDFPGRGNTHSSFKWRWYHFDGVDWDQSRRLNNRIYKFRGHGKAWDWEVDTENGNYDYLMYADIDMDHPEVVNELRNWGVWYTNTLGLDGFRIDAVKHIKYSFTRDWINHVRSATGKNMFAVAEFWKNDLGAIENYLQKTNWNHSVFDVPLHYNLYNASKSGGNYDMRNIFNGTVVQRHPSHAVTFVDNHDSQPEEALESFVEEWFKPLAYALTLTREQGYPSVFYGDYYGIPTHGVPAMRSKIDPILEARQKYAYGPQHDYLDHPDVIGWTREGDSSHPKSGLATLITDGPGGSKRMYAGLKNAGETWYDITGNRSDTVKIGSDGWGEFHVNDGSVSIYVQK

SEQ ID NO: 27208 - protein, 485 aa, Synthetic construct
HHNGTNGTMMQYFEWYLPNDGNHWNRLNSDASNLKSKGITAVWIPPAWKGASQNDVGYGAYDLYDLGEFNQKGTVRTKYGTRSQLQAAVTSLKNNGIQVYGDVVMNHKGGADATEMVRAVEVNPNNRNQEVTGEYTIEAWTRFNFPGRGNTHSSFKWRWYHFDGVDWDQSRRLNNRIYKFRGHGKAWDWEVDTENGNYDYLMYADIDMDHPEVVNELRNWGVWYTNTLGLDGFRIDAVKHIKYSFTRDWINHVRSATGKNMFAVAEFWKNDLGAIENYLQKTNWNHSVFDVPLHYNLYNASKSGGNYDMRNIFNGTVVQRHPSHAVTFVDNHDSQPEEALESFVEEWFKPLAYALTLTREQGYPSVFYGDYYGIPTHGVPAMRSKIDPILEARQKYAYGPQHDYLDHPDVIGWTREGDSSHPKSGLATLITDGPGGSKRMYAGLKNAGETWYDITGNRSDTVKIGSDGWGEFHVNDGSVSIYVQK

SEQ ID NO: 27209 - protein, 483 aa, Bacillus sp.
HHNGKNGTMMQYFEWYLPNDGNHWNRLNSDASNLKSKGITAVWIPPAWKGASQNDVGYGAYDLYDLGEFNQKGTVRTKYGTRSQLQAAVTSLKNNGIQVYGDVVMNHKGGADATEMVRAVEVNPNNRNQEVTGEYTIEAWTRFDFPGRGNTHSSFKWRWYHFDGVDWDQSREFNNRIYKFRGKAWDWEVDTEFGNYDYLMYADYDMDHPEVVNELRNWGVWYTNTLGLDGFRIDAVKHIKYSFTRDWINHVRSATGKNMFAVAEFWKNDLGAIENYLQKTNWNHSVFDVPLHYNLYNASKSGGNYDMRNIFNGTVVQVHPSHAVTFVDNHDSQPEEALESFVEEWFKPLAYALTLTREQGYPSVFYGDYYGIPTHGVPAMRSKIDPILEARQKYAYGPQHDYLDHPDVIGWTREGDSSHPKSGLATLITDGPGGSKRMYAGLKNAGETWYDITGNRSDTVKIGSDGWGEFHVNYGSVSIYVQK

SEQ ID NO: 27210 - protein, 483 aa, Synthetic construct
HHNGTNGTMMQYFEWYLPNDGNHWNRLNSDASNLKSKGITAVWIPPAWKGASQNDVGYGAYDLYDLGEFNQKGTVRTKYGTRSQLQAAVTSLKNNGIQVYGDVVMNHKGGADATEMVRAVEVNPNNRNQEVTGEYTIEAWTRFDFPGRGNTHSSFKWRWYHFDGVDWDQSRRLNNRIYKFRGKAWDWEVDTENGNYDYLMYADYDMDHPEVVNEIRNWGVWYTNTLGLDGFRIDAVKHIKYSFTRDWINHVRSATGKNMFAVAEFWKNDLGAIENYLQKTNWNHSVFDVPLHYNLYNASKSGGNYDMRNIFNGTVVQRHPSHAVTFVDNHDSQPEEALESFVEEWFKPLAYALTLTREQGYPSVFYGDYYGIPTHGVPAMRSKIDPILEARQKYAYGPQHDYLDHPDVIGWTREGDSSHPKSGLATLITDGPGGSKRMYAGLKNAGETWYDITGNRSDTVKIGSDGWGEFHVNDGSVSIYVQK

SEQ ID NO: 27211 - protein, 485 aa, Synthetic construct
HHNGTNGTMMQYFEWYLPNDGNHWNRLNSDASNLKSKGITAVWIPPAWKGASQNDVGYGAYNLYDLGEFNQKGTVRTKYGTRSQLQAAVTSLKNNGIQVYGDVVMNHKGGADATEMVRAVEVNPNNRNQEVTGEYTIEAWTRFDFPGRGNTHSSFKWRWYHFDGVDWDQSRRLNNRIYKFRGHGKAWDWEVDTENGNYDYLMYADIDMDHPEVVNELRNWGVWYTNTLGLDGFRIDAVKHIKYSFTRDWINHVRSATGKNMFAVAEFWKNDLGAIENYLQKTNWNHSVFDVPLHYNLYNASKSGGNYDMRNIFNGTVVQRHPSHAVTFVDNHDSQPEEALESFVEEWFKPLAYALTLTREQGYPSVFYGDYYGIPTHGVPAMRSKIDPILEARQKYAYGPQHDYLDHPDVIGWTREGDSSHPKSGLATLITDGPGGSKRMYAGLKNAGETWYDITGNRSDTVKIGSDGWGEFHVNDGSVSIYVQK

SEQ ID NO: 27212 - protein, 483 aa, Bacillus sp.
HHNGTNGTMMQYFEWYLPNDGNHWNRLNSDASNLKSKGITAVWIPPAWKGASQNDVGYGAYDLYDLGEFNQKGTVRTKYGTRSQLQAAVTSLKNNGIQVYGDVVMNHKGGADATEMVRAVEVNPNNRNQEVTGEYTIEAWTTFDFPGRGNTHSSFKWRWYHFDGVDWDQSRRLNNRIYKFRGKAWDWEVDTEFGNYDYLMYADYDMDHPEVVNELRNWGVWYTNTLGLDGFRIDAVKHIKYSFTRDWINHVRSATGKNMFAVAEFWKNDLGAIENYLQKTNWNHSVFDVPLHYNLYNASKSGGNYDMRNIFNGTVVQRHPSHAVTFVDNHDSQPEEALESFVEEWFKPLAYALTLTREQGYPSVFYGDYYGIPTHGVPAMRSKIDPILEARQKYAYGPQHDYLDHPDVIGWTREGDSSHPKSGLATLITDGPGGSKRMYAGLKNAGETWYDITGNRSDTVKIGSDGWGEFHVNDGSVSIYVQK

SEQ ID NO: 27213 - protein, 483 aa, Bacillus sp.
HHNGTNGTMMQYFEWYLPNDGNHWNRLNSDASNLKSKGITAVWIPPAWKGASQNDVGYGAYDLYDLGEFNQKGTVRTKYGTRSQLQAAVTSLKNNGIQVYGDVVMNHKGGADATEMVRAVEVNPNNRNQEVTGEYTIEAWTRFDFPGRGNTHSSFKWRWYHFDGVDWDQSRRISNRIYKFRGKAWDWEVDTEFGNYDYLMYADYDMDHPEVVNELRNWGVWYTNTLGLDGFRIDAVKHIKYSFTRDWINHVRSATGKNMFAVAEFWKNDLGAIENYLQKTNWNHSVFDVPLHYNLYNASKSGGNYDMRNIFNGTVVQRHPSHAVTFVDNHDSQPEEALESFVEEWFKPLAYALTLTREQGYPSVFYGDYYGIPTHGVPAMRSKIDPILEARQKYAYGPQHDYLDHPDVIGWTREGDSSHPKSGLATLITDGPGGSKRMYAGLKNAGETWYDITGNRSDTVKIGSDGWGEFHVNDGSVSIYVQK

SEQ ID NO: 27214 - protein, 483 aa, Synthetic construct
HHNGTNGTMMQYFEWYLPNDGNHWNRLNSDASNLKSKGITAVWIPPAWKGASQNDVGYGAYDLYDLGEFNQKGTVRTKYGTRSQLQAAVTSLKNNGIQVYGDVVMNHKGGADATEMVRAVEVNPNNRNQEVTGEYTIEAWTRFDFPGRGNTHSSFKWRWYHFDGVDWDQSRRLNNRIYKFRGKAWDWEVDTENGNYDYLMYADYDMDYPEVVNELRNWGVWYTNTLGLDGFRIDAVKHIKYSFTRDWINHVRSATGKNMFAVAEFWKNDLGAIENYLQKTNWNHSVFDVPLHYNLYNASKSGGNYDMRNIFNGTVVQRHPSHAVTFVDNHDSQPEEALESFVEEWFKPLAYALTLTREQGYPSVFYGDYYGIPTHGVPAMRSKIDPILEARQKYAYGPQHDYLDHPDVIGWTREGDSSHPKSGLATLITDGPGGSKRMYAGLKNAGETWYDITGNRSDTVKIGSDGWGEFHVNDGSVSIYVQK

SEQ ID NO: 27215 - protein, 483 aa, Bacillus sp.
HHNGTNGTMMQYFEWYLPNDGNHWNRLNSDASNLKSKGITAVWIPPAWKAASQNDVGYGAYDLYDLGEFNQKGTVRTKYGTRSQLQAAVTSLKNNGIQVYGDVVMNHKGGADATEMVRAVEVNPNNRNQEVTGEYTIEAWTRFDFPGRGNTHSSFKWRWYHFDGVDWDQSRQLNNRIYKFRGKAWDWEVDTEFGNYDYLMYADYDMDHPEVVNELRNWGVWYTNTLGLDGFRIDAVKHIKYSFTRDWINHVRSATGKNMFAVAEFWKNDLGAIENYLQKTNWNHSVFDVPLHYNLYNASKSGGNYDMRNIFNGTVVQRHPSHAVTFVDNHDSQPEEALESFVEEWFKPLAYALTLTREQGYPSVFYGDYYGIPTHGVPAMRSKIDPILEARQKYAYGPQHDYLDHPDVIGWTREGDSSHPKSGLATLITDGPGGSKRMYAGPKNAGETWYDITGNRSDTVKIGSDGWGEFHVNDGSVSIYVQK

SEQ ID NO: 27216 - protein, 483 aa, Bacillus sp.
HHNGTNGTMMQYFEWYLPNDGNHWNRLNSDASNLKSKGITAVWIPPAWKAASQNDVGYGAYDLYDLGEFNQKGTVRTKYGTRSQLQAAVTSLKNNGIQVYGDVVMNHKGGADATEMVDAVEVNPNNRNQEVTGEYTIEAWTRFDFPGRGNTHSSFKWRWYHFDGVDWDQSRDLQNRIYKFRGKAWDWEVDTEFGNYDYLMYADYDMDHPEVVNELRNWGVWYTNTLGLDGFRIDAVKHIKYSFTRDWINHVRSATGKNMFAVAEFWKNDLGAIENYLQKTNWNHSVFDVPLHYNLYNASKSGGNYDMRNIFNGTVVQRHPSHAVTFVDNHDSQPEEALESFVEEWFKPLAYALTLTREQGYPSVFYGDYYGIPTHGVPAMRSKIDPILEARQKYAYGPQHDYLDHPDVIGWTREGDSSHPKSGLATLITDGPGGSKRMYAGLKNAGETWYDITGNRSDTVKIGSDGWGEFHVNDGSVSIYVQK

SEQ ID NO: 27217 - protein, 485 aa, Synthetic construct
HHNGTNGTMMQYFEWYLPNDGNHWNRLNSDASNLKSKGITAVWIPPAWKGASQNDVGYGAYDLYDLGEFNQKGTVRTKYGTRSQLQAAVTSLKNNGIQVYGDVVMNHKGGADATEMVRAVEVNPNNRNQEVTGEYTIKAWTRFDFPGRGNTHSSFKWRWYHFDGVDWDQSRRLNNRIYKFRGHGKAWDWEVDTENGNYDYLMYADIDMDHPEVVNELRNWGVWYTNTLGLDGFRIDAVKHIKYSFTRDWINHVRSATGKNMFAVAEFWKNDLGAIENYLQKTNWNHSVFDVPLHYNLYNASKSGGNYDMRNIFNGTVVQRHPSHAVTFVDNHDSQPEEALESFVEEWFKPLAYALTLTREQGYPSVFYGDYYGIPTHGVPAMRSKIDPILEARQKYAYGPQHDYLDHPDVIGWTREGDSSHPKSGLATLITDGPGGSKRMYAGLKNAGETWYDITGNRSDTVKIGSDGWGEFHVNDGSVSIYVQK

SEQ ID NO: 27218 - protein, 483 aa, Synthetic construct
HHNGTNGTMMQYFEWYLPNDGNHWNRLNSDASNLKSKGITAVWIPPAWKGASQNDVGYGAYDLYDLGEFNQKGTVRTKYGTRSQLQAAVTSLKNNGIQVYGDVVMNHKGGADATEMVRAVEVNPNNRNQEVTGEYTIEAWTRFDFPGRGNTHSSFKWRWYHFDGVDWDQSRRLNNRIYKFRGKAWDWEVDTENGNYDYLMYADIDMDHPEVVNELRNWGVWYTNTLGLDGFRIDAVKHIKYSFMRDWINHVRSATGKNMFAVAEFWKNDLGAIENYLQKTNWNHSVFDVPLHYNLYNASKSGGNYDMRNIFNGTVVQRHPSHAVTFVDNHDSQPEEALESFVEEWFKPLAYALTLTREQGYPSVFYGDYYGIPTHGVPAMRSKIDPILEARQKYAYGPQHDYLDHPDVIGWTREGDSSHPKSGLATLITDGPGGSKRMYAGLKNAGETWYDITGNRSDTVKIGSDGWGEFHVNDGSVSIYVQK

SEQ ID NO: 27219 - protein, 485 aa, Synthetic construct
HHNGTNGTMMQYFEWYLPNDGNHWNRLNSDASNLKSKGITAVWIPPAWKGASQNDVGYGAYDLYDLGEFNQKGTVRTKYGTRSQLQAAVTSLKNNGIQVYGDVVMNHKGGADATEMVRAVEVNPNNRNQEVTGEYTIEAWTRFDFPGRGNTHSSFKWRWYHFDGVDWDQSRRLNNRIYKFRGHGKAWDWEVDTENGNYDYLMYADIDMDHPEVANELRNWGVWYTNTLGLDGFRIDAVKHIKYSFTRDWINHVRSATGKNMFAVAEFWKNDLGAIENYLQKTNWNHSVFDVPLHYNLYNASKSGGNYDMRNIFNGTVVQRHPSHAVTFVDNHDSQPEEALESFVEEWFKPLAYALTLTREQGYPSVFYGDYYGIPTHGVPAMRSKIDPILEARQKYAYGPQHDYLDHPDVIGWTREGDSSHPKSGLATLITDGPGGSKRMYAGLKNAGETWYDITGNRSDTVKIGSDGWGEFHVNDGSVSIYVQK

SEQ ID NO: 27220 - protein, 483 aa, unidentified
HHNGTNGTMMQYFEWYLPNDGNHWNRLRDDAANLKSKGITAVWIPPAWKGTSQNDVGYGAYDLYDLGEFNQKGTVRTKYGTRNQLQAAVTSLKNNGIQVYGDVVMNHKGGADGTEIVNAVEVNRSNRNQETSGEYAIEAWTKFDFPGRGNNHSSFKWRWYHFDGTDWDQSRQLQNKIYKFRGKAWDWEVDTENGNYDYLMYADVDMDHPEVIHELRNWGVWYTNTLNLDGFRIDAVKHIKYSFTRDWLTHVRNTTGKPMFAVAEFWKNDLGAIENYLNKTSWNHSVFDVPLHYNLYNASNSGGYYDMRNILNGSVVQKHPTHAVTFVDNHDSQPGEALESFVQQWFKPLAYALVLTREQGYPSVFYGDYYGIPTHGVPAMKSKIDPLLQARQTFAYGPQHDYLDHPDVIGWTREGDSSAAKSGLAALITDGPGGSKRMYAGLKNAGETWYDITGNRSDTVKIGSDGWGEFHVNDGSVSIYVQK

SEQ ID NO: 27221 - protein, 485 aa, Synthetic construct
HHNGTNGTMMQYFEWYLPNDGNHWNRLNSDASNLKSKGITAVWIPPAWKGASQNDVGYGAYDLYDLGEFNQKGTVRTKYGTRSQLQAAVTSLKNNGIQVYGDVVMNHKGGADQTEMVRAVEVNPNNRNQEVTGEYTIEAWTRFDFPGRGNTHSSFKWRWYHFDGVDWDQSRRLNNRIYKFRGHGKAWDWEVDTENGNYDYLMYADIDMDHPEVVNELRNWGVWYTNTLGLDGFRIDAVKHIKYSFTRDWINHVRSATGKNMFAVAEFWKNDLGAIENYLQKTNWNHSVFDVPLHYNLYNASKSGGNYDMRNIFNGTVVQRHPSHAVTFVDNHDSQPEEALESFVEEWFKPLAYALTLTREQGYPSVFYGDYYGIPTHGVPAMRSKIDPILEARQKYAYGPQHDYLDHPDVIGWTREGDSSHPKSGLATLITDGPGGSKRMYAGLKNAGETWYDITGNRSDTVKIGSDGWGEFHVNDGSVSIYVQK

SEQ ID NO: 27222 - protein, 483 aa, Bacillus sp.
HHNGTNGTMMQYFEWYLPNDGNHWNRLNSDASNLKSKGITAVWIPPAWKGASQNDVGYGAYDLYDLGEFNQKGTVRTKYGTRSQLQAAVTSLKNNGIQVYGDVVMNHKGGADATEMVRAVEVNPNNRNQEVTGEYTIEAWTRFDFPGRGNTHSSFKWRWYHFDGVDWDQSRRLNNRIYKFRGKAWDWEVDTEFGNYDYLMYADYDMDHPEVVNELRNWGVWYTNTLGLDGFRIDAVKHIKYSFTRDWINHVRSATGKNMFAVAEFWKNDLGAIENYLKKTNWNHSVFDVPLHYNLYNASKSGGNYDMRNIFNGTVVQRHPSHAVTFVDNHDSQPEEALESFVEEWFKPLAYALTLTREQGYPSVFYGDYYGIPTHGVPAMRSKIDPILEARQKYAYGPQHDYLDHPDVIGWTREGDSSHPKSGLATLITDGPGGSKRMYAGLKNAGETWYDITGNRSDTVKIGSDGWGEFHVNDGSVSIYVQK

SEQ ID NO: 27223 - protein, 485 aa, Synthetic construct
HHNGTNGTMMQYFEWYLPNDGNHWNRLNSDASNLKSKGITAVWIPPAWKGASQNDVGYGAYDLYDLGEFNQKGTVRTKYGTRSQLQAAVTSLKNNGIQVYGDVVMNHKGGADATEMVRAVEVNPQNRNQEVTGEYTIEAWTRFDFPGRGNTHSSFKWRWYHFDGVDWDQSRRLNNRIYKFRGHGKAWDWEVDTENGNYDYLMYADIDMDHPEVVNELRNWGVWYTNTLGLDGFRIDAVKHIKYSFTRDWINHVRSATGKNMFAVAEFWKNDLGAIENYLQKTNWNHSVFDVPLHYNLYNASKSGGNYDMRNIFNGTVVQRHPSHAVTFVDNHDSQPEEALESFVEEWFKPLAYALTLTREQGYPSVFYGDYYGIPTHGVPAMRSKIDPILEARQKYAYGPQHDYLDHPDVIGWTREGDSSHPKSGLATLITDGPGGSKRMYAGLKNAGETWYDITGNRSDTVKIGSDGWGEFHVNDGSVSIYVQK

SEQ ID NO: 27224 - protein, 483 aa, Synthetic construct
HHNGTNGTMMQYFEWYLPNDGNHWNRLNSDASNLKSKGITAVWIPPAWKGASQNDVGYGAYDLYDLGEFNQKGTVRTKYGTRSQLQAAVTSLKNNGIQVYGDVVMNHKGGADATEMVRAVEVNPNNRNQEVTGEYTIEAWTRFDFPGRGNTHSSFKWRWYHFDGVDWDQSRRLNNRIYKFRGKAWDWEVDTENGNYDYLMYADIDMDHLEVVNELRNWGVWYTNTLGLDGFRIDAVKHIKYSFTRDWINHVRSATGKNMFAVAEFWKNDLGAIENYLQKTNWNHSVFDVPLHYNLYNASKSGGNYDMRNIFNGTVVQRHPSHAVTFVDNHDSQPEEALESFVEEWFKPLAYALTLTREQGYPSVFYGDYYGIPTHGVPAMRSKIDPILEARQKYAYGPQHDYLDHPDVIGWTREGDSSHPKSGLATLITDGPGGSKRMYAGLKNAGETWYDITGNRSDTVKIGSDGWGEFHVNDGSVSIYVQK

SEQ ID NO: 27225 - protein, 483 aa, Bacillus sp.
HHNGTNGTMMQYFEWYLPNDGNHWNRLNSDASNLKSKGITAVWIPPAWKGASQNDVGYGAYDLYDLGEFNQKGTVRTKYGTRSQLQAAVTSLKNNGIQVYGDVVMNHKGGADATEMVRAVEVNPNNRNQEVTGEYTIEAWTRFDFPGRGNTHSSFKWRWYHFDGVDWDQSRRLNNRIYKFRGKAWDWEVDTEFGNYDYLMYADYDMDHPEVVNELRNWGVWYTNTLGLDGFRIDAVKHIKYSFTRDWINHVRSATGKNMFAVAEFWKNDLGAIENYLQKTNWNHSVFDVPLHYNLYNASKSGGNYDMRNIFNGTVVQSHPSHAVTFVDNHDSQPEEALESFVEEWFKPLAYALTLTREQGYPSVFYGDYYGIPTHGVPAMRSKIDPILEARQKYAYGPQHDYLDHPDVIGWTREGDSSHPKSGLATLITDGPGGSKRMYAGLKNAGETWYDITGNRSDTVKIGSDGWGEFHVNDGSVSIYVQK

SEQ ID NO: 27226 - protein, 483 aa, Bacillus sp.
HHNGTNGTMMQYFEWYLPNDGNHWNRLNSDASNLKSKGITAVWIPPAWKGASQNDVGYGAYDLYDLGEFNQKGTVRTKYGTRSQLQAAVTSLKNNGIQVYGDVVMNHKGGADATEMVRAVEVNPNNRNQEVTGEYTIEAWTRFDFPGRGNTHSSFKWRWYHFDGVDWDQSRQVNNRIYKFRGKAWDWEVDTEFGNYDYLMYVDYDMDHPEVVNELRNWGVWYTNTLGLDGFRIDAVKHIKYSFTRDWINHVRSATGKNMFAVAEFWKNDLGAIENYLQKTNWNHSVFDVPLHYNLYNASKSGGNYDMRNIFNGTVVQRHPSHAVTFVDNHDSQPEEALESFVEEWFKPLAYALTLTREQGYPSVFYGDYYGIPTHGVPAMRSKIDPILEARQKYAYGPQHDYLDHPDVIGWTREGDSSHPKSGLATLITDGPGGSKRMYAGLKNAGETWYDITGNRSDTVKIGSDGWGEFHVNDGSVSIYVQK

SEQ ID NO: 27227 - protein, 483 aa, Bacillus sp.
HHNGTNGTMMQYFEWYLPNDGNHWNRLNSDASNLKSKGITAVWIPPAWKGASQNDVGYGAYDLYDLGEFNQKVTVRTKYGTRSQLQAAVTSLKNNGIQVYGDVVMNHKGGADATEMVRAVEVNPNNRNQEVTGEYTIEAWTRFDFPGRGNTHSSFKWRWYHFDGVDWDQSRQLENRIYKFRGKAWDWEVDTEFGNYDYLMYADYDMDHPEVVNELRNWGVWYTNTLGLDGFRIDAVKHIKYSFTRDWINHVRSATGKNMFAVAEFWKNDLGAIENYLQKTNWNHSVFDVPLHYNLYNASKSGGNYDMRNIFNGTVVQRHPSHAVTFVDNHDSQPEEALESFVEEWFKPLAYALTLTREQGYPSVFYGDYYGIPTHGVPAMRSKIDPILEARQKYAYGPQHDYLDHPDVIGWTREGDSSHPKSGLATLITDGPGGSKRMYAGLKNAGETWYDITGNRSDTVKIGSDGWGEFHVNDGSVSIYVQK

SEQ ID NO: 27228 - protein, 485 aa, Bacillus sp.
HHNGTNGTMMQYFEWYLPNDGNHWNRLNSDASNLKSKGITAVWIPPAWKGASQNDVGYGAYDLYDLGEFNQKGTVRTKYGTRSQLQAAVTSLKNNGIQVYGDVVMNHKGGADATEMVRAVEVNPNNRNQEVTGEYTIEAWTRFDFPGRGNTHSSFKWRWYHFDGVDWDQSRRLNNRIYKFRGHGKAWDWEVDTEFGNYDYLMYADYDMDHPEVVNELRGWGVWYTNTLGLDGFRIDAVKHIKYSFTRDWINHVRSATGKNMFAVAEFWKNDLGAIENYLQKTNWNHSVFDVPLHYNLYNASKSGGNYDMRNIFNGTVVQRHPSHAVTFVDNHDSQPEEALESFVEEWFKPLAYALTLTREQGYPSVFYGDYYGIPTHGVPAMRSKIDPILEARQKYAYGPQHDYLDHPDVIGWTREGDSSHPKSGLATLITDGPGGSKRMYAGLKNAGETWYDITGNRSDTVKIGSDGWGEFHVNDGSVSIYVQK

SEQ ID NO: 27229 - protein, 485 aa, Bacillus sp.
HHNGTNGTMMQYFEWYLPNDGNHWNRLNSDASNLKSKGITAVWIPPAWKGASQNDVGYGAYDLYDLGEFNQKGTVRTKYGTRSQLQAAVTSLKNNGIQVYGDVVMNHKGGADATEMVRAVEVNPNNRNQEVTGEYTIEAWTRFDFPGRGNTHSSFKWRWYHFDGVDWDQSRRLNNRIYKFRGHGKAWDWEVDTEFGNYDYLMYADYDMDHPEVVNELRNWGVWYTNTLGLDGFRIDAVKHIKYSFTRDWINHVRSATGKNMFAVAEFWKNDLGAIENYLQKTNWNHSVFDVPLHYNLYNASKSGGNYDMRNIFNGTVVQRHPSHAVTFVDNHDSQPEEALESFVEEWFKPLAYALTLTREQGYPSVFYGDYYGIPTHGVPAMRSKIDPILEARQKYAYGPQHDYLDHPDVIGWTREGDSSHPKSGLATLITDGPGGSKRMYAGLKNAGETWYDITGNRSDTVKIGSDGWGEFHVNQGSVSIYVQK

SEQ ID NO: 27230 - protein, 485 aa, Synthetic construct
HHNGTNGTMMQYFEWYLPNDGNHWNRLNSDASNLKSKGITAVWIPPAWKGASQNDVGYGAYDLYDLGEFNQKGTVRTKYGTRSQLQAAVTSLKNNGIQVYGDVVMNHKGGADATEMVRAVEVNPNNRNQEVTGEYTIEAWTRFDFPGRGNTHSSFKWRWYHFDGVDWDQSRRLNNRIYKFRGHGKAWDWEVDTENGNYDYLMYADIDMDHPEVVNELRNWGVWYTNTLGLDGFRIDAVKHIKYSFTRDWINHVRSATGKNMFAVAEFWKNDLGAIENYLQKTNWNHSVFDVPLHYNLYNASKSGGNYDMRNIFNGTVVQRHPSHAVTFVDNHDSQPEEALESFVEEWFKPLAYALTLTREQGYPSVFYGDYYGIPTHGVPAMRSKIDPILEARQKYAYGPQHDYLDHPDVIGWTREGDSSHPKSGLATLITDGPGGSKRMYAGLKNAGETWYDITGNRSDTVKIGSDGTGEFHVNDGSVSIYVQK

SEQ ID NO: 27231 - protein, 485 aa, Bacillus sp.
HHNGTNGTMMQYFEWYLPNDGNHWNRLNSDASNLKSKGITAVWIPPAWKGASQNDVGYGAYDLYDLGEFNQKGTVRTKYGTRSQLQAAVTSLKNNGIQVYGDVVMNHKGGADATEMVPAVEVNPNNRNQEVTGEYTIEAWTRFDFPGRGNTHSSFKWRWYHFDGVDWDQSRRLNNRIYKFRNHGKAWDWEVDTEFGNYDYLMYADYDMDHPEVVNELRNWGVWYTNTLGLDGFRIDAVKHIKYSFTRDWINHVRSATGKNMFAVAEFWKNDLGAIENYLQKTNWNHSVFDVPLHYNLYNASKSGGNYDMRNIFNGTVVQRHPSHAVTFVDNHDSQPEEALESFVEEWFKPLAYALTLTREQGYPSVFYGDYYGIPTHGVPAMRSKIDPILEARQKYAYGPQHDYLDHPDVIGWTREGDSSHPKSGLATLITDGPGGSKRMYAGLKNAGETWYDITGNRSDTVKIGSDGWGEFHVNDGSVSIYVQK

SEQ ID NO: 27232 - protein, 483 aa, Bacillus sp.
HHNGTNGTMMQYFEWYLPNDGNHWNRLNSDASNLKSKGITAVWIPPAWKAQSQNDVGYGAYDLYDLGEFNQKGTVRTKYGTRSQLQAAVTSLKNNGIQVYGDVVMNHKGGADATEMVRAVEVNPNNRNQEVTGEYTIEAWTRFDFPGRGNTHSSFKWRWYHFDGVDWDQSRQLNNRIYKFRGKAWDWEVDTEFGNYDYLMYADYDMDHPEVVNELRNWGVWYTNTLGLDGFRIDAVKHIKYSFTRDWINHVRSATGKNMFAVAEFWKNDLGAIENYLQKTNWNHSVFDVPLHYNLYNASKSGGNYDMRNIFNGTVVQRHPSHAVTFVDNHDSQPEEALESFVEEWFKPLAYALTLTREQGYPSVFYGDYYGIPTHGVPAMRSKIDPILEARQKYAYGPQHDYLDHPDVIGWTREGDSSHPKSGLATLITDGPGGSKRMYAGLKNAGETWYDITGNRSDTVKIGSDGWGEFHVNDGSVSIYVQK

SEQ ID NO: 27233 - protein, 483 aa, Bacillus sp.
HHNGTNGTMMQYFEWYLPNDGNHWNRLNSDASNLKSKGITAVWIPPAWKGASQNDVGYGAYDLYDLGEFNQKGTVRTKYGTRSQLQAAVTSLKNNGIQVYGDVVMNHKGGADATEMVRAVEVNPNNRNQEVTGEYTIEAWTRFDFPGRGNTHSSFKWRWYHFDGVDWDQSRRLNNRIYKFRGKAWDWEVDTEFGNYDYLMYADYDMDHPEVVNELRNWGVWYTNTLGLDGFRIDAVKHIKYSFTRDWINHVRSATGKNMFAVAEFWKNDLGAIENYLQKTNWNHSVFDVPLHYNLYNASKSGGNYDMRNIFNGTVVQRHPSHAVTFVDNHDSQPEEALESFVEEWFKPLAYALTLTREQGYPSVFYGDYYGIPTHGVPAMRSKIDPILEARQKYAYGPQHDYLDHPDVIGWTREGDSSHPKSGLATLITDGPGGSKRMYAGLKNAGETWYDITGNRSDTVRIGSDGWGEFHVNDGSVSIYVQK

SEQ ID NO: 27234 - protein, 485 aa, Synthetic construct
HHNGTNGTMMQYFEWYLPNDGNHWNRLNSDASNLKSKGITAVWIPPAWKGASQNDVGYGAYDLYDLGEFNQKGTVRTKYGTRSQLQAAVTSLKNNGIQVYGDVVMNHKGGADATEMVRAVEVNPNNRNQEVTGEYTIEAWTRFDFPGRGNTHSSFKWRWYHFDGVDWDQSRRLNNRIYKFRGHGKAWDWEVDTENGNYDYLMYADLDFDHPEVVNELRNWGVWYTNTLGLDGFRIDAVKHIKYSFTRDWINHVRSATGKNMFAVAEFWKNDLGAIENYLQKTNWNHSVFDVPLHYNLYNASKSGGNYDMRNIFNGTVVQRHPSHAVTFVDNHDSQPEEALESFVEEWFKPLAYALTLTREQGYPSVFYGDYYGIPTHGVPAMRSKIDPILEARQKYAYGPQHDYLDHPDVIGWTREGDSSHPKSGLATLITDGPGGSKRMYAGLKNAGETWYDITGNRSDTVKIGSDGWGEFHVNDGSVSIYVQK

SEQ ID NO: 27235 - protein, 483 aa, Bacillus sp.
HHNGTNGTMMQYFEWYLPNDGNHWNRLNSDASNLKSKGITAVWIPPAWKGASQNDVGYGAYDLYDLGEFNQKGTVRTKYGTRSQLQAAVTSLKNNGIQVYGDVVMNHKGGADATEMVKAVEVNPNNRNQEVTGEYTIEAWTRFDFPGRGNTHSSFKWRWYHFDGVDWDQSRRLNNRIYKFRGKAWDWEVDTEFGNYDYLMYADYDMDHPEVVNELRNWGVWYTNTLGLDGFRIDAVKHIKYSFTRDWINHVRSATGKNMFAVAEFWKNDLGAIENYLQKTNWNHSVFDVPLHYNLYNASKSGGNYDMRNIFNGTVVQRHPSHAVTFVDNHDSQPEEALESFVEEWFKPLAYALTLTREQGYPSVFYGDYYGIPTHGVPAMRSKIDPILEARQKYAYGPQHDYLDHPDVIGWTREGDSSHPKSGLATLITDGPGGSKRMYAGLKNAGETWYDITGNRSDTVKIGSDGWGEFHVNDGSVSIYVQK

SEQ ID NO: 27236 - protein, 485 aa, Bacillus sp.
HHNGTNGTMMQYFEWYLPNDGNHWNRLNSDASNLKSKGITAVWIPPAWKGASQNDVGYGAYDLYDLGEFNQKGTVRTKYGTRSQLQAAVTSLKNNGIQVYGDVVMNHKGGADATEMVRAVEVNPNNRNQEVTGEYTIEAWTRFDFPGRGNTHSSFKWRWYHFDGVDWDQSRRLNNRIYKFRGHGKAWDWEVDAEFGNYDYLMYADYDMDHPEVVNELRNWGVWYTNTLGLDGFRIDAVKHIKYSFTRDWINHVRSATGKNMFAVAEFWKNDLGAIENYLQKTNWNHSVFDVPLHYNLYNASKSGGNYDMRNIFNGTVVQRHPSHAVTFVDNHDSQPEEALESFVEEWFKPLAYALTLTREQGYPSVFYGDYYGIPTHGVPAMRSKIDPILEARQKYAYGPQHDYLDHPDVIGWTREGDSSHPKSGLATLITDGPGGSKRMYAGLKNAGETWYDITGNRSDTVKIGSDGWGEFHVNDGSVSIYVQK

SEQ ID NO: 27237 - protein, 485 aa, Bacillus sp.
HHNGTNGTMMQYFEWYLPNDGNHWNRLNSDASNLKSKGITAVWIPPAWKGASQNDVGYGAYDLYDLGEFNQKGTVRTKYGTRSQLQAAVTSLKNNGIQVYGDVVMNHKGGADATEMVRAVEVNPNNRNQEVTGEYTIEAWTRFDFPGRGNTHSSFKWRWYHFDGVDWDQSRRLNNRIYKFRGHGKAWDWEVDGEFGNYDYLMYADYDMDHPEVVNELRNWGVWYTNTLGLDGFRIDAVKHIKYSFTRDWINHVRSATGKNMFAVAEFWKNDLGAIENYLQKTNWNHSVFDVPLHYNLYNASKSGGNYDMRNIFNGTVVQRHPSHAVTFVDNHDSQPEEALESFVEEWFKPLAYALTLTREQGYPSVFYGDYYGIPTHGVPAMRSKIDPILEARQKYAYGPQHDYLDHPDVIGWTREGDSSHPKSGLATLITDGPGGSKRMYAGLKNAGETWYDITGNRSDTVKIGSDGWGEFHVNDGSVSIYVQK

SEQ ID NO: 27238 - protein, 485 aa, Bacillus sp.
HHNGTNGTMMQYFEWYLPNDGNHWNRLNSDASNLKSKGITAVWIPPAWKAASQNDVGYGAYDLYDLGEFNQKGTVRTKYGTRSQLQAAVTSLKNNGIQVYGDVVMNHKGGADATEMVRAVEVNPNNRNQEVTGEYTIEAWTRFDFPGRGNTHSSFKWRWYHFDGVDWDQSRQLTNRIYKFRGHGKAWDWEVDTEFGNYDYLMYADYDMDHPEVVNELRNWGVWYTNTLGLDGFRIDAVKHIKYSFTRDWINHVRSATGKNMFAVAEFWKNDLGAIENYLQKTNWNHSVFDVPLHYNLYNASKSGGNYDMRNIFNGTVVQRHPSHAVTFVDNHDSQPEEALESFVEEWFKPLAYALTLTREQGYPSVFYGDYYGIPTHGVPAMRSKIDPILEARQKYAYGPQHDYLDHPDVIGWTREGDSSHPKSGLATLITDGPGGSKRMYAGLKNAGETWYDITGNRSDTVKIGSDGWGEFHVNDGSVSIYVQK

SEQ ID NO: 27239 - protein, 485 aa, Bacillus sp.
HHNGTNGTMMQYFEWYLPNDGNHWNRLNSDASNLKSKGITAVWIPPAWKGASQNDVGYGAYDLYDLGEFNQKGTVRTKYGTRSQLQAAVTSLKNNGIQVYGDVVMNHKGGADATEMVRAVEVNPNNRNQEVTGEYTIEAWTRFDFPGRGNTHSSFKWRWYHFDGVDWDQSRRLNNRIYKFRGHNKAWDWEVDTEFGNYDYLMYADYDMDHPEVVNELRNWGVWYTNTLGLDGFRIDAVKHIKYSFTRDWINHVRSATGKNMFAVAEFWKNDLGAIENYLQKTNWNHSVFDVPLHYNLYNASKSGGNYDMRNIFNGTVVQRHPSHAVTFVDNHDSQPEEALESFVEEWFKPLAYALTLTREQGYPSVFYGDYYGIPTHGVPAMRSKIDPILEARQKYAYGPQHDYLDHPDVIGWTREGDSSHPKSGLATLITDGPGGSKRMYAGLKNAGETWYDITGNRSDTVKIGSDGWGEFHVNDGSVSIYVQK

SEQ ID NO: 27240 - protein, 485 aa, Bacillus sp.
HHNGTNGTMMQYFEWYLPNDGNHWNRLNSDASNLKSKGITAVWIPPAWKGASQNDVGYGAYDLYDLGEFNQKGTVRTKYGTRSQLQAAVTSLKNNGIQVYGDVVMNHKGGADATEMVRAVEVNPNNRNQEVTGEYTIEAWTRFDFPGRGNTHSSFKWRWYHFDGVDWDQSRRVDNRIYKFRGHGKAWDWEVDTEFGNYDYLMYADYDMDHPEVVNELRNWGVWYTNTLGLDGFRIDAVKHIKYSFTRDWINHVRSATGKNMFAVAEFWKNDLGAIENYLQKTNWNHSVFDVPLHYNLYNASKSGGNYDMRNIFNGTVVQRHPSHAVTFVDNHDSQPEEALESFVEEWFKPLAYALTLTREQGYPSVFYGDYYGIPTHGVPAMRSKIDPILEARQKYAYGPQHDYLDHPDVIGWTREGDSSHPKSGLATLITDGPGGSKRMYAGLKNAGETWYDITGNRSDTVKIGSDGWGEFHVNDGSVSIYVQK

SEQ ID NO: 27241 - protein, 485 aa, Bacillus sp.
HHNGTNGTMMQYFEWYLPNDGNHWNRLNSDASNLKSKGITAVWIPPAWKGASQNDVGYGAYDLYDLGEFNQKGTVRTKYGTRSQLQAAVTSLKNNGIQVYGDVVMNHKGGADATEMVRAVEVNPNNRNQEVTGEYTIEAWTRFDFPGRGNTHSSFKWRWYHFDGVDWDQSRRLNNRIYKFRGHGKAWDWEVDTEFGNYDYLMYADYDMDHPEVVNELRNWGVWYTNTLGLDGFRIDAVKHIKYSFTRDWINHVRSATGKNMFAVAEFWKNDLGAIENYLQKTNWNHSVFDVPLHYNLYNASKSGGNYDMRNIFNGTVVQVHPSHAVTFVDNHDSQPEEALESFVEEWFKPLAYALTLTREQGYPSVFYGDYYGIPTHGVPAMRSKIDPILEARQKYAYGPQHDYLDHPDVIGWTREGDSSHPKSGLATLITDGPGGSKRMYAGLKNAGETWYDITGNRSDTVKIGSDGWGEFHVNDGSVSIYVQK

SEQ ID NO: 27242 - protein, 483 aa, Synthetic construct
HHNGTNGTMMQYFEWYLPNDGNHWNRLNSDASNLKSKGITAVWIPPAWKGASQNDVGYGAYDLYDLGEFNQKGTVRTKYGTRSQLQAAVTSLKNNGIQVYGDVVMNHKGGADATEMVRAVEVNPNNRNQEVTGEYTIEAWTRFDFPGRGNTHSSFKWRWYHFDGVDWDQSRRLNNRIYKFRGKAWDWEVDTENGNYDYLMYADIDMDTPEVVNELRNWGVWYTNTLGLDGFRIDAVKHIKYSFTRDWINHVRSATGKNMFAVAEFWKNDLGAIENYLQKTNWNHSVFDVPLHYNLYNASKSGGNYDMRNIFNGTVVQRHPSHAVTFVDNHDSQPEEALESFVEEWFKPLAYALTLTREQGYPSVFYGDYYGIPTHGVPAMRSKIDPILEARQKYAYGPQHDYLDHPDVIGWTREGDSSHPKSGLATLITDGPGGSKRMYAGLKNAGETWYDITGNRSDTVKIGSDGWGEFHVNDGSVSIYVQK

SEQ ID NO: 27243 - protein, 483 aa, Synthetic construct
HHNGTNGTMMQYFEWYLPNDGNHWNRLNSDASNLKSKGITAVWIPPAWKGASQNDVGYGAYDLYDLGEFNQKGTVRTKYGTRSQLQAAVTSLKNNGIQVYGDVVMNHKGGADATEMVRAVEVNPNNRNQEVTGEYTIEAWTRFDFPGRGNTHSSFKWRWYHFDGVDWDQSRRLNNRIYKFRGKAWDWEVDTENGNYDYLMYADIDMDSPEVVNELRNWGVWYTNTLGLDGFRIDAVKHIKYSFTRDWINHVRSATGKNMFAVAEFWKNDLGAIENYLQKTNWNHSVFDVPLHYNLYNASKSGGNYDMRNIFNGTVVQRHPSHAVTFVDNHDSQPEEALESFVEEWFKPLAYALTLTREQGYPSVFYGDYYGIPTHGVPAMRSKIDPILEARQKYAYGPQHDYLDHPDVIGWTREGDSSHPKSGLATLITDGPGGSKRMYAGLKNAGETWYDITGNRSDTVKIGSDGWGEFHVNDGSVSIYVQK

SEQ ID NO: 27244 - protein, 485 aa, Bacillus sp.
HHNGTNGTMMQYFEWYLPNDGNHWNRLNSDASNLKSKGITAVWIPPAWKGASQNDVGYGAYDLYDLGEFNQKGTVRTKYGTRSQLQAAVTSLKNNGIQVYGDVVMNHKGGADATEMVRAVEVNPNNRNQEVTGEYTIEAWTRFDFPGRGNTHSSFKWRWYHFDGVDWDQSRRLNNRIYKFRGHGKAWDWEVDTEFGNYDYLMYADYDMDHPEVVNELRKWGVWYTNTLGLDGFRIDAVKHIKYSFTRDWINHVRSATGKNMFAVAEFWKNDLGAIENYLQKTNWNHSVFDVPLHYNLYNASKSGGNYDMRNIFNGTVVQRHPSHAVTFVDNHDSQPEEALESFVEEWFKPLAYALTLTREQGYPSVFYGDYYGIPTHGVPAMRSKIDPILEARQKYAYGPQHDYLDHPDVIGWTREGDSSHPKSGLATLITDGPGGSKRMYAGLKNAGETWYDITGNRSDTVKIGSDGWGEFHVNDGSVSIYVQK

SEQ ID NO: 27245 - protein, 485 aa, Synthetic construct
HHNGTNGTMMQYFEWYLPNDGNHWNRLNSDASNLKSKGITAVWIPPAWKGASQNDVGYGAYDLYDLGEFNQKGTVRTKYGTRSQLQAAVTSLKNNGIQVYGDVVMNHKGGADATEMVRAVEVNPNNRNQEVTGEYTIEAWTRFDFPGRGNTHSSFKWRWYHFDGVDWDQSRRLNNRIYKFRGHGKAWDWEVDDEFGNYDYLMYADIDMDHPEVVNELRNWGVWYTNTLGLDGFRIDAVKHIKYSFTRDWINHVRSATGKNMFAVAEFWKNDLGAIENYLQKTNWNHSVFDVPLHYNLYNASKSGGNYDMRNIFNGTVVQRHPSHAVTFVDNHDSQPEEALESFVEEWFKPLAYALTLTREQGYPSVFYGDYYGIPTHGVPAMRSKIDPILEARQKYAYGPQHDYLDHPDVIGWTREGDSSHPKSGLATLITDGPGGSKRMYAGLKNAGETWYDITGNRSDTVKIGSDGWGEFHVNDGSVSIYVQK

SEQ ID NO: 27246 - protein, 483 aa, Bacillus sp.
HHNGTNGTMMQYFEWYLPNDGNHWNRLNSDASNLKSKGITAVWIPPAWKATSQNDVGYGAYDLYDLGEFNQKGTVRTKYGTRSQLQAAVTSLKNNGIQVYGDVVMNHKGGADATEMVRAVEVNPNNRNQEVTGEYTIEAWTRFDFPGRGNTHSSFKWRWYHFDGVDWDQSRRTNNRIYKFRGKAWDWEVDTEFGNYDYLMYADYDMDHPEVVNELRNWGVWYTNTLGLDGFRIDAVKHIKYSFTRDWINHVRSATGKNMFAVAEFWKNDLGAIENYLQKTNWNHSVFDVPLHYNLYNASKSGGNYDMRNIFNGTVVQRHPSHAVTFVDNHDSQPEEALESFVEEWFKPLAYALTLTREQGYPSVFYGDYYGIPTHGVPAMRSKIDPILEARQKYAYGPQHDYLDHPDVIGWTREGDSSHPKSGLATLITDGPGGSKRMYAGLKNAGETWYDITGNRSDTVKIGSDGWGEFHVNDGSVSIYVQK

SEQ ID NO: 27247 - protein, 483 aa, Bacillus sp.
HHNGTNGTMMQYFEWYLPNDGNHWNRLNSDASNLKSKGITAVWIPPAWKGASQNDVGYGAYDLYDLGEFNQKGTVRTKYGTRSQLQAAVTSLKNNGIQVYGDVVMNHKGGADATEMVRAVEVNPNNRNQEVTGEYTIEAWTRFDFPGRGNTHSSFKWRWYHFDGVDWDQSRSLNNRIYKFRGKAWDWEVDTEFGNYDYLMYADYDMDHPEVVNELRNWGVWYTNTLGLDGFRIDAVKHIKYSFTRDWINHVRSATGKNMFAVAEFWKNDLGAIENYLQKTNWNHSVFDVPLHYNLYNASKSGGNYDMRNIFNGTVVQRHPSHAVTFVDNHDSQPEEALESFVEEWFKPLAYALTLTREQGYPSVFYGDYYGIPTHGVPAMRSKIDPILEARQKYAYGPQHDYLDHPDVIGWTREGDSSHPKSGLATLITDGPGGSKRMYAGLKNAGETWYDITGNRSDTVKIGSDGWGEFHVNDGSVSIYVQK

SEQ ID NO: 27248 - protein, 485 aa, Bacillus sp.
HHNGTNGTMMQYFEWYLPNDGNHWNRLNSDASNLKSKGITAVWIPPAWKGASQNDVGYGAYDLYDLGEFNQKGTVRTKYGTRSQLQAAVTSLKNNGIQVYGDVVMNHKGGADATEMVRAVEVNPNNRNQEVTGEYTIEAWTRFDFPGRGNTHSSFKWRWYHFDGVDWDQSRRLNNRIYKFRGHGKAWDWEVDTEFGNYDYLMYADYDMDHPEVVNELREWGVWYTNTLGLDGFRIDAVKHIKYSFTRDWINHVRSATGKNMFAVAEFWKNDLGAIENYLQKTNWNHSVFDVPLHYNLYNASKSGGNYDMRNIFNGTVVQRHPSHAVTFVDNHDSQPEEALESFVEEWFKPLAYALTLTREQGYPSVFYGDYYGIPTHGVPAMRSKIDPILEARQKYAYGPQHDYLDHPDVIGWTREGDSSHPKSGLATLITDGPGGSKRMYAGLKNAGETWYDITGNRSDTVKIGSDGWGEFHVNDGSVSIYVQK

SEQ ID NO: 27249 - protein, 485 aa, Synthetic construct
HHNGTNGTMMQYFEWYLPNDGNHWNRLNSDASNLKSKGITAVWIPPAWKGASQNDVGYGAYDLYDLGEFNQKGTVRTKYGTRSQLQAAVTSLKNNGIQVYGDVVMNHKGGADATEMVRAVEVNPNNRNQEVTGEYTIEAWTRFDFPGRGNTHSSFKWRWYHFDGVDWDQSRRLNNRIYKFRGHGKAWDWEVDTENGNYDYLMYADLDMDHPEVVNEVRNWGVWYTNTLGLDGFRIDAVKHIKYSFTRDWINHVRSATGKNMFAVAEFWKNDLGAIENYLQKTNWNHSVFDVPLHYNLYNASKSGGNYDMRNIFNGTVVQRHPSHAVTFVDNHDSQPEEALESFVEEWFKPLAYALTLTREQGYPSVFYGDYYGIPTHGVPAMRSKIDPILEARQKYAYGPQHDYLDHPDVIGWTREGDSSHPKSGLATLITDGPGGSKRMYAGLKNAGETWYDITGNRSDTVKIGSDGWGEFHVNDGSVSIYVQK

SEQ ID NO: 27250 - protein, 483 aa, Bacillus sp.
HHNGTNGTMMQYFEWYLPNDGNHWNRLNSDASNLKSKGITAVWIPPAWKGASQNDVGYGAYDLYDLGEFNQKGTVRTKYGTRSQLQAAVTSLKNNGIQVYGDVVMNHKGGADATEMVRAVEVNPNNRNQEVTGEYTIEAWTRFDFPGRGNTHSSFKWRWYHFDGVDWDQSRRLNNRIYKFRGKAWDWEVDTEFGNYDYLMYADYDMDHPEVVNELRNWGVWYTNTLGLDGFRIDAVKHIKYSFTRDWINHVRSATGKNMFAVAEFWKNDLGAIENYLQKTNWNHSVFDVPLHYNLYNASKSGGNYDMRNIFNGTVVQRHPSHAVTFVDNHDSQPEEALESFVEEWFKPLAYALTLTREQGYPSVFYGDYYGIPTHGVPAMRSKIDPILEARQKYAYGPQHDYLDHPDVIGWTREGDSSHPKSGLATLATDGPGGSKRMYAGLKNAGETWYDITGNRSDTVKIGSDGWGEFHVNDGSVSIYVQK

SEQ ID NO: 27251 - protein, 485 aa, Bacillus sp.
HHNGTNGTMMQYFEWYLPNDGNHWNRLNSDASNLKSKGITAVWIPPAWKATSQNDVGYGAYDLYDLGEFNQKGTVRTKYGTRSQLQAAVTSLKNNGIQVYGDVVMNHKGGADATEMVRAVEVNPNNRNQEVTGEYTIEAWTRFDFPGRGNTHSSFKWRWYHFDGVDWDQSRQLNNRIYKFRGHGKAWDWEVDTEFGNYDYLMYVDYDMDHPEVVNELRNWGVWYTNTLGLDGFRIDAVKHIKYSFTRDWINHVRSATGKNMFAVAEFWKNDLGAIENYLQKTNWNHSVFDVPLHYNLYNASKSGGNYDMRNIFNGTVVQRHPSHAVTFVDNHDSQPEEALESFVEEWFKPLAYALTLTREQGYPSVFYGDYYGIPTHGVPAMRSKIDPILEARQKYAYGPQHDYLDHPDVIGWTREGDSSHPKSGLATLITDGPGGSKRMYAGLKNAGETWYDITGNRSDTVKIGSDGWGEFHVNDGSVSIYVQK

SEQ ID NO: 27252 - protein, 485 aa, Bacillus sp.
HHNGTNGTMMQYFEWYLPNDGNHWNRLNSDASNLKSKGITAVWIPPAWKGASQNDVGYGAYDLYDLGEFNQKGTVRTKYGTRSQLQAAVTSLKNNGIQVYGDVVMNHKGGADATEMVRAVEVNPNNRNQEVTGEYTIEAWTRFDFPGRGNTHSSFKWRWYHFDGVDWDQSRRLNNRIYKFRGHGKAWDWEVDTEFGNYDYLMYADYDMDHPEVVNELRNWGVWYTNTLGLDGFRIDAVKHIKYSFTRDWINHVRSATGKNMFAVAEFWKNDLGAIENYLQKTNWNHSVFDVPLHYNLYNASQSGGNYDMRNIFNGTVVQRHPSHAVTFVDNHDSQPEEALESFVEEWFKPLAYALTLTREQGYPSVFYGDYYGIPTHGVPAMRSKIDPILEARQKYAYGPQHDYLDHPDVIGWTREGDSSHPKSGLATLITDGPGGSKRMYAGLKNAGETWYDITGNRSDTVKIGSDGWGEFHVNGASVSIYVQK

SEQ ID NO: 27253 - protein, 485 aa, Bacillus sp.
HHNGTNGTMMQYFEWYLPNDGNHWNRLNSDASNLKSKGITAVWIPPAWKGASQNDVGYGAYDLYDLGEFNQKGTVRTKYGTRSQLQAAVTSLKNNGIQVYGDVVMNHKGGADATEMVRAVEVNPNNRNQEVTGEYTIEAWTRFDFPGRGNTHSSFKWRWYHFDGVDWDQSRRLNNRIYKFRGHGKAWDWEVDTEFGNYDYLMYADYDMDHPEVVNELRNWGVWYTNTLGLDGFRIDAVKHIKYSFTRDWINHVRSATGKNMFAVAEFWKNDLGAIENYLQKTNWNHSVFDVPLHYNLYNASKSGGNYDMRNIFNGTVVQMHPMQAVTFVDNHDSQPEEALESFVEEWFKPLAYALTLTREQGYPSVFYGDYYGIPTHGVPAMRSKIDPILEARQKYAYGPQHDYLDHPDVIGWTREGDSSHPKSGLATLITDGPGGSKRMYAGLKNAGETWYDITGNRSDTVKIGSDGWGEFHVNDGSVSIYVQK

SEQ ID NO: 27254 - protein, 483 aa, Synthetic construct
HHNGTNGTMMQYFEWYLPNDGNHWNRLNSDASNLKSKGITAVWIPPAWKGASQNDVGYGAYDLYDLGEFNQKGTVRTKYGTRSQLQAAVTSLKNNGIQVYGDVVMNHKGGADATEMVRAVEVNPNNRNQEVTGEYTIEAWTRFDFPGRGNTHSSFKWRWYHFDGVDWDQSRRLNNRIYKFRGKAWDWEVDTENGNYDYLMYADIDMDHPLVVNELRNWGVWYTNTLGLDGFRIDAVKHIKYSFTRDWINHVRSATGKNMFAVAEFWKNDLGAIENYLQKTNWNHSVFDVPLHYNLYNASKSGGNYDMRNIFNGTVVQRHPSHAVTFVDNHDSQPEEALESFVEEWFKPLAYALTLTREQGYPSVFYGDYYGIPTHGVPAMRSKIDPILEARQKYAYGPQHDYLDHPDVIGWTREGDSSHPKSGLATLITDGPGGSKRMYAGLKNAGETWYDITGNRSDTVKIGSDGWGEFHVNDGSVSIYVQK

SEQ ID NO: 27255 - protein, 485 aa, Bacillus sp.
HHNGTNGTMMQYFEWYLPNDGNHWNRLNSDASNLKSKGITAVWIPPAWKGASQNDVGYGAYDLYDLGEFNQKGTVRTKYGTRSQLQAAVTSLKNNGIQVYGDVVMNHKGGADATEMVRAVEVNPNNRNQEVTGEYTIEAWTRFDFPGRGNTHSSFKWRWYHFDGVDWDQSRRLNNRIYKFRGHGKAWDWEVDTEFGNYDYLMYADYDMDHPEVVNELRNWGVWYTNTLGLDGFRIDAVKHIKYSFTRDWINHVRSATGKNMFAVAEFWKNDLGAIENYLQKTNWNHSVFDVPLHYNLYNASKSGGNYDMRNIFNGTVVQRHPQHAVTFVDNHDSQPEEALESFVEEWFKPLAYALTLTREQGYPSVFYGDYYGIPTHGVPAMRSKIDPILEARQKYAYGPQHDYLDHPDVIGWTREGDSSHPKSGLATLITDGPGGSKRMYAGLKNAGETWYDITGNRSDTVKIGSDGWGEFHVNDGSVSIYVQK

SEQ ID NO: 27256 - protein, 483 aa, Bacillus sp.
HHNGTNGTMMQYFEWYLPNDGNHWNRLNSDASNLKSKGITAVWIPPAWKGASQNDVGYGAYDLYDLGEFNQKGTVRTKYGTRSQLQAAVTSLKNNGIQVYGDVVMNHKGGADATEMVRAVEVNPNNRNQEVTGEYTIEAWTRFDFPGRGNTHSSFKWRWYHFDGVDWDQSREFDNRIYKFRGKAWDWEVDTEFGNYDYLMYADYDMDHPEVVNELRNWGVWYTNTLGLDGFRIDAVKHIKYSFTRDWINHVRSATGKNMFAVAEFWKNDLGAIENYLQKTNWNHSVFDVPLHYNLYNASKSGGNYDMRNIFNGTVVQRHPSHAVTFVDNHDSQPEEALESFVDEWFKPLAYALTLTREQGYPSVFYGDYYGIPTHGVPAMRSKIDPILEARQKYAYGPQHDYLDHPDVIGWTREGDSSHPKSGLATLITDGPGGSKRMYAGLKNAGETWYDITGNRSDTVKIGSDGWGEFHVNKSSVSIYVQK

SEQ ID NO: 27257 - protein, 485 aa, Bacillus sp.
HHNGTNGTMMQYFEWYLPNDGNHWNRLNSDASNLKSKGITAVWIPPAWKGASQNDVGYGAYDLYDLGEFNQKGTVRTKYGTRSQLQAAVTSLKNNGIQVYGDVVMNHKGGADATEMVRAVEVNPNNRNQEVTGEYTIEAWTRFDFPGRGNTHSSFKWRWYHFDGVDWDQSRNFQNRIYKFRGHGKAWDWEVDTEFGNYDYLMYADYDMDHPEVVNELRNWGVWYTNTLGLDGFRIDAVKHIKYSFTRDWINHVRSATGKNMFAVAEFWKNDLGAIENYLQKTNWNHSVFDVPLHYNLYNASKSQGNYDMRNIFNGTVVQAHPNHAVTFVDNHDSQPEEALESFVDTWFKPLAYALTLTREQGYPSVFYGDYYGIPTHGVPAMRSKIDPILEARQKYAYGPQHDYLDHPDVIGWTREGDSSHPKSGLATLITDGPGGSKRMYAGLKNAGETWYDITGNRSDTVKIGSDGWGEFHVNGSSVSIYVQK

SEQ ID NO: 27258 - protein, 485 aa, Synthetic construct
HHNGTNGTMMQYFEWYLPNDGNHWNRLNSDASNLKSKGITAVWIPPAWKGASQNDVGYGAYDLYDLGEFNQKGTVRTKYGTRSQLQAAVTSLKNNGIQVYGDVVMNHKGGADATEMVRAVEVNPNNRNQEVTGEYTIEAWTRFDFPGRGNTHSSFKWRWYHFDGVDWDQSRRLNNRIYKFRGHGKAWDWEVDTENGNYDYLMYADIDMDHPEVVNELRNWGVWYTNTLGLDGFRIDAVKHIKYSFTRDWINHVRSATGKNMFAVAEFWKNDLGAIENYLQKTNWNHSVFDVPLHYNLYNASKSGGNYDMRNIFNGTVVQRHPSHAVTFVDNHDSQPEQALESFVEEWFKPLAYALTLTREQGYPSVFYGDYYGIPTHGVPAMRSKIDPILEARQKYAYGPQHDYLDHPDVIGWTREGDSSHPKSGLATLITDGPGGSKRMYAGLKNAGETWYDITGNRSDTVKIGSDGWGEFHVNDGSVSIYVQK

SEQ ID NO: 27259 - protein, 485 aa, Synthetic construct
HHNGTNGTMMQYFEWYLPNDGQHWNRLNSDASNLKSKGITAVWIPPAWKGASQNDVGYGAYDLYDLGEFNQKGTVRTKYGTRSQLQAAVTSLKNNGIQVYGDVVMNHKGGADATEMVRAVEVNPNNRNQEVTGEYTIEAWTRFDFPGRGNTHSSFKWRWYHFDGVDWDQSRRLNNRIYKFRGHGKAWDWEVDTENGNYDYLMYADIDMDHPEVVNELRNWGVWYTNTLGLDGFRIDAVKHIKYSFTRDWINHVRSATGKNMFAVAEFWKNDLGAIENYLQKTNWNHSVFDVPLHYNLYNASKSGGNYDMRNIFNGTVVQRHPSHAVTFVDNHDSQPEEALESFVEEWFKPLAYALTLTREQGYPSVFYGDYYGIPTHGVPAMRSKIDPILEARQKYAYGPQHDYLDHPDVIGWTREGDSSHPKSGLATLITDGPGGSKRMYAGLKNAGETWYDITGNRSDTVKIGSDGWGEFHVNDGSVSIYVQK

SEQ ID NO: 27260 - protein, 483 aa, Bacillus sp.
HHNGTNGTMMQYFEWYLPNDGNHWNRLNSDASNLKSKGITAVWIPPAWKGASQNDVGYGAYDLYDLGEFNQKGTVRTKYGTRSQLQAAVTSLKNNGIQVYGDVVMNHKGGADATEMVRAVEVNPNNRNQEVTGEYTIEAWTRFDFPGRGNTHSSFKWRWYHFDGVDWDQSRRLNNRIYKFRGKAWDWEVDTEFGNYDYLMYADYDMDHPEVVNELRNWGVWYTNTLGLDGFRIDAVKHIKYSFTRDWINHVRSATGKNMFAVAEFWKNDLGAIENYLQKTNWNHSVFDVPLHYNLYNASKSGGNYDMRNIFNGTVVQVHPSHAVTFVDNHDSQPEEALESFVEEWFKPLAYALTLTREQGYPSVFYGDYYGIPTHGVPAMRSKIDPILEARQKYAYGPQHDYLDHPDVIGWTREGDSSHPKSGLATLITDGPGGSKRMYAGLKNAGETWYDITGNRSDTVKIGSDGWGEFHVNYGSVSIYVQK

SEQ ID NO: 27261 - protein, 485 aa, Bacillus sp.
HHNGTNGTMMQYFEWYLPNDGNHWNRLNSDASNLKSKGITAVWIPPAWKGASQNDVGYGAYDLYDLGEFNQKGTVRTKYGTRSQLQAAVTSLKNNGIQVYGDVVMNHKGGADATEMVRAVEVNPNNRNQEVTGEYTIEAWTRFDFPGRGNTHSSFKWRWYHFDGVDWDQSRRLLNRIYKFRGHGKAWDWEVDTEFGNYDYLMYADYDMDHPEVVNELRNWGVWYTNTLGLDGFRIDAVKHIKYSFTRDWINHVRSATGKNMFAVAEFWKNDLGAIENYLQKTNWNHSVFDVPLHYNLYNASKSGGNYDMRNIFNGTVVQRHPSHAVTFVDNHDSQPEEALESFVEEWFKPLAYALTLTREQGYPSVFYGDYYGIPTHGVPAMRSKIDPILEARQKYAYGPQHDYLDHPDVIGWTREGDSSHPKSGLATLITDGPGGSKRMYAGLKNAGETWYDITGNRSDTVKIGSDGWGEFHVNDGSVSIYVQK

SEQ ID NO: 27262 - protein, 483 aa, Synthetic construct
HHNGTNGTMMQYFEWYLPNDGNHWNRLNSDASNLKSKGITAVWIPPAWKGASQNDVGYGAYDLYDLGEFNQKGTVRTKYGTRSQLQAAVTSLKNNGIQVYGDVVMNHKGGADATEMVRAVEVNPNNRNQEVTGEYTIEAWTRFDFPGRGNTHSSFKWRWYHFDGVDWDQSRRLNNRIYKFRGKAWDWEVDTENGNYDYLMYADIDMDHAEVVNELRNWGVWYTNTLGLDGFRIDAVKHIKYSFTRDWINHVRSATGKNMFAVAEFWKNDLGAIENYLQKTNWNHSVFDVPLHYNLYNASKSGGNYDMRNIFNGTVVQRHPSHAVTFVDNHDSQPEEALESFVEEWFKPLAYALTLTREQGYPSVFYGDYYGIPTHGVPAMRSKIDPILEARQKYAYGPQHDYLDHPDVIGWTREGDSSHPKSGLATLITDGPGGSKRMYAGLKNAGETWYDITGNRSDTVKIGSDGWGEFHVNDGSVSIYVQK

SEQ ID NO: 27263 - protein, 483 aa, Bacillus sp.
HHNGTNGTMMQYFEWYLPNDGNHWNRLNSDASNLKSKGITAVWIPPAWKAASQNDVGYGAYDLYDLGEFNQKGTVRTKYGTRSQLQAAVTSLKNNGIQVYGDVVMNHKGGADATEMVRAVEVNPNNRNQEVTGEYTIEAWTRFDFPGRGNTHSSFKWRWYHFDGVDWDQSRDLQNRIYKFRGKAWDWEVDTEFGNYDYLMYADYDMDHPEVVNELRNWGVWYTNTLGLDGFRIDAVKHIKYSFTRDWINHVRSATGKNMFAVAEFWKNDLGAIENYLQKTNWNHSVFDVPLHYNLYNASKSGGNYDMRNIFNGTVVQVHPSHAVTFVDNHDSQPEEALESFVEEWFKPLAYALTLTREQGYPSVFYGDYYGIPTHGVPAMRSKIDPILEARQKYAYGPQHDYLDHPDVIGWTREGDSSHPKSGLATLITDGPGGSKRMYAGLKNAGETWYDITGNRSDTVKIGSDGWGEFHVNYGSVSIYVQK

SEQ ID NO: 27264 - protein, 483 aa, Bacillus sp.
HHNGTNGTMMQYFEWYLPNDGNHWNRLNSDASNLKSKGITAVWIPPAWKGASQNDVGYGAYDLYDLGEFNQKGTVRTKYGTRSQLQAAVTSLKNNGIQVYGDVVMNHKGGADATEMVRAVEVNPNNRNQEVTGEYTIEAWTRFDFPGRGNTHSSFKWRWYHFDGVDWDQSRRLNNRIYKFRGKAWDWEVDTEFGNYDYLMYADYDMDHPEVVNELRNWGVWYTNTLGLDGFRIDAVKHIKYSFTRDWINHVRSATGKNMFAVAEFWKNDLGAIENYLQKTNWNHSVFDVPLHYNLYNASKSGGNYDMRNIFNGTVVQAHPMQAVTFVDNHDSQPEEALESFVEEWFKPLAYALTLTREQGYPSVFYGDYYGIPTHGVPAMRSKIDPILEARQKYAYGPQHDYLDHPDVIGWTREGDSSHPKSGLATLITDGPGGSKRMYAGLKNAGETWYDITGNRSDTVKIGSDGWGEFHVNDGSVSIYVQK

SEQ ID NO: 27265 - protein, 485 aa, Synthetic construct
HHNGTNGTMMQYFEWYLPNDGNHWNRLNSDASNLKSKGITAVWIPPAWKGASQNDVGYGAYDLYDLGEFNQKGTVRTKYGTRSQLQAAVTSLKNNGIQVYGDVVMNHKGGADATEMVRAVEVNPNNRNQEVTGEYTIEAWTRFDFPGRGNTHSSFKWRWYHFDGVDWDQSRRLNNRIYKFRGHGKAWDWEVDTENGNYDYLMYADIDMDHPEVVNELRNWGVWYTNTLGLDGFRIDAVKHIKYSFTRDWINHVRSATGKNMFAVAEFWKNDLGAIENYLQKTNWNHSVFDVPLHYNLYNASKSGGNYDMRNIFNGTVVQRHPSHAVTFVDNHDSQPEEALESFVEEWFKPLAYALTLTREQGYPSVFYGDYYGIPTHGVPALRSKIDPILEARQKYAYGPQHDYLDHPDVIGWTREGDSSHPKSGLATLITDGPGGSKRMYAGLKNAGETWYDITGNRSDTVKIGSDGWGEFHVNDGSVSIYVQK

SEQ ID NO: 27266 - protein, 483 aa, Bacillus sp.
HHNGTNGTMMQYFEWYLPNDGNHWNRLNSDASNLKSKGITAVWIPPAWKGASQNDVGYGAYDLYDLGEFNQKGTVRTKYGTRSQLQAAVTSLKNNGIQVYGDVVMNHKGGADATEMVRAVEVNPNNRNQEVTGEYTIEAWTRFDFPGRGNTHSSFKWRWYHFDGVDWDQSRRLNNRIYKFRGKAWDWEVDTEFGNYDYLMYADYDMDHPEVVNELRNWGVWYTNTLGLDGFRIDAVKHIKYSFTRDWINHVRSATGKNMFAVAEFWKNDLGAIENYLRKTNWNHSVFDVPLHYNLYNASKSGGNYDMRNIFNGTVVQRHPSHAVTFVDNHDSQPEEALESFVEEWFKPLAYALTLTREQGYPSVFYGDYYGIPTHGVPAMRSKIDPILEARQKYAYGPQHDYLDHPDVIGWTREGDSSHPKSGLATLITDGPGGSKRMYAGLKNAGETWYDITGNRSDTVKIGSDGWGEFHVNDGSVSIYVQK

SEQ ID NO: 27267 - protein, 485 aa, Synthetic construct
HHNGTNGTMMQYFEWYLPNDGNHWNRLNSDASNLKSKGITAVWIPPAWKGASQNDVGYGAYDLYDLGEFNQKGTVRTKYGTRSQLQAAVTSLKNNGIQVYGDVVMNHKGGADATEMVRAVEVNPNNRNQEVTGEYLIEAWTRFDFPGRGNTHSSFKWRWYHFDGVDWDQSRRLNNRIYKFRGHGKAWDWEVDTENGNYDYLMYADIDMDHPEVVNELRNWGVWYTNTLGLDGFRIDAVKHIKYSFTRDWINHVRSATGKNMFAVAEFWKNDLGAIENYLQKTNWNHSVFDVPLHYNLYNASKSGGNYDMRNIFNGTVVQRHPSHAVTFVDNHDSQPEEALESFVEEWFKPLAYALTLTREQGYPSVFYGDYYGIPTHGVPAMRSKIDPILEARQKYAYGPQHDYLDHPDVIGWTREGDSSHPKSGLATLITDGPGGSKRMYAGLKNAGETWYDITGNRSDTVKIGSDGWGEFHVNDGSVSIYVQK

SEQ ID NO: 27268 - protein, 485 aa, Synthetic construct
HHNGTNGTMMQYFEWYLPNDGNHWNRLNSDASNLKSKGITAVWIPPAWKGASQNDVGYGAYDLYDLGEFNQKGTVRTKYGTRSQLQAAVTSLKNNGIQVYGDVVMNHKGGADATEMVRAVEVNPNNRNQEVTGEYTIEAWTRFDFPGRGNTHSSFKWRWYHFDGVDWDQSRRLNNRIYKFRGHGKAWDWEVDTENGNYDYLMYADIDMDHPEVVNELRNWGVWYTNTLGLDGFRIDAVKHIKYSFTRDWINHVRSATGKNMFAVAEFWKNDLGAIENYLQKTNWNHSVFDVPLHYNLYNASKSGGNYDMRNIFNGTVVQRHPSHAVTFVDNHDSQPEEALESFVEEWFKPLAYALTLTREQGYPSVFYGDYYGIPTHGVPAMRSKIDPILEARQKYAYGPQHDYLDHPDVIGWTREGDSSHPKSGLATLITDGPGGSKRMYAGLKNAGETWYDITGNRSDPVKIGSDGWGEFHVNDGSVSIYVQK

SEQ ID NO: 27269 - protein, 483 aa, Bacillus sp.
HHNGTNGTMMQYFEWYLPNDGNHWNRLNSDASNLKSKGITAVWIPPAWKAASQNDVGYGAYDLYDLGEFNQKGTVRTKYGTRSQLQAAVTSLKNNGIQVYGDVVMNHKGGADATEMVRAVEVNPNNRNQEVTGEYTIEAWTRFDFPGRGNTHSSFKWRWYHFDGVDWDQSRRLQNRIYKFRGKAWDWEVDTEFGNYDYLMYADYDMDHPEVVNELRNWGVWYTNTLGLDGFRIDAVKHIKYSFTRDWINHVRSATGKNMFAVAEFWKNDLGAIENYLQKTNWNHSVFDVPLHYNLYNASKSGGNYDMRNIFNGTVVQRHPSHAVTFVDNHDSQPEEALESFVEEWFKPLAYALTLTREQGYPSVFYGDYYGIPTHGVPAMRSKIDPILEARQKYAYGPQHDYLDHPDVIGWTREGDSSHPKSGLATLITDGPGGSKRMYAGLKNAGETWYDITGNRSDTVKIGSDGWGEFHVNDGSVSIYVQK

SEQ ID NO: 27270 - protein, 485 aa, Synthetic construct
HHNGTNGTMMQYFEWYLPNDGNHWNRLNSDASNLKSKGITAVWIPPAWKGASQNDVGYGAYDLYDLGEFNQKGTVRTKYGTRSQLQAAVTSLKNNGIQVYGDVVMNHKGGADATEMVRAVEVNPNNRNQEVTGEYTIEAWTRFDFPGRGNTHSSFKWRWYHFDGVDWDQSRRLNNRIYKFRGHGKAWDWEVDTENGNYDYLMYADIDMDHPEVVNELRNWGVWYTNTLGLDGFRLDAVKHIKYSFTRDWINHVRSATGKNMFAVAEFWKNDLGAIENYLQKTNWNHSVFDVPLHYNLYNASKSGGNYDMRNIFNGTVVQRHPSHAVTFVDNHDSQPEEALESFVEEWFKPLAYALTLTREQGYPSVFYGDYYGIPTHGVPAMRSKIDPILEARQKYAYGPQHDYLDHPDVIGWTREGDSSHPKSGLATLITDGPGGSKRMYAGLKNAGETWYDITGNRSDTVKIGSDGWGEFHVNDGSVSIYVQK

SEQ ID NO: 27271 - protein, 483 aa, Synthetic construct
HHNGTNGTMMQYFEWYLPNDGNHWNRLNSDASNLKSKGITAVWIPPAWKGASQNDVGYGAYDLYDLGEFNQKGTVRTKYGTRSQLQAAVTSLKNNGIQVYGDVVMNHKGGADATEMVRAVEVNPNNRNQEVTGEYTIEAWTRFDFPGRGNTHSSFKWRWYHFDGVDWDQSRRLNNRIYKFRGKAWDWPVDTENGNYDYLMYADIDMDHPEVVNELRNWGVWYTNTLGLDGFRIDAVKHIKYSFTRDWINHVRSATGKNMFAVAEFWKNDLGAIENYLQKTNWNHSVFDVPLHYNLYNASKSGGNYDMRNIFNGTVVQRHPSHAVTFVDNHDSQPEEALESFVEEWFKPLAYALTLTREQGYPSVFYGDYYGIPTHGVPAMRSKIDPILEARQKYAYGPQHDYLDHPDVIGWTREGDSSHPKSGLATLITDGPGGSKRMYAGLKNAGETWYDITGNRSDTVKIGSDGWGEFHVNDGSVSIYVQK

SEQ ID NO: 27272 - protein, 483 aa, Synthetic construct
HHNGTNGTMMQYFEWYLPNDGNHWNRLNSDASNLKSKGITAVWIPPAWKGASQNDVGYGAYDLYDLGEFNQKGTVRTKYGTRSQLQAAVTSLKNNGIQVYGDVVMNHKGGADATEMVRAVEVNPNNRCQEVTGEYTIEAWTRFDFPGRGNTHSSFKWRWYHFDGVDWDQSRRLNNRIYKFRGKAWDWEVDTENGNYDYLMYADIDMDHPEVVNELRNWGVWYTNTLGLDGFRIDAVKHIKYSFTRDWINHVRSATGKNMFAVAEFWKNDLGAIENYLQKTNWNHSVFDVPLHYNLYNASKSGGNYDMRNIFNGTVVQRHPSHAVTFVDNHDSQPEEALESFVEEWFKPLAYALTLTREQGYPSVFYGDYYGIPTHGVPAMRSKIDPILEARQKYAYGPQHDYLDHPDVIGWTREGDSSHPKSGLATLITDGPGGSKRMYAGLKNAGETWYDITGNRSDTVKIGSDGWGEFHVNDGSVSIYVQK

SEQ ID NO: 27273 - protein, 485 aa, Bacillus sp.
HHNGTNGTMMQYFEWYLPNDGNHWNRLNSDASNLKSKGITAVWIPPAWKAASQNDVGYGAYDLYDLGEFNQKGTVRTKYGTRSQLQAAVTSLKNNGIQVYGDVVMNHKGGADATEMVRAVEVNPNNRNQEVTGEYTIEAWTRFDFPGRGNTHSSFKWRWYHFDGVDWDQSRRFQNRIYKFRGHGKAWDWEVDTEFGNYDYLMYVDYDMDHPEVVNELRNWGVWYTNTLGLDGFRIDAVKHIKYSFTRDWINHVRSATGKNMFAVAEFWKNDLGAIENYLQKTNWNHSVFDVPLHYNLYNASKSGGNYDMRNIFNGTVVQRHPSHAVTFVDNHDSQPEEALESFVEEWFKPLAYALTLTREQGYPSVFYGDYYGIPTHGVPAMRSKIDPILEARQKYAYGPQHDYLDHPDVIGWTREGDSSHPKSGLATLITDGPGGSKRMYAGLKNAGETWYDITGNRSDTVKIGSDGWGEFHVNDGSVSIYVQK

SEQ ID NO: 27274 - protein, 483 aa, Bacillus sp.
HHNGTNGTMMQYFEWYLPNDGNHWNRLNSDASNLKSKGITAVWIPPAWKGASQNDVGYGAYDLYDLGEFNQKGTVRTKYGTRSQLQAAVTSLKNNGIQVYGDVVMNHKGGADATEMVRAVEVNPNNRNQEVTGEYTIEAWTRFDFPGRGNTHSSFKWRWYHFDGVDWDQSRRLNNRIYKFRGKAWDWEVDTEFGNYDYLMYADYDMDHPEVVNELRNWGVWYTNTLGLDGFRIDAVKHIKYSFTRDWINHVRSATGKNMFAVAEFWKNDLGAIENYLQKTNWNHSVFDVPLHYNLYNASKSGGNYDMRNIFNGTVVQRHPSHAVTFVDNHDSQPEEALESFVEEWFKPLAYALTLTREQGYPSVFYGDYYGIPTHGVPAMRSKIDPILEARQKYAYGPQHDYLDHPDVIGWTREGDSSHPRSGLATLITDGPGGSKRMYAGLKNAGETWYDITGNRSDTVKIGSDGWGEFHVNDGSVSIYVQK

SEQ ID NO: 27275 - protein, 483 aa, Bacillus sp.
HHNGTNGTMMQYFEWYLPNDGNHWNRLNSDASNLKSKGITAVWIPPAWKAASQNDVGYGAYDLYDLGEFNQKGTVRTKYGTRSQLQAAVTSLKNNGIQVYGDVVMNHKGGADATEMVRAVEVNPNNRNQEVTGEYTIEAWTRFDFPGRGNTHSSFKWRWYHFDGVDWDQSRDLQNRIYKFRGKAWDWEVDTEFGNYDYLMYADYDMDHPEVVNELRNWGVWYTNTLGLDGFRIDAVKHIKYSFTRDWINHVRSATGKNMFAVAEFWKNDLGAIENYLQKTNWNHSVFDVPLHYNLYNASKSGGNYDMRNIFNGTVVQAHPNHAVTFVDNHDSQPEEALESFVEEWFKPLAYALTLTREQGYPSVFYGDYYGIPTHGVPAMRSKIDPILEARQKYAYGPQHDYLDHPDVIGWTREGDSSHPKSGLATLITDGPGGSKRMYAGLKNAGETWYDITGNRSDTVKIGSDGWGEFHVNDGSVSIFVQK

SEQ ID NO: 27276 - protein, 483 aa, Bacillus sp.
HHNGTNGTMMQYFEWYLPNDGNHWNRLNSDASNLKDKGITAVWIPPAWKGASQNDVGYGAYDLYDLGEFNQKGTVRTKYGTRSQLQAAVTSLKNNGIQVYGDVVMNHKGGADATEMVRAVEVNPNNRNQEVTGEYTIEAWTRFDFPGRGNTHSSFKWRWYHFDGVDWDQSRRLNNRIYKFRGKAWDWEVDTEFGNYDYLMYADYDMDHPEVVNELRNWGVWYTNTLGLDGFRIDAVKHIKYSFTRDWINHVRSATGKNMFAVAEFWKNDLGAIENYLQKTNWNHSVFDVPLHYNLYNASKSGGNYDMRNIFNGTVVQRHPSHAVTFVDNHDSQPEEALESFVEEWFKPLAYALTLTREQGYPSVFYGDYYGIPTHGVPAMRSKIDPILEARQKYAYGPQHDYLDHPDVIGWTREGDSSHPKSGLATLITDGPGGSKRMYAGLKNAGETWYDITGNRSDTVKIGSDGWGEFHVNDGSVSIYVQK

SEQ ID NO: 27277 - protein, 485 aa, Synthetic construct
HHNGTNGTMMQYFEWYLPNDGNHWNRLNSDASNLKSKGITAVWIPPAWKGASQNDVGYGAYDLYDLGEFNQKGTVRTKYGTRSQLQAAVTSLKNNGIQVYGDVVMNHKGGADATEMVRAVEVNPNNRNQEVTGEYTIEAWTRFDFPGRGNTHSSFKWRWYHFDGVDWDQSRRLNNRIYKFRGHGKAWDWEVDTENGNYDYLMYADIDMDHPEVVNELRNWGVWYTNTLGLDGFRIDAVKHIKYSFTRDWINHVRSATGKNMFAVAEFWKNDLGAIENYLQKTNWNHSVFDVPLHYNLYNASKSGGYYDMRNIFNGTVVQRHPSHAVTFVDNHDSQPEEALESFVEEWFKPLAYALTLTREQGYPSVFYGDYYGIPTHGVPAMRSKIDPILEARQKYAYGPQHDYLDHPDVIGWTREGDSSHPKSGLATLITDGPGGSKRMYAGLKNAGETWYDITGNRSDTVKIGSDGWGEFHVNDGSVSIYVQK

SEQ ID NO: 27278 - protein, 485 aa, Synthetic construct
HHNGTNGTMMQYFEWYLPNDGNHWNRLNSDASNLKSKGITAVWIPPAWKGASQNDVGYGAYDLYDLGEFNQKGTVRTKYGTRSQLQAAVTSLKNNGINVYGDVVMNHKGGADATEMVRAVEVNPNNRNQEVTGEYTIEAWTRFDFPGRGNTHSSFKWRWYHFDGVDWDQSRRLNNRIYKFRGHGKAWDWEVDTENGNYDYLMYADIDMDHPEVVNELRNWGVWYTNTLGLDGFRIDAVKHIKYSFTRDWINHVRSATGKNMFAVAEFWKNDLGAIENYLQKTNWNHSVFDVPLHYNLYNASKSGGNYDMRNIFNGTVVQRHPSHAVTFVDNHDSQPEEALESFVEEWFKPLAYALTLTREQGYPSVFYGDYYGIPTHGVPAMRSKIDPILEARQKYAYGPQHDYLDHPDVIGWTREGDSSHPKSGLATLITDGPGGSKRMYAGLKNAGETWYDITGNRSDTVKIGSDGWGEFHVNDGSVSIYVQK

SEQ ID NO: 27279 - protein, 485 aa, Synthetic construct
HHNGTNGTMMQYFEWYLPNDGNHWNRLNSDAANLKSKGITAVWIPPAWKGASQNDVGYGAYDLYDLGEFNQKGTVRTKYGTRSQLQAAVTSLKNNGIQVYGDVVMNHKGGADATEMVRAVEVNPNNRNQEVTGEYTIEAWTRFDFPGRGNTHSSFKWRWYHFDGVDWDQSRRLNNRIYKFRGHGKAWDWEVDTENGNYDYLMYADIDMDHPEVVNELRNWGVWYTNTLGLDGFRIDAVKHIKYSFTRDWINHVRSATGKNMFAVAEFWKNDLGAIENYLQKTNWNHSVFDVPLHYNLYNASKSGGNYDMRNIFNGTVVQRHPSHAVTFVDNHDSQPEEALESFVEEWFKPLAYALTLTREQGYPSVFYGDYYGIPTHGVPAMRSKIDPILEARQKYAYGPQHDYLDHPDVIGWTREGDSSHPKSGLATLITDGPGGSKRMYAGLKNAGETWYDITGNRSDTVKIGSDGWGEFHVNDGSVSIYVQK

SEQ ID NO: 27280 - protein, 483 aa, Bacillus sp.
HHNGTNGTMMQYFEWYLPNDGNHWNRLNSDASNLKSKGITAVWIPPAWKGASQNDVGYGAYDLYDLGEFNQKGTVRTKYGTRSQLQAAVTSLKNNGIQVYGDVVMNHKGGADATEMVRAVEVNPNNRNQEVTGEYTIEAWTRFDFPGRGNTHSSFKWRWYHFDGVDWDQSRRVNNRIYKFRGKAWDWEVDTEFGNYDYLMYADYDMDHPEVVNELRNWGVWYTNTLGLDGFRIDAVKHIKYSFTRDWINHVRSATGKNMFAVAEFWKNDLGAIENYLQKTNWNHSVFDVPLHYNLYNASKSGGNYDMRNIFNGTVVQRHPSHAVTFVDNHDSQPEEALESFVEEWFKPLAYALTLTREQGYPSVFYGDYYGIPTHGVPAMRSKIDPILEARQKYAYGPQHDYLDHPDVIGWTREGDSSHPKSGLATLITDGPGGSKRMYAGLKNAGETWYDITGNRSDTVKIGSDGWGEFHVNDGSVSIYVQK

SEQ ID NO: 27281 - protein, 483 aa, Bacillus sp.
HHNGTNGTMMQYFEWYLPNDGNHWNRLNSDASNLKSKGITAVWIPPAWKGASQNDVGYGAYDLYDLGEFNQKGTVRTKYGTRSQLQAAVTSLKNNGIQVYGDVVMNHKGGADATEMVRAVEVNPNNRNQEVTGEYTIEAWTRFDFPGRGNTHSSFKWRWYHFDGVDWDQSRDLDNRIYKFRGKAWDWEVDTEFGNYDYLMYADYDMDHPEVVNELRNWGVWYTNTLGLDGFRIDAVKHIKYSFTRDWINHVRSATGKNMFAVAEFWKNDLGAIENYLQKTNWNHSVFDVPLHYNLYNASKSGGNYDMRNIFNGTVVQRHPSHAVTFVDNHDSQPEEALESFVEEWFKPLAYALTLTREQGYPSVFYGDYYGIPTHGVPAMRSKIDPILEARQKYAYGPQHDYLDHPDVIGWTREGDSSHPKSGLATLITDGPGGSKRMYAGLKNAGETWYDITGNRSDTVKIGSDGWGEFHVNDGSVSIYVQK

SEQ ID NO: 27282 - protein, 485 aa, Synthetic construct
HHNGTNGTMMQYFEWYLPNDGNHWNRLNSDASNLKSKGITAVWIPPAWKGASQNDVGYGAYDLYDLGEFNQKGTVRTKYGTRSQLQAAVTSLHNNGIQVYGDVVMNHKGGADATEMVRAVEVNPNNRNQEVTGEYTIEAWTRFDFPGRGNTHSSFKWRWYHFDGVDWDQSRRLNNRIYKFRGHGKAWDWEVDTENGNYDYLMYADIDMDHPEVVNELRNWGVWYTNTLGLDGFRIDAVKHIKYSFTRDWINHVRSATGKNMFAVAEFWKNDLGAIENYLQKTNWNHSVFDVPLHYNLYNASKSGGNYDMRNIFNGTVVQRHPSHAVTFVDNHDSQPEEALESFVEEWFKPLAYALTLTREQGYPSVFYGDYYGIPTHGVPAMRSKIDPILEARQKYAYGPQHDYLDHPDVIGWTREGDSSHPKSGLATLITDGPGGSKRMYAGLKNAGETWYDITGNRSDTVKIGSDGWGEFHVNDGSVSIYVQK

SEQ ID NO: 27283 - protein, 483 aa, Synthetic construct
HHNGTNGTMMQYFEWYLPNDGNHWNRLNSDASNLKSKGITAVWIPPAWKGASQNDVGYGAYDLYDLGEFNQKGTVRTKYGTRSQLQAAVTSLKNNGIQVYGDVVMNHKGGADLTEMVRAVEVNPNNRNQEVTGEYTIEAWTRFDFPGRGNTHSSFKWRWYHFDGVDWDQSRRLNNRIYKFRGKAWDWEVDTENGNYDYLMYADIDMDHPEVVNELRNWGVWYTNTLGLDGFRIDAVKHIKYSFTRDWINHVRSATGKNMFAVAEFWKNDLGAIENYLQKTNWNHSVFDVPLHYNLYNASKSGGNYDMRNIFNGTVVQRHPSHAVTFVDNHDSQPEEALESFVEEWFKPLAYALTLTREQGYPSVFYGDYYGIPTHGVPAMRSKIDPILEARQKYAYGPQHDYLDHPDVIGWTREGDSSHPKSGLATLITDGPGGSKRMYAGLKNAGETWYDITGNRSDTVKIGSDGWGEFHVNDGSVSIYVQK

SEQ ID NO: 27284 - protein, 485 aa, Synthetic construct
HHNGTNGTMMQYFEWYLPNDGNHWNRLNSDASNLKSKGITAVWIPPAWKGASQNDVGYGAYDLYDLGEFNQKGTVRTKYGTRSQLQAAVTSLKNNGIQVYGDVVMNHKGGADATEMVRAVEVNPNNRNQEVTGEYTIEAWTRFDFPGRGNTHSSFKWRWYHFDGVDWDQSRRLNNRIYKFRGHGKAWDWEVDTENGNYDYLMYADIDMDHPEVVNELRNWGVWYTNTLGLDGFRIDAVKHIKYSFTRDWINHVRSATGKNMFAVAEFWKNDLGAIENYLQKTNWNHSVFDVPLHYNLYNASKSGGNYDMRNIFNGTVVQRHPSHAVTFVDNHDSQPEEALESFVEEWFKPLAYALTLTREQGYPSVFYGDMYGIPTHGVPAMRSKIDPILEARQKYAYGPQHDYLDHPDVIGWTREGDSSHPKSGLATLITDGPGGSKRMYAGLKNAGETWYDITGNRSDTVKIGSDGWGEFHVNDGSVSIYVQK

SEQ ID NO: 27285 - protein, 485 aa, Synthetic construct
HHNGTNGTMMQYFEWYLPNDGNHWNRLNSDASNLKSKGITAVWIPPAWKGASQNDVGYGAYDLYDLGEFNQKGTVRTKYGTRSQLQAAVTSLKNNGIQVYGDVVMNHKGGADATEMVRAVEVNPNNRNQEVTGEYTIEAWTRFDFPGRGNTHSSFKWRWYHFDGVDWDQSRRLNNRIYKFRGHGKAWDWEVDTENGNYDYLMYADIDMDHPEVVNELRNWGVWYTNTLGLDGFRIDAVKHIKYSFTRDWINHVRSATGKNMFAVAEFWKNDLGAIENYLQKTNYNHSVFDVPLHYNLYNASKSGGNYDMRNIFNGTVVQRHPSHAVTFVDNHDSQPEEALESFVEEWFKPLAYALTLTREQGYPSVFYGDYYGIPTHGVPAMRSKIDPILEARQKYAYGPQHDYLDHPDVIGWTREGDSSHPKSGLATLITDGPGGSKRMYAGLKNAGETWYDITGNRSDTVKIGSDGWGEFHVNDGSVSIYVQK

SEQ ID NO: 27286 - protein, 483 aa, Synthetic construct
HHNGTNGTMMQYFEWYLPNDGNHWNRLNSDASNLKSKGITAVWIPPAWKGASQNDVGYGAYDLYDLGEFNQKGTVRTKYGTRSQLQAAVTSLKNNGIQVYGDVVMNHKGGADATEMVRAVEVNPNNRNQEVTGEYTIEAWTRFDFPGRGNTHSSFKWRWYHFDGVDWDQSRRLNNRIYKFRGKAWDWEVDTENGNYDYLMYADIDMDHPEVVNELRNWGVWYTNTLGLDGFRIDAVKHIKYSFTRDWINHVRSATGKNMFAVAEFWKNDLGAIENYLQKTNWNHSVFDVPLHYNLYNASKSGGNYDMRNIFNGTVVQRHPSHAVTFVDNHDSQPEEALESFVEEWFKPLAYALTLTREQGYPSVFYGDYYGIPTHGVPAMRSKIDPILSARQKYAYGPQHDYLDHPDVIGWTREGDSSHPKSGLATLITDGPGGSKRMYAGLKNAGETWYDITGNRSDTVKIGSDGWGEFHVNDGSVSIYVQK

SEQ ID NO: 27287 - protein, 485 aa, Bacillus sp.
HHNGTNGTMMQYFEWYLPNDGNHWNRLNSDASNLKSKGITAVWIPPAWKGASQNDVGYGAYDLYDLGEFNQKGTVRTKYGTRSQLQAAVTSLKNNGINVYGDVVMNHKGGADATEMVRAVEVNPNNRNQEVTGEYTIEAWTRFDFPGRGNTHSSFKWRWYHFDGVDWDQSRRLNNRIYKFRGHGKAWDWEVDTEFGNYDYLMYADYDMDHPEVVNELRNWGVWYTNTLGLDGFRIDAVKHIKYSFTRDWINHVRSATGKNMFAVAEFWKNDLGAIENYLQKTNWNHSVFDVPLHYNLYNASKSGGNYDMRNIFNGTVVQAHPMHAVTFVDNHDSQPEEALESFVEEWFKPLAYALTLTREQGYPSVFYGDYYGIPTHGVPAMRSKIDPILEARQKYAYGPQHDYLDHPDVIGWTREGDSSHPKSGLATLITDGPGGSKRMYAGLKNAGETWYDITGNRSDTVKIGSDGWGEFHVNDGSVSIYVQK

SEQ ID NO: 27288 - protein, 483 aa, Synthetic construct
HHNGTNGTMMQYFEWYLPNDGNHWNRLNSDASNLKSKGITAVWIPPAWKGASQNDVGYGAYDLYDLGEFNQKGTVRTKYGTRSQLQAAVTSLKNNGIQVYGDVVMNHKGGADWTEMVRAVEVNPNNRNQEVTGEYTIEAWTRFDFPGRGNTHSSFKWRWYHFDGVDWDQSRRLNNRIYKFRGKAWDWEVDTENGNYDYLMYADIDMDHPEVVNELRNWGVWYTNTLGLDGFRIDAVKHIKYSFTRDWINHVRSATGKNMFAVAEFWKNDLGAIENYLQKTNWNHSVFDVPLHYNLYNASKSGGNYDMRNIFNGTVVQRHPSHAVTFVDNHDSQPEEALESFVEEWFKPLAYALTLTREQGYPSVFYGDYYGIPTHGVPAMRSKIDPILEARQKYAYGPQHDYLDHPDVIGWTREGDSSHPKSGLATLITDGPGGSKRMYAGLKNAGETWYDITGNRSDTVKIGSDGWGEFHVNDGSVSIYVQK

SEQ ID NO: 27289 - protein, 483 aa, Bacillus sp.
HHNGTNGTMMQYFEWYLPNDGNHWNRLNSDASNLKSKGITAVWIPPAWKGASQNDVGYGAYDLYDLGEFNQKGTVRTKYGTRSQLQAAVTSLKNNGIQVYGDVVMNHKGGADATEMVRAVEVNPNNRNQEVTGEYTIEAWTRFDFPGRGNTHSSFKWRWYHFDGVDWDQSRRLENRIYKFRGKAWDWEVDTEFGNYDYLMYADYDMDHPEVVNELRNWGVWYTNTLGLDGFRIDAVKHIKYSFTRDWINHVRSATGKNMFAVAEFWKNDLGAIENYLQKTNWNHSVFDVPLHYNLYNASKSGGNYDMRNIFNGTVVQRHPSHAVTFVDNHDSQPEEALESFVEEWFKPLAYALTLTREQGYPSVFYGDYYGIPTHGVPAMRSKIDPILEARQKYAYGPQHDYLDHPDVIGWTREGDSSHPKSGLATLITDGPGGSKRMYAGLKNAGETWYDITGNRSDTVKIGSDGWGEFHVNDGSVSIYVQK

SEQ ID NO: 27290 - protein, 483 aa, Bacillus sp.
HHNGTNGTMMQYFEWYLPNDGNHWNRLNSDASNLKSKGITAVWIPPAWKGISQNDVGYGAYDLYDLGEFNQKGTVRTKYGTRSQLQAAVTSLKNNGIQVYGDVVMNHKGGADATEMVRAVEVNPNNRNQEVTGEYTIEAWTRFDFPGRGNTHSSFKWRWYHFDGVDWDQSRDLNNRIYKFRGKAWDWEVDTEFGNYDYLMYADYDMDHPEVVNELRNWGVWYTNTLGLDGFRIDAVKHIKYSFTRDWINHVRSATGKNMFAVAEFWKNDLGAIENYLQKTNWNHSVFDVPLHYNLYNASKSGGNYDMRNIFNGTVVQRHPSHAVTFVDNHDSQPEEALESFVEEWFKPLAYALTLTREQGYPSVFYGDYYGIPTHGVPAMRSKIDPILEARQKYAYGPQHDYLDHPDVIGWTREGDSSHPKSGLATLITDGPGGSKRMYAGLKNAGETWYDITGNRSDTVKIGSDGWGEFHVNDGSVSIYVQK

SEQ ID NO: 27291 - protein, 483 aa, Bacillus sp.
HHNGTNGTMMQYFEWYLPNDGNHWNRLNSDASNLKSKGITAVWIPPAWKGASQNDVGYGAYDLYDLGEFNQKGTVRTKYGTRSQLQAAVTSLKNNGIQVYGDVVMNHKGGADATEMVRAVEVNPNNRNQEVTGEYTIEAWTRFDFPGRGNTHSSFKWRWYHFDGVDWDQSRELNNRIYKFRGKAWDWEVDTEFGNYDYLMYADYDMDHPEVVNELRNWGVWYTNTLGLDGFRIDAVKHIKYSFTRDWINHVRSATGKNMFAVAEFWKNDLGAIENYLQKTNWNHSVFDVPLHYNLYNASKSGGNYDMRNIFNGTVVQRHPSHAVTFVDNHDSQPEEALESFVEEWFKPLAYALTLTREQGYPSVFYGDYYGIPTHGVPAMRSKIDPILEARQKYAYGPQHDYLDHPDVIGWTREGDSSHPKSGLATLITDGPGGSKRMYAGLKNAGETWYDITGNRSDTVKIGSDGWGEFHVNDGSVSIYVQK

SEQ ID NO: 27292 - protein, 483 aa, Bacillus sp.
HHNGTNGTMMQYFEWYLPNDGNHWNRLNSDASNLKSKGITAVWIPPAWKGASQNDVGYGAYDLYDLGEFNQKGTVRTKYGTRSQLQAAVTSLKNNGIQVYGDVVMNHKGGADATEMVRAVEVNPNNRNQEVTGEYTIEAWTRFDFPGRGNTHSSFKWRWYHFDGVDWDQSRRFDNRIYKFRGKAWDWEVDTEFGNYDYLMYADYDMDHPEVVNELRNWGVWYTNTLGLDGFRIDAVKHIKYSFTRDWINHVRSATGKNMFAVAEFWKNDLGAIENYLQKTNWNHSVFDVPLHYNLYNASKSGGNYDMRNIFNGTVVQRHPSHAVTFVDNHDSQPEEALESFVEEWFKPLAYVLTLTREQGYPSVFYGDYYGIPTHGVPAMRSKIDPILEARQKYAYGPQHDYLDHPDVIGWTREGDSSHPKSGLATLITDGPGGSKRMYAGLKNAGETWYDITGNRSDTVKIGSDGWGEFHVNDGSVSIYVQK

SEQ ID NO: 27293 - protein, 485 aa, Bacillus sp.
HHNGTNGTMMQYFEWYLPNDGNHWNRLNSDASNLKSKGITAVWIPPAWKGASQNDVGYGAYDLYDLGEFNQKGTVRTKYGTRSQLQAAVTSLKNNGIQVYGDVVMNHKGGADATEMVRAVEVNPNNRNQEVTGEYTIEAWTRFDFPGRGNTHSSFKWRWYHFDGVDWDQSRRLNNRIYKFRGHGKAWDWEVDTEFGNYDYLMYADYDMDHPEVVNELRNWGVWYTNTLGLDGFRIDAVKHIKYSFTRDWINHVRSATGKNMFAVAEFWKNDLGAIENYLQKTNWNHSVFDVPLHYNLYNASKSGGNYDMRNIFNGTVVQRHPSHAVTFVDNHDSQPEEALESFVSEWFKPLAYALTLTREQGYPSVFYGDYYGIPTHGVPAMRSKIDPILEARQKYAYGPQHDYLDHPDVIGWTREGDSSHPKSGLATLITDGPGGSKRMYAGLKNAGETWYDITGNRSDTVKIGSDGWGEFHVNDGSVSIYVQK

SEQ ID NO: 27294 - protein, 485 aa, Synthetic construct
HHNGTNGTMMQYFEWYLPNDGNHWNRLNSDASNLKSKGITAVWIPPAWKGASQNDVGYGAYDLYDLGEFNQKGTVRTKYGTRSQLQAAVTSLKNNGIQVYGDVVMNHKGGADATEMVRAVEVNPNNRNQEVTGEYTIEAWTRFDFPGRGNTHSSFKWRWYHFDGVDWDQSRRLNNRIYKFRGHGKAWDWEVDTENGNYDYLMYADFDMDHPEVVNEIRNWGVWYTNTLGLDGFRIDAVKHIKYSFTRDWINHVRSATGKNMFAVAEFWKNDLGAIENYLQKTNWNHSVFDVPLHYNLYNASKSGGNYDMRNIFNGTVVQRHPSHAVTFVDNHDSQPEEALESFVEEWFKPLAYALTLTREQGYPSVFYGDYYGIPTHGVPAMRSKIDPILEARQKYAYGPQHDYLDHPDVIGWTREGDSSHPKSGLATLITDGPGGSKRMYAGLKNAGETWYDITGNRSDTVKIGSDGWGEFHVNDGSVSIYVQK

SEQ ID NO: 27295 - protein, 485 aa, Synthetic construct
HHNGTNGTMMQYFEWYLPNDGNHWNRLNSDASNLKSKGITAVWIPPAWKGASQNDVGYGAYDLYDLGEFNQKGTVRTKYGTRSQLQAAVTSLKNNGIQVYGDVVMNHKGGADATEMVRAVEVNPNNRNQEVTGEYTIEAWTRFDFPGRGNTHSSFKWRWYHFDGVDWDQSRRLNNRIYKFRGHGKAWDWEVDTENGNYDYLMYADYDMDHPEGVNELRNWGVWYTNTLGLDGFRIDAVKHIKYSFTRDWINHVRSATGKNMFAVAEFWKNDLGAIENYLQKTNWNHSVFDVPLHYNLYNASKSGGNYDMRNIFNGTVVQRHPSHAVTFVDNHDSQPEEALESFVEEWFKPLAYALTLTREQGYPSVFYGDYYGIPTHGVPAMRSKIDPILEARQKYAYGPQHDYLDHPDVIGWTREGDSSHPKSGLATLITDGPGGSKRMYAGLKNAGETWYDITGNRSDTVKIGSDGWGEFHVNDGSVSIYVQK

SEQ ID NO: 27296 - protein, 483 aa, Bacillus sp.
HHNGTNGTMMQYFEWYLPNDGNHWNRLNSDASNLKSKGITAVWIPPAWKGASQNDVGYGAYDLYDLGEFNQKGTVRTKYGTRSQLQAAVTSLKNNGIQVYGDVVMNHKGGADATEMVRAVEVNPNNRNQEVTGEYTIEAWTRFDFPGRGNTHSSFKWRWYHFDGVDWDQSRRLNNRIYKFRGKAWDWEVDTEFGNYDYLMYADYDMDHPEVVNELRNWGVWYTNTLGLDGFRIDAVKHIKYSFTRDWINHVRSATGKNMFAVAEFWKNDLGAIENYLQKTNWNHSVFDVPLHYNLYNASKSGGNYDMRNIFNGTVVQMHPSHAVTFVDNHDSQPEEALESFVEEWFKPLAYALTLTREQGYPSVFYGDYYGIPTHGVPAMRSKIDPILEARQKYAYGPQHDYLDHPDVIGWTREGDSSHPKSGLATLITDGPGGSKRMYAGLKNAGETWYDITGNRSDTVKIGSDGWGEFHVNDGSVSIYVQK

SEQ ID NO: 27297 - protein, 483 aa, Bacillus sp.
HHNGTNGTMMQYFEWYLPNDGNHWNRLNSDASNLKSKGITAVWIPPAWKGASQNDVGYGAYDLYDLGEFNQKGTVRTKYGTRSQLQAAVTSLKNNGIQVYGDVVMNHKGGADATEMVRAVEVNPNNRNQEVTGEYTIEAWTRFDFPGRGNTHSSFKWRWYHFDGVDWDQSRRLNNRIYKFRGKAWDWEVDTEFGNYDYLMYADYDMDHPEVVNELRNWGVWYTNTLGLDGFRIDAVKHIKYSFTRDWINHVRSATGKNMFAVAEFWKNDLGAIENYLQKTNWNHSVFDVPLHYNLYNASKSGGNYDMRNIFNGTVVQAHPSHAVTFVDNHDSQPEEALESFVEEWFKPLAYALTLTREQGYPSVFYGDYYGIPTHGVPAMRSKIDPILEARQKYAYGPQHDYLDHPDVIGWTREGDSSHPKSGLATLITDGPGGSKRMYAGLKNAGETWYDITGNRSDTVKIGSDGWGEFHVNDGSVSIYVQK

SEQ ID NO: 27298 - protein, 485 aa, Synthetic construct
HHNGTNGTMMQYFEWYLPNDGNHWNRLNSDASNLKSKGITAVWIPPAWKGASQNDVGYGAYDLYDLGEFNQKGTVRTKYGTRSQLQAAVTSLKNNGIQVYGDVVMNHKGGADATEMVRAVEVNPNNRNQEVTGEYTIEAWTRFDFPGRGNTHSSFKWRWYHFDGVDWDQSRRLNNRIYKFRGHGKAWDWEVDTENGNYDYLMYADIDMDHPEVVNELRNWGVWYTNTLGLDGFRIDAVKHIKYSFTRDWINHVRSATGKNMFAVAEFWKNDLGAIENYLQKTNWNHSVFDVPLHYNLYNASKSGGNYDMRNIFNNTVVQRHPSHAVTFVDNHDSQPEEALESFVEEWFKPLAYALTLTREQGYPSVFYGDYYGIPTHGVPAMRSKIDPILEARQKYAYGPQHDYLDHPDVIGWTREGDSSHPKSGLATLITDGPGGSKRMYAGLKNAGETWYDITGNRSDTVKIGSDGWGEFHVNDGSVSIYVQK

SEQ ID NO: 27299 - protein, 485 aa, Synthetic construct
HHNGTNGTMMQYFEWYLPNDGNHWNRLNSDASNLKSKGITAVWIPPAWKGASQNDVGYGAYDIYDLGEFNQKGTVRTKYGTRSQLQAAVTSLKNNGIQVYGDVVMNHKGGADATEMVRAVEVNPNNRNQEVTGEYTIEAWTRFDFPGRGNTHSSFKWRWYHFDGVDWDQSRRLNNRIYKFRGHGKAWDWEVDTENGNYDYLMYADYDMDHPEVVNELRNWGVWYTNTLGLDGFRIDAVKHIKYSFTRDWINHVRSATGKNMFAVAEFWKNDLGAIENYLQKTNWNHSVFDVPLHYNLYNASKSGGNYDMRNIFNGTVVQRHPSHAVTFVDNHDSQPEEALESFVEEWFKPLAYALTLTREQGYPSVFYGDYYGIPTHGVPAMRSKIDPILEARQKYAYGPQHDYLDHPDVIGWTREGDSSHPKSGLATLITDGPGGSKRMYAGLKNAGETWYDITGNRSDTVKIGSDGWGEFHVNDGSVSIYVQK

SEQ ID NO: 27300 - protein, 483 aa, Synthetic construct
HHNGTNGTMMQYFEWYLPNDGNHWNRLNSDASNLKSKGITAVWIPPAWKGASQNDVGYGAYDLYDLGEFNQKGTVRTKYGTRSQLQAAVTSLKNNGIQVYGDVVMNHKGGADMTEMVRAVEVNPNNRNQEVTGEYTIEAWTRFDFPGRGNTHSSFKWRWYHFDGVDWDQSRRLNNRIYKFRGKAWDWEVDTENGNYDYLMYADIDMDHPEVVNELRNWGVWYTNTLGLDGFRIDAVKHIKYSFTRDWINHVRSATGKNMFAVAEFWKNDLGAIENYLQKTNWNHSVFDVPLHYNLYNASKSGGNYDMRNIFNGTVVQRHPSHAVTFVDNHDSQPEEALESFVEEWFKPLAYALTLTREQGYPSVFYGDYYGIPTHGVPAMRSKIDPILEARQKYAYGPQHDYLDHPDVIGWTREGDSSHPKSGLATLITDGPGGSKRMYAGLKNAGETWYDITGNRSDTVKIGSDGWGEFHVNDGSVSIYVQK

SEQ ID NO: 27301 - protein, 485 aa, Bacillus sp.
HHNGKNGTMMQYFEWYLPNDGNHWNRLNSDASNLKSKGITAVWIPPAWKGASQNDVGYGAYDLYDLGEFNQKGTVRTKYGTRSQLQAAVTSLKNNGIQVYGDVVMNHKGGADATEMVRAVEVNPNNRNQEVTGEYTIEAWTRFDFPGRGNTHSSFKWRWYHFDGVDWDQSREFNNRIYKFRGHGKAWDWEVDTEFGNYDYLMYADYDMDHPEVVNELRNWGVWYTNTLGLDGFRIDAVKHIKYSFTRDWINHVRSATGKNMFAVAEFWKNDLGAIENYLQKTNWNHSVFDVPLHYNLYNASKSGGNYDMRNIFNGTVVQRHPSHAVTFVDNHDSQPEEALESFVDPWFKPLAYALTLTREQGYPSVFYGDYYGIPTHGVPAMRSKIDPILEARQKYAYGPQHDYLDHPDVIGWTREGDSSHPKSGLATLITDGPGGSKRMYAGLKNAGETWYDITGNRSDTVKIGSDGWGEFHVNGGSVSIYVQK

SEQ ID NO: 27302 - protein, 485 aa, Synthetic construct
HHNGTNGTMMQYFEWYLPNDGNHWNRLNSDASNLKSKGITAVWIPPAWKGASQNDVGYGAYDLYDLGEFNQKGTVRTKYGTRSQLQAAVTSLKNNGIQVYGDVVMNHKGGADATEMVRAVEVNPNNRNQEVTGEYTIEAWTRFDFPGRGNTHSSFKWRWYHFDGVDWDQSRRLNNRIYKFRGHGKAWDWEVDTENGNYDYLMYADIDMDHPDVVNELRNWGVWYTNTLGLDGFRIDAVKHIKYSFTRDWINHVRSATGKNMFAVAEFWKNDLGAIENYLQKTNWNHSVFDVPLHYNLYNASKSGGNYDMRNIFNGTVVQRHPSHAVTFVDNHDSQPEEALESFVEEWFKPLAYALTLTREQGYPSVFYGDYYGIPTHGVPAMRSKIDPILEARQKYAYGPQHDYLDHPDVIGWTREGDSSHPKSGLATLITDGPGGSKRMYAGLKNAGETWYDITGNRSDTVKIGSDGWGEFHVNDGSVSIYVQK

SEQ ID NO: 27303 - protein, 485 aa, Synthetic construct
HHNGTNGTMMQYFEWYLPNDGNHWNRLNSDASNLKSKGITAVWIPPAWKGASQNDVGYGAYDLYDLGEFNQKGTVRTKYGTRSQLQAAVTSLKNNGIQVYGDVVMNHKGGADATEMVRAVEVNPNNRNQEVTGEYTIEAWTRFDFPGRGNQHSSFKWRWYHFDGVDWDQSRRLNNRIYKFRGHGKAWDWEVDTENGNYDYLMYADIDMDHPEVVNELRNWGVWYTNTLGLDGFRIDAVKHIKYSFTRDWINHVRSATGKNMFAVAEFWKNDLGAIENYLQKTNWNHSVFDVPLHYNLYNASKSGGNYDMRNIFNGTVVQRHPSHAVTFVDNHDSQPEEALESFVEEWFKPLAYALTLTREQGYPSVFYGDYYGIPTHGVPAMRSKIDPILEARQKYAYGPQHDYLDHPDVIGWTREGDSSHPKSGLATLITDGPGGSKRMYAGLKNAGETWYDITGNRSDTVKIGSDGWGEFHVNDGSVSIYVQK

SEQ ID NO: 27304 - protein, 483 aa, Bacillus sp.
HHNGTNGTMMQYFEWYLPNDGNHWNRLNSDASNLKSKGITAVWIPPAWKGASQNDVGYGAYDLYDLGEFNQKGTVRTKYGTRSQLQAAVTSLKNNGIQVYGDVVMNHKGGADATEMVRAVEVNPNNRNQEVTGEYTIEAWTRFDFPGRGNTHSSFKWRWYHFDGVDWDQSRRLNNRIYKFRGKAWDWEVDTEFGNYDYLMYADYDMDHPEVVNELRNWGVWYTNTLGLDGFRIDAVKHIKYSFTRDWINHVRSATGKNMFAVAEFWKNDLGAIENYLQKTNWNHSVFDVPLHYNLYNASKSGGNYDMRNIFNGTVVQSHPNHAVTFVDNHDSQPEEALESFVEEWFKPLAYALTLTREQGYPSVFYGDYYGIPTHGVPAMRSKIDPILEARQKYAYGPQHDYLDHPDVIGWTREGDSSHPKSGLATLITDGPGGSKRMYAGLKNAGETWYDITGNRSDTVKIGSDGWGEFHVNDGSVSIYVQK

SEQ ID NO: 27305 - protein, 485 aa, Bacillus sp.
HHNGTNGTMMQYFEWYLPNDGNHWNRLNSDASNLKSKGITAVWIPPAWKAVSQNDVGYGAYDLYDLGEFNQKGTVRTKYGTRSQLQAAVTSLKNNGIQVYGDVVMNHKGGADATEMVRAVEVNPNNRNQEVTGEYTIEAWTRFDFPGRGNTHSSFKWRWYHFDGVDWDQSRRLQNRIYKFRGHGKAWDWEVDTEFGNYDYLMYADYDMDHPEVVNELRNWGVWYTNTLGLDGFRIDAVKHIKYSFTRDWINHVRSATGKNMFAVAEFWKNDLGAIENYLQKTNWNHSVFDVPLHYNLYNASKSGGNYDMRNIFNGTVVQRHPSHAVTFVDNHDSQPEEALESFVEEWFKPLAYALTLTREQGYPSVFYGDYYGIPTHGVPAMRSKIDPILEARQKYAYGPQHDYLDHPDVIGWTREGDSSHPKSGLATLITDGPGGSKRMYAGLKNAGETWYDITGNRSDTVKIGSDGWGEFHVNDGSVSIYVQK

SEQ ID NO: 27306 - protein, 485 aa, Synthetic construct
HHNGTNGTMMQYFEWYLPNDGNHWNRLNSDASNLKSKGITAVWIPPAWKGASQNDVGYGAYDLYDLGEFNQKGTVRTKYGTRSQLQAAVTSLKNNGIQVYGDVVMNHKGGADATEMVRAVEVNPNNRNQEVTGEYTIEAWTRFDFPGRGNTHSSFKWRWYHFDGVDWDQSRRLNNRIYKFRGHGKAWDWEVDTENGNYDYLMYADIDMDHPEVVNELRNWGVWYTNTLGLDGFRIDAVKHIKYSFTRDWINHVRSATGKNMFAVAEFWKNDLGAIENYLQKTNWNHSVFDVPLHYNLYNASKSGGNYDMRNIFNGTVVQRHPSHAVTFVDNHDSQPEEALESFVEEWFKPLAYALTLTREQGYPSVFYGDYYGIPTHGVPAMRSKIDPILEARQKYAYGPQHDYLDHPDVIGWTREGDSSHPKSGLATLITDGPGGSKRMYAGLKNAGETWYDITGNRSDTVKIGSDGNGEFHVNDGSVSIYVQK

SEQ ID NO: 27307 - protein, 483 aa, Synthetic construct
HHNGTNGTMMQYFEWYLPNDGNHWNRLNSDASNLKSKGITAVWIPPAWKGASQNDVGYGAYDLYDLGEFNQKGTVRTKYGTRSQLQAAVTSLKNNGIQVYGDVVMNHKGGADATEMVRAVEVNPNNRNQEVTNEYTIEAWTRFDFPGRGNTHSSFKWRWYHFDGVDWDQSRRLNNRIYKFRGKAWDWEVDTENGNYDYLMYADIDMDHPEVVNELRNWGVWYTNTLGLDGFRIDAVKHIKYSFTRDWINHVRSATGKNMFAVAEFWKNDLGAIENYLQKTNWNHSVFDVPLHYNLYNASKSGGNYDMRNIFNGTVVQRHPSHAVTFVDNHDSQPEEALESFVEEWFKPLAYALTLTREQGYPSVFYGDYYGIPTHGVPAMRSKIDPILEARQKYAYGPQHDYLDHPDVIGWTREGDSSHPKSGLATLITDGPGGSKRMYAGLKNAGETWYDITGNRSDTVKIGSDGWGEFHVNDGSVSIYVQK

SEQ ID NO: 27308 - protein, 485 aa, Synthetic construct
HHNGTNGTMMQYFEWYLPNDGNHWNRLNSDASNLKSKGITAVWIPPAWKGASQNDVGYGAYDLYDLGEFNQKGTVRTKYGTKSQLQAAVTSLKNNGIQVYGDVVMNHKGGADATEMVRAVEVNPNNRNQEVTGEYTIEAWTRFDFPGRGNTHSSFKWRWYHFDGVDWDQSRRLNNRIYKFRGHGKAWDWEVDTENGNYDYLMYADIDMDHPEVVNELRNWGVWYTNTLGLDGFRIDAVKHIKYSFTRDWINHVRSATGKNMFAVAEFWKNDLGAIENYLQKTNWNHSVFDVPLHYNLYNASKSGGNYDMRNIFNGTVVQRHPSHAVTFVDNHDSQPEEALESFVEEWFKPLAYALTLTREQGYPSVFYGDYYGIPTHGVPAMRSKIDPILEARQKYAYGPQHDYLDHPDVIGWTREGDSSHPKSGLATLITDGPGGSKRMYAGLKNAGETWYDITGNRSDTVKIGSDGWGEFHVNDGSVSIYVQK

SEQ ID NO: 27309 - protein, 483 aa, Bacillus sp.
HHNGTNGTMMQYFEWYLPNDGNHWNRLNSDASNLKSKGITAVWIPPAWKGASQNDVGYGAYDLYDLGEFNQKGTVRTKYGTRSQLQAAVTSLKNNGIQVYGDVVMNHKGGADATEMVRAVEVNPNNRNQEVTGEYTIEAWTRFDFPGRGNTHSSFKWRWYHFDGVDWDQSRRVSNRIYKFRGKAWDWEVDTEFGNYDYLMYADYDMDHPEVVNELRNWGVWYTNTLGLDGFRIDAVKHIKYSFTRDWINHVRSATGKNMFAVAEFWKNDLGAIENYLQKTNWNHSVFDVPLHYNLYNASKSGGNYDMRNIFNGTVVQRHPSHAVTFVDNHDSQPEEALESFVEEWFKPLAYALTLTREQGYPSVFYGDYYGIPTHGVPAMRSKIDPILEARQKYAYGPQHDYLDHPDVIGWTREGDSSHPKSGLATLITDGPGGSKRMYAGLKNAGETWYDITGNRSDTVKIGSDGWGEFHVNDGSVSIYVQK

SEQ ID NO: 27310 - protein, 485 aa, Synthetic construct
HHNGTNGTMMQYFEWYLPNDGNHWNRLNSDASNLKSKGITAVWIPPAWKGASQNDVGYGAYDLYDLGEFNQKGTVRTKYGTRSQLQAAVTSLKNNGIQVYGDVVMNHKGGADATEMVRAVEVNPNNRNQEVTGEYTIEAWTRFDFPGRGNTHSSFKWRWYHFDGVDWDQSRRLNNRIYKFRGHGKAWDWEVDTENGNYDYLMYADIDMDHPEVVNELRNWGVWYTNTLGLDGFRIDAVKHIKYSFTRDWINHVRSATGKNMFAVAEFWKNDLGAIENYLQYTNWNHSVFDVPLHYNLYNASKSGGNYDMRNIFNGTVVQRHPSHAVTFVDNHDSQPEEALESFVEEWFKPLAYALTLTREQGYPSVFYGDYYGIPTHGVPAMRSKIDPILEARQKYAYGPQHDYLDHPDVIGWTREGDSSHPKSGLATLITDGPGGSKRMYAGLKNAGETWYDITGNRSDTVKIGSDGWGEFHVNDGSVSIYVQK

SEQ ID NO: 27311 - protein, 485 aa, Synthetic construct
HHNGLNGTMMQYFEWYLPNDGNHWNRLNSDASNLKSKGITAVWIPPAWKGASQNDVGYGAYDLYDLGEFNQKGTVRTKYGTRSQLQAAVTSLKNNGIQVYGDVVMNHKGGADATEMVRAVEVNPNNRNQEVTGEYTIEAWTRFDFPGRGNTHSSFKWRWYHFDGVDWDQSRRLNNRIYKFRGHGKAWDWEVDTENGNYDYLMYADIDMDHPEVVNELRNWGVWYTNTLGLDGFRIDAVKHIKYSFTRDWINHVRSATGKNMFAVAEFWKNDLGAIENYLQKTNWNHSVFDVPLHYNLYNASKSGGNYDMRNIFNGTVVQRHPSHAVTFVDNHDSQPEEALESFVEEWFKPLAYALTLTREQGYPSVFYGDYYGIPTHGVPAMRSKIDPILEARQKYAYGPQHDYLDHPDVIGWTREGDSSHPKSGLATLITDGPGGSKRMYAGLKNAGETWYDITGNRSDTVKIGSDGWGEFHVNDGSVSIYVQK

SEQ ID NO: 27312 - protein, 485 aa, Bacillus sp.
HHNGTNGTMMQYFEWYLPNDGNHWNRLNSDASNLKSKGITAVWIPPAWKGASQNDVGYGAYDLYDLGEFNQKGTVRTKYGTRSQLQAAVTSLKNNGIQVYGDVVMNHKGGADATEMVRAVEVNPNNRNQEVTGEYTIEAWTRFDFPGRGNTHSSFKWRWYHFDGVDWDQSRRLNNRIYKFRGHGKAWDWEVDTEFGNYDYLMYADYDMDHPEVVNELRNWGVWYTNTLGLDGFRIDAVKHIKYSFTRDWINHVRSATGKNMFAVAEFWKNDLGAIENYLQKTNWNHSVFDVPLHYNLYNASKSGGNYDMRNIFNGTVVQRHPSHAVTFVDNHDSQPEEALESFVEEWFKPLAYALTLTREQGYPSVFYGDYYGIPTHGVPAMRSKIDPILEARQKYAYGPQHDYLDHPDVIGWTREGDSSHPKSGLATFITDGPGGSKRMYAGLKNAGETWYDITGNRSDTVKIGSDGWGEFHVNDGSVSIYVQK

SEQ ID NO: 27313 - protein, 485 aa, Synthetic construct
HHNGTNGTMMQYFEWYLPNDGNHWNRLNSDASNLKSKGITAVWIPPAWKGASQNDVGYGAYDLYDLGEFNQKGTVRTKYGTRSQLQAAVTSLKNNGIQVYGDVVMNHKGGADATEMVRAVEVNPNNRNQEVTGEYTIEAWTRFDFPGRGNTHSSFKWRWYHFDGVDWDQSRRLNNRIYKFRGHGKAWDWEVDTENGNYDYLMYADIDMDHPEVVNELRNWGVWYTNTLGLDGFRIDAVKHIKYSFTRDWINHVRSATGKNMFAVAEFWKNDLGAIENYLQKTNWNHSVFDVPLHYNLYNASKSGGNYDMRNIFNGTVVQRHPSHAVTFVDNHDSQPEEALESFVEEWFKPLAYALTLTREQGYPSVFYGDYYGIPTHGVPAMRSKIDPLLEARQKYAYGPQHDYLDHPDVIGWTREGDSSHPKSGLATLITDGPGGSKRMYAGLKNAGETWYDITGNRSDTVKIGSDGWGEFHVNDGSVSIYVQK

SEQ ID NO: 27314 - protein, 483 aa, Bacillus sp.
HHNGTNGTMMQYFEWYLPNDGNHWNRLNSDASNLKSKGITAVWIPPAWKGASQNDVGYGAYDLYDLGEFNQKGTVRTKYGTRSQLQAAVTSLKNNGIQVYGDVVMNHKGGADATEMVRAVEVNPNNRNQEVTGEYTIEAWTRFDFPGRGNTHSSFKWRWYHFDGVDWDQSRRLNNRIYKFRGKAWDWEVDTEFGNYDYLMYADYDMDHPEVVNELRNWGVWYTNTLGLDGFRIDAVKHIKYSFTRDWINHVRSATGKNMFAVAEFWKNDLGAIENYLQKTNWNHSVFDVPLHYNLYNASQSGGNYDMRNIFNGTVVQRHPSHAVTFVDNHDSQPEEALESFVEEWFKPLAYALTLTREQGYPSVFYGDYYGIPTHGVPAMRSKIDPILEARQKYAYGPQHDYLDHPDVIGWTREGDSSHPKSGLATLITDGPGGSKRMYAGLKNAGETWYDITGNRSDTVKIGSDGWGEFHVNGASVSIYVQK

SEQ ID NO: 27315 - protein, 483 aa, Bacillus sp.
HHNGTNGTMMQYFEWYLPNDGNHWNRLNSDASNLKSKGITAVWIPPAWKATSQNDVGYGAYDLYDLGEFNQKGTVRTKYGTRSQLQAAVTSLKNNGIQVYGDVVMNHKGGADATEMVRAVEVNPNNRNQEVTGEYTIEAWTRFDFPGRGNTHSSFKWRWYHFDGVDWDQSRQLSNRIYKFRGKAWDWEVDTEFGNYDYLMYVDYDMDHPEVVNELRNWGVWYTNTLGLDGFRIDAVKHIKYSFTRDWINHVRSATGKNMFAVAEFWKNDLGAIENYLQKTNWNHSVFDVPLHYNLYNASKSGGNYDMRNIFNGTVVQRHPSHAVTFVDNHDSQPEEALESFVEEWFKPLAYALTLTREQGYPSVFYGDYYGIPTHGVPAMRSKIDPILEARQKYAYGPQHDYLDHPDVIGWTREGDSSHPKSGLATLITDGPGGSKRMYAGLKNAGETWYDITGNRSDTVKIGSDGWGEFHVNDGSVSIYVQK

SEQ ID NO: 27316 - protein, 483 aa, Synthetic construct
HHNGTNGTMMQYFEWYLPNDGNHWNRLNSDASNLKSKGITAVWIPPAWKGASQNDVGYGAYDLYDLGEFNQKGTVRTKYGTRSQLQAAVTSLKNNGIQVYGDVVMNHKGGADATEMVRAVEVNPNNRNQEVTGEYTIEAWTRFDFPGRGNTHSSFKWRWYHFDGVDWDQSRRLNNRIYKFRGKAWDWEVDTEHGNYDYLMYADIDMDHPEVVNELRNWGVWYTNTLGLDGFRIDAVKHIKYSFTRDWINHVRSATGKNMFAVAEFWKNDLGAIENYLQKTNWNHSVFDVPLHYNLYNASKSGGNYDMRNIFNGTVVQRHPSHAVTFVDNHDSQPEEALESFVEEWFKPLAYALTLTREQGYPSVFYGDYYGIPTHGVPAMRSKIDPILEARQKYAYGPQHDYLDHPDVIGWTREGDSSHPKSGLATLITDGPGGSKRMYAGLKNAGETWYDITGNRSDTVKIGSDGWGEFHVNDGSVSIYVQK

SEQ ID NO: 27317 - protein, 483 aa, Bacillus sp.
HHNGTNGTMMQYFEWYLPNDGNHWNRLNSDASNLKSKGITAVWIPPAWKAASQNDVGYGAYDLYDLGEFNQKGTVRTKYGTRSQLQAAVTSLKNNGIQVYGDVVMNHKGGADATEMVRAVEVNPNNRNQEVTGEYTIEAWTRFDFPGRGNTHSSFKWRWYHFDGVDWDQSRRFTNRIYKFRGKAWDWEVDTEFGNYDYLMYADYDMDHPEVVNELRNWGVWYTNTLGLDGFRIDAVKHIKYSFTRDWINHVRSATGKNMFAVAEFWKNDLGAIENYLQKTNWNHSVFDVPLHYNLYNASKSGGNYDMRNIFNGTVVQRHPSHAVTFVDNHDSQPEEALESFVEEWFKPLAYALTLTREQGYPSVFYGDYYGIPTHGVPAMRSKIDPILEARQKYAYGPQHDYLDHPDVIGWTREGDSSHPKSGLATLITDGPGGSKRMYAGLKNAGETWYDITGNRSDTVKIGSDGWGEFHVNDGSVSIYVQK

SEQ ID NO: 27318 - protein, 485 aa, Bacillus sp.
HHNGTNGTMMQYFEWYLPNDGNHWNRLNSDASNLKSKGITAVWIPPAWKAASQNDVGYGAYDLYDLGEFNQKGTVRTKYGTRSQLQAAVTSLKNNGIQVYGDVVMNHKGGADATEMVRAVEVNPNNRNQEVTGEYTIEAWTRFDFPGRGNTHSSFKWRWYHFDGVDWDQSRRLQNRIYKFRGHGKAWDWEVDTEFGNYDYLMYADYDMDHPEVVNELRNWGVWYTNTLGLDGFRIDAVKHIKYSFTRDWINHVRSATGKNMFAVAEFWKNDLGAIENYLQKTNWNHSVFDVPLHYNLYNASKSGGNYDMRNIFNGTVVQRHPSHAVTFVDNHDSQPEEALESFVEEWFKPLAYALTLTREQGYPSVFYGDYYGIPTHGVPAMRSKIDPILEARQKYAYGPQHDYLDHPDVIGWTREGDSSHPKSGLATLITDGPGGSKRMYAGLKNAGETWYDITGNRSDTVKIGSDGWGEFHVNDGSVSIYVQK

SEQ ID NO: 27319 - protein, 483 aa, Bacillus sp.
HHNGTNGTMMQYFEWYLPNDGNHWNRLNSDASNLKSKGITAVWIPPAWKAASQNDVGYGAYDLYDLGEFNQKGTVRTKYGTRSQLQAAVTSLKNNGIQVYGDVVMNHKGGADATEMVRAVEVNPNNRNQEVTGEYTIEAWTRFDFPGRGNTHSSFKWRWYHFDGVDWDQSRDLQNRIYKFRGKAWDWEVDTEFGNYDYLMYADYDMDHPEVVNELRNWGVWYTNTLGLDGFRIDAVKHIKYSFTRDWINHVRSATGKNMFAVAEFWKNDLGAIENYLQKTNWNHSVFDVPLHYNLYNASKSGGNYDMRNIFNGTVVQVHPSHAVTFVDNHDSQPEEALESFVEEWFKPLAYALTLTREQGYPSVFYGDYYGIPTHGVPAMRSKIDPILEARQKYAYGPQHDYLDHPDVIGWTREGDSSHPKSGLATLITDGPGGSKRMYAGLKNAGETWYDITGNRSDTVKIGSDGWGEFHVNDGSVSIYVQK

SEQ ID NO: 27320 - protein, 483 aa, Synthetic construct
HHNGTNGTMMQYFEWYLPNDGNHWNRLNSDASNLKSKGITAVWIPPAWKGASQNDVGYGAYDLYDLGEFNQKGTVRTKYGTRSQLQAAVTSLKNNGIQVYGDVVMNHKGGADATEMVRAVEVNPNNRNQEVTGEYTIEAWTRFDFPGRGNTHSSFKWRWYHFDGVDWDQSRRLNNRIYKFRGKEWDWEVDTENGNYDYLMYADIDMDHPEVVNELRNWGVWYTNTLGLDGFRIDAVKHIKYSFTRDWINHVRSATGKNMFAVAEFWKNDLGAIENYLQKTNWNHSVFDVPLHYNLYNASKSGGNYDMRNIFNGTVVQRHPSHAVTFVDNHDSQPEEALESFVEEWFKPLAYALTLTREQGYPSVFYGDYYGIPTHGVPAMRSKIDPILEARQKYAYGPQHDYLDHPDVIGWTREGDSSHPKSGLATLITDGPGGSKRMYAGLKNAGETWYDITGNRSDTVKIGSDGWGEFHVNDGSVSIYVQK

SEQ ID NO: 27321 - protein, 483 aa, Bacillus sp.
HHNGTNGTMMQYFEWYLPNDGNHWNRLNSDASNLKSKGITAVWIPPAWKAASQNDVGYGAYDLYDLGEFNQKGTVRTKYGTRSQLQAAVTSLKNNGIQVYGDVVMNHKGGADATEMVRAVEVNPNNRNQEVTGEYTIEAWTRFDFPGRGNTHSSFKWRWYHFDGVDWDQSRQVSNRIYKFRGKAWDWEVDTEFGNYDYLMYADYDMDHPEVVNELRNWGVWYTNTLGLDGFRIDAVKHIKYSFTRDWINHVRSATGKNMFAVAEFWKNDLGAIENYLQKTNWNHSVFDVPLHYNLYNASKSGGNYDMRNIFNGTVVQRHPSHAVTFVDNHDSQPEEALESFVEEWFKPLAYALTLTREQGYPSVFYGDYYGIPTHGVPAMRSKIDPILEARQKYAYGPQHDYLDHPDVIGWTREGDSSHPKSGLATLITDGPGGSKRMYAGLKNAGETWYDITGNRSDTVKIGSDGWGEFHVNDGSVSIYVQK

SEQ ID NO: 27322 - protein, 483 aa, Bacillus sp.
HHNGTNQTMMQYFEWYLPNDGNHWNRLNSDASNLKSKGITAVWIPPAWKGASQNDVGYGAYDLYDLGEFNQKGTVRTKYGTRSQLQAAVTSLKNNGIQVYGDVVMNHKGGADATEMVRAVEVNPNNRNQEVTGEYTIEAWTRFDFPGRGNTHSSFKWRWYHFDGVDWDQSRRLNNRIYKFRGKAWDWEVDTEFGNYDYLMYADYDMDHPEVVNELRNWGVWYTNTLGLDGFRIDAVKHIKYSFTRDWINHVRSATGKNMFAVAEFWKNDLGAIENYLQKTNWNHSVFDVPLHYNLYNASKSGGNYDMRNIFNGTVVQSHPMHAVTFVDNHDSQPEEALESFVEEWFKPLAYALTLTREQGYPSVFYGDYYGIPTHGVPAMRSKIDPILEARQKYAYGPQHDYLDHPDVIGWTREGDSSHPKSGLATLITDGPGGSKRMYAGLKNAGETWYDITGNRSDTVKIGSDGWGEFHVNDGSVSIYVQK

SEQ ID NO: 27323 - protein, 485 aa, Bacillus sp.
HHNGTNGTMMQYFEWYLPNDGNHWNRLNSDASNLKSKGITAVWIPPAWKGASQNDVGYGAYDLYDLGEFNQKGTVRTKYGTRSQLQAAVTSLKNNGIQVYGDVVMNHKGGADATEMVRAVEVNPNNRNQEVTGEYTIEAWTRFDFPGRGNTHSSFKWRWYHFDGVDWDQSRELSNRIYKFRGHGKAWDWEVDTEFGNYDYLMYADYDMDHPEVVNELRNWGVWYTNTLGLDGFRIDAVKHIKYSFTRDWINHVRSATGKNMFAVAEFWKNDLGAIENYLQKTNWNHSVFDVPLHYNLYNASKSGGNYDMRNIFNGTVVQRHPSHAVTFVDNHDSQPEEALESFVEEWFKPLAYALTLTREQGYPSVFYGDYYGIPTHGVPAMRSKIDPILEARQKYAYGPQHDYLDHPDVIGWTREGDSSHPKSGLATLITDGPGGSKRMYAGLKNAGETWYDITGNRSDTVKIGSDGWGEFHVNDGSVSIYVQK

SEQ ID NO: 27324 - protein, 483 aa, Synthetic construct
HHNGTNGTMMQYFEWYLPNDGNHWNRLNSDASNLKSKGITAVWIPPAWKGASQNDVGYGAYDLYDLGEFNQKGTVRTKYGTRSQLQAAVTSLKNNGIQVYGDVVMNHKGGADATEMVRAVEVNPNNRNQEVTGEYTIEAWTRFDFPGRGNTHSSFKWRWYHFDGVDWDQSRRLNNRIYKFRGKAWDWEVDTENGNYDYLMYADYDMDHPEVVNELRNWGVWYTNTLGLDGFRIDAVKHIKYSFVRDWINHVRSATGKNMFAVAEFWKNDLGAIENYLQKTNWNHSVFDVPLHYNLYNASKSGGNYDMRNIFNGTVVQRHPSHAVTFVDNHDSQPEEALESFVEEWFKPLAYALTLTREQGYPSVFYGDYYGIPTHGVPAMRSKIDPILEARQKYAYGPQHDYLDHPDVIGWTREGDSSHPKSGLATLITDGPGGSKRMYAGLKNAGETWYDITGNRSDTVKIGSDGWGEFHVNDGSVSIYVQK

SEQ ID NO: 27325 - protein, 485 aa, Bacillus sp.
HHNGTNGTMMQYFEWYLPNDGNHWNRLNSDASNLKSKGITAVWIPPAWKGASQNDVGYGAYDLYDLGEFNQKGTVRTKYGTRSQLQAAVTSLKNNGIQVYGDVVMNHKGGADATEMVRAVEVNPNNRNQEVTGEYTIEAWTRFDFPGRGNTHSSFKWRWYHFDGVDWDQSRRLNNRIYKFRGHGKAWDWEVDTEFGNYDYLMYADYDMDHPEVVNELRNWGVWYTNTLGLDGFRIDAVKHIKYSFTRDWINHVRSATGKNMFAVAEFWKNDLGAIENYLQKTNWNHSVFDVPLHYNLYNASKSGGNYDMRNIFNGTVVQSWPMHAVTFVDNHDSQPEEALESFVEEWFKPLAYALTLTREQGYPSVFYGDYYGIPTHGVPAMRSKIDPILEARQKYAYGPQHDYLDHPDVIGWTREGDSSHPKSGLATLITDGPGGSKRMYAGLKNAGETWYDITGNRSDTVKIGSDGWGEFHVNDGSVSIYVQK

SEQ ID NO: 27326 - protein, 485 aa, Synthetic construct
HHNGTNGTMMQYFEWYLPNDGNHWNRLNSDASNLKSKGITAVWIPPAWKGASQNDVGYGAYDLYDLGEFNQKGTVRTKYGTRSQLQAAVTSLKNNGIQVYGDVVMNHKGGADATEMVRAVEVNPNNRNQEVTGEYTIEAWTRFDFPGRGNTHSSFKWRWYHFDGVDWDQSRRLNNRIYKFRGHGKAWDWEVDTEFGNYDYLMYADIDMDHPEVVNELRNWGVWYTNTLGLDGFRIDAVKHIKYSFTRDWINHVRSATGKNMFAVAEFWKNDLGAIENYLQKTNWNHSVFDVPLHYNLYNASKSGGNYDMRNIFNGTVVQRHPSHAVTFVDNHDSQPEEALESFVEEWFKPLAYALTLTREQGYPSVFYGDYYGIPTHGVPAMRSKIDPILEARQKYAYGPQHDYLDHPDVIGWTREGDSSHPKSGLATLITDGPGGSKRMYAGLKNAGETWYDITGNRSDTVKIGSDGWGEFHVNDGSVSIYVQK

SEQ ID NO: 27327 - protein, 485 aa, Bacillus sp.
HHNGTNGTMMQYFEWYLPNDGNHWNRLNSDASNLKSKGITAVWIPPAWKGASQNDVGYGAYDLYDLGEFNQKGTVRTKYGTRSQLQAAVTSLKNNGIQVYGDVVMNHKGGADATEMVRAVEVNPNNRNQEVTGEYTIEAWTRFDFPGRGNTHSSFKWRWYHFDGVDWDQSRRLNNRIYKFRGHGKAWDWEVDTEFGNYDYLMYADYDMDHPEVVNELRNWGVWYTNTLGLDGFRIDAVKHIKYSFTRDWINHVRSATGKNMFAVAEFWKNDLGAIENYLQKTNWNHSVFDVPLHYNLYNASKSGGNYDMRNIFNGTVVQRHPSHAVTFVDNHDSQPEEALESFVEEWFKPLAYALTLTREQGYPSVFYGDYYGIPTHGVPAMRSKIDPILEARQKYAYGPQHDYLDHPDRIGWTREGDSSHPKSGLATLITDGPGGSKRMYAGLKNAGETWYDITGNRSDTVKIGSDGWGEFHVNDGSVSIYVQK

SEQ ID NO: 27328 - protein, 485 aa, Synthetic construct
HHNGTNGTMMQYFEWYLPNDGNHWNRLNSDASNLKSKGITAVWIPPAWKGASQNDVGYGAYDLYDLGEFNQKGTVRTKYGTRSQLQAAVTSLKNNGIQVYGDVVMNHKGGADATEMVRAVEVNPNNRNQEVTGEYTIEAWTRFDFPGRGNTHSSFKWRWYHFDGVDWDQSRRLNNRIYKFRGHGKAWDWEVDTENGNYDYLMYADIDMDHPEVVNELRNWGVWYTNTLGLDGFRIDAVKHIKYSFTRDWINHVRSATGKNMFAVAEFWKNDLGAIENYLQKTNWNHSVFDVPLHYNLYSASKSGGNYDMRNIFNGTVVQRHPSHAVTFVDNHDSQPEEALESFVEEWFKPLAYALTLTREQGYPSVFYGDYYGIPTHGVPAMRSKIDPILEARQKYAYGPQHDYLDHPDVIGWTREGDSSHPKSGLATLITDGPGGSKRMYAGLKNAGETWYDITGNRSDTVKIGSDGWGEFHVNDGSVSIYVQK

SEQ ID NO: 27329 - protein, 485 aa, Bacillus sp.
HHNGTNGTMMQYFEWYLPNDGNHWNRLNSDASNLKSKGITAVWIPPAWKGASQNDVGYGAYDLYDLGEFNQKGTVRTKYGTRSQLQAAVTSLKNNGIQVYGDVVMNHKGGADATEMVRAVEVNPNNRNQEVTGEYTIEAWTRFDFPGRGNTHSSFKWRWYHFDGVDWDQSRNVNNRIYKFRGHGKAWDWEVDTEFGNYDYLMYADYDMDHPEVVNELRNWGVWYTNTLGLDGFRIDAVKHIKYSFTRDWINHVRSATGKNMFAVAEFWKNDLGAIENYLQKTNWNHSVFDVPLHYNLYNASKSGGNYDMRNIFNGTVVQRHPSHAVTFVDNHDSQPEEALESFVEEWFKPLAYALTLTREQGYPSVFYGDYYGIPTHGVPAMRSKIDPILEARQKYAYGPQHDYLDHPDVIGWTREGDSSHPKSGLATLITDGPGGSKRMYAGLKNAGETWYDITGNRSDTVKIGSDGWGEFHVNDGSVSIYVQK

SEQ ID NO: 27330 - protein, 483 aa, Synthetic construct
HHNGTNGTMMQYFEWYLPNDGNHWNRLNSDASNLKSKGITAVWIPPAWKGASQNDVGYGAYDLYDLGEFNQKGTVRTKYGTRSQLQAAVTSLKNNGIQVYGDVVMNHKGGADATEMVRAVEVNPNNRNQEVTGEYTIEAWTRFDFPGRGNTHSSFKWRWYHFDGVDWDQSRRLNNRIYKFRGKAWDWEVDTEYGNYDYLMYADIDMDHPEVVNELRNWGVWYTNTLGLDGFRIDAVKHIKYSFTRDWINHVRSATGKNMFAVAEFWKNDLGAIENYLQKTNWNHSVFDVPLHYNLYNASKSGGNYDMRNIFNGTVVQRHPSHAVTFVDNHDSQPEEALESFVEEWFKPLAYALTLTREQGYPSVFYGDYYGIPTHGVPAMRSKIDPILEARQKYAYGPQHDYLDHPDVIGWTREGDSSHPKSGLATLITDGPGGSKRMYAGLKNAGETWYDITGNRSDTVKIGSDGWGEFHVNDGSVSIYVQK

SEQ ID NO: 27331 - protein, 483 aa, Bacillus sp.
HHNGTNGTMMQYFEWYLPNDGNHWNRLNSDASNLKSKGITAVWIPPAWKGASQNDVGYGAYDLYDLGEFNQKGTVRTKYGTRSQLQAAVTSLKNNGIQVYGDVVMNHKGGADATEMVRAVEVNPNNRNQEVTGEYTIEAWTRFDFPGRGNTHSSFKWRWYHFDGVDWDQSRRLNNRIYKFRGKAWDWEVDTEFGNYDYLMYADYDMDHPEVVNELRNWGVWYTNTLGLDGFRIDAVKHIKYSFTRDWINHVRSATGKNMFAVAEFWKNDLGAIENYLQKTNWNHSVFDVPLHYNLYNASKSGGNYDMRNIFNGTVVQRHPSHAVTFVDNHDSQPEEALESFVEEWFKPLAYALTLTREQGYPSVFYGDYYGIPTHGVPAMRSKIDPILEARQKYAYGPQHDYLDHPDVIGWTREGDSSHPWSGLATLITDGPGGSKRMYAGLKNAGETWYDITGNRSDTVKIGSDGWGEFHVNDGSVSIYVQK

SEQ ID NO: 27332 - protein, 483 aa, Bacillus sp.
HHNGTNGTMMQYFEWYLPNDGNHWNRLNSDASNLKSKGITAVWIPPAWKGASQNDVGYGAYDLYDLGEFNQKGTVRTKYGTRSQLQAAVTSLKNNGIQVYGDVVMNHKGGADATEMVRAVEVNPNNRNQEVTGEYTIEAWTRFDFPGRGNTHSSFKWRWYHFDGVDWDQSRRLSNRIYKFRGKAWDWEVDTEFGNYDYLMYADYDMDHPEVVNELRNWGVWYTNTLGLDGFRIDAVKHIKYSFTRDWINHVRSATGKNMFAVAEFWKNDLGAIENYLQKTNWNHSVFDVPLHYNLYNASKSGGNYDMRNIFNGTVVQRHPSHAVTFVDNHDSQPEEALESFVEEWFKPLAYALTLTREQGYPSVFYGDYYGIPTHGVPAMRSKIDPILEARQKYAYGPQHDYLDHPDVIGWTREGDSSHPKSGLATLITDGPGGSKRMYAGLKNAGETWYDITGNRSDTVKIGSDGWGEFHVNDGSVSIYVQK

SEQ ID NO: 27333 - protein, 485 aa, Synthetic construct
HHNGTNGTMMQYFEWYLPNDGNHWNRLNSDASNLKSKGITAVWIPPAWKGASQNDVGYGAYDLYDLGEFNQKGTVRTKYGTRSQLQAAVTSLKNNGIQVYGDVVMNHKGGADATEMVRAVEVNPNNRNQEVTGEYTIEAWTRFDFPGRGNTHSSFKWRWYHFDGVDWDQSRRLNNRIYKFRGHGKAWDWEVDAEFGNYDYLMYADIDMDHPEVVNELRNWGVWYTNTLGLDGFRIDAVKHIKYSFTRDWINHVRSATGKNMFAVAEFWKNDLGAIENYLQKTNWNHSVFDVPLHYNLYNASKSGGNYDMRNIFNGTVVQRHPSHAVTFVDNHDSQPEEALESFVEEWFKPLAYALTLTREQGYPSVFYGDYYGIPTHGVPAMRSKIDPILEARQKYAYGPQHDYLDHPDVIGWTREGDSSHPKSGLATLITDGPGGSKRMYAGLKNAGETWYDITGNRSDTVKIGSDGWGEFHVNDGSVSIYVQK

SEQ ID NO: 27334 - protein, 483 aa, Bacillus sp.
HHNGTNGTMMQYFEWYLPNDGNHWNRLNSDASNLKSKGITAVWIPPAWKGASQNDVGYGAYDLYDLGEFNQKGTVRTKYGTRSQLQAAVTSLKNNGIQVYGDVVMNHKGGADATEMVRAVEVNPNNRNQEVTGEYTIEAWTRFDFPGRGNTHSSFKWRWYHFDGVDWDQSRRLNNRIYKFRGKAWDWEVDTEFGNYDYLMYADYDMDHPEVVNELRNWGVWYTNTLGLDGFRIDAVKHIKYSFTRDWINHVRSATGKNMFAVAEFWKNDLGAIENYLQKTNWNHSVFDVPLHYNLYNASKSGGNYDMRDIFNGTVVQRHPSHAVTFVDNHDSQPEEALESFVEEWFKPLAYALTLTREQGYPSVFYGDYYGIPTHGVPAMRSKIDPILEARQKYAYGPQHDYLDHPDVIGWTREGDSSHPKSGLATLITDGPGGSKRMYAGLKNAGETWYDITGNRSDTVKIGSDGWGEFHVNDGSVSIYVQK

SEQ ID NO: 27335 - protein, 485 aa, Synthetic construct
HHNGTNGTMMQYFEWYLPNDGNHWRRLNSDASNLKSKGITAVWIPPAWKGASQNDVGYGAYDLYDLGEFNQKGTVRTKYGTRSQLQAAVTSLKNNGIQVYGDVVMNHKGGADATEMVRAVEVNPNNRNQEVTGEYTIEAWTRFDFPGRGNTHSSFKWRWYHFDGVDWDQSRRLNNRIYKFRGHGKAWDWEVDTENGNYDYLMYADIDMDHPEVVNELRNWGVWYTNTLGLDGFRIDAVKHIKYSFTRDWINHVRSATGKNMFAVAEFWKNDLGAIENYLQKTNWNHSVFDVPLHYNLYNASKSGGNYDMRNIFNGTVVQRHPSHAVTFVDNHDSQPEEALESFVEEWFKPLAYALTLTREQGYPSVFYGDYYGIPTHGVPAMRSKIDPILEARQKYAYGPQHDYLDHPDVIGWTREGDSSHPKSGLATLITDGPGGSKRMYAGLKNAGETWYDITGNRSDTVKIGSDGWGEFHVNDGSVSIYVQK

SEQ ID NO: 27336 - protein, 483 aa, Bacillus sp.
HHNGTNGTMMQYFEWYLPNDGNHWNRLNSDASNLKSKGITAVWIPPAWKGASQNDVGYGAYDLYDLGEFNQKGTVRTKYGTRSQLQAAVTSLKNNGIQVYGDVVMNHKGGADATEMVRAVEVNPNNRNQEVTGEYTIEAWTRFDFPGRGNTHSSFKWRWYHFDGVDWDQSRRLNNRIYKFRGKAWDWEVDTEFGNYDYLMYADYDMDHPEVVNELRNWGVWYTNTLGLDGFRIDAVKHIKYSFTRDWINHVRSATGKNMFAVAEFWKNDLGAIENYLQKTNWNHSVFDVPLHYNLYNASKSGGNYDMRNIFNGTVVQRHPSHAVTFVDNHDSQPEEALESFVDTWFKPLAYALTLTREQGYPSVFYGDYYGIPTHGVPAMRSKIDPILEARQKYAYGPQHDYLDHPDVIGWTREGDSSHPKSGLATLITDGPGGSKRMYAGLKNAGETWYDITGNRSDTVKIGSDGWGEFHVNGGSVSIYVQK

SEQ ID NO: 27337 - protein, 483 aa, Bacillus sp.
HHNGTNGTMMQYFEWYLPNDGNHWNRLNSDASNLKSKGITAVWIPPAWKAASQNDVGYGAYDLYDLGEFNQKGTVRTKYGTRSQLQAAVTSLKNNGIQVYGDVVMNHKGGADATEMVRAVEVNPNNRNQEVTGEYTIEAWTRFDFPGRGNTHSSFKWRWYHFDGVDWDQSRQTNNRIYKFRGKAWDWEVDTEFGNYDYLMYADYDMDHPEVVNELRNWGVWYTNTLGLDGFRIDAVKHIKYSFTRDWINHVRSATGKNMFAVAEFWKNDLGAIENYLQKTNWNHSVFDVPLHYNLYNASKSGGNYDMRNIFNGTVVQRHPSHAVTFVDNHDSQPEEALESFVEEWFKPLAYALTLTREQGYPSVFYGDYYGIPTHGVPAMRSKIDPILEARQKYAYGPQHDYLDHPDVIGWTREGDSSHPKSGLATLITDGPGGSKRMYAGLKNAGETWYDITGNRSDTVKIGSDGWGEFHVNDGSVSIYVQK

SEQ ID NO: 27338 - protein, 485 aa, Synthetic construct
HHNGTNGTMMQYFEWYLPNDGNHWNRLNSDASNLKSKGITAVWIPPAWKGASQNDVGYGAYDLYDLGEFNQKGTVRTKYGTRSQLQAAVTSLKNNGIQVYGDVVMNHKGGADYTEMVRAVEVNPNNRNQEVTGEYTIEAWTRFDFPGRGNTHSSFKWRWYHFDGVDWDQSRRLNNRIYKFRGHGKAWDWEVDTENGNYDYLMYADIDMDHPEVVNELRNWGVWYTNTLGLDGFRIDAVKHIKYSFTRDWINHVRSATGKNMFAVAEFWKNDLGAIENYLQKTNWNHSVFDVPLHYNLYNASKSGGNYDMRNIFNGTVVQRHPSHAVTFVDNHDSQPEEALESFVEEWFKPLAYALTLTREQGYPSVFYGDYYGIPTHGVPAMRSKIDPILEARQKYAYGPQHDYLDHPDVIGWTREGDSSHPKSGLATLITDGPGGSKRMYAGLKNAGETWYDITGNRSDTVKIGSDGWGEFHVNDGSVSIYVQK

SEQ ID NO: 27339 - protein, 485 aa, Synthetic construct
HHNGTNGTMMQYFEWYLPNDGNHWNRLNSDASNLKSKGITAVWIPPAWKGASQNDVGYGAYDLYDLGEFNQKGTVRTKYGTRSQLQAAVTSLKNNGIQVYGDVVMNHKGGADATEMVRAVEVNPNNRNQEVTGEYTIEAWTRFDFPGRGNTHSSFKWRWYHFDGVDWDQSRRLNNRIYKFRGHGKAWDWEVDTENGNYDYLMYADIDMDHPEVVNELRNWGVWYTNTLGLDGFRIDAVKHIKYSFTRDWINHVRSATGKNMFAVAEFWKNDLGAIENYLQKTNWNHSVFDVPLHYNLYNASKSGGNYDMRNIFNGTVVQRHPSHAVTFVDNHDSQPEEALESFVEEWFKPLAYALTLTREQGYPSVFYGDYYGIPTHGVPAMRSKIDPILEARQKYAYGPQHDYLDHPDVIGWTREGDSSHPKSGLATLITDGPGGSKRMYAGLKNAGETWYDITGNRSDKVKIGSDGWGEFHVNDGSVSIYVQK

SEQ ID NO: 27340 - protein, 483 aa, Bacillus sp.
HHNGTNGTMMQYFEWYLPNDGNHWNRLNSDASNLKSKGITAVWIPPAWKGASQNDVGYGAYDLYDLGEFNQKGTVRTKYGTRSQLQAAVTSLKNNGIQVYGDVVMNHKGGADATEMVRAVEVNPNNRNQEVTGEYTIEAWTRFDFPGRGNTHSSFKWRWYHFDGVDWDQSRRLNNRIYKFRGKAWDWEVDTEFGNYDYLMYADYDMDHPEVVNELRNWGVWYTNTLGLDGFRIDAVKHIKYSFTRDWINHVRSATGKNMFAVAEFWKNDLGAIENYLQKTNWNHSVFDVPLHYNLYNASKSGGNYDMRNIFNGTVVQRHPSHAVTFVDNHDSQPEEALESFVEEWFKPLAYALTLTREQGYPSVFYGDYYGIPTHGVPAMRSKIDPILEARQKYAYGPQHDYLDHPDVIGWTREGDSSHPKSGLATLITDGPGGSKRMYAGLKNAGETWYDITGNRSDTVKIGSDGWGEFHVNGSSVSIYVQK

SEQ ID NO: 27341 - protein, 485 aa, Synthetic construct
HHNGTNGTMMQYFEWYLPNDGNHWNRLNSDASNLKSKGITAVWIPPAWKGASQNDVGYGAYDLYDLGEFNQKGTVRTKYGTRSQLQAAVTSLKNNGIQVYGDVVMNHKGGADATEMVRAVEVNPNNRNQEVTGEYTIEAWTRFDFPGRGNTHSSFKWRWYHFDGVDWDQSRRLNNRIYKFRGHGKAWDWEVDTENGNYDYLMYADIDMDHPEVVNELRNWGVWYTNTLGLDGFRIDAVKHIKYSFTRDWINHVRSATGKNMFAVAEFWKNDLGAIENYLQKTNWNHSVFDVPLHYNLYNASKSGGNYDMRNIFNGTVVQRHPSHSVTFVDNHDSQPEEALESFVEEWFKPLAYALTLTREQGYPSVFYGDYYGIPTHGVPAMRSKIDPILEARQKYAYGPQHDYLDHPDVIGWTREGDSSHPKSGLATLITDGPGGSKRMYAGLKNAGETWYDITGNRSDTVKIGSDGWGEFHVNDGSVSIYVQK

SEQ ID NO: 27342 - protein, 483 aa, Synthetic construct
HHNGTNGTMMQYFEWYLPNDGNHWNRLNSDASNLKSKGITAVWIPPAWKGASQNDVGYGAYDLYDLGEFNQKGTVRTKYGTRSQLQAAVTSLKNNGIQVYGDVVMNHKGGADATEMVRAVEVNPNNRNQEVTGEYTIEAWTRFDFPGRGNTHSSFKWRWYHFDGVDWDQSRRLNNRIYKFRGKAWDWEVDTENGNYDYLMYADIDMDHPVVVNELRNWGVWYTNTLGLDGFRIDAVKHIKYSFTRDWINHVRSATGKNMFAVAEFWKNDLGAIENYLQKTNWNHSVFDVPLHYNLYNASKSGGNYDMRNIFNGTVVQRHPSHAVTFVDNHDSQPEEALESFVEEWFKPLAYALTLTREQGYPSVFYGDYYGIPTHGVPAMRSKIDPILEARQKYAYGPQHDYLDHPDVIGWTREGDSSHPKSGLATLITDGPGGSKRMYAGLKNAGETWYDITGNRSDTVKIGSDGWGEFHVNDGSVSIYVQK

SEQ ID NO: 27343 - protein, 485 aa, Bacillus sp.
HHNGTNGTMMQYFEWYLPNDGNHWNRLNSDASNLKSKGITAVWIPPAWKATSQNDVGYGAYDLYDLGEFNQKGTVRTKYGTRSQLQAAVTSLKNNGIQVYGDVVMNHKGGADATEMVRAVEVNPNNRNQEVTGEYTIEAWTRFDFPGRGNTHSSFKWRWYHFDGVDWDQSRQVNNRIYKFRGHGKAWDWEVDTEFGNYDYLMYVDYDMDHPEVVNELRNWGVWYTNTLGLDGFRIDAVKHIKYSFTRDWINHVRSATGKNMFAVAEFWKNDLGAIENYLQKTNWNHSVFDVPLHYNLYNASKSGGNYDMRNIFNGTVVQRHPSHAVTFVDNHDSQPEEALESFVEEWFKPLAYALTLTREQGYPSVFYGDYYGIPTHGVPAMRSKIDPILEARQKYAYGPQHDYLDHPDVIGWTREGDSSHPKSGLATLITDGPGGSKRMYAGLKNAGETWYDITGNRSDTVKIGSDGWGEFHVNDGSVSIYVQK

SEQ ID NO: 27344 - protein, 483 aa, Bacillus sp.
HHNGTNGTMMQYFEWYLPNDGNHWNRLNSDASNLKSKGITAVWIPPAWKAASQNDVGYGAYDLYDLGEFNQKGTVRTKYGTRSQLQAAVTSLKNNGIQVYGDVVMNHKGGADATEMVRAVEVNPNNRNQEVTGEYTIEAWTRFDFPGRGNTHSSFKWRWYHFDGVDWDQSRQINNRIYKFRGKAWDWEVDTEFGNYDYLMYADYDMDHPEVVNELRNWGVWYTNTLGLDGFRIDAVKHIKYSFTRDWINHVRSATGKNMFAVAEFWKNDLGAIENYLQKTNWNHSVFDVPLHYNLYNASKSGGNYDMRNIFNGTVVQRHPSHAVTFVDNHDSQPEEALESFVEEWFKPLAYALTLTREQGYPSVFYGDYYGIPTHGVPAMRSKIDPILEARQKYAYGPQHDYLDHPDVIGWTREGDSSHPKSGLATLITDGPGGSKRMYAGLKNAGETWYDITGNRSDTVKIGSDGWGEFHVNDGSVSIYVQK

SEQ ID NO: 27345 - protein, 483 aa, Bacillus sp.
HHNGTNGTMMQYFEWYLPNDGNHWNRLNSDASNLKSKGITAVWIPPAWKAVSQNDVGYGAYDLYDLGEFNQKGTVRTKYGTRSQLQAAVTSLKNNGIQVYGDVVMNHKGGADATEMVRAVEVNPNNRNQEVTGEYTIEAWTRFDFPGRGNTHSSFKWRWYHFDGVDWDQSRRFDNRIYKFRGKAWDWEVDTEFGNYDYLMYADYDMDHPEVVNELRNWGVWYTNTLGLDGFRIDAVKHIKYSFTRDWINHVRSATGKNMFAVAEFWKNDLGAIENYLQKTNWNHSVFDVPLHYNLYNASKSGGNYDMRNIFNGTVVQRHPSHAVTFVDNHDSQPEEALESFVEEWFKPLAYALTLTREQGYPSVFYGDYYGIPTHGVPAMRSKIDPILEARQKYAYGPQHDYLDHPDVIGWTREGDSSHPKSGLATLITDGPGGSKRMYAGLKNAGETWYDITGNRSDTVKIGSDGWGEFHVNDGSVSIYVQK

SEQ ID NO: 27346 - protein, 483 aa, Synthetic construct
HHNGTNGTMMQYFEWYLPNDGNHWNRLNSDASNLKSKGITAVWIPPAWKGASQNDVGYGAYDLYDLGEFNQKGTVRTKYGTRSQLQAAVTSLKNNGIQVYGDVVMNHKGGADATEMVRAVEVNPNNRNQEVTGEYTIEAWTRFDFPGRGNTHSSFKWRWYHFDGVDWDQSRRLNNRIYKFRGKAWDWEVDTENGNYDYLMYADIDMDHPESVNELRNWGVWYTNTLGLDGFRIDAVKHIKYSFTRDWINHVRSATGKNMFAVAEFWKNDLGAIENYLQKTNWNHSVFDVPLHYNLYNASKSGGNYDMRNIFNGTVVQRHPSHAVTFVDNHDSQPEEALESFVEEWFKPLAYALTLTREQGYPSVFYGDYYGIPTHGVPAMRSKIDPILEARQKYAYGPQHDYLDHPDVIGWTREGDSSHPKSGLATLITDGPGGSKRMYAGLKNAGETWYDITGNRSDTVKIGSDGWGEFHVNDGSVSIYVQK

SEQ ID NO: 27347 - protein, 483 aa, Synthetic construct
HHNGTNGTMMQYFEWYLPNDGNHWNRLNSDASNLKSKGITAVWIPPAWKGASQNDVGYGAYDLYDLGEFNQKGTVRTKYGTRSQLQAAVTSLKNNGIQVYGDVVMNHKGGADATELVVAVEVNPNNRNQEVTGEYTIEAWTRFDFPGRGNTHSSFKWRWYHFDGVDWDQSRRLNNRIYKFRGKAWDWEVDTENGNYDYLMYADIDMDHPETVNELRNWGVWYTNTLGLDGFRIDAVKHIKYSFTRDWINHVRSATGKNMFAVAEFWKNDLGAIENYLQKTNWNHSVFDVPLHYNLYNASKSGGNYDMRNIFNGTVVQRHPSHAVTFVDNHDSQPEEALESFVEEWFKPLAYALTLTREQGYPSVFYGDYYGIPTHGVPAMRSKIDPILEARQKYAYGPQHDYLDHPDVIGWTREGDSSHPKSGLATLITDGPGGSKRMYAGLKNAGETWYDITGNRSDTVKIGSDGWGEFHVNDGSVSIYVQK

SEQ ID NO: 27348 - protein, 485 aa, Synthetic construct
HHNGTNGTMMQYFEWYLPNDGNHWNRLNSDASNLKSKGITAVWIPPAWKGASQNDVGYGAYDLYDLGEFNQKGTVRTKYGTRSQLQAAVTSLKNNGIQVYGDVVMNHKGGADATEMVRAVEVNPNNRNQEVTGEYTIEAWTRFDFPGRGNTHSSWKWRWYHFDGVDWDQSRRLNNRIYKFRGHGKAWDWEVDTENGNYDYLMYADIDMDHPEVVNELRNWGVWYTNTLGLDGFRIDAVKHIKYSFTRDWINHVRSATGKNMFAVAEFWKNDLGAIENYLQKTNWNHSVFDVPLHYNLYNASKSGGNYDMRNIFNGTVVQRHPSHAVTFVDNHDSQPEEALESFVEEWFKPLAYALTLTREQGYPSVFYGDYYGIPTHGVPAMRSKIDPILEARQKYAYGPQHDYLDHPDVIGWTREGDSSHPKSGLATLITDGPGGSKRMYAGLKNAGETWYDITGNRSDTVKIGSDGWGEFHVNDGSVSIYVQK

SEQ ID NO: 27349 - protein, 483 aa, Bacillus sp.
HHNGTNGTMMQYFEWYLPNDGNHWNRLNSDASNLKSKGITAVWIPPAWKGASQNDVGYGAYDLYDLGEFNQKGTVRTKYGTRSQLQAAVTSLKNNGIQVYGDVVMNHKGGADATEMVRAVEVNPNNRNQEVTGEYTIEAWTRFDFPGRGNTHSSFKWRWYHFDGVDWDQSRDLTNRIYKFRGKAWDWEVDTEFGNYDYLMYADYDMDHPEVVNELRNWGVWYTNTLGLDGFRIDAVKHIKYSFTRDWINHVRSATGKNMFAVAEFWKNDLGAIENYLQKTNWNHSVFDVPLHYNLYNASKSGGNYDMRNIFNGTVVQRHPSHAVTFVDNHDSQPEEALESFVEEWFKPLAYALTLTREQGYPSVFYGDYYGIPTHGVPAMRSKIDPILEARQKYAYGPQHDYLDHPDVIGWTREGDSSHPKSGLATLITDGPGGSKRMYAGLKNAGETWYDITGNRSDTVKIGSDGWGEFHVNDGSVSIYVQK

SEQ ID NO: 27350 - protein, 485 aa, Synthetic construct
HHNGTNGTMMQYFEWYLPNDGNHWNRLNSDASNLKSKGITAVWIPPAWKGASQNDVGYGAYDLYDLGEFNQKGTVRTKYGTRSQLQAAVTSLKNNGIQVYGDVVMNHKGGADATEMVRAVEVNPNNRNQEVTGEYTIEAWTRFDFPGRGNTHSSFKWRWYHFDGVDWDQSRRLNNRIYKFRGHGKAWDWEVDTENGNYDYLMYADIDMDHPEVVNELRNWGVWYTNTLGLDGFRIDAVKHIKYSFTRDWINHVRSATGKNMFAVAEFWKNDLGAIENYLQKTNWNHSVFDVPLHYNLYNASKSGGNYDMRNIFNGTVVQRHPSHAVTFVDNHDSQPEEALESFVEEWFKPLAYALTLTREQGYPSVFYGDYYGIPTHGVPAYRSKIDPILEARQKYAYGPQHDYLDHPDVIGWTREGDSSHPKSGLATLITDGPGGSKRMYAGLKNAGETWYDITGNRSDTVKIGSDGWGEFHVNDGSVSIYVQK

SEQ ID NO: 27351 - protein, 485 aa, Bacillus sp.
HHNGTNGTMMQYFEWYLPNDGNHWNRLNSDASNLKSKGITAVWIPPAWKGASQNDVGYGAYDLYDLGEFNQKGTVRTKYGTRSQLQAAVTSLKNNGIQVYGDVVMNHKGGADATEMVRAVEVNPNNRNQEVTGEYTIEAWTRFDFPGRGNTHSSFKWRWYHFDGVDWDQSRRLNNRIYKFRGHGKAWDWEVDTEFGNYDYLMYADYDMDHPEVVNELRNWGVWYTNTLGLDGFRIDAVKHIKYSFTRDWINHVRSATGKNMFAVAEFWKNDLGAIENYLQKTNWNHSVFDVPLHYNLYNASKSGGNYDMRNIFNGTVVQRHPSHAVTFVDNHDSQPEEALESFVEEWFKPLAYALTLTREQGYPSVFYGDYYGIPTHGVPAMRSKIDPILEARQKYAYGPQHDYLDHPDVIGWTREGDSSHPKSGLATLLTDGPGGSKRMYAGLKNAGETWYDITGNRSDTVKIGSDGWGEFHVNDGSVSIYVQK

SEQ ID NO: 27352 - protein, 485 aa, Bacillus sp.
HHNGTNGTMMQYFEWYLPNDGNHWNRLNSDASNLKSKGITAVWIPPAWKGASQNDVGYGAYDLYDLGEFNQKGTVRTKYGTRSQLQAAVTSLKNNGIQVYGDVVMNHKGGADATEMVRAVEVNPNNRNQEVTGEYTIEAWTRFDFPGRGNTHSSFKWRWYHFDGVDWDQSRNVNNRIYKFRGHGKAWDWEVDTEFGNYDYLMYADYDMDHPEVVNELRNWGVWYTNTLGLDGFRIDAVKHIKYSFTRDWINHVRSATGKNMFAVAEFWKNDLGAIENYLQKTNWNHSVFDVPLHYNLYNASKSGGNYDMRNIFNGTVVQAHPNHAVTFVDNHDSQPEEALESFVEEWFKPLAYALTLTREQGYPSVFYGDYYGIPTHGVPAMRSKIDPILEARQKYAYGPQHDYLDHPDVIGWTREGDSSHPKSGLATLITDGPGGSKRMYAGLKNAGETWYDITGNRSDTVKIGSDGWGEFHVNDGSVSIYVQK

SEQ ID NO: 27353 - protein, 485 aa, Synthetic construct
HHNGTNGTMMQYFEWYLPNDGNHWNRLNSDASNLKSKGITAVWIPPAWKGASQNDVGYGAYDLYDLGEFNQKGTVRTKYGTRSQLQAAVTSLKNNGIQVYGDVVMNHKGGADATEMVRAVEVNPNNRNQEVTGEYTIEAWTRFDFPGRGNTHSSFKWRWYHFDGVDWDQSRRLNNRIYKFRGHGKAWDWEVDTENGNYDYLMYADIDMDHPEVVNELRNWGVWYTNTLGLDGFRIDAVKHIKYSFTRDWINNVRSATGKNMFAVAEFWKNDLGAIENYLQKTNWNHSVFDVPLHYNLYNASKSGGNYDMRNIFNGTVVQRHPSHAVTFVDNHDSQPEEALESFVEEWFKPLAYALTLTREQGYPSVFYGDYYGIPTHGVPAMRSKIDPILEARQKYAYGPQHDYLDHPDVIGWTREGDSSHPKSGLATLITDGPGGSKRMYAGLKNAGETWYDITGNRSDTVKIGSDGWGEFHVNDGSVSIYVQK

SEQ ID NO: 27354 - protein, 485 aa, Bacillus sp.
HHNGTNGTMMQYFEWYLPNDGNHWNRLNSDASNLKSKGITAVWIPPAWKGASQNDVGYGAYDLYDLGEFNQKGTVRTKYGTRSQLQAAVTSLKNNGIQVYGDVVMNHKGGADATEMVRAVEVNPNNRNQEVTGEYTIEAWTRFDFPGRGNTHSSFKWRWYHFDGVDWDQSRKLSNRIYKFRGHGKAWDWEVDTEFGNYDYLMYADYDMDHPEVVNELRNWGVWYTNTLGLDGFRIDAVKHIKYSFTRDWINHVRSATGKNMFAVAEFWKNDLGAIENYLQKTNWNHSVFDVPLHYNLYNASKSGGNYDMRNIFNGTVVQRHPSHAVTFVDNHDSQPEEALESFVEEWFKPLAYALTLTREQGYPSVFYGDYYGIPTHGVPAMRSKIDPILEARQKYAYGPQHDYLDHPDVIGWTREGDSSHPKSGLATLITDGPGGSKRMYAGLKNAGETWYDITGNRSDTVKIGSDGWGEFHVNDGSVSIYVQK

SEQ ID NO: 27355 - protein, 483 aa, Bacillus sp.
HHNGTNGTMMQYFEWYLPNDGNHWNRLNSDASNLKSKGITAVWIPPAWKGASQNDVGYGAYDLYDLGEFNQKGTVRTKYGTRSQLQAAVTSLKNNGIQVYGDVVMNHKGGADATEMVRAVEVNPNNRNQEVTGEYTIEAWTRFDFPGRGNTHSSFKWRWYHFDGVDWDQSRRLNNRIYKFRGKAWDWEVDTEFGNYDYLMYADYDMDHPEVVNELRNWGVWYTNTLGLDGFRIDAVKHIKYSFTRDWINHVRSATGKNMFAVAEFWKNDLGAIENYLQKTNWNHSVFDVPLHYNLYNASKSGGNYDMRNIFNGTVVQRHPSHAVTFVDNHDSQPEEALESFVEEWFKPLAYALTLTREQGYPSVFYGDYYGIPTHGVPAMRSKIDPILEARQKYAYGPQHDYLDHPDVIGWTREGLSSHPKSGLATLITDGPGGSKRMYAGLKNAGETWYDITGNRSDTVKIGSDGWGEFHVNDGSVSIYVQK

SEQ ID NO: 27356 - protein, 485 aa, Synthetic construct
HHNGTNGTMMQYFEWYLPNDGNHWNRLNSDASNLKSKGITAVWIPPAWKGASQNDVGYGAYDLYDLGEFNQKGTVRTKYGTRSQLQAAVTSLKNNGIQVYGDVVMNHKGGADATEMVRAVEVNPNNRNQEVTGEYTIEAWTRFDFPGRGNTHSSFKWRWYHFDGVDWDQSRRLNNRIYKFRGHGKAWDWEVDTENGNYDYLMYADIDMDHPEVVNELRNWGVWYTNTLGLDGFRIDAVKHIKYSFTRDWINHVRSATGKNMFAVAEFWKNDLGAIENYLQKTNWNHSVFDVPLHYNLYNASKSGGNYDMRNIFNGTVVQRHPSHAVTFVDNHDSQPEEALESFVEEWFKPLAYATTLTREQGYPSVFYGDYYGIPTHGVPAMRSKIDPILEARQKYAYGPQHDYLDHPDVIGWTREGDSSHPKSGLATLITDGPGGSKRMYAGLKNAGETWYDITGNRSDTVKIGSDGWGEFHVNDGSVSIYVQK

SEQ ID NO: 27357 - protein, 485 aa, Synthetic construct
HHNGTNGTMMQYFEWYLPNDGNHWNRLNSDASNLKSKGITAVWIPPAWKGASQNDVGYGAYDLYDLGEFNQKGTVRTKYGTRSQLQAAVTSLKNNGIQVYGDVVMNHKGGADATEMVRAVEVNPNNRNQEVTGEYTIEAWTRFDFPGRGNTHSSFKWRWYHFDGVDWDQSRRLNNRIYKFRGHGKAWDWEVDTENGNYDYLMYADIDYDHPEVVNELRNWGVWYTNTLGLDGFRIDAVKHIKYSFTRDWINHVRSATGKNMFAVAEFWKNDLGAIENYLQKTNWNHSVFDVPLHYNLYNASKSGGNYDMRNIFNGTVVQRHPSHAVTFVDNHDSQPEEALESFVEEWFKPLAYALTLTREQGYPSVFYGDYYGIPTHGVPAMRSKIDPILEARQKYAYGPQHDYLDHPDVIGWTREGDSSHPKSGLATLITDGPGGSKRMYAGLKNAGETWYDITGNRSDTVKIGSDGWGEFHVNDGSVSIYVQK

SEQ ID NO: 27358 - protein, 485 aa, Synthetic construct
HHNGTNGTMMQYFEWYLPNDGNHWNRLNSDASNLKSKGITAVWIPPAWKGASQNDVGYGAYDLYDLGEFNQKGTVRTKYGTRSQLQAAVTSLKNNGIQVYGDVVMNHKGGADATEMVRAVEVNPNNRNQEVTGEYTIEAWTRFDFPGRGNTHSSFKWRWYHFDGVDWDQSRRLNNRIYKFRGHGKAWDWEVDTENGNYDYLMYADIDMDHPEVVNELRNWGVWYTNTLGLDGFRIDAVKHIKYSFTRDWINHVRSATGKNMFAVAEFWKNDLGAIENYLQKTNWNHSVFDVPLHYNLYNASKSGGNYDMRNIFNGTVVQRHPSHAVTFVDNHDSQPEEALESFVEEWFKPLAYALTLTREQGYPSVFYGDYYGIPTHGIPAMRSKIDPILEARQKYAYGPQHDYLDHPDVIGWTREGDSSHPKSGLATLITDGPGGSKRMYAGLKNAGETWYDITGNRSDTVKIGSDGWGEFHVNDGSVSIYVQK

SEQ ID NO: 27359 - protein, 483 aa, Bacillus sp.
HHNGTNGTMMQYFEWYLPNDGNHWNRLNSDASNLKSKGITAVWIPPAWKGVSQNDVGYGAYDLYDLGEFNQKGTVRTKYGTRSQLQAAVTSLKNNGIQVYGDVVMNHKGGADATEMVRAVEVNPNNRNQEVTGEYTIEAWTRFDFPGRGNTHSSFKWRWYHFDGVDWDQSRRISNRIYKFRGKAWDWEVDTEFGNYDYLMYADYDMDHPEVVNELRNWGVWYTNTLGLDGFRIDAVKHIKYSFTRDWINHVRSATGKNMFAVAEFWKNDLGAIENYLQKTNWNHSVFDVPLHYNLYNASKSGGNYDMRNIFNGTVVQRHPSHAVTFVDNHDSQPEEALESFVEEWFKPLAYALTLTREQGYPSVFYGDYYGIPTHGVPAMRSKIDPILEARQKYAYGPQHDYLDHPDVIGWTREGDSSHPKSGLATLITDGPGGSKRMYAGLKNAGETWYDITGNRSDTVKIGSDGWGEFHVNDGSVSIYVQK

SEQ ID NO: 27360 - protein, 483 aa, Bacillus sp.
HHNGTNGTMMQYFEWYLPNDGNHWNRLNSDASNLKSKGITAVWIPPAWKGASQNDVGYGAYDLYDLGEFNQKGTVRTKYGTRSQLQAAVTSLKNNGIQVYGDVVMNHKGGADATEMVRAVEVNPNNRNQEVTGEYTIEAWTRFDFPGRGNTHSSFKWRWYHFDGVDWDQSRRLQNRIYKFRGKAWDWEVDTEFGNYDYLMYVDYDMDHPEVVNELRNWGVWYTNTLGLDGFRIDAVKHIKYSFTRDWINHVRSATGKNMFAVAEFWKNDLGAIENYLQKTNWNHSVFDVPLHYNLYNASKSGGNYDMRNIFNGTVVQRHPSHAVTFVDNHDSQPEEALESFVEEWFKPLAYALTLTREQGYPSVFYGDYYGIPTHGVPAMRSKIDPILEARQKYAYGPQHDYLDHPDVIGWTREGDSSHPKSGLATLITDGPGGSKRMYAGLKNAGETWYDITGNRSDTVKIGSDGWGEFHVNDGSVSIYVQK

SEQ ID NO: 27361 - protein, 483 aa, Synthetic construct
HHNGTNGTMMQYFEWYLPNDGNHWNRLNSDASNLKSKGITAVWIPPAWKGASQNDVGYGAYDLYDLGEFNQKGTVRTKYGTRSQLQAAVTSLKNNGIQVYGDVVMNHKGGADATEMVRAVEVNPNNRNQEVTGEYTIEAWTRFDFPGRGNTHSSFKWRWYHFDGVDWDQSRRLNNRIYKFRGKAWDWEVDTENGNYDYLMYADYDMDHPEVVNEVRNWGVWYTNTLGLDGFRIDAVKHIKYSFTRDWINHVRSATGKNMFAVAEFWKNDLGAIENYLQKTNWNHSVFDVPLHYNLYNASKSGGNYDMRNIFNGTVVQRHPSHAVTFVDNHDSQPEEALESFVEEWFKPLAYALTLTREQGYPSVFYGDYYGIPTHGVPAMRSKIDPILEARQKYAYGPQHDYLDHPDVIGWTREGDSSHPKSGLATLITDGPGGSKRMYAGLKNAGETWYDITGNRSDTVKIGSDGWGEFHVNDGSVSIYVQK

SEQ ID NO: 27362 - protein, 485 aa, Bacillus sp.
HHNGTNGTMMQYFEWYLPNDGNHWNRLNSDASNLKSKGITAVWIPPAWKGASQNDVGYGAYDLYDLGEFNQKGTVRTKYGTRSQLQAAVTSLKNNGIQVYGDVVMNHKGGADATEMVKAVEVNPNNRNQEVTGEYTIEAWTRFDFPGRGNTHSSFKWRWYHFDGVDWDQSRRLNNRIYKFRGHGKAWDWEVDTEFGNYDYLMYADYDMDHPEVVNELRNWGVWYTNTLGLDGFRIDAVKHIKYSFTRDWINHVRSATGKNMFAVAEFWKNDLGAIENYLQKTNWNHSVFDVPLHYNLYNASKSGGNYDMRNIFNGTVVQRHPSHAVTFVDNHDSQPEEALESFVEEWFKPLAYALTLTREQGYPSVFYGDYYGIPTHGVPAMRSKIDPILEARQKYAYGPQHDYLDHPDVIGWTREGDSSHPKSGLATLITDGPGGSKRMYAGLKNAGETWYDITGNRSDTVKIGSDGWGEFHVNDGSVSIYVQK

SEQ ID NO: 27363 - protein, 483 aa, Bacillus sp.
HHNGTNGTMMQYFEWYLPNDGNHWNRLNSDASNLKSKGITAVWIPPAWKGASQNDVGYGAYDLYDLGEFNQKGTVRTKYGTRSQLQAAVTSLKNNGIQVYGDVVMNHKGGADATEMVRAVEVNPNNRNQEVTGEYTIEAWTRFDFPGRGNTHSSFKWRWYHFDGVDWDQSRKISNRIYKFRGKAWDWEVDTEFGNYDYLMYADYDMDHPEVVNELRNWGVWYTNTLGLDGFRIDAVKHIKYSFTRDWINHVRSATGKNMFAVAEFWKNDLGAIENYLQKTNWNHSVFDVPLHYNLYNASKSGGNYDMRNIFNGTVVQRHPSHAVTFVDNHDSQPEEALESFVEEWFKPLAYALTLTREQGYPSVFYGDYYGIPTHGVPAMRSKIDPILEARQKYAYGPQHDYLDHPDVIGWTREGDSSHPKSGLATLITDGPGGSKRMYAGLKNAGETWYDITGNRSDTVKIGSDGWGEFHVNDGSVSIYVQK

SEQ ID NO: 27364 - protein, 483 aa, Bacillus sp.
HHNGTNGTMMQYFEWYLPNDGNHWNRLNSDASNLKSKGITAVWIPPAWKGASQNDVGYGAYDLYDLGEFNQKGTVRTKYGTRSQLQAAVTSLKNNGIQVYGDVVMNHKGGADATEMVRAVEVNPNNRNQEVTGEYTIEAWTRFDFPGRGNTHSSFKWRWYHFDGVDWDQSRRLNNRIYKFRGKAWDWEVDVEFGNYDYLMYADYDMDHPEVVNELRNWGVWYTNTLGLDGFRIDAVKHIKYSFTRDWINHVRSATGKNMFAVAEFWKNDLGAIENYLQKTNWNHSVFDVPLHYNLYNASKSGGNYDMRNIFNGTVVQRHPSHAVTFVDNHDSQPEEALESFVEEWFKPLAYALTLTREQGYPSVFYGDYYGIPTHGVPAMRSKIDPILEARQKYAYGPQHDYLDHPDVIGWTREGDSSHPKSGLATLITDGPGGSKRMYAGLKNAGETWYDITGNRSDTVKIGSDGWGEFHVNDGSVSIYVQK

SEQ ID NO: 27365 - protein, 483 aa, Bacillus sp.
HHNGTNGTMMQYFEWYLPNDGNHWNRLNSDASNLKSKGITAVWIPPAWKATSQNDVGYGAYDLYDLGEFNQKGTVRTKYGTRSQLQAAVTSLKNNGIQVYGDVVMNHKGGADATEMVRAVEVNPNNRNQEVTGEYTIEAWTRFDFPGRGNTHSSFKWRWYHFDGVDWDQSRELSNRIYKFRGKAWDWEVDTEFGNYDYLMYADYDMDHPEVVNELRNWGVWYTNTLGLDGFRIDAVKHIKYSFTRDWINHVRSATGKNMFAVAEFWKNDLGAIENYLQKTNWNHSVFDVPLHYNLYNASKSGGNYDMRNIFNGTVVQRHPSHAVTFVDNHDSQPEEALESFVEEWFKPLAYALTLTREQGYPSVFYGDYYGIPTHGVPAMRSKIDPILEARQKYAYGPQHDYLDHPDVIGWTREGDSSHPKSGLATLITDGPGGSKRMYAGLKNAGETWYDITGNRSDTVKIGSDGWGEFHVNDGSVSIYVQK

SEQ ID NO: 27366 - protein, 483 aa, Bacillus sp.
HHNGTNGTMMQYFEWYLPNDGNHWNRLNSDASNLKSKGITAVWIPPAWKATSQNDVGYGAYDLYDLGEFNQKGTVRTKYGTRSQLQAAVTSLKNNGIQVYGDVVMNHKGGADATEMVRAVEVNPNNRNQEVTGEYTIEAWTRFDFPGRGNTHSSFKWRWYHFDGVDWDQSRDLSNRIYKFRGKAWDWEVDTEFGNYDYLMYADYDMDHPEVVNELRNWGVWYTNTLGLDGFRIDAVKHIKYSFTRDWINHVRSATGKNMFAVAEFWKNDLGAIENYLQKTNWNHSVFDVPLHYNLYNASKSGGNYDMRNIFNGTVVQRHPSHAVTFVDNHDSQPEEALESFVEEWFKPLAYALTLTREQGYPSVFYGDYYGIPTHGVPAMRSKIDPILEARQKYAYGPQHDYLDHPDVIGWTREGDSSHPKSGLATLITDGPGGSKRMYAGLKNAGETWYDITGNRSDTVKIGSDGWGEFHVNDGSVSIYVQK

SEQ ID NO: 27367 - protein, 485 aa, Bacillus sp.
HHNGTNGTMMQYFEWYLPNDGNHWNRLNSDASNLKSKGITAVWIPPAWKATSQNDVGYGAYDLYDLGEFNQKGTVRTKYGTRSQLQAAVTSLKNNGIQVYGDVVMNHKGGADATEMVDAVEVNPNNRNQEVTGEYTIEAWTRFDFPGRGNTHSSFKWRWYHFDGVDWDQSRNVNNRIYKFRGHGKAWDWEVDTEFGNYDYLMYADYDMDHPEVVNELRNWGVWYTNTLGLDGFRIDAVKHIKYSFTRDWINHVRSATGKNMFAVAEFWKNDLGAIENYLQKTNWNHSVFDVPLHYNLYNASKSGGNYDMRNIFNGTVVQRHPSHAVTFVDNHDSQPEEALESFVEEWFKPLAYALTLTREQGYPSVFYGDYYGIPTHGVPAMRSKIDPILEARQKYAYGPQHDYLDHPDVIGWTREGDSSHPKSGLATLITDGPGGSKRMYAGLKNAGETWYDITGNRSDTVKIGSDGWGEFHVNDGSVSIYVQK

SEQ ID NO: 27368 - protein, 483 aa, Bacillus sp.
HHNGTNETMMQYFEWYLPNDGNHWNRLNSDASNLKSKGITAVWIPPAWKGASQNDVGYGAYDLYDLGEFNQKGTVRTKYGTRSQLQAAVTSLKNNGIQVYGDVVMNHKGGADATEMVRAVEVNPNNRNQEVTGEYTIEAWTRFDFPGRGNTHSSFKWRWYHFDGVDWDQSRRLNNRIYKFRGKAWDWEVDTEFGNYDYLMYADYDMDHPEVVNELRNWGVWYTNTLGLDGFRIDAVKHIKYSFTRDWINHVRSATGKNMFAVAEFWKNDLGAIENYLQKTNWNHSVFDVPLHYNLYNASKSGGNYDMRNIFNGTVVQAHPMHAVTFVDNHDSQPEEALESFVEEWFKPLAYALTLTREQGYPSVFYGDYYGIPTHGVPAMRSKIDPILEARQKYAYGPQHDYLDHPDVIGWTREGDSSHPKSGLATLITDGPGGSKRMYAGLKNAGETWYDITGNRSDTVKIGSDGWGEFHVNDGSVSIYVQK

SEQ ID NO: 27369 - protein, 485 aa, Bacillus sp.
HHNGTNGTMMQYFEWYLPNDGNHWNRLNSDASNLKSKGITAVWIPPAWKATSQNDVGYGAYDLYDLGEFNQKGTVRTKYGTRSQLQAAVTSLKNNGIQVYGDVVMNHKGGADATEMVRAVEVNPNNRNQEVTGEYTIEAWTRFDFPGRGNTHSSFKWRWYHFDGVDWDQSRELNNRIYKFRGHGKAWDWEVDTEFGNYDYLMYADYDMDHPEVVNELRNWGVWYTNTLGLDGFRIDAVKHIKYSFTRDWINHVRSATGKNMFAVAEFWKNDLGAIENYLQKTNWNHSVFDVPLHYNLYNASKSGGNYDMRNIFNGTVVQRHPSHAVTFVDNHDSQPEEALESFVEEWFKPLAYALTLTREQGYPSVFYGDYYGIPTHGVPAMRSKIDPILEARQKYAYGPQHDYLDHPDVIGWTREGDSSHPKSGLATLITDGPGGSKRMYAGLKNAGETWYDITGNRSDTVKIGSDGWGEFHVNDGSVSIYVQK

SEQ ID NO: 27370 - protein, 483 aa, Bacillus sp.
HHNGTNGTMMQYFEWYLPNDGNHWNRLNSDASNLKSKGITAVWIPPAWKGASQNDVGYGAYDLYDLGEFNQKGTVRTKYGTRSQLQAAVTSLKNNGIQVYGDVVMNHKGGADATEMVRAVEVNPNNRNQEVTGEYTIEAWTRFDFPGRGNTHSSFKWRWYHFDGVDWDQSRRLNNRIYKFRGKAWDWEVDTEFGNYDYLMYADYDMDHPEVVNELRNWGVWYTNTLGLDGFRIDAVKHIKYSFTRDWINHVRSATGKNMFAVAEFWKNDLGAIENYLQKTNWNHSVFDVPLHYNLYNASKSGGNYDMRNIFNGTVVQRHPSHAVTFVDNHDSQPEEALESFVEEWFKPLAYALTLTREQGYPSVFYGDYYGIPTHGVPAMRSKIDPILEARQKYAYGPQHDYLDHPDVIGWTREGDSSHPKSGLATLETDGPGGSKRMYAGLKNAGETWYDITGNRSDTVKIGSDGWGEFHVNDGSVSIYVQK

SEQ ID NO: 27371 - protein, 483 aa, Bacillus sp.
HHNGTNGTMMQYFEWYLPNDGNHWNRLNSDASNLKSKGITAVWIPPAWKGASQNDVGYGAYDLYDLGEFNQKGTVRTKYGTRSQLQAAVTSLKNNGIQVYGDVVMNHKGGADATEMVRAVEVNPNNRNQEVTGEYTIEAWTRFDFPGRGNTHSSFKWRWYHFDGVDWDQSRDLNNRIYKFRGKAWDWEVDTEFGNYDYLMYADYDMDHPEVVNELRNWGVWYTNTLGLDGFRIDAVKHIKYSFTRDWINHVRSATGKNMFAVAEFWKNDLGAIENYLQKTNWNHSVFDVPLHYNLYNASKSGGNYDMRNIFNGTVVQRHPSHAVTFVDNHDSQPEEALESFVEEWFKPLAYALTLTREQGYPSVFYGDYYGIPTHGVPAMRSKIDPILEARQKYAYGPQHDYLDHPDVIGWTREGDSSHPKSGLATLITDGPGGSKRMYAGLKNAGETWYDITGNRSDTVKIGSDGWGEFHVNDGSVSIYVQK

SEQ ID NO: 27372 - protein, 483 aa, Synthetic construct
HHNGTNGTMMQYFEWYLPNDGNHWNRLNSDASNLKSKGITAVWIPPAWKGASQNDVGYGAYDLYDLGEFNQKGTVRTKYGTRSQLQAAVTSLKNNGIQVYGDVVMNHKGGADATEMVRAVEVNPNNRNQEVTGEYTIEAWTRFDFPGRGNTHSSFKWRWYHFDGVDWDQSRRLNNRIYKFRGKAWDWEVDTENGNYDYLMYADIDMDHPEVVNELRNWGVWYTNTLGLDGFRIDAVKHIKYSFTRDWINHVRSATGKNMFAVAEFWKNDLGAIENYLQKTNWNHSVFDVPLHYNLYNASKSGGNYDMRNIFNGTVVQRHPSHAVTFVDNHDSQPEEALESWVEEWFKPLAYALTLTREQGYPSVFYGDYYGIPTHGVPAMRSKIDPILEARQKYAYGPQHDYLDHPDVIGWTREGDSSHPKSGLATLITDGPGGSKRMYAGLKNAGETWYDITGNRSDTVKIGSDGWGEFHVNDGSVSIYVQK

SEQ ID NO: 27373 - protein, 485 aa, Synthetic construct
HHNGTNGTMMQYFEWYLPNDGNHWNRLNSDASNLKSKGITAVWIPPAWKGASQNDVGYGAYDLYDLGEFNQKGTVRTKYGTRSQLQAAVTSLKNNGIQVYGDVVMNHKGGADATEMVRAVEVNPNNRNQEVTGEYTIEAWTRFDFPGRGNTHSSFKWRWYHFDGVDWDQSRRLNNRIYKFRGHGKAWDWEVDTENGNYDYLMYADIDMDHPEVVNELRNWGVWYTNTLGLDGFRIDAVKHIKYSFTRDWINHVRSKTGKNMFAVAEFWKNDLGAIENYLQKTNWNHSVFDVPLHYNLYNASKSGGNYDMRNIFNGTVVQRHPSHAVTFVDNHDSQPEEALESFVEEWFKPLAYALTLTREQGYPSVFYGDYYGIPTHGVPAMRSKIDPILEARQKYAYGPQHDYLDHPDVIGWTREGDSSHPKSGLATLITDGPGGSKRMYAGLKNAGETWYDITGNRSDTVKIGSDGWGEFHVNDGSVSIYVQK

SEQ ID NO: 27374 - protein, 483 aa, Bacillus sp.
HHNGTNNTMMQYFEWYLPNDGNHWNRLNSDASNLKSKGITAVWIPPAWKGASQNDVGYGAYDLYDLGEFNQKGTVRTKYGTRSQLQAAVTSLKNNGIQVYGDVVMNHKGGADATEMVRAVEVNPNNRNQEVTGEYTIEAWTRFDFPGRGNTHSSFKWRWYHFDGVDWDQSRRLNNRIYKFRGKAWDWEVDTEFGNYDYLMYADYDMDHPEVVNELRNWGVWYTNTLGLDGFRIDAVKHIKYSFTRDWINHVRSATGKNMFAVAEFWKNDLGAIENYLQKTNWNHSVFDVPLHYNLYNASKSGGNYDMRNIFNGTVVQAHPMHAVTFVDNHDSQPEEALESFVEEWFKPLAYALTLTREQGYPSVFYGDYYGIPTHGVPAMRSKIDPILEARQKYAYGPQHDYLDHPDVIGWTREGDSSHPKSGLATLITDGPGGSKRMYAGLKNAGETWYDITGNRSDTVKIGSDGWGEFHVNDGSVSIYVQK

SEQ ID NO: 27375 - protein, 483 aa, Bacillus sp.
HHNGTNGTMMQYFEWYLPNDGNHWNRLNSDASNLKSKGITAVWIPPAWKGASQNDVGYGAYDLYDLGEFNQKGTVRTKYGTRSQLQAAVTSLKNNGIQVYGDVVMNHKGGADATEMVRAVEVNPNNRNQEVTGEYTIEAWTRFDFPGRGNTHSSFKWRWYHFDGVDWDQSRQVNNRIYKFRGKAWDWEVDTEFGNYDYLMYTDYDMDHPEVVNELRNWGVWYTNTLGLDGFRIDAVKHIKYSFTRDWINHVRSATGKNMFAVAEFWKNDLGAIENYLQKTNWNHSVFDVPLHYNLYNASKSGGNYDMRNIFNGTVVQRHPSHAVTFVDNHDSQPEEALESFVEEWFKPLAYALTLTREQGYPSVFYGDYYGIPTHGVPAMRSKIDPILEARQKYAYGPQHDYLDHPDVIGWTREGDSSHPKSGLATLITDGPGGSKRMYAGLKNAGETWYDITGNRSDTVKIGSDGWGEFHVNDGSVSIYVQK

SEQ ID NO: 27376 - protein, 485 aa, Bacillus sp.
HHNGTNGTMMQYFEWYLPNDGNHWNRLNSDASNLKSKGITAVWIPPAWKGASQNDVGYGAYDLYDLGEFNQKGTVRTKYGTRSQLQAAVTSLKNNGIQVYGDVVMNHKGGADATEMVRAVEVNPNNRNQEVTGEYTIEAWTRFDFPGRGNTHSSFKWRWYHFDGVDWDQSRRLNNRIYKFRGHGKAWDWEVDTEFGNYDYLMYADYDMDHPEVVNELRNWGVWYTNTLGLDGFRIDAVKHIKYSFTRDWINHVRSATGKNMFAVAEFWKNDLGAIENYLQKTNWNHSVFDVPLHYNLYNASKSGGNYDMRNIFNGTVVQRHPSHAVTFVDNHDSQPEEALESFVEEWFKPLAYALTLTREQGYPSVFYGDYYGIPTHGVPAMRSKIDPILEARQKYAYGPQHDYLDHPDVIGWTREGDSSHPKSGLATLITDGPGGSKRMYAGLKNAGETWYDITGNRSDTVKIGSDGWGEFHVNYGSVSIYVQK

SEQ ID NO: 27377 - protein, 485 aa, Bacillus sp.
HHNGTNGTMMQYFEWYLPNDGNHWNRLNSDASNLKSKGITAVWIPPAWKGISQNDVGYGAYDLYDLGEFNQKGTVRTKYGTRSQLQAAVTSLKNNGIQVYGDVVMNHKGGADATEMVRAVEVNPNNRNQEVTGEYTIEAWTRFDFPGRGNTHSSFKWRWYHFDGVDWDQSRDLTNRIYKFRGHGKAWDWEVDTEFGNYDYLMYADYDMDHPEVVNELRNWGVWYTNTLGLDGFRIDAVKHIKYSFTRDWINHVRSATGKNMFAVAEFWKNDLGAIENYLQKTNWNHSVFDVPLHYNLYNASKSGGNYDMRNIFNGTVVQRHPSHAVTFVDNHDSQPEEALESFVEEWFKPLAYALTLTREQGYPSVFYGDYYGIPTHGVPAMRSKIDPILEARQKYAYGPQHDYLDHPDVIGWTREGDSSHPKSGLATLITDGPGGSKRMYAGLKNAGETWYDITGNRSDTVKIGSDGWGEFHVNDGSVSIYVQK

SEQ ID NO: 27378 - protein, 485 aa, Bacillus sp.
HHNGTNGTMMQYFEWYLPNDGNHWNRLNSDASNLKSKGITAVWIPPAWKGASQNDVGYGAYDLYDLGEFNQKGTVRTKYGTRSQLQAAVTSLKNNGIQVYGDVVMNHKGGADATEMVDAVEVNPNNRNQEVTGEYTIEAWTRFDFPGRGNTHSSFKWRWYHFDGVDWDQSRRLNNRIYKFRNHGKAWDWEVDTEFGNYDYLMYADYDMDHPEVVNELRNWGVWYTNTLGLDGFRIDAVKHIKYSFTRDWINHVRSATGKNMFAVAEFWKNDLGAIENYLQKTNWNHSVFDVPLHYNLYNASKSGGNYDMRNIFNGTVVQRHPSHAVTFVDNHDSQPEEALESFVEEWFKPLAYALTLTREQGYPSVFYGDYYGIPTHGVPAMRSKIDPILEARQKYAYGPQHDYLDHPDVIGWTREGDSSHPKSGLATLITDGPGGSKRMYAGLKNAGETWYDITGNRSDTVKIGSDGWGEFHVNDGSVSIYVQK

SEQ ID NO: 27379 - protein, 485 aa, Synthetic construct
HHNGTNGTMMQYFEWYLPNDGNHWNRLNSDASNLKSKGITAVWIPPAWKGASQNDVGYGAYDLYDLGEFNQKGTVRTKYGTRSQLQAAVTSLKNNGIQVYGDVVMNHKGGADATEMVRAVEVNPNNRNQEVTGEYTIEAWTRFDFPGRGNTHSSFKWRWYHFDGVDWDQSRRLNNRIYKFRGHGKAWDWEVDTENGNYDYLMYADIDMDHPEVVNELRNWGVWYTNTLGLDGFRIDAVKHIKYSFTRDWINHVRSATGKNMFAVAEFWKNDLGAIENYLQKTNWNHSVFDVPLHYNLYNASKSGGNYDMRNIFNGTVVQRHPSHAVTFVDNHDSQPEEALESFVEEWFKPLAYALTLTREQGYPSVFYGDYYGIPTHGVPAMRSKIDPILAARQKYAYGPQHDYLDHPDVIGWTREGDSSHPKSGLATLITDGPGGSKRMYAGLKNAGETWYDITGNRSDTVKIGSDGWGEFHVNDGSVSIYVQK

SEQ ID NO: 27380 - protein, 486 aa, Bacillus sp.
HHNGTNGTMMQYFEWYLPNDGNHWNRLNSDASNLKSKGITAVWIPPAWKGASQNDVGYGAYDLYDLGEFNQKGTVRTKYGTRSQLQAAVTSLKNNGIQVYGDVVMNHKGGADATEMVRAVEVNPNNRNQEVTGEYTIEAWTRFDFPGRGNTHSSFKWRWYHFDGVDWDQSRRLNNRIYKFRGHGKAWDWEVDTEFGNYDYLMYADYDMDHPEVVNELRNWGVWYTNTLGLDGFRIDAVKHIKYSFTRDWINHVRSATGKNMFAVAEFWKNDLGAIENYLQKTNWNHSVFDVPLHYNLYNASKSGGNYDMRNIFNGTVVQRHPSHAVTFVDNHDSQGPEEALESFVEEWFKPLAYALTLTREQGYPSVFYGDYYGIPTHGVPAMRSKIDPILEARQKYAYGPQHDYLDHPDVIGWTREGDSSHPKSGLATLITDGPGGSKRMYAGLKNAGETWYDITGNRSDTVKIGSDGWGEFHVNDGSVSIYVQK

SEQ ID NO: 27381 - protein, 483 aa, Synthetic construct
HHNGTNGTMMQYFEWYLPNDGNHWNRLNSDASNLKSKGITAVWIPPAWKGASQNDVGYGAYDLYDLGEFNQKGTVRTKYGTRSQLQAAVTSLKNNGIQVYGDVVMNHKGGADATEMVRAVEVNPNNRNQEVTGEYTIEAWTRFDFPGRGNTHSSFKWRWYHFDGVDWDQSRRLNNRIYKFRGKAWDWEVDTENGNYDYLMYADIDMDHHEVVNELRNWGVWYTNTLGLDGFRIDAVKHIKYSFTRDWINHVRSATGKNMFAVAEFWKNDLGAIENYLQKTNWNHSVFDVPLHYNLYNASKSGGNYDMRNIFNGTVVQRHPSHAVTFVDNHDSQPEEALESFVEEWFKPLAYALTLTREQGYPSVFYGDYYGIPTHGVPAMRSKIDPILEARQKYAYGPQHDYLDHPDVIGWTREGDSSHPKSGLATLITDGPGGSKRMYAGLKNAGETWYDITGNRSDTVKIGSDGWGEFHVNDGSVSIYVQK

SEQ ID NO: 27382 - protein, 485 aa, Bacillus sp.
HHNGTNGTMMQYFEWYLPNDGNHWNRLNSDASNLKSKGITAVWIPPAWKGASQNDVGYGAYDLYDLGEFNQKGTVRTKYGTRSQLQAAVTSLKNNGIQVYGDVVMNHKGGADATEMVRAVEVNPNNRNQEVTGEYTIEAWTRFDFPGRGNTHSSFKWRWYHFDGVDWDQSRRLNNRIYKFRGHGKAWDWEVDTEFGNYDYLMYADYDMDHPEVVNELRTWGVWYTNTLGLDGFRIDAVKHIKYSFTRDWINHVRSATGKNMFAVAEFWKNDLGAIENYLQKTNWNHSVFDVPLHYNLYNASKSGGNYDMRNIFNGTVVQRHPSHAVTFVDNHDSQPEEALESFVEEWFKPLAYALTLTREQGYPSVFYGDYYGIPTHGVPAMRSKIDPILEARQKYAYGPQHDYLDHPDVIGWTREGDSSHPKSGLATLITDGPGGSKRMYAGLKNAGETWYDITGNRSDTVKIGSDGWGEFHVNDGSVSIYVQK

SEQ ID NO: 27383 - protein, 485 aa, Bacillus sp.
HHNGTNGTMMQYFEWYLPNDGNHWNRLNSDASNLKSKGITAVWIPPAWKGFSQNDVGYGAYDLYDLGEFNQKGTVRTKYGTRSQLQAAVTSLKNNGIQVYGDVVMNHKGGADATEMVRAVEVNPNNRNQEVTGEYTIEAWTRFDFPGRGNTHSSFKWRWYHFDGVDWDQSRRLNNRIYKFRGHGKAWDWEVDTEFGNYDYLMYADYDMDHPEVVNELRNWGVWYTNTLGLDGFRIDAVKHIKYSFTRDWINHVRSATGKNMFAVAEFWKNDLGAIENYLQKTNWNHSVFDVPLHYNLYNASKSGGNYDMRNIFNGTVVQRHPSHAVTFVDNHDSQPEEALESFVEEWFKPLAYALTLTREQGYPSVFYGDYYGIPTHGVPAMRSKIDPILEARQKYAYGPQHDYLDHPDVIGWTREGDSSHPKSGLATLITDGPGGSKRMYAGLKNAGETWYDITGNRSDTVKIGSDGWGEFHVNDGSVSIYVQK

SEQ ID NO: 27384 - protein, 485 aa, Bacillus sp.
HHNGTNGTMMQYFEWYLPNDGNHWNRLNSDASNLKSKGITAVWIPPAWKGASQNDVGYGAYDLYDLGEFNQKGTVRTKYGTRSQLQAAVTSLKNNGIQVYGDVVMNHKGGADATEMVRAVEVNPNNRNQEVTGEYTIEAWTRFDFPGRGNTHSSFKWRWYHFDGVDWDQSREFDNRIYKFRGHGKAWDWEVDTEFGNYDYLMYADYDMDHPEVVNELRNWGVWYTNTLGLDGFRIDAVKHIKYSFTRDWINHVRSATGKNMFAVAEFWKNDLGAIENYLQKTNWNHSVFDVPLHYNLYNASKSGGNYDMRNIFNGTVVQRHPSHAVTFVDNHDSQPEEALESFVDEWFKPLAYALTLTREQGYPSVFYGDYYGIPTHGVPAMRSKIDPILEARQKYAYGPQHDYLDHPDVIGWTREGDSSHPKSGLATLITDGPGGSKRMYAGLKNAGETWYDITGNRSDTVKIGSDGWGEFHVNKSSVSIYVQK

SEQ ID NO: 27385 - protein, 485 aa, Bacillus sp.
HHNGTNGTMMQYFEWYLPNDGNHWNRLNSDASNLKSKGITAVWIPPAWKGASQNDVGYGAYDLYDLGEFNQKGTVRTKYGTRSQLQAAVTSLKNNGIQVYGDVVMNHKGGADATEMVRAVEVNPNNRNQEVTGEYTIEAWTRFDFPGRGNTHSSFKWRWYHFDGVDWDQSRRLNNRIYKFRGHGKAWDWEVDTEFGNYDYLMYADYDMDHPEVVNELRNWGVWYTNTLGLDGFRIDAVKHIKYSFTRDWINHVRSATGKNMFAVAEFWKNDLGAIENYLQKTNWNHSVFDVPLHYNLYNASKSGGNYDMRSIFNGTVVQRHPSHAVTFVDNHDSQPEEALESFVEEWFKPLAYALTLTREQGYPSVFYGDYYGIPTHGVPAMRSKIDPILEARQKYAYGPQHDYLDHPDVIGWTREGDSSHPKSGLATLITDGPGGSKRMYAGLKNAGETWYDITGNRSDTVKIGSDGWGEFHVNDGSVSIYVQK

SEQ ID NO: 27386 - protein, 485 aa, Synthetic construct
HHNGTNGTMMQYFEWYLPNDGNHWNRLNSDASNLKSKGITAVWIPPAWKGASQNDVGYGAYDLYDLGEFNQKGTVRTKYGTRSQLQAAVTSLKNNGIQVYGDVVMNHKGGADATEMVRAVEVNPNNRNQEVTGEYTIEAWTRFDFPGRGNTHSSFKWRWYHFDGVDWDQSRRLNNRIYKFRGHGKAWDWEVDTENGNYDYLMYADIDMDHPEVVNELRNWGVWYTNTLGLDGFRIDAVKHIKYSFTRDWINHVRSATGKNMFAVAEFWKNDLGAIENYLQKTNWNHSVFDVPLHYNLYNASKSGGNYDMRNIFNGTVVQRHPSHAVTFVDNHDSQPEEALESFVEEWFKPLAYALTLTREQGYPSVFYGDYYGIPTHGVPAMRSKIDPILEARQKYAYGPQHDYLDHPDVVGWTREGDSSHPKSGLATLITDGPGGSKRMYAGLKNAGETWYDITGNRSDTVKIGSDGWGEFHVNDGSVSIYVQK

SEQ ID NO: 27387 - protein, 485 aa, Bacillus sp.
HHNGTNGTMMQYFEWYLPNDGNHWNRLNSDASNLKSKGITAVWIPPAWKGASQNDVGYGAYDLYDLGEFNQKGTVRTKYGTRSQLQAAVTSLKNNGIQVYGDVVMNHKGGADATEMVRAVEVNPNNRNQEVTGEYTIEAWTRFDFPGRGNTHSSFKWRWYHFDGVDWDQSRRLNNRIYKFRGHGKAWDWEVDTEFGNYDYLMYADYDMDHPEVVNELRNWGVWYTNTLGLDGFRIDAVKHIKYSFTRDWINHVRKATGKNMFAVAEFWKNDLGAIENYLQKTNWNHSVFDVPLHYNLYNASKSGGNYDMRNIFNGTVVQRHPSHAVTFVDNHDSQPEEALESFVEEWFKPLAYALTLTREQGYPSVFYGDYYGIPTHGVPAMRSKIDPILEARQKYAYGPQHDYLDHPDVIGWTREGDSSHPKSGLATLITDGPGGSKRMYAGLKNAGETWYDITGNRSDTVKIGSDGWGEFHVNDGSVSIYVQK

SEQ ID NO: 27388 - protein, 485 aa, Synthetic construct
HHNATNGTMMQYFEWYLPNDGNHWNRLNSDASNLKSKGITAVWIPPAWKGASQNDVGYGAYDLYDLGEFNQKGTVRTKYGTRSQLQAAVTSLKNNGIQVYGDVVMNHKGGADATEMVRAVEVNPNNRNQEVTGEYTIEAWTRFDFPGRGNTHSSFKWRWYHFDGVDWDQSRRLNNRIYKFRGHGKAWDWEVDTENGNYDYLMYADIDMDHPEVVNELRNWGVWYTNTLGLDGFRIDAVKHIKYSFTRDWINHVRSATGKNMFAVAEFWKNDLGAIENYLQKTNWNHSVFDVPLHYNLYNASKSGGNYDMRNIFNGTVVQRHPSHAVTFVDNHDSQPEEALESFVEEWFKPLAYALTLTREQGYPSVFYGDYYGIPTHGVPAMRSKIDPILEARQKYAYGPQHDYLDHPDVIGWTREGDSSHPKSGLATLITDGPGGSKRMYAGLKNAGETWYDITGNRSDTVKIGSDGWGEFHVNDGSVSIYVQK

SEQ ID NO: 27389 - protein, 485 aa, Synthetic construct
HHNGTNGTMMQYFEWYLPNDGNHWNRLNSDASNLKSKGITAVWIPPAWKGASQNDVGYGAYDLYDLGEFNQKGTVRTKYGTRSQLQAAVTSLKNNGIQVYGDVVMNHKGGADATEMVRAVEVNPNNRNQEVTGEYTIEAWTRFDFPGRGNTHSSFKWRWYHFDGVDWDQSRRLNNRIYKFRGHGKAWDWEVDTENGNYDYLMYADIDMDHPEVVNELRNWGVWYTNTLGLDGFRIDAVKHIKYSFTRDWINHVRSATGKNMFAVAEFWKNDLGAIENYLQKTNWNHSVFDVPLHYNLYNASKSGGNYDMRNIFNGTVVQRHPSHAVTFVDNHDSQPEEALESFVEEWFKPLAYALTLTREQGYPSVFYGDYYGIPTHGVPAMRSKIDPILEARQKYAYGPQHDYLDHPDVIGWTREGDSSHPKSGLATLITDGPGGSKRMYAGLKNAGETWYDITGNRSDTIKIGSDGWGEFHVNDGSVSIYVQK

SEQ ID NO: 27390 - protein, 485 aa, Synthetic construct
HHNGTNGTMMQYFEWYLPNDGNHWNRLNSDASNLKSKGITAVWIPPAWKGASQNDVGYGAYDLYDLGEFNQKGTVRTKYGTRSQLQAAVTSLKNNGIQVYGDVVMNHKGGADATEMVRAVEVNPNNRNQEVTGEYTIEAWTRFDFPGRGNTHSSFKWRWYHFDGVDWDQSRRLNNRIYKFRGHGKAWDWEVDTENGNYDYLMYADIDMDHPEVVNELRNWGVWYTNTLGLDGFRIDAVKHIKYSFTRDWINHVRSATGKNMFAVAEFWKNDLGAIENYLQKTNWNHSVFDVPLHYNLYNASKSGGNYDMRNIFNGTVVQRHPSHAVTFVDNHDSQPEEALESFVEEWFKPLAYALTLTREQGYPSVFYGDYYGISTHGVPAMRSKIDPILEARQKYAYGPQHDYLDHPDVIGWTREGDSSHPKSGLATLITDGPGGSKRMYAGLKNAGETWYDITGNRSDTVKIGSDGWGEFHVNDGSVSIYVQK

SEQ ID NO: 27391 - protein, 485 aa, Bacillus sp.
HHNGTNGTMMQYFEWYLPNDGNHWNRLNSDASNLKSKGITAVWIPPAWKGASQNDVGYGAYDLYDLGEFNQKGTVRTKYGTRSQLQAAVTSLKNNGIQVYGDVVMNHKGGADATEMVRAVEVNPNNRNQEVTGEYTIEAWTRFDFPGRGNTHSSFKWRWYHFDGVDWDQSRRLNNRIYKFRGHGKAWDWEVDTEFGNYDYLMYADYDMDHPEVVNELRNWGVWYTNTLGLDGFRIDAVKHIKYSFTRDWINHVRSATGKNMFAVAEFWKNDLGAIENYLQKTNWNHSVFDVPLHYNLYNASKSGGNYDMRNIFNGTVVQSHPMLAVTFVDNHDSQPEEALESFVEEWFKPLAYALTLTREQGYPSVFYGDYYGIPTHGVPAMRSKIDPILEARQKYAYGPQHDYLDHPDVIGWTREGDSSHPKSGLATLITDGPGGSKRMYAGLKNAGETWYDITGNRSDTVKIGSDGWGEFHVNDGSVSIYVQK

SEQ ID NO: 27392 - protein, 485 aa, Bacillus sp.
HHNGTNGTMMQYFEWYLPNDGNHWNRLNSDASNLKSKGITAVWIPPAWKGASQNDVGYGAYDLYDLGEFNQKGTVRTKYGTRSQLQAAVTSLKNNGIQVYGDVVMNHKGGADATEMVRAVEVNPNNRNQEVTGEYTIEAWTRFDFPGRGNTHSSFKWRWYHFDGVDWDQSRNLNNRIYKFRGHGKAWDWEVDTEFGNYDYLMYADYDMDHPEVVNELRNWGVWYTNTLGLDGFRIDAVKHIKYSFTRDWINHVRSATGKNMFAVAEFWKNDLGAIENYLQKTNWNHSVFDVPLHYNLYNASKSGGNYDMRNIFNGTVVQRHPSHAVTFVDNHDSQPEEALESFVEEWFKPLAYALTLTREQGYPSVFYGDYYGIPTHGVPAMRSKIDPILEARQKYAYGPQHDYLDHPDVIGWTREGDSSHPKSGLATLITDGPGGSKRMYAGLKNAGETWYDITGNRSDTVKIGSDGWGEFHVNDGSVSIYVQK

SEQ ID NO: 27393 - protein, 485 aa, Bacillus sp.
HHNGTNGTMMQYFEWYLPNDGNHWNRLNSDASNLKSKGITAVWIPPAWKGASQNDVGYGAYDLYDLGEFNQKGTVRTKYGTRSQLQAAVTSLKNNGIAVYGDVVMNHKGGADATEMVRAVEVNPNNRNQEVTGEYTIEAWTRFDFPGRGNTHSSFKWRWYHFDGVDWDQSRRLNNRIYKFRGHGKAWDWEVDTEFGNYDYLMYADYDMDHPEVVNELRNWGVWYTNTLGLDGFRIDAVKHIKYSFTRDWINHVRSATGKNMFAVAEFWKNDLGAIENYLQKTNWNHSVFDVPLHYNLYNASKSGGNYDMRNIFNGTVVQAHPMHAVTFVDNHDSQPEEALESFVEEWFKPLAYALTLTREQGYPSVFYGDYYGIPTHGVPAMRSKIDPILEARQKYAYGPQHDYLDHPDVIGWTREGDSSHPKSGLATLITDGPGGSKRMYAGLKNAGETWYDITGNRSDTVKIGSDGWGEFHVNDGSVSIYVQK

SEQ ID NO: 27394 - protein, 485 aa, Bacillus sp.
HHNGTNGTMMQYFEWYLPNDGNHWNRLNSDASNLKSKGITAVWIPPAWKGASQNDVGYGAYDLYDLGEFNQKGTVRTKYGTRSQLQAAVTSLKNNGIQVYGDVVMNHKGGADATEMVRAVEVNPNNRNQEVTGEYTIEAWTRFDFPGRGNTHSSFKWRWYHFDGVDWDQSRRLDNRIYKFRGHGKAWDWEVDTEFGNYDYLMYADYDMDHPEVVNELRNWGVWYTNTLGLDGFRIDAVKHIKYSFTRDWINHVRSATGKNMFAVAEFWKNDLGAIENYLQKTNWNHSVFDVPLHYNLYNASKSGGNYDMRNIFNGTVVQRHPSHAVTFVDNHDSQPEEALESFVEEWFKPLAYALTLTREQGYPSVFYGDYYGIPTHGVPAMRSKIDPILEARQKYAYGPQHDYLDHPDVIGWTREGDSSHPKSGLATLITDGPGGSKRMYAGLKNAGETWYDITGNRSDTVKIGSDGWGEFHVNDGSVSIYVQK

SEQ ID NO: 27395 - protein, 483 aa, Synthetic construct
HHNGTNGTMMQYFEWYLPNDGNHWNRLNSDASNLKSKGITAVWIPPAWKGASQNDVGYGAYDLYDLGEFNQKGTVRTKYGTRSQLQAAVTSLKNNGIQVYGDVVMNHKGGADATEMVRAVEVNPNNRNQEVTGEYTIEAWTRFDFPGRGNTHSSFKWRWYHFDGVDWDQSRRLNNRIYKFRGKAWDWEVDTENGNYDYLMYADIDMDHGEVVNELRNWGVWYTNTLGLDGFRIDAVKHIKYSFTRDWINHVRSATGKNMFAVAEFWKNDLGAIENYLQKTNWNHSVFDVPLHYNLYNASKSGGNYDMRNIFNGTVVQRHPSHAVTFVDNHDSQPEEALESFVEEWFKPLAYALTLTREQGYPSVFYGDYYGIPTHGVPAMRSKIDPILEARQKYAYGPQHDYLDHPDVIGWTREGDSSHPKSGLATLITDGPGGSKRMYAGLKNAGETWYDITGNRSDTVKIGSDGWGEFHVNDGSVSIYVQK

SEQ ID NO: 27396 - protein, 483 aa, Bacillus sp.
HHNGTNGTMMQYFEWYLPNDGNHWNRLNSDASNLKSKGITAVWIPPAWKAASQNDVGYGAYDLYDLGEFNQKGTVRTKYGTRSQLQAAVTSLKNNGIQVYGDVVMNHKGGADATEMVRAVEVNPNNRNQEVTGEYTIEAWTRFDFPGRGNTHSSFKWRWYHFDGVDWDQSREFTNRIYKFRGKAWDWEVDTEFGNYDYLMYADYDMDHPEVVNELRNWGVWYTNTLGLDGFRIDAVKHIKYSFTRDWINHVRSATGKNMFAVAEFWKNDLGAIENYLQKTNWNHSVFDVPLHYNLYNASKSGGNYDMRNIFNGTVVQRHPSHAVTFVDNHDSQPEEALESFVEEWFKPLAYALTLTREQGYPSVFYGDYYGIPTHGVPAMRSKIDPILEARQKYAYGPQHDYLDHPDVIGWTREGDSSHPKSGLATLITDGPGGSKRMYAGLKNAGETWYDITGNRSDTVKIGSDGWGEFHVNDGSVSIYVQK

SEQ ID NO: 27397 - protein, 483 aa, Synthetic construct
HHNGTNGTMMQYFEWYLPNDGNHWNRLNSDASNLKSKGITAVWIPPAWKGASQNDVGYGAYDLYDLGEFNQKGTVRTKYGTRSQLQAAVTSLKNNGIQVYGDVVMNHKGGADATEMVRAVEVNPNNRNQEVTGEYTIEAWTRFDFPGRGNTHSSFKWRWYHFDGVDWDQSRRLNNRIYKFRGKQWDWEVDTENGNYDYLMYADIDMDHPEVVNELRNWGVWYTNTLGLDGFRIDAVKHIKYSFTRDWINHVRSATGKNMFAVAEFWKNDLGAIENYLQKTNWNHSVFDVPLHYNLYNASKSGGNYDMRNIFNGTVVQRHPSHAVTFVDNHDSQPEEALESFVEEWFKPLAYALTLTREQGYPSVFYGDYYGIPTHGVPAMRSKIDPILEARQKYAYGPQHDYLDHPDVIGWTREGDSSHPKSGLATLITDGPGGSKRMYAGLKNAGETWYDITGNRSDTVKIGSDGWGEFHVNDGSVSIYVQK

SEQ ID NO: 27398 - protein, 485 aa, Bacillus sp.
HHNGTNGTMMQYFEWYLPNDGNHWNRLNSDASNLKSKGITAVWIPPAWKAVSQNDVGYGAYDLYDLGEFNQKGTVRTKYGTRSQLQAAVTSLKNNGIQVYGDVVMNHKGGADATEMVRAVEVNPNNRNQEVTGEYTIEAWTRFDFPGRGNTHSSFKWRWYHFDGVDWDQSRDFNNRIYKFRGHGKAWDWEVDTEFGNYDYLMYADYDMDHPEVVNELRNWGVWYTNTLGLDGFRIDAVKHIKYSFTRDWINHVRSATGKNMFAVAEFWKNDLGAIENYLQKTNWNHSVFDVPLHYNLYNASKSGGNYDMRNIFNGTVVQRHPSHAVTFVDNHDSQPEEALESFVEEWFKPLAYALTLTREQGYPSVFYGDYYGIPTHGVPAMRSKIDPILEARQKYAYGPQHDYLDHPDVIGWTREGDSSHPKSGLATLITDGPGGSKRMYAGLKNAGETWYDITGNRSDTVKIGSDGWGEFHVNDGSVSIYVQK

SEQ ID NO: 27399 - protein, 485 aa, Bacillus sp.
HHNGTNGTMMQYFEWYLPNDGNHWNRLNSDASNLKSKGITAVWIPPAWKGASQNDVGYGAYDLYDLGEFNQKGTVRTKYGTRSQLQAAVTSLKNNGIQVYGDVVMNHKGGADATEMVRAVEVNPNNRNQEVTGEYTIEAWTRFDFPGRGNTHSSFKWRWYHFDGVDWDQSRRVTNRIYKFRGHGKAWDWEVDTEFGNYDYLMYADYDMDHPEVVNELRNWGVWYTNTLGLDGFRIDAVKHIKYSFTRDWINHVRSATGKNMFAVAEFWKNDLGAIENYLQKTNWNHSVFDVPLHYNLYNASKSGGNYDMRNIFNGTVVQRHPSHAVTFVDNHDSQPEEALESFVEEWFKPLAYALTLTREQGYPSVFYGDYYGIPTHGVPAMRSKIDPILEARQKYAYGPQHDYLDHPDVIGWTREGDSSHPKSGLATLITDGPGGSKRMYAGLKNAGETWYDITGNRSDTVKIGSDGWGEFHVNDGSVSIYVQK

SEQ ID NO: 27400 - protein, 483 aa, Bacillus sp.
HHNGTNGTMMQYFEWYLPNDGNHWNRLNSDASNLKSKGITAVWIPPAWKGISQNDVGYGAYDLYDLGEFNQKGTVRTKYGTRSQLQAAVTSLKNNGIQVYGDVVMNHKGGADATEMVRAVEVNPNNRNQEVTGEYTIEAWTRFDFPGRGNTHSSFKWRWYHFDGVDWDQSRRLDNRIYKFRGKAWDWEVDTEFGNYDYLMYADYDMDHPEVVNELRNWGVWYTNTLGLDGFRIDAVKHIKYSFTRDWINHVRSATGKNMFAVAEFWKNDLGAIENYLQKTNWNHSVFDVPLHYNLYNASKSGGNYDMRNIFNGTVVQRHPSHAVTFVDNHDSQPEEALESFVEEWFKPLAYALTLTREQGYPSVFYGDYYGIPTHGVPAMRSKIDPILEARQKYAYGPQHDYLDHPDVIGWTREGDSSHPKSGLATLITDGPGGSKRMYAGLKNAGETWYDITGNRSDTVKIGSDGWGEFHVNDGSVSIYVQK

SEQ ID NO: 27401 - protein, 485 aa, Bacillus sp.
HHNGTNGTMMQYFEWYLPNDGNHWNRLNSDASNLKSKGITAVWIPPAWKGASQNDVGYGAYDLYDLGEFNQKGTVRTKYGTRSQLQAAVTSLKNNGIQVYGDVVMNHKGGADATEMVRAVEVNPNNRNQEVTGEYTIEAWTRFDFPGRGNTHSSFKWRWYHFDGVDWDQSRKLNNRIYKFRGHGKAWDWEVDTEFGNYDYLMYADYDMDHPEVVNELRNWGVWYTNTLGLDGFRIDAVKHIKYSFTRDWINHVRSATGKNMFAVAEFWKNDLGAIENYLQKTNWNHSVFDVPLHYNLYNASKSGGNYDMRNIFNGTVVQRHPSHAVTFVDNHDSQPEEALESFVEEWFKPLAYALTLTREQGYPSVFYGDYYGIPTHGVPAMRSKIDPILEARQKYAYGPQHDYLDHPDVIGWTREGDSSHPKSGLATLITDGPGGSKRMYAGLKNAGETWYDITGNRSDTVKIGSDGWGEFHVNDGSVSIYVQK

SEQ ID NO: 27402 - protein, 485 aa, Bacillus sp.
HHNGTNGTMMQYFEWYLPNDGNHWNRLNSDASNLKSKGITAVWIPPAWKGASQNDVGYGAYDLYDLGEFNQKGTVRTKYGTRSQLQAAVTSLKNNGIQVYGDVVMNHKGGADATEMVRAVEVNPNNRNQEVTGEYTIEAWTRFDFPGRGNTHSSFKWRWYHFDGVDWDQSREFDNRIYKFRGHGKAWDWEVDTEFGNYDYLMYADYDMDHPEVVNELRNWGVWYTNTLGLDGFRIDAVKHIKYSFTRDWINHVRIATGKNMFAVAEFWKNDLGAIENYLQKTNWNHSVFDVPLHYNLYNASKSGGNYDMRNIFNGTVVQRHPSHAVTFVDNHDSQPEEALESFVDEWFKPLAYALTLTREQGYPSVFYGDYYGIPTHGVPAMRSKIDPILEARQKYAYGPQHDYLDHPDVIGWTREGDSSHPKSGLATLITDGPGGSKRMYAGLKNAGETWYDITGNRSDTVKIGSDGWGEFHVNDQSVSIYVQK

SEQ ID NO: 27403 - protein, 483 aa, Bacillus sp.
HHNGTNGTMMQYFEWYLPNDGNHWNRLNSDASNLKSKGITAVWIPPAWKGASQNDVGYGAYDLYDLGEFNQKGTVRTKYGTRSQLQAAVTSLKNNGIQVYGDVVMNHKGGADATEMVRAVEVNPNNRNQEVTGEYTIEAWTRFDFPGRGNTHSSFKWRWYHFDGVDWDQSRRLNNRIYKFRGKAWDWEVDTEFGNYDYLMYADYDMDHPEVVNELRNWGVWYTNTLGLDGFRIDAVKHIKYSFTRDWINHVRSATGKNMFAVAEFWKNDLGAIENYLQKTNWNHSVFDVPLHYNLYNASKSGGNYDMRNIFNGTVVQMHPNHAVTFVDNHDSQPEEALESFVEEWFKPLAYALTLTREQGYPSVFYGDYYGIPTHGVPAMRSKIDPILEARQKYAYGPQHDYLDHPDVIGWTREGDSSHPKSGLATLITDGPGGSKRMYAGLKNAGETWYDITGNRSDTVKIGSDGWGEFHVNDGSVSIYVQK

SEQ ID NO: 27404 - protein, 483 aa, Bacillus sp.
HHNGTNGTMMQYFEWYLPNDGNHWNRLNSDASNLKSKGITAVWIPPAWKGASQNDVGYGAYDLYDLGEFNQKGTVRTKYGTRSQLQAAVTSLKNNGIQVYGDVVMNHKGGADATEMVRAVEVNPNNRNQEVTGEYTIEAWTRFDFPGRGNTHSSFKWRWYHFDGVDWDQSRRLNNRIYKFRGKAWDWEVDTEFGNYDYLMYADYDMDHPEVVNELRNWGVWYTNTLGLDGFRIDAVKHIKYSFTRDWINHVRSATGKNMFAVAEFWKNDLGAIENYLQKTNWNHSVFDVPLHYNLYNASRSGGNYDMRNIFNGTVVQRHPSHAVTFVDNHDSQPEEALESFVEEWFKPLAYALTLTREQGYPSVFYGDYYGIPTHGVPAMRSKIDPILEARQKYAYGPQHDYLDHPDVIGWTREGDSSHPKSGLATLITDGPGGSKRMYAGLKNAGETWYDITGNRSDTVKIGSDGWGEFHVNDGSVSIYVQK

SEQ ID NO: 27405 - protein, 485 aa, Bacillus sp.
HHNGTNGTMMQYFEWYLPNDGNHWNRLNSDASNLKSKGITAVWIPPAWKGASQNDVGYGAYDLYDLGEFNQKGTVRTKYGTRSQLQAAVTSLKNNGIQVYGDVVMNHKGGADATEMVRAVEVNPNNRNQEVTGEYTIEAWTRFDFPGRGNTHSSFKWRWYHFDGVDWDQSRRLNNRIYKFRGHGKAWDWEVDTEFGNYDYLMYADYDMDHPEVVNELRNWGVWYTNTLGLDGFRIDAVKHIKYSFTRDWINHVRSATGKNMFAVAEFWKNDLGAIENYLQKTNWNHSVFDVPLHYNLYNASKSGGNYDMRNIFNGTVVQRHPSHAVTFVDNHDSQPEEALESFVDEWFKPLAYALTLTREQGYPSVFYGDYYGIPTHGVPAMRSKIDPILEARQKYAYGPQHDYLDHPDVIGWTREGDSSHPKSGLATLITDGPGGSKRMYAGLKNAGETWYDITGNRSDTVKIGSDGWGEFHVNQGSVSIYVQK

SEQ ID NO: 27406 - protein, 485 aa, Bacillus sp.
HHNGTNGTMMQYFEWYLPNDGNHWNRLNSDASNLKSKGITAVWIPPAWKAISQNDVGYGAYDLYDLGEFNQKGTVRTKYGTRSQLQAAVTSLKNNGIQVYGDVVMNHKGGADATEMVRAVEVNPNNRNQEVTGEYTIEAWTRFDFPGRGNTHSSFKWRWYHFDGVDWDQSRRFNNRIYKFRGHGKAWDWEVDTEFGNYDYLMYADYDMDHPEVVNELRNWGVWYTNTLGLDGFRIDAVKHIKYSFTRDWINHVRSATGKNMFAVAEFWKNDLGAIENYLQKTNWNHSVFDVPLHYNLYNASKSGGNYDMRNIFNGTVVQRHPSHAVTFVDNHDSQPEEALESFVEEWFKPLAYALTLTREQGYPSVFYGDYYGIPTHGVPAMRSKIDPILEARQKYAYGPQHDYLDHPDVIGWTREGDSSHPKSGLATLITDGPGGSKRMYAGLKNAGETWYDITGNRSDTVKIGSDGWGEFHVNDGSVSIYVQK

SEQ ID NO: 27407 - protein, 485 aa, Bacillus sp.
HHNGTNGTMMQYFEWYLPNDGNHWNRLNSDASNLKSKGITAVWIPPAWKAASQNDVGYGAYDLYDLGEFNQKGTVRTKYGTRSQLQAAVTSLKNNGIQVYGDVVMNHKGGADATEMVRAVEVNPNNRNQEVTGEYTIEAWTRFDFPGRGNTHSSFKWRWYHFDGVDWDQSRQLNNRIYKFRGHGKAWDWEVDTEFGNYDYLMYADYDMDHPEVVNELRNWGVWYTNTLGLDGFRIDAVKHIKYSFTRDWINHVRSATGKNMFAVAEFWKNDLGAIENYLQKTNWNHSVFDVPLHYNLYNASKSGGNYDMRNIFNGTVVQRHPSHAVTFVDNHDSQPEEALESFVEEWFKPLAYALTLTREQGYPSVFYGDYYGIPTHGVPAMRSKIDPILEARQKYAYGPQHDYLDHPDVIGWTREGDSSHPKSGLATLITDGPGGSKRMYAGPKNAGETWYDITGNRSDTVKIGSDGWGEFHVNDGSVSIYVQK

SEQ ID NO: 27408 - protein, 485 aa, Bacillus sp.
HHNGTNGTMMQYFEWYLPNDGNHWNRLNSDASNLKSKGITAVWIPPAWKGASQNDVGYGAYDLYDLGEFNQKGTVRTKYGTRSQLQAAVTSLKNNGIQVYGDVVMNHKGGADATEMVRAVEVNPNNRNQEVTGEYTIEAWTRFDFPGRGNTHSSFKWRWYHFDGVDWDQSRRFENRIYKFRGHGKAWDWEVDTEFGNYDYLMYADYDMDHPEVVNELRNWGVWYTNTLGLDGFRIDAVKHIKYSFTRDWINHVRSATGKNMFAVAEFWKNDLGAIENYLQKTNWNHSVFDVPLHYNLYNASKSGGNYDMRNIFNGTVVQRHPSHAVTFVDNHDSQPEEALESFVEEWFKPLAYALTLTREQGYPSVFYGDYYGIPTHGVPAMRSKIDPILEARQKYAYGPQHDYLDHPDVIGWTREGDSSHPKSGLATLITDGPGGSKRMYAGLKNAGETWYDITGNRSDTVKIGSDGWGEFHVNDSSVSIYVQK

SEQ ID NO: 27409 - protein, 485 aa, Bacillus sp.
HHNGTNGTMMQYFEWYLPNDGNHWNRLNSDASNLKSKGITAVWIPPAWKGASQNDVGYGAYDLYDLGEFNQKGTVRTKYGTRSQLQAAVTSLKNNGIQVYGDVVMNHKGGADATEMVRAVEVNPNNRNQEVTGEYTIEAWTRFDFPGRGNTHSSFKWRWYHFDGVDWDQSRRINNRIYKFRGHGKAWDWEVDTEFGNYDYLMYADYDMDHPEVVNELRNWGVWYTNTLGLDGFRIDAVKHIKYSFTRDWINHVRSATGKNMFAVAEFWKNDLGAIENYLQKTNWNHSVFDVPLHYNLYNASKSGGNYDMRNIFNGTVVQRHPSHAVTFVDNHDSQPEEALESFVEEWFKPLAYALTLTREQGYPSVFYGDYYGIPTHGVPAMRSKIDPILEARQKYAYGPQHDYLDHPDVIGWTREGDSSHPKSGLATLITDGPGGSKRMYAGLKNAGETWYDITGNRSDTVKIGSDGWGEFHVNDGSVSIYVQK

SEQ ID NO: 27410 - protein, 485 aa, Bacillus sp.
HHNGTNGTMMQYFEWYLPNDGNHWNRLNSDASNLKSKGITAVWIPPAWKGASQNDVGYGAYDLYDLGEFNQKGTVRTKYGTRSQLQAAVTSLKNNGIQVYGDVVMNHKGGADATEMVRAVEVNPNNRNQEVTGEYTIEAWTRFDFPGRGNTHSSFKWRWYHFDGVDWDQSRRLNNRIYKFRGHGKAWDWEVDNEFGNYDYLMYADYDMDHPEVVNELRNWGVWYTNTLGLDGFRIDAVKHIKYSFTRDWINHVRSATGKNMFAVAEFWKNDLGAIENYLQKTNWNHSVFDVPLHYNLYNASKSGGNYDMRNIFNGTVVQRHPSHAVTFVDNHDSQPEEALESFVEEWFKPLAYALTLTREQGYPSVFYGDYYGIPTHGVPAMRSKIDPILEARQKYAYGPQHDYLDHPDVIGWTREGDSSHPKSGLATLITDGPGGSKRMYAGLKNAGETWYDITGNRSDTVKIGSDGWGEFHVNDGSVSIYVQK

SEQ ID NO: 27411 - protein, 483 aa, Bacillus sp.
HHNGTNGTMMQYFEWYLPNDGNHWNRLNSDASNLKSKGITAVWIPPAWKSASQNDVGYGAYDLYDLGEFNQKGTVRTKYGTRSQLQAAVTSLKNNGIQVYGDVVMNHKGGADATEMVRAVEVNPNNRNQEVTGEYTIEAWTRFDFPGRGNTHSSFKWRWYHFDGVDWDQSRNLQNRIYKFRGKAWDWEVDTEFGNYDYLMYADYDMDHPEVVNELRNWGVWYTNTLGLDGFRIDAVKHIKYSFTRDWINHVRSATGKNMFAVAEFWKNDLGAIENYLQKTNWNHSVFDVPLHYNLYNASKSGGNYDMRNIFNGTVVQRHPSHAVTFVDNHDSQPEEALESFVEEWFKPLAYALTLTREQGYPSVFYGDYYGIPTHGVPAMRSKIDPILEARQKYAYGPQHDYLDHPDVIGWTREGDSSHPKSGLATLITDGPGGSKRMYAGLKNAGETWYDITGNRSDTVKIGSDGWGEFHVNDGSVSIYVQK

SEQ ID NO: 27412 - protein, 485 aa, Bacillus sp.
HHNGTNGTMMQYFEWYLPNDGNHWNRLNSDASNLKSKGITAVWIPPAWKGTSQNDVGYGAYDLYDLGEFNQKGTVRTKYGTRSQLQAAVTSLKNNGIQVYGDVVMNHKGGADATEMVRAVEVNPNNRNQEVTGEYTIEAWTRFDFPGRGNTHSSFKWRWYHFDGVDWDQSRDLQNRIYKFRGHGKAWDWEVDTEFGNYDYLMYADYDMDHPEVVNELRNWGVWYTNTLGLDGFRIDAVKHIKYSFTRDWINHVRSATGKNMFAVAEFWKNDLGAIENYLQKTNWNHSVFDVPLHYNLYNASKSQGNYDMRNIFNGTVVQRHPSHAVTFVDNHDSQPEEALESFVDTWFKPLAYALTLTREQGYPSVFYGDYYGIPTHGVPAMRSKIDPILEARQKYAYGPQHDYLDHPDVIGWTREGDSSHPKSGLATLITDGPGGSKRMYAGLKNAGETWYDITGNRSDTVKIGSDGWGEFHVNGSSVSIYVQK

SEQ ID NO: 27413 - protein, 483 aa, Bacillus sp.
HHNGTNGTMMQYFEWYLPNDGNHWNRLNSDASNLKSKGITAVWIPPAWKGASQNDVGYGAYDLYDLGEFNQKGTVRTKYGTRSQLQAAVTSLKNNGIQVYGDVVMNHKGGADATEMVRAVEVNPNNRNQEVTGEYTIEAWTRFDFPGRGNTHSSFKWRWYHFDGVDWDQSRRLNNRIYKFRGKAWDWEVDTEFGNYDYLMYADYDMDHPEVVNELRNWGVWYTNTLGLDGFRIDAVKHIKYSFTRDWINHVRSATGKNMFAVAEFWKNDLGAIENYLQKTNWNHSVFDVPLHYNLYNASKSGGNYDMRNIFNGTVVQRHPSHAVTFVDNHDSQPEEALESFVEEWFKPLAYALTLTREQGYPSVFYGDYYGIPTHGVPAMRSKIDPILEARQKYAYGPQHDYLDHPDVIGWTREGDSSHPHSGLATLITDGPGGSKRMYAGLKNAGETWYDITGNRSDTVKIGSDGWGEFHVNDGSVSIYVQK

SEQ ID NO: 27414 - protein, 485 aa, Bacillus sp.
HHNGTNGTMMQYFEWYLPNDGNHWNRLNSDASNLKSKGITAVWIPPAWKAASQNDVGYGAYDLYDLGEFNQKGTVRTKYGTRSQLQAAVTSLKNNGIQVYGDVVMNHKGGADATEMVRAVEVNPNNRNQEVTGEYTIEAWTRFDFPGRGNTHSSFKWRWYHFDGVDWDQSRQVNNRIYKFRGHGKAWDWEVDTEFGNYDYLMYADYDMDHPEVVNELRNWGVWYTNTLGLDGFRIDAVKHIKYSFTRDWINHVRSATGKNMFAVAEFWKNDLGAIENYLQKTNWNHSVFDVPLHYNLYNASKSGGNYDMRNIFNGTVVQRHPSHAVTFVDNHDSQPEEALESFVEEWFKPLAYALTLTREQGYPSVFYGDYYGIPTHGVPAMRSKIDPILEARQKYAYGPQHDYLDHPDVIGWTREGDSSHPKSGLATLITDGPGGSKRMYAGLKNAGETWYDITGNRSDTVKIGSDGWGEFHVNDGSVSIYVQK

SEQ ID NO: 27415 - protein, 483 aa, Bacillus sp.
HHNGTNGTMMQYFEWYLPNDGNHWNRLNSDASNLKSKGITAVWIPPAWKAASQNDVGYGAYDLYDLGEFNQKGTVRTKYGTRSQLQAAVTSLKNNGIQVYGDVVMNHKGGADATEMVRAVEVNPNNRNQEVTGEYTIEAWTRFDFPGRGNTHSSFKWRWYHFDGVDWDQSRDFNNRIYKFRGKAWDWEVDTEFGNYDYLMYADYDMDHPEVVNELRNWGVWYTNTLGLDGFRIDAVKHIKYSFTRDWINHVRSATGKNMFAVAEFWKNDLGAIENYLQKTNWNHSVFDVPLHYNLYNASKSGGNYDMRNIFNGTVVQRHPSHAVTFVDNHDSQPEEALESFVEEWFKPLAYALTLTREQGYPSVFYGDYYGIPTHGVPAMRSKIDPILEARQKYAYGPQHDYLDHPDVIGWTREGDSSHPKSGLATLITDGPGGSKRMYAGLKNAGETWYDITGNRSDTVKIGSDGWGKFHVNDGSVSIYVQK

SEQ ID NO: 27416 - protein, 483 aa, Bacillus sp.
HHNGTNGTMMQYFEWYLPNDGNHWNRLNSDASNLKSKGITAVWIPPAWKGASQNDVGYGAYDLYDLGEFNQKGTVRTKYGTRSQLQAAVTSLKNNGIQVYGDVVMNHKGGADATEMVRAVEVNPNNRNQEVTGEYTIEAWTRFDFPGRGNTHSSFKWRWYHFDGVDWDQSRRLNNRIYKFRGKAWDWEVDTEFGNYDYLMYADYDMDHPEVVNELRNWGVWYTNTLGLDGFRIDAVKHIKYSFTRDWINHVRSATGKNMFAVAEFWKNDLGAIENYLQKTNWNHSVFDVPLHYNLYNASKSGGNYDMRNIFNGTVVQRHPSHAVTFVDNHDSQPEEALESFVEEWFKPLAYALTLTREQGYPSVFYGDYYGIPTHGVPAMRSKIDPILEARQKYAYGPQHDYLDHPDVIGWTREGDSSHPKSGLATLITDGPGGSKRMYAGLKNAGETWYDITGNRSDTVKIGFDGWGEFHVNKGSVSIYVQK

SEQ ID NO: 27417 - protein, 485 aa, Bacillus sp.
HHNGTNGTMMQYFEWYLPNDGNHWNRLNSDASNLKSKGITAVWIPPAWKAASQNDVGYGAYDLYDLGEFNQKGTVRTKYGTRSQLQAAVTSLKNNGIQVYGDVVMNHKGGADATEMVRAVEVNPNNRNQEVTGEYTIEAWTRFDFPGRGNTHSSFKWRWYHFDGVDWDQSRRFSNRIYKFRGHGKAWDWEVDTEFGNYDYLMYADYDMDHPEVVNELRNWGVWYTNTLGLDGFRIDAVKHIKYSFTRDWINHVRSATGKNMFAVAEFWKNDLGAIENYLQKTNWNHSVFDVPLHYNLYNASKSGGNYDMRNIFNGTVVQRHPSHAVTFVDNHDSQPEEALESFVEEWFKPLAYALTLTREQGYPSVFYGDYYGIPTHGVPAMRSKIDPILEARQKYAYGPQHDYLDHPDVIGWTREGDSSHPKSGLATLITDGPGGSKRMYAGLKNAGETWYDITGNRSDTVKIGSDGWGEFHVNDGSVSIYVQK

SEQ ID NO: 27418 - protein, 483 aa, Synthetic construct
HHNGTNGTMMQYFEWYLPNDGNHWNRLNSDASNLKSKGITAVWIPPAWKGASQNDVGYGAYDIYDLGEFNQKGTVRTKYGTRSQLQAAVTSLKNNGIQVYGDVVMNHKGGADATEMVRAVEVNPNNRNQEVTGEYTIEAWTRFDFPGRGNTHSSFKWRWYHFDGVDWDQSRRLNNRIYKFRGKAWDWEVDTENGNYDYLMYADYDMDHPEVVNELRNWGVWYTNTLGLDGFRIDAVKHIKYSFTRDWINHVRSATGKNMFAVAEFWKNDLGAIENYLQKTNWNHSVFDVPLHYNLYNASKSGGNYDMRNIFNGTVVQRHPSHAVTFVDNHDSQPEEALESFVEEWFKPLAYALTLTREQGYPSVFYGDYYGIPTHGVPAMRSKIDPILEARQKYAYGPQHDYLDHPDVIGWTREGDSSHPKSGLATLITDGPGGSKRMYAGLKNAGETWYDITGNRSDTVKIGSDGWGEFHVNDGSVSIYVQK

SEQ ID NO: 27419 - protein, 483 aa, Bacillus sp.
HHNGTNGTMMQYFEWYLPNDGNHWNRLNSDASNLKSKGITAVWIPPAWKGASQNDVGYGAYDLYDLGEFNQKGTVRTKYGTRSQLQAAVTSLKNNGIQVYGDVVMNHKGGADATEMVRAVEVNPNNRNQEVTGEYTIEAWTRFDFPGRGNTHSSFKWRWYHFDGVDWDQSRRLNNRIYKFRGKAWDWEVDTEFGNYDYLMYADYDMDHPEVVNELRNWGVWYTNTLGLDGFRIDAVKHIKYSFTRDWINHVRSATGKNMFAVAEFWKNDLGAIENYLQKTNWNHSVFDVPLHYNLYNASKSGGNYDMRNIFNGTVVQRHPSHAVTFVDNHDSQPEEALESFVEEWFKPLAYALTLTREQGYPSVFYGDYYGIPTHGVPAMRSKIDPILEARQKYAYGPQHDYLDHPDVIGWTREGDSSHPLSGLATLITDGPGGSKRMYAGLKNAGETWYDITGNRSDTVKIGSDGWGEFHVNDGSVSIYVQK

SEQ ID NO: 27420 - protein, 485 aa, Synthetic construct
HHNGTNGTMMQYFEWYLPNDGNHWNRLNSDASNLKSKGITAVWIPPAWKGASQNDVGYGAYDLYDLGEFNQKGTVRTKYGTRSQLQAAVTSLKNNGIQVYGDVVMNHKGGADATEMVRAVEVNPNNRNQEVTGEYTIEAWTRFDFPGRGNTHSSFKWRWYHFDGVDWDQSRRLNNRIYKFRGHGKAWDWEVDTENGNYDYLMYADIDMDHPEVVNELRNWGVWYTNTLGLDGFRIDAVKHIKYSFTRDWINHVRSATGKNMFAVAEFWKNDLGAIENYLQKTNWNHSVFDVPLHYNLYNASKSGGNYDMRNIFNGTVVQRHPSHAVTFVDNHDSQPEEALESFVEEWFKPLAYALTLTREQGYPSVFYGDYYGIPTHGVPAMRSKIDPILEARKKYAYGPQHDYLDHPDVIGWTREGDSSHPKSGLATLITDGPGGSKRMYAGLKNAGETWYDITGNRSDTVKIGSDGWGEFHVNDGSVSIYVQK

SEQ ID NO: 27421 - protein, 485 aa, Synthetic construct
HHNGTNGTMMQYFEWYLPNDGNHWNRLNSDASNLKSKGITAVWIPPAWKGASQNDVGYGAYDLYDLGEFNQKGTVRTKYGTRSQLQAAVTSLKNNGIQVYGDVVMNHKGGADATEMVRAVEVNPNNRNQEVTGEYTIEAWTRFDFPGRGNTHSSFKWRWYHFDGVDWDQSRRLNNRIYKFRGHGKAWDWEVDTENGNYDYLMYADIDMDHPEVVNELRNWGVWYTNTLGLDGFRIDAVKHIKYSFTRDWINHVRSATGKNMFAVAEFWKNDLGAIENYLQKTNWNHSAFDVPLHYNLYNASKSGGNYDMRNIFNGTVVQRHPSHAVTFVDNHDSQPEEALESFVEEWFKPLAYALTLTREQGYPSVFYGDYYGIPTHGVPAMRSKIDPILEARQKYAYGPQHDYLDHPDVIGWTREGDSSHPKSGLATLITDGPGGSKRMYAGLKNAGETWYDITGNRSDTVKIGSDGWGEFHVNDGSVSIYVQK

SEQ ID NO: 27422 - protein, 483 aa, Synthetic construct
HHNGTNGTMMQYFEWYLPNDGNHWNRLNSDASNLKSKGITAVWIPPAWKGASQNDVGYGAYDLYDLGEFNQKGTVRTKYGTRSQLQAAVTSLKNNGIQVYGDVVMNHKGGADATEMVRAVEVNPNNRNEEVTGEYTIEAWTRFDFPGRGNTHSSFKWRWYHFDGVDWDQSRRLNNRIYKFRGKAWDWEVDTENGNYDYLMYADIDMDHPEVVNELRNWGVWYTNTLGLDGFRIDAVKHIKYSFTRDWINHVRSATGKNMFAVAEFWKNDLGAIENYLQKTNWNHSVFDVPLHYNLYNASKSGGNYDMRNIFNGTVVQRHPSHAVTFVDNHDSQPEEALESFVEEWFKPLAYALTLTREQGYPSVFYGDYYGIPTHGVPAMRSKIDPILEARQKYAYGPQHDYLDHPDVIGWTREGDSSHPKSGLATLITDGPGGSKRMYAGLKNAGETWYDITGNRSDTVKIGSDGWGEFHVNDGSVSIYVQK

SEQ ID NO: 27423 - protein, 485 aa, Bacillus sp.
HHNGTNGTMMQYFEWYLPNDGNHWNRLNSDASNLKSKGITAVWIPPAWKAASQNDVGYGAYDLYDLGEFNQKGTVRTKYGTRSQLQAAVTSLKNNGIQVYGDVVMNHKGGADATEMVRAVEVNPNNRNQEVTGEYTIEAWTRFDFPGRGNTHSSFKWRWYHFDGVDWDQSRQINNRIYKFRGHGKAWDWEVDTEFGNYDYLMYADYDMDHPEVVNELRNWGVWYTNTLGLDGFRIDAVKHIKYSFTRDWINHVRSATGKNMFAVAEFWKNDLGAIENYLQKTNWNHSVFDVPLHYNLYNASKSGGNYDMRNIFNGTVVQRHPSHAVTFVDNHDSQPEEALESFVEEWFKPLAYALTLTREQGYPSVFYGDYYGIPTHGVPAMRSKIDPILEARQKYAYGPQHDYLDHPDVIGWTREGDSSHPKSGLATLITDGPGGSKRMYAGLKNAGETWYDITGNRSDTVKIGSDGWGEFHVNDGSVSIYVQK

SEQ ID NO: 27424 - protein, 485 aa, Bacillus sp.
HHNGTNGTMMQYFEWYLPNDGNHWNRLNSDASNLKSKGITAVWIPPAWKGASQNDVGYGAYDLYDLGEFNQKGTVRTKYGTRSQLQAAVTSLKNNGIQVYGDVVMNHKGGADATEMVRAVEVNPNNRNQEVTGEYTIEAWTRFDFPGRGNTHSSFKWRWYHFDGVDWDQSRRLNNRIYKFRGHGKAWDWEVDTEFGNYDYLMYADYDMDHPEVVNELRNWGVWYTNTLGLDGFRIDAVKHIKYSFTRDWINHVRSATGKNMFAVAEFWKNDLGAIENYLQKTNWNHSVFDVPLHYNLYNASKSGGNYDMRNIFNGTVVQSHPNHAVTFVDNHDSQPEEALESFVEEWFKPLAYALTLTREQGYPSVFYGDYYGIPTHGVPAMRSKIDPILEARQKYAYGPQHDYLDHPDVIGWTREGDSSHPKSGLATLITDGPGGSKRMYAGLKNAGETWYDITGNRSDTVKIGSDGWGEFHVNDGSVSIYVQK

SEQ ID NO: 27425 - protein, 483 aa, Synthetic construct
HHNGTNGTMMQYFEWYLPNDGNHWNRLNSDASNLKSKGITAVWIPPAWKGASQNDVGYGAYDLYDLGEFNQKGTVRTKYGTRSQLQAAVTSLKNNGIQVYGDVVMNHKGGADATEMVRAVEVNPNNRNQEVTGEYTIEAWTRFDFPGRGNTHSSFKWRWYHFDGVDWDQSRRLNNRIYKFRGKAWDWEVDTENGNYDYLMYADLDMDHPEVVNEVRNWGVWYTNTLGLDGFRIDAVKHIKYSFTRDWINHVRSATGKNMFAVAEFWKNDLGAIENYLQKTNWNHSVFDVPLHYNLYNASKSGGNYDMRNIFNGTVVQRHPSHAVTFVDNHDSQPEEALESFVEEWFKPLAYALTLTREQGYPSVFYGDYYGIPTHGVPAMRSKIDPILEARQKYAYGPQHDYLDHPDVIGWTREGDSSHPKSGLATLITDGPGGSKRMYAGLKNAGETWYDITGNRSDTVKIGSDGWGEFHVNDGSVSIYVQK

SEQ ID NO: 27426 - protein, 485 aa, Bacillus sp.
HHNGTNGTMMQYFEWYLPNDGNHWNRLNSDASNLKSKGITAVWIPPAWKAVSQNDVGYGAYDLYDLGEFNQKGTVRTKYGTRSQLQAAVTSLKNNGIQVYGDVVMNHKGGADATEMVRAVEVNPNNRNQEVTGEYTIEAWTRFDFPGRGNTHSSFKWRWYHFDGVDWDQSRDFQNRIYKFRGHGKAWDWEVDTEFGNYDYLMYTDYDMDHPEVVNELRNWGVWYTNTLGLDGFRIDAVKHIKYSFTRDWINHVRSATGKNMFAVAEFWKNDLGAIENYLQKTNWNHSVFDVPLHYNLYNASKSGGNYDMRNIFNGTVVQRHPSHAVTFVDNHDSQPEEALESFVEEWFKPLAYALTLTREQGYPSVFYGDYYGIPTHGVPAMRSKIDPILEARQKYAYGPQHDYLDHPDVIGWTREGDSSHPKSGLATLITDGPGGSKRMYAGLKNAGETWYDITGNRSDTVKIGSDGWGEFHVNDGSVSIYVQK

SEQ ID NO: 27427 - protein, 483 aa, Bacillus sp.
HHNGTNGTMMQYFEWYLPNDGNHWNRLNSDASNLKSKGITAVWIPPAWKGASQNDVGYGAYDLYDLGEFNQKGTVRTKYGTRSQLQAAVTSLKNNGIQVYGDVVMNHKGGADATEMVRAVEVNPNNRNQEVTGEYTIEAWTRFDFPGRGNTHSSFKWRWYHFDGVDWDHSRRFNNRIYKFRGKAWDWEVDTEFGNYDYLMYADYDMDHPEVVNELRNWGVWYTNTLGLDGFRIDAVKHIKYSFTRDWINHVRSATGKNMFAVAEFWKNDLGAIENYLQKTNWNHSVFDVPLHYNLYNASKSGGNYDMRNIFNGTVVQRHPSHAVTFVDNHDSQPEEALESFVEEWFKPLAYALTLTREQGYPSVFYGDYYGIPTHGVPAMRSKIDPILEARQKYAYGPQHDYLDHPDVIGWTREGDSSHPKSGLATLITDGPGGSKRMYAGLKNAGETWYDITGNRSDTVKIGSDGWGEFHVNDGSVSIYVQK

SEQ ID NO: 27428 - protein, 485 aa, Bacillus sp.
HHNGTNGTMMQYFEWYLPNDGNHWNRLNSDASNLKSKGITAVWIPPAWKATSQNDVGYGAYDLYDLGEFNQKGTVRTKYGTRSQLQAAVTSLKNNGIQVYGDVVMNHKGGADATEMVRAVEVNPNNRNQEVTGEYTIEAWTRFDFPGRGNTHSSFKWRWYHFDGVDWDQSRDLSNRIYKFRGHGKAWDWEVDTEFGNYDYLMYADYDMDHPEVVNELRNWGVWYTNTLGLDGFRIDAVKHIKYSFTRDWINHVRSATGKNMFAVAEFWKNDLGAIENYLQKTNWNHSVFDVPLHYNLYNASKSGGNYDMRNIFNGTVVQRHPSHAVTFVDNHDSQPEEALESFVEEWFKPLAYALTLTREQGYPSVFYGDYYGIPTHGVPAMRSKIDPILEARQKYAYGPQHDYLDHPDVIGWTREGDSSHPKSGLATLITDGPGGSKRMYAGLKNAGETWYDITGNRSDTVKIGSDGWGEFHVNDGSVSIYVQK

SEQ ID NO: 27429 - protein, 485 aa, Synthetic construct
HHNGTNGTMMQYFEWYLPNDGNHWNRLNSDASNLKSKGITAVWIPPAWKGASQNDVGYGAYDLYDLGEFNQKGTVRTKYGTRSQLQAAVTSLKNNGIQVYGDVVMNHKGGADATEMVRAVEVNPNNRNQEVTGEYTIEAWTRFDFPGRGNTHSSFKWRWYHFDGVDWDQSRRLNNRIYKFRGHGKAWDWEVDTENGNYDYLMYADIDMDHPEVVNELRNWGVWYANTLGLDGFRIDAVKHIKYSFTRDWINHVRSATGKNMFAVAEFWKNDLGAIENYLQKTNWNHSVFDVPLHYNLYNASKSGGNYDMRNIFNGTVVQRHPSHAVTFVDNHDSQPEEALESFVEEWFKPLAYALTLTREQGYPSVFYGDYYGIPTHGVPAMRSKIDPILEARQKYAYGPQHDYLDHPDVIGWTREGDSSHPKSGLATLITDGPGGSKRMYAGLKNAGETWYDITGNRSDTVKIGSDGWGEFHVNDGSVSIYVQK

SEQ ID NO: 27430 - protein, 485 aa, Synthetic construct
HHNGTNGTMMQYFEWYLPNDGNHWNRLNSDASNLKSKGITAVWIPPAWKGASQNDVGYGAYDLYDLGEFNQKGTVRTKYGTRSQLQAAVTSLKNNGIQVYGDVVMNHKGGADATEMVRAVEVNPNNRNQEVTGEYTIEAWTRFDFPGRGNTHSSFKWRWYHFDGVDWDQSRRLNNRIYKFRGHGKAWDWEVDTENGNYDYLMYADIDMDHPEVVNELRNWGVWYTNTLGLDGFRIDAVKHIKYSFTRDWINHVRSATGKNMFAVAEFWKNDLGAIENYLQKTNWNHSVFDVPLHYNLYNASKSGGNYDMRNIFNGTVVQRHPSHAVTFVDNHDTQPEEALESFVEEWFKPLAYALTLTREQGYPSVFYGDYYGIPTHGVPAMRSKIDPILEARQKYAYGPQHDYLDHPDVIGWTREGDSSHPKSGLATLITDGPGGSKRMYAGLKNAGETWYDITGNRSDTVKIGSDGWGEFHVNDGSVSIYVQK

SEQ ID NO: 27431 - protein, 485 aa, Bacillus sp.
HHNGTNGTMMQYFEWYLPNDGNHWNRLNSDASNLKSKGITAVWIPPAWKAVSQNDVGYGAYDLYDLGEFNQKGTVRTKYGTRSQLQAAVTSLKNNGIQVYGDVVMNHKGGADATEMVRAVEVNPNNRNQEVTGEYTIEAWTRFDFPGRGNTHSSFKWRWYHFDGVDWDQSRRFDNRIYKFRGHGKAWDWEVDTEFGNYDYLMYADYDMDHPEVVNELRNWGVWYTNTLGLDGFRIDAVKHIKYSFTRDWINHVRIATGKNMFAVAEFWKNDLGAIENYLQKTNWNHSVFDVPLHYNLYNASKSGGNYDMRNIFNGTVVQRHPSHAVTFVDNHDSQPEEALESFVDEWFKPLAYALTLTREQGYPSVFYGDYYGIPTHGVPAMRSKIDPILEARQKYAYGPQHDYLDHPDVIGWTREGDSSHPKSGLATLITDGPGGSKRMYAGLKNAGETWYDITGNRSDTVKIGSDGWGEFHVNDGSVSIYVQK

SEQ ID NO: 27432 - protein, 485 aa, Bacillus sp.
HHNGTNGTMMQYFEWYLPNDGNHWNRLNSDASNLKSKGITAVWIPPAWKGSSQNDVGYGAYDLYDLGEFNQKGTVRTKYGTRSQLQAAVTSLKNNGIQVYGDVVMNHKGGADATEMVRAVEVNPNNRNQEVTGEYTIEAWTRFDFPGRGNTHSSFKWRWYHFDGVDWDQSRRLNNRIYKFRGHGKAWDWEVDTEFGNYDYLMYADYDMDHPEVVNELRNWGVWYTNTLGLDGFRIDAVKHIKYSFTRDWINHVRSATGKNMFAVAEFWKNDLGAIENYLQKTNWNHSVFDVPLHYNLYNASKSGGNYDMRNIFNGTVVQRHPSHAVTFVDNHDSQPEEALESFVEEWFKPLAYALTLTREQGYPSVFYGDYYGIPTHGVPAMRSKIDPILEARQKYAYGPQHDYLDHPDVIGWTREGDSSHPKSGLATLITDGPGGSKRMYAGLKNAGETWYDITGNRSDTVKIGSDGWGEFHVNDGSVSIYVQK

SEQ ID NO: 27433 - protein, 483 aa, Synthetic construct
HHNGTNGTMMQYFEWYLPNDGNHWNRLNSDASNLKSKGITAVWIPPAWKGASQNDVGYGAYDLYDLGEFNQKGTVRTKYGTRSQLQAAVTSLKNNGIQVYGDVVMNHKGGADATEMVRAVEVNPNNRNQEVTGEYTIEAWTRFDFPGRGNTHSSFKWRWYHFDGVDWDQSRRLNNRIYKFRGKAWDWEVDTENGNYDYLMYADIDMDHPEPVNELRNWGVWYTNTLGLDGFRIDAVKHIKYSFTRDWINHVRSATGKNMFAVAEFWKNDLGAIENYLQKTNWNHSVFDVPLHYNLYNASKSGGNYDMRNIFNGTVVQRHPSHAVTFVDNHDSQPEEALESFVEEWFKPLAYALTLTREQGYPSVFYGDYYGIPTHGVPAMRSKIDPILEARQKYAYGPQHDYLDHPDVIGWTREGDSSHPKSGLATLITDGPGGSKRMYAGLKNAGETWYDITGNRSDTVKIGSDGWGEFHVNDGSVSIYVQK

SEQ ID NO: 27434 - protein, 483 aa, Synthetic construct
HHNGTNGTMMQYFEWYLPNDGNHWNRLNSDASNLKSKGITAVWIPPAWKGASQNDVGYGAYDLYDLGEFNQKGTVRTKYGTRSQLQAAVTSLKNNGIQVYGDVVMNHKGGADATEMVRAVEVNPNNRNQEVTGEYTIEAWTRFDFPGRGNTHSSFKWRWYHFDGVDWDQSRRLNNRIYKFRGKAWDWEVDTENGNYDYLMYADIDMDNPEVVNELRNWGVWYTNTLGLDGFRIDAVKHIKYSFTRDWINHVRSATGKNMFAVAEFWKNDLGAIENYLQKTNWNHSVFDVPLHYNLYNASKSGGNYDMRNIFNGTVVQRHPSHAVTFVDNHDSQPEEALESFVEEWFKPLAYALTLTREQGYPSVFYGDYYGIPTHGVPAMRSKIDPILEARQKYAYGPQHDYLDHPDVIGWTREGDSSHPKSGLATLITDGPGGSKRMYAGLKNAGETWYDITGNRSDTVKIGSDGWGEFHVNDGSVSIYVQK

SEQ ID NO: 27435 - protein, 483 aa, Bacillus sp.
HHNGTNGTMMQYFEWYLPNDGNHWNRLNSDASNLKSKGITAVWIPPAWKGASQNDVGYGAYDLYDLGEFNQKGTVRTKYGTRSQLQAAVTSLKNNGIQVYGDVVMNHKGGANATEMVRAVEVNPNNRNQEVTGEYTIEAWTRFDFPGRGNTHSSFKWRWYHFDGVDWDQSRRLNNRIYKFRGKAWDWEVDTEFGNYDYLMYADYDMDHPEVVNELRNWGVWYTNTLGLDGFRIDAVKHIKYSFTRDWINHVRSATGKNMFAVAEFWKNDLGAIENYLQKTNWNHSVFDVPLHYNLYNASKSGGNYDMRNIFNGTVVQMHPMHAVTFVDNHDSQPEEALESFVEEWFKPLAYALTLTREQGYPSVFYGDYYGIPTHGVPAMRSKIDPILEARQKYAYGPQHDYLDHPDVIGWTREGDSSHPKSGLATLITDGPGGSKRMYAGLKNAGGTWYDITGNRSDTVKIGSDGWGEFHVNDGSVSIYVQK

SEQ ID NO: 27436 - protein, 483 aa, Bacillus sp.
HHNGTNGTMMQYFEWYLPNDGNHWNRLNSDASNLKSKGITAVWIPPAWKGASQNDVGYGAYDLYDLGEFNQKGTVRTKYGTRSQLQAAVTSLKNNGIQVYGDVVMNHKGGADATEMVDAVEVNPNNRNQEVTGEYTIEAWTRFDFPGRGNTHSSFKWRWYHFDGVDWDQSRRLNNRIYKFRGKAWDWEVDTEFGNYDYLMYADYDMDHPEVVNELRNWGVWYTNTLGLDGFRIDAVKHIKYSFTRDWINHVRSATGKNMFAVAEFWKNDLGAIENYLQKTNWNHSVFDVPLHYNLYNASKSGGNYDMRNIFNGTVVQRHPSHAVTFVDNHDSQPEEALESFVEEWFKPLAYALTLTREQGYPSVFYGDYYGIPTHGVPAMRSKIDPILEARQKYAYGPQHDYLDHPDVIGWTREGDSSHPKSGLATLITDGPGGSKRMYAGLKNAGETWYDITGNRSDTVKIGSDGWGEFHVNDGSVSIYVQK

SEQ ID NO: 27437 - protein, 485 aa, Synthetic construct
HHNGTNGTMMQYFEWYLPNDGNHWNRLNSDASNLKSKGITAVWIPPAWKGASQNDVGYGAYDLYDLGEFNQKGTVRTKYGTRSQLQAAVTSLKNNGIQVYGDVVMNHKGGADATEMVRAVEVNPNNRNQEVTGEYTIEAWTRFDFPGRGNTHSSFKWRWYHFDGVDWDQSRRLNNRIYKFRGHGKAWDWEVDTENGNYDYLMYADIDMDHPEVVNELRNWGVWYTNTLGLDGFRIDAVKHIKYSFTRDWINHVRSATGKNMFAVAEFWKNDLGAIENYLQKTNWNHSVFDVPLHYNLYNASKSGGNYDMRNIFNGTVVQRHPSHAVTFVDNHDSQPEEALESFVEEWFKPLAYALTLTREQGYPSVFYGDYYGITTHGVPAMRSKIDPILEARQKYAYGPQHDYLDHPDVIGWTREGDSSHPKSGLATLITDGPGGSKRMYAGLKNAGETWYDITGNRSDTVKIGSDGWGEFHVNDGSVSIYVQK

SEQ ID NO: 27438 - protein, 485 aa, Synthetic construct
HHNGTNGTMMQYFEWYLPNDGNHWNRLNSDASNLKSKGITAVWIPPAWKGASQNDVGYGAYDLYDLGEFNQKGTVRTKYGTRSQLQAAVTSLKNNGIQVYGDVVMNHKGGADATEMVRAVEVNPNNRNQEVTGEYTIEAYTRFDFPGRGNTHSSFKWRWYHFDGVDWDQSRRLNNRIYKFRGHGKAWDWEVDTENGNYDYLMYADIDMDHPEVVNELRNWGVWYTNTLGLDGFRIDAVKHIKYSFTRDWINHVRSATGKNMFAVAEFWKNDLGAIENYLQKTNWNHSVFDVPLHYNLYNASKSGGNYDMRNIFNGTVVQRHPSHAVTFVDNHDSQPEEALESFVEEWFKPLAYALTLTREQGYPSVFYGDYYGIPTHGVPAMRSKIDPILEARQKYAYGPQHDYLDHPDVIGWTREGDSSHPKSGLATLITDGPGGSKRMYAGLKNAGETWYDITGNRSDTVKIGSDGWGEFHVNDGSVSIYVQK

SEQ ID NO: 27439 - protein, 483 aa, Synthetic construct
HHNGTNGTMMQYFEWYLPNDGNHWNRLNSDASNLKSKGITAVWIPPAWKGASQNDVGYGAYDLYDLGEFNQKGTVRTKYGTRSQLQAAVTSLKNNGIQVYGDVVMNHKGGADATEMVRAVEVNPNNRNQEVTGEYTIEAWTRFDFPGRGNTHSSFKWRWYHFDGVDWDQSRRLNNRIYKFRGKAWDWEVDTENGNYDYLMYADIDMDMPEVVNELRNWGVWYTNTLGLDGFRIDAVKHIKYSFTRDWINHVRSATGKNMFAVAEFWKNDLGAIENYLQKTNWNHSVFDVPLHYNLYNASKSGGNYDMRNIFNGTVVQRHPSHAVTFVDNHDSQPEEALESFVEEWFKPLAYALTLTREQGYPSVFYGDYYGIPTHGVPAMRSKIDPILEARQKYAYGPQHDYLDHPDVIGWTREGDSSHPKSGLATLITDGPGGSKRMYAGLKNAGETWYDITGNRSDTVKIGSDGWGEFHVNDGSVSIYVQK

SEQ ID NO: 27440 - protein, 483 aa, Bacillus sp.
HHNGTNGTMMQYFEWYLPNDGNHWNRLNSDASNLKSKGITAVWIPPAWKGASQNDVGYGAYDLYDLGEFNQKGTVRTKYGTRSQLQAAVTSLKNNGIQVYGDVVMNHKGGADATEMVRAVEVNPNNRNQEVTGEYTIEAWTRFDFPGRGNTHSSFKWRWYHFDGVDWDQSRRLNNRIYKFRGKAWDWEVDTEFGNYDYLMYADYDMDHPEVVNELRNWGVWYTNTLGLDGFRIDAVKHIKYSFTRDWINHVRSATGKNMFAVAEFWKNDLGAIENYLQKTNWNHSVFDVPLHYNLYNASKSGGNYDMRFIFNGTVVQRHPSHAVTFVDNHDSQPEEALESFVEEWFKPLAYALTLTREQGYPSVFYGDYYGIPTHGVPAMRSKIDPILEARQKYAYGPQHDYLDHPDVIGWTREGDSSHPKSGLATLITDGPGGSKRMYAGLKNAGETWYDITGNRSDTVKIGSDGWGEFHVNDGSVSIYVQK

SEQ ID NO: 27441 - protein, 483 aa, Bacillus sp.
HHNGTNGTMMQYFEWYLPNDGNHWNRLNSDASNLKSKGITAVWIPPAWKGASQNDVGYGAYDLYDLGEFNQKGTVRTKYGTRSQLQAAVTSLKNNGIQVYGDVVMNHKGGADATEMVRAVEVNPNNRNQEVTGEYTIEAWTRFDFPGRGNTHSSFKWRWYHFDGVDWDQSRRLNNRIYKFRGKAWDWEVDTEFGNYDYLMYADYDMDHPEVVNELREWGVWYTNTLGLDGFRIDAVKHIKYSFTRDWINHVRSATGKNMFAVAEFWKNDLGAIENYLQKTNWNHSVFDVPLHYNLYNASKSGGNYDMRNIFNGTVVQRHPSHAVTFVDNHDSQPEEALESFVEEWFKPLAYALTLTREQGYPSVFYGDYYGIPTHGVPAMRSKIDPILEARQKYAYGPQHDYLDHPDVIGWTREGDSSHPKSGLATLITDGPGGSKRMYAGLKNAGETWYDITGNRSDTVKIGSDGWGEFHVNDGSVSIYVQK

SEQ ID NO: 27442 - protein, 485 aa, Synthetic construct
HHNGTNGTMMQYFEWYLPNDGNHWNRLNSDASNLKSKGITAVWIPPAWKGASQNDVGYGAYDLYDLGEFNQKGTVRTKYGTRSQLQAAVTSLKNNGIQVYGDVVMNHKGGADATEMVRAVEVNPNNRNQEVTGEYTIEAWTRFDFPGRGNTHSSFKWRWYHFDGVDWDQSRRLNNRIYKFRGHGKAWDWEVDTENGNYDYLMYADIDMDHPEVVNELRNWGVWYTNTLGLDGFRIDAVKHIKYSFTRDWINHVRSATGKNMFAVGEFWKNDLGAIENYLQKTNWNHSVFDVPLHYNLYNASKSGGNYDMRNIFNGTVVQRHPSHAVTFVDNHDSQPEEALESFVEEWFKPLAYALTLTREQGYPSVFYGDYYGIPTHGVPAMRSKIDPILEARQKYAYGPQHDYLDHPDVIGWTREGDSSHPKSGLATLITDGPGGSKRMYAGLKNAGETWYDITGNRSDTVKIGSDGWGEFHVNDGSVSIYVQK

SEQ ID NO: 27443 - protein, 485 aa, Synthetic construct
HHNGTNGTMMQYFEWYLPNDGNHWNRLNSDASNLKSKGITAVWIPPAWKGASQNDVGYGAYDLYDLGEFNQKGTVRTKYGTRSQLQAAVTSLKNNGIQVYGDVVMNHKGGADATEMVRAVEVNPNNRNQEVTGEYTIEAWTRFDFPGRGNTHSSFKWRWYHFDGVDWDQSRRLNNRIYKFRGHGKAWDWPVDTENGNYDYLMYADIDMDHPEVVNELRNWGVWYTNTLGLDGFRIDAVKHIKYSFTRDWINHVRSATGKNMFAVAEFWKNDLGAIENYLQKTNWNHSVFDVPLHYNLYNASKSGGNYDMRNIFNGTVVQRHPSHAVTFVDNHDSQPEEALESFVEEWFKPLAYALTLTREQGYPSVFYGDYYGIPTHGVPAMRSKIDPILEARQKYAYGPQHDYLDHPDVIGWTREGDSSHPKSGLATLITDGPGGSKRMYAGLKNAGETWYDITGNRSDTVKIGSDGWGEFHVNDGSVSIYVQK

SEQ ID NO: 27444 - protein, 485 aa, Synthetic construct
HHNGTNGTMMQYFEWYLPNDGNHWKRLNSDASNLKSKGITAVWIPPAWKGASQNDVGYGAYDLYDLGEFNQKGTVRTKYGTRSQLQAAVTSLKNNGIQVYGDVVMNHKGGADATEMVRAVEVNPNNRNQEVTGEYTIEAWTRFDFPGRGNTHSSFKWRWYHFDGVDWDQSRRLNNRIYKFRGHGKAWDWEVDTENGNYDYLMYADIDMDHPEVVNELRNWGVWYTNTLGLDGFRIDAVKHIKYSFTRDWINHVRSATGKNMFAVAEFWKNDLGAIENYLQKTNWNHSVFDVPLHYNLYNASKSGGNYDMRNIFNGTVVQRHPSHAVTFVDNHDSQPEEALESFVEEWFKPLAYALTLTREQGYPSVFYGDYYGIPTHGVPAMRSKIDPILEARQKYAYGPQHDYLDHPDVIGWTREGDSSHPKSGLATLITDGPGGSKRMYAGLKNAGETWYDITGNRSDTVKIGSDGWGEFHVNDGSVSIYVQK

SEQ ID NO: 27445 - protein, 485 aa, Synthetic construct
HHNGTNGTMMQYFEWYLPNDGNHWNRLNSDASNLKSKGITAVWIPPAWKGASQNDVGYGAYDLYDLGEFNQKGTVRTKYGTRSQLQAAVTSLKNNGIQVYGDVVMNHKGGADATEMVRAVEVNPNNRNQEVTGEYTIEAWTRFDFPGRGNTHSSFKWRWYHFDGVDWDQSRRLNNRIYKFRGHGKAWDWEVDTENGNYDYLMYADIDMDHPEVVNELRNWGVWYTNTLGLDGFRIDAVKHIKYSFTRDWINHVRSATGKNMFAVAEFWKNDLGAIENYLQKTNWNHSVFDVPLHYNLYNASKSGGNYDMRNIFNGTLVQRHPSHAVTFVDNHDSQPEEALESFVEEWFKPLAYALTLTREQGYPSVFYGDYYGIPTHGVPAMRSKIDPILEARQKYAYGPQHDYLDHPDVIGWTREGDSSHPKSGLATLITDGPGGSKRMYAGLKNAGETWYDITGNRSDTVKIGSDGWGEFHVNDGSVSIYVQK

SEQ ID NO: 27446 - protein, 483 aa, Bacillus sp.
HHNGTNGTMMQYFEWYLPNDGNHWNRLNSDASNLKSKGITAVWIPPAWKGASQNDVGYGAYDLYDLGEFNQKGTVRTKYGTRSQLQAAVTSLKNNGIQVYGDVVMNHKGGADATEMVPAVEVNPNNRNQEVTGEYTIEAWTRFDFPGRGNTHSSFKWRWYHFDGVDWDQSRRLNNRIYKFRGKAWDWEVDTEFGNYDYLMYADYDMDHPEVVNELRNWGVWYTNTLGLDGFRIDAVKHIKYSFTRDWINHVRSATGKNMFAVAEFWKNDLGAIENYLQKTNWNHSVFDVPLHYNLYNASKSGGNYDMRNIFNGTVVQRHPSHAVTFVDNHDSQPEEALESFVEEWFKPLAYALTLTREQGYPSVFYGDYYGIPTHGVPAMRSKIDPILEARQKYAYGPQHDYLDHPDVIGWTREGDSSHPKSGLATLITDGPGGSKRMYAGLKNAGETWYDITGNRSDTVKIGSDGWGEFHVNDGSVSIYVQK

SEQ ID NO: 27447 - protein, 485 aa, Bacillus sp.
HHNGTNGTMMQYFEWYLPNDGNHWNRLNSDASNLKSKGITAVWIPPAWKGASQNDVGYGAYDLYDLGEFNQKGTVRTKYGTRSQLQAAVTSLKNNGIQVYGDVVMNHKGGADATEMVRAVEVNPNNRNQEVTGEYTIEAWTRFDFPGRGNTHSSFKWRWYHFDGVDWDQSRRFDNRIYKFRGHGKAWDWEVDTEFGNYDYLMYADYDMDHPEVVNELRNWGVWYTNTLGLDGFRIDAVKHIKYSFTRDWINHVRSATGKNMFAVAEFWKNDLGAIENYLQKTNWNHSVFDVPLHYNLYNASKSGGNYDMRNIFNGTVVQRHPSHAVTFVDNHDSQPEEALESFVEEWFKPLAYVLTLTREQGYPSVFYGDYYGIPTHGVPAMRSKIDPILEARQKYAYGPQHDYLDHPDVIGWTREGDSSHPKSGLATLITDGPGGSKRMYAGLKNAGETWYDITGNRSDTVKIGSDGWGEFHVNDGSVSIYVQK

SEQ ID NO: 27448 - protein, 483 aa, Bacillus sp.
HHNGTNETMMQYFEWYLPNDGNHWNRLNSDASNLKSKGITAVWIPPAWKGASQNDVGYGAYDLYDLGEFNQKGTVRTKYGTRSQLQAAVTSLKNNGIQVYGDVVMNHKGGADATEMVRAVEVNPNNRNQEVTGEYTIEAWTRFDFPGRGNTHSSFKWRWYHFDGVDWDQSRRLNNRIYKFRGKAWDWEVDTEFGNYDYLMYADYDMDHPEVVNELRNWGVWYTNTLGLDGFRIDAVKHIKYSFTRDWINHVRSATGKNMFAVAEFWKNDLGAIENYLQKTNWNHSVFDVPLHYNLYNASKSGGNYDMRNIFNGTVVQMHPMHAVTFVDNHDSQPEEALESFVEEWFKPLAYALTLTREQGYPSVFYGDYYGIPTHGVPAMRSKIDPILEARQKYAYGPQHDYLDHPDVIGWTREGDSSHPKSGLATLITDGPGGSKRMYAGLKNAGETWYDITGNRSDTVKIGSDGWGEFHVNDGSVSIYVQK

SEQ ID NO: 27449 - protein, 483 aa, Bacillus sp.
HHNGTNGTMMQYFEWYLPNDGNHWNRLNSDASNLKSKGITAVWIPPAWKGASQNDVGYGAYDLYDLGEFNQKGTVRTKYGTRSQLQAAVTSLKNNGIQVYGDVVMNHKGGADATEMVRAVEVNPNNRNQEVTGEYTIEAWTRFDFPGRGNTHSSFKWRWYHFDGVDWDQSRNFQNRIYKFRGKAWDWEVDTEFGNYDYLMYADYDMDHPEVVNELRNWGVWYTNTLGLDGFRIDAVKHIKYSFTRDWINHVRSATGKNMFAVAEFWKNDLGAIENYLQKTNWNHSVFDVPLHYNLYNASKSQGNYDMRNIFNGTVVQAHPNHAVTFVDNHDSQPEEALESFVDTWFKPLAYALTLTREQGYPSVFYGDYYGIPTHGVPAMRSKIDPILEARQKYAYGPQHDYLDHPDVIGWTREGDSSHPKSGLATLITDGPGGSKRMYAGLKNAGETWYDITGNRSDTVKIGSDGWGEFHVNGSSVSIYVQK

SEQ ID NO: 27450 - protein, 483 aa, Bacillus sp.
HHNGTNGTMMQYFEWYLPNDGNHWNRLNSDASNLKSKGITAVWIPPAWKAVSQNDVGYGAYDLYDLGEFNQKGTVRTKYGTRSQLQAAVTSLKNNGIQVYGDVVMNHKGGADATEMVRAVEVNPNNRNQEVTGEYTIEAWTRFDFPGRGNTHSSFKWRWYHFDGVDWDQSRRFDNRIYKFRGKAWDWEVDTEFGNYDYLMYADYDMDHPEVVNELRNWGVWYTNTLGLDGFRIDAVKHIKYSFTRDWINHVRSATGKNMFAVAEFWKNDLGAIENYLQKTNWNHSVFDVPLHYNLYNASKSGGNYDMRNIFNGTVVQRHPSHAVTFVDNHDSQPEEALESFVDPWFKPLAYALTLTREQGYPSVFYGDYYGIPTHGVPAMRSKIDPILEARQKYAYGPQHDYLDHPDVIGWTREGDSSHPKSGLATLITDGPGGSKRMYAGLKNAGETWYDITGNRSDTVKIGSDGWGEFHVNGGSVSIYVQK

SEQ ID NO: 27451 - protein, 483 aa, Synthetic construct
HHNGTNGTMMQYFEWYLPNDGNHWNRLNSDASNLKSKGITAVWIPPAWKGASQNDVGYGAYDLYDLGEFNQKGTVRTKYGTRSQLQAAVTSLKNNGIQVYGDVVMNHKGGADATEMVRAVEVNPNNRNQEVTGEYTIEAWTRFDFPGRGNTHSSFKWRWYHFDGVDWDQSRRLNNRIYKFRGKAWDWEVDTENGNYDYLMYADIDMDHPEVINELRNWGVWYTNTLGLDGFRIDAVKHIKYSFTRDWINHVRSATGKNMFAVAEFWKNDLGAIENYLQKTNWNHSVFDVPLHYNLYNASKSGGNYDMRNIFNGTVVQRHPSHAVTFVDNHDSQPEEALESFVEEWFKPLAYALTLTREQGYPSVFYGDYYGIPTHGVPAMRSKIDPILEARQKYAYGPQHDYLDHPDVIGWTREGDSSHPKSGLATLITDGPGGSKRMYAGLKNAGETWYDITGNRSDTVKIGSDGWGEFHVNDGSVSIYVQK

SEQ ID NO: 27452 - protein, 483 aa, Bacillus sp.
HHNGTNGTMMQYFEWYLPNDGNHWNRLNSDASNLKSKGITAVWIPPAWKATSQNDVGYGAYDLYDLGEFNQHGTVRTKYGTRSQLQAAVTSLKNNGIQVYGDVVMNHKGGADATEMVRAVEVNPNNRNQEVTGEYTIEAWTRFDFPGRGNTHSSFKWRWYHFDGVDWDQSRQLQNRIYKFRGKAWDWEVDTEFGNYDYLMYVDYDMDHPEVVNELRNWGVWYTNTLGLDGFRIDAVKHIKYSFTRDWINHVRSATGKNMFAVAEFWKNDLGAIENYLQKTNWNHSVFDVPLHYNLYNASKSGGNYDMRNIFNGTVVQRHPSHAVTFVDNHDSQPEEALESFVEEWFKPLAYALTLTREQGYPSVFYGDYYGIPTHGVPAMRSKIDPILEARQKYAYGPQHDYLDHPDVIGWTREGDSSHPKSGLATLITDGPGGSKRMYAGLKNAGETWYDITGNRSDTVKIGSDGWGEFHVNDGSVSIYVQK

SEQ ID NO: 27453 - protein, 485 aa, Synthetic construct
HHNGTNGTMMQYFEWYLPNDGNHWNRLNSDASNLKSKGITAVWIPPAWKGASQNDVGYGAYDLYDLGEFNQKGTVRTKYGTRNQLQAAVTSLKNNGIQVYGDVVMNHKGGADATEMVRAVEVNPNNRNQEVTGEYTIEAWTRFDFPGRGNTHSSFKWRWYHFDGVDWDQSRRLNNRIYKFRGHGKAWDWEVDTENGNYDYLMYADIDMDHPEVVNELRNWGVWYTNTLGLDGFRIDAVKHIKYSFTRDWINHVRSATGKNMFAVAEFWKNDLGAIENYLQKTNWNHSVFDVPLHYNLYNASKSGGNYDMRNIFNGTVVQRHPSHAVTFVDNHDSQPEEALESFVEEWFKPLAYALTLTREQGYPSVFYGDYYGIPTHGVPAMRSKIDPILEARQKYAYGPQHDYLDHPDVIGWTREGDSSHPKSGLATLITDGPGGSKRMYAGLKNAGETWYDITGNRSDTVKIGSDGWGEFHVNDGSVSIYVQK

SEQ ID NO: 27454 - protein, 485 aa, Bacillus sp.
HHNGTNETMMQYFEWYLPNDGNHWNRLNSDASNLKSKGITAVWIPPAWKGASQNDVGYGAYDLYDLGEFNQKGTVRTKYGTRSQLQAAVTSLKNNGIQVYGDVVMNHKGGADATEMVRAVEVNPNNRNQEVTGEYTIEAWTRFDFPGRGNTHSSFKWRWYHFDGVDWDQSRRLNNRIYKFRGHGKAWDWEVDTEFGNYDYLMYADYDMDHPEVVNELRNWGVWYTNTLGLDGFRIDAVKHIKYSFTRDWINHVRSATGKNMFAVAEFWKNDLGAIENYLQKTNWNHSVFDVPLHYNLYNASKSGGNYDMRNIFNGTVVQMHPMHAVTFVDNHDSQPEEALESFVEEWFKPLAYALTLTREQGYPSVFYGDYYGIPTHGVPAMRSKIDPILEARQKYAYGPQHDYLDHPDVIGWTREGDSSHPKSGLATLITDGPGGSKRMYAGLKNAGETWYDITGNRSDTVKIGSDGWGEFHVNDGSVSIYVQK

SEQ ID NO: 27455 - protein, 483 aa, Bacillus sp.
HHNGTNGTMMQYFEWYLPNDGNHWNRLNSDASNLKSKGITAVWIPPAWKGASQNDVGYGAYDLYDLGEFNQKGTVRTKYGTRSQLQAAVTSLKNNGIQVYGDVVMNHKGGADATEMVRAVEVNPNNRNQEVTGEYTIEAWTQFDFPGRGNTHSSFKWRWYHFDGVDWDQSRRLNNRIYKFRGKAWDWEVDTEFGNYDYLMYADYDMDHPEVVNELRNWGVWYTNTLGLDGFRIDAVKHIKYSFTRDWINHVRSATGKNMFAVAEFWKNDLGAIENYLQKTNWNHSVFDVPLHYNLYNASKSGGNYDMRNIFNGTVVQRHPSHAVTFVDNHDSQPEEALESFVEEWFKPLAYALTLTREQGYPSVFYGDYYGIPTHGVPAMRSKIDPILEARQKYAYGPQHDYLDHPDVIGWTREGDSSHPKSGLATLITDGPGGSKRMYAGLKNAGETWYDITGNRSDTVKIGSDGWGEFHVNDGSVSIYVQK

SEQ ID NO: 27456 - protein, 483 aa, Bacillus sp.
HHNGTNGTMMQYFEWYLPNDGNHWNRLNSDASNLKSKGITAVWIPPAWKGASQNDVGYGAYDLYDLGEFNQKGTVRTKYGTRSQLQAAVTSLKNNGIQVYGDVVMNHKGGADATEMVRAVEVNPNNRNQEVTGEYTIEAWTRFDFPGRGNTHSSFKWRWYHFDGVDWDQSRRLNNRIYKFRGKAWDWEVDTEFGNYDYLMYADYDMDHPEVVNELRNWGVWYTNTLGLDGFRIDAVKHIKYSFTRDWINHVRSATGKNMFAVAEFWKNDLGAIENYLQKTNWNHSVFDVPLHYNLYNASNSGGNYDMRNIFNGTVVQRHPSHAVTFVDNHDSQPEEALESFVDEWFKPLAYALTLTREQGYPSVFYGDYYGIPTHGVPAMRSKIDPILEARQKYAYGPQHDYLDHPDVIGWTREGDSSHPKSGLATLITDGPGGSKRMYAGLKNAGETWYDITGNRSDTVKIGSDGWGEFHVNQQSVSIYVQK

SEQ ID NO: 27457 - protein, 483 aa, Synthetic construct
HHNGTNGTMMQYFEWYLPNDGNHWNRLNSDASNLKSKGITAVWIPPAWKGASQNDVGYGAYDLYDLGEFNQKGTVRTKYGTRSQLQAAVTSLKNNGIQVYGDVVMNHKGGADATEMVRAVEVNPNNRNQEVTGEYTIEAWTRFDFPGRGNTHSSFKWRWYHFDGVDWDQSRRLNNRIYKFRGKAWDWEVDTENGNYDYLMYADIDMDHPTVVNELRNWGVWYTNTLGLDGFRIDAVKHIKYSFTRDWINHVRSATGKNMFAVAEFWKNDLGAIENYLQKTNWNHSVFDVPLHYNLYNASKSGGNYDMRNIFNGTVVQRHPSHAVTFVDNHDSQPEEALESFVEEWFKPLAYALTLTREQGYPSVFYGDYYGIPTHGVPAMRSKIDPILEARQKYAYGPQHDYLDHPDVIGWTREGDSSHPKSGLATLITDGPGGSKRMYAGLKNAGETWYDITGNRSDTVKIGSDGWGEFHVNDGSVSIYVQK

SEQ ID NO: 27458 - protein, 485 aa, Bacillus sp.
HHNGTNGTMMQYFEWYLPNDGNHWNRLNSDASNLKSKGITAVWIPPAWKGASQNDVGYGAYDLYDLGEFNQKGTVRTKYGTRSQLQAAVTSLKNNGIQVYGDVVMNHKGGADATEMVRAVEVNPNNRNQEVTGEYTIEAWTRFDFPGRGNTHSSFKWRWYHFDGVDWDQSRRVNNRIYKFRGHGKAWDWEVDTEFGNYDYLMYADYDMDHPEVVNELRNWGVWYTNTLGLDGFRIDAVKHIKYSFTRDWINHVRSATGKNMFAVAEFWKNDLGAIENYLQKTNWNHSVFDVPLHYNLYNASKSGGNYDMRNIFNGTVVQRHPSHAVTFVDNHDSQPEEALESFVEEWFKPLAYALTLTREQGYPSVFYGDYYGIPTHGVPAMRSKIDPILEARQKYAYGPQHDYLDHPDVIGWTREGDSSHPKSGLATLITDGPGGSKRMYAGLKNAGETWYDITGNRSDTVKIGSDGWGEFHVNDGSVSIYVQK

SEQ ID NO: 27459 - protein, 485 aa, Synthetic construct
HHNGTNGTMMQYFEWYLPNDGNHWNRLNSDASNLKSKGITAVWIPPAWKGASQNDVGYGAYDLYDLGEFNQKGTVRTKYGTRSQLQAAVTSLKNNGIQVYGDVVMNHKGGADATEMVRAVEVNPNNRNQEVTGEYTIEAWTRFDFPGRGNTHSSFKWRWYHFDGVDWDQSRRLNNRIYKFRSHGKEWDWEVDTENGNYDYLMYADIDMDHPEVVNELRNWGVWYTNTLGLDGFRIDAVKHIKYSFTRDWINHVRSATGKNMFAVAEFWKNDLGAIENYLQKTNWNHSVFDVPLHYNLYNASKSGGNYDMRNIFNGTVVQRHPSHAVTFVDNHDSQPEEALESFVEEWFKPLAYALTLTREQGYPSVFYGDYYGIPTHGVPAMRSKIDPILEARQKYAYGPQHDYLDHPDVIGWTREGDSSHPKSGLATLITDGPGGSKRMYAGLKNAGETWYDITGNRSDTVKIGSDGWGEFHVNDGSVSIYVQK

SEQ ID NO: 27460 - protein, 483 aa, Bacillus sp.
HHNGTNGTMMQYFEWYLPNDGNHWNRLNSDASNLKSKGITAVWIPPAWKGASQNDVGYGAYDLYDLGEFNQKGTVRTKYGTRSQLQAAVTSLKNNGIQVYGDVVMNHKGGADATEMVRAVEVNPNNRNQEVTGEYTIEAWTRFDFPGRGNTHSSFKWRWYHFDGVDWDQSRRLNNRIYKFRGKAWDWEVDMEFGNYDYLMYADYDMDHPEVVNELRNWGVWYTNTLGLDGFRIDAVKHIKYSFTRDWINHVRSATGKNMFAVAEFWKNDLGAIENYLQKTNWNHSVFDVPLHYNLYNASKSGGNYDMRNIFNGTVVQRHPSHAVTFVDNHDSQPEEALESFVEEWFKPLAYALTLTREQGYPSVFYGDYYGIPTHGVPAMRSKIDPILEARQKYAYGPQHDYLDHPDVIGWTREGDSSHPKSGLATLITDGPGGSKRMYAGLKNAGETWYDITGNRSDTVKIGSDGWGEFHVNDGSVSIYVQK

SEQ ID NO: 27461 - protein, 485 aa, Synthetic construct
HHNGTNGTMMQYFEWYLPNDGNHWNRLNSDASNLKSKGITAVWIPPAWKGASQNDVGYGAYDLYDLGEFNQKGTVRTKYGTRSQLQAAVTSLKNNGIQVYGDVVMNHKGGADATEMVRAVEVNPNNRNQEVTGEYTIEAWTRFDFPGRGNTHSSFKWRWYHFDGVDWDQSRRLNNRIYKFRGHGKAWDWEVDTENGNYDYLMYADYDMDHPEVVNEMRNWGVWYTNTLGLDGFRIDAVKHIKYSFTRDWINHVRSATGKNMFAVAEFWKNDLGAIENYLQKTNWNHSVFDVPLHYNLYNASKSGGNYDMRNIFNGTVVQRHPSHAVTFVDNHDSQPEEALESFVEEWFKPLAYALTLTREQGYPSVFYGDYYGIPTHGVPAMRSKIDPILEARQKYAYGPQHDYLDHPDVIGWTREGDSSHPKSGLATLITDGPGGSKRMYAGLKNAGETWYDITGNRSDTVKIGSDGWGEFHVNDGSVSIYVQK

SEQ ID NO: 27462 - protein, 483 aa, Bacillus sp.
HHNGTNGTMMQYFEWYLPNDGNHWNRLNSDASNLKSKGITAVWIPPAWKGVSQNDVGYGAYDLYDLGEFNQKGTVRTKYGTRSQLQAAVTSLKNNGIQVYGDVVMNHKGGADATEMVRAVEVNPNNRNQEVTGEYTIEAWTRFDFPGRGNTHSSFKWRWYHFDGVDWDQSRRLSNRIYKFRGKAWDWEVDTEFGNYDYLMYADYDMDHPEVVNELRNWGVWYTNTLGLDGFRIDAVKHIKYSFTRDWINHVRSATGKNMFAVAEFWKNDLGAIENYLQKTNWNHSVFDVPLHYNLYNASKSGGNYDMRNIFNGTVVQVHPSHAVTFVDNHDSQPEEALESFVEEWFKPLAYALTLTREQGYPSVFYGDYYGIPTHGVPAMRSKIDPILEARQKYAYGPQHDYLDHPDVIGWTREGDSSHPKSGLATLITDGPGGSKRMYAGLKNAGETWYDITGNRSDTVKIGSDGWGEFHVNYGSVSIYVQK

SEQ ID NO: 27463 - protein, 485 aa, Synthetic construct
HHNGTNGTMMQYFEWYLPNDGNHWNRLNSDASNLKSKGITAVWIPPAWKGASQNDVGYGAYDLYDLGEFNQKGTVRTKYGTRSDLQAAVTSLKNNGIQVYGDVVMNHKGGADATEMVRAVEVNPNNRNQEVTGEYTIEAWTRFDFPGRGNTHSSFKWRWYHFDGVDWDQSRRLNNRIYKFRGHGKAWDWEVDTENGNYDYLMYADIDMDHPEVVNELRNWGVWYTNTLGLDGFRIDAVKHIKYSFTRDWINHVRSATGKNMFAVAEFWKNDLGAIENYLQKTNWNHSVFDVPLHYNLYNASKSGGNYDMRNIFNGTVVQRHPSHAVTFVDNHDSQPEEALESFVEEWFKPLAYALTLTREQGYPSVFYGDYYGIPTHGVPAMRSKIDPILEARQKYAYGPQHDYLDHPDVIGWTREGDSSHPKSGLATLITDGPGGSKRMYAGLKNAGETWYDITGNRSDTVKIGSDGWGEFHVNDGSVSIYVQK

SEQ ID NO: 27464 - protein, 485 aa, Bacillus sp.
HHNGTNGTMMQYFEWYLPNDGNHWNRLNSDASNLKSKGITAVWIPPAWKGASQNDVGYGAYDLYDLGEFNQKGTVRTKYGTRSQLQAAVTSLKNNGIQVYGDVVMNHKGGADATEMVRAVEVNPNNRNQEVTGEYTIEAWTRFDFPGRGNTHSSFKWRWYHFDGVDWDQSRRLNNRIYKFRGHGKAWDWEVDTEFGNYDYLMYADYDMDHPEVVNELRNWGVWYTNTLGLDGFRIDAVKHIKYSFTRDWINHVRSATGKNMFAVAEFWKNDLGAIENYLQKTNWNHSVFDVPLHYNLYNASKSGGNYDMRNIFNGTVVQRHPSHAVTFVDNHDSQPEEALESFVEEWFKPLAYALTLTREQGYPSVFYGDYYGIPTHGVPAMRSKIDPILEARQKYAYGPQHDYLDHPDVIGWTREGDSSHPTSGLATLITDGPGGSKRMYAGLKNAGETWYDITGNRSDTVKIGSDGWGEFHVNDGSVSIYVQK

SEQ ID NO: 27465 - protein, 483 aa, Bacillus sp.
HHNGTNGTMMQYFEWYLPNDGNHWNRLNSDASNLKSKGITAVWIPPAWKGASQNDVGYGAYDLYDLGEFNQKGTVRTKYGTRSQLQAAVTSLKNNGIQVYGDVVMNHKGGADATEMVRAVEVNPNNRNQEVTGDYTIEAWTRFDFPGRGNTHSSFKWRWYHFDGVDWDQSRRLNNRIYKFRGKEWDWEVDTEFGNYDYLMYADYDMDHPEVVNELRNWGVWYTNTLGLDGFRIDAVKHIKYSFTRDWINHVRSATGKNMFAVAEFWKNDLGAIENYLQKTNWNHSVFDVPLHYNLYNASKSGGNYDMRNIFNGTVVQRHPSHAVTFVDNHDSQPEEALESFVEEWFKPLAYALTLTREQGYPSVFYGDYYGIPTHGVPAMRSKIDPILEARQKYAYGPQHDYLDHPDVIGWTREGDSSHPKSGLATLITDGPGGSKRMYAGLKNAGETWYDITGNRSDTVKIGSDGWGEFHVNDGSVSIYVQK

SEQ ID NO: 27466 - protein, 483 aa, Bacillus sp.
HHNGTNGTMMQYFEWYLPNDGNHWNRLNSDASNLKSKGITAVWIPPAWKGASQNDVGYGAYDLYDLGEFNQKGTVRTKYGTRSQLQAAVTSLKNNGIQVYGDVVMNHKGGADATEMVRAVEVNPNNRNQEVTGEYTIEAWTRFDFPGRGNTHSSFKWRWYHFDGVDWDQSRRTNNRIYKFRGKAWDWEVDTEFGNYDYLMYADYDMDHPEVVNELRNWGVWYTNTLGLDGFRIDAVKHIKYSFTRDWINHVRSATGKNMFAVAEFWKNDLGAIENYLQKTNWNHSVFDVPLHYNLYNASKSGGNYDMRNIFNGTVVQRHPSHAVTFVDNHDSQPEEALESFVEEWFKPLAYALTLTREQGYPSVFYGDYYGIPTHGVPAMRSKIDPILEARQKYAYGPQHDYLDHPDVIGWTREGDSSHPKSGLATLITDGPGGSKRMYAGLKNAGETWYDITGNRSDTVKIGSDGWGEFHVNDGSVSIYVQK

SEQ ID NO: 27467 - protein, 485 aa, Synthetic construct
HHNGTNGTMMQYFEWYLPNDGNHWNRLNSDASNLKSKGITAVWIPPAWKGASQNDVGYGAYDLYDLGEFNQKGTVRTKYGTRSQLQAAVTSLKNNGIQVYGDVVMNHKGGADATEMVRAVEVNPNNRNQEVTGEYTIEAWTRFDFPGRGNTHSSFKWRWYHFDGVDWDQSRRLNNRIYKFRGHGKAWDWEVDTENGNYDYLMYADIDMDHPEVVNELNNWGVWYTNTLGLDGFRIDAVKHIKYSFTRDWINHVRSATGKNMFAVAEFWKNDLGAIENYLQKTNWNHSVFDVPLHYNLYNASKSGGNYDMRNIFNGTVVQRHPSHAVTFVDNHDSQPEEALESFVEEWFKPLAYALTLTREQGYPSVFYGDYYGIPTHGVPAMRSKIDPILEARQKYAYGPQHDYLDHPDVIGWTREGDSSHPKSGLATLITDGPGGSKRMYAGLKNAGETWYDITGNRSDTVKIGSDGWGEFHVNDGSVSIYVQK

SEQ ID NO: 27468 - protein, 485 aa, Synthetic construct
HHNGTNGTMMQYFEWYLPNDGNHWNRLNSDASNLKSKGITAVWIPPAWKGASQNDVGYGAYDLYDLGEFNQKGTVRTKYGTRSQLQAAVTSLKNNGIQVYGDVVMNHKGGADATEMVRAVEVNPNNRNQEVTGEYTIEAWTRFDFPGRGNTHSSFKWRWYHFDGVDWDQSRRLNNRIYKFRGHGKAWDWEVDTENGNYDYLMYADIDMDHPEVVNELRNWGVWYTNTLGLDGFRIDAVKHIKYSFTRDWINHVRSATGKNMFAVAEYWKNDLGAIENYLQKTNWNHSVFDVPLHYNLYNASKSGGNYDMRNIFNGTVVQRHPSHAVTFVDNHDSQPEEALESFVEEWFKPLAYALTLTREQGYPSVFYGDYYGIPTHGVPAMRSKIDPILEARQKYAYGPQHDYLDHPDVIGWTREGDSSHPKSGLATLITDGPGGSKRMYAGLKNAGETWYDITGNRSDTVKIGSDGWGEFHVNDGSVSIYVQK

SEQ ID NO: 27469 - protein, 483 aa, Synthetic construct
HHNGTNGTMMQYFEWYLPNDGNHWNRLNSDASNLKSKGITAVWIPPAWKGASQNDVGYGAYDLYDLGEFNQKGTVRTKYGTRSQLQAAVTSLKNNGIQVYGDVVMNHKGGADATEMVRAVEVNPNNRNQEVTGEYTIETWTRFDFPGRGNTHSSFKWRWYHFDGVDWDQSRRLNNRIYKFRGKAWDWEVDTENGNYDYLMYADIDMDHPEVVNELRNWGVWYTNTLGLDGFRIDAVKHIKYSFTRDWINHVRSATGKNMFAVAEFWKNDLGAIENYLQKTNWNHSVFDVPLHYNLYNASKSGGNYDMRNIFNGTVVQRHPSHAVTFVDNHDSQPEEALESFVEEWFKPLAYALTLTREQGYPSVFYGDYYGIPTHGVPAMRSKIDPILEARQKYAYGPQHDYLDHPDVIGWTREGDSSHPKSGLATLITDGPGGSKRMYAGLKNAGETWYDITGNRSDTVKIGSDGWGEFHVNDGSVSIYVQK

SEQ ID NO: 27470 - protein, 483 aa, Bacillus sp.
HHNGTNGTMMQYFEWYLPNDGNHWNRLNSDASNLKSKGITAVWIPPAWKGASQNDVGYGAYDLYDLGEFNQKGTVRTKYGTRSQLQAAVTSLKNNGIQVYGDVVMNHKGGADATEMVRAVEVNPNNRNQEVTGEYTIEAWTRFDFPGRGNTHSSFKWRWYHFDGVDWDQSRELDNRIYKFRGKAWDWEVDTEFGNYDYLMYADYDMDHPEVVNELRNWGVWYTNTLGLDGFRIDAVKHIKYSFTRDWINHVRSATGKNMFAVAEFWKNDLGAIENYLQKTNWNHSVFDVPLHYNLYNASKSGGNYDMRNIFNGTVVQRHPSHAVTFVDNHDSQPEEALESFVEEWFKPLAYALTLTREQGYPSVFYGDYYGIPTHGVPAMRSKIDPILEARQKYAYGPQHDYLDHPDVIGWTREGDSSHPKSGLATLITDGPGGSKRMYAGLKNAGETWYDITGNRSDTVKIGSDGWGEFHVNDGSVSIYVQK

SEQ ID NO: 27471 - protein, 483 aa, Bacillus sp.
HHNGTNGTMMQYFEWYLPNDGNHWNRLNSDASNLKSKGITAVWIPPAWKGASQNDVGYGAYDLYDLGEFNQKGTVRTKYGTRSQLQAAVTSLKNNGIQVYGDVVMNHKGGADATEMVRAVEVNPNNRNQEVTGEYTIEAWTRFDFPGRGNTHSSFKWRWYHFDGVDWDQSRRLNNRIYKFRGKAWDWEVDTEFGNYDYLMYADYDMDHPEVVNELRNWGVWYTNTLGLDGFRIDAVKHIKYSFTRDWINHVRSATGKNMFAVAEFWKNDLGAIENYLQKTNWNHSVFDVPLHYNLYNASKSGGNYDMRNIFNGTVVQSWPMHAVTFVDNHDSQPEEALESFVEEWFKPLAYALTLTREQGYPSVFYGDYYGIPTHGVPAMRSKIDPILEARQKYAYGPQHDYLDHPDVIGWTREGDSSHPKSGLATLITDGPGGSKRMYAGLKNAGETWYDITGNRSDTVKIGSDGWGEFHVNDGSVSIYVQK

SEQ ID NO: 27472 - protein, 485 aa, Synthetic construct
HHNGTNGTMMQYFEWYLPNDGNHWNRLNSDASNLKSKGITAVWIPPAWKGASQNDVGYGAYDLYDLGEFNQKGTVRTKYGTRSQLQAAVTSLKNNGIQVYGDVVMNHKAGADATEMVRAVEVNPNNRNQEVTGEYTIEAWTRFDFPGRGNTHSSFKWRWYHFDGVDWDQSRRLNNRIYKFRGHGKAWDWEVDTENGNYDYLMYADIDMDHPEVVNELRNWGVWYTNTLGLDGFRIDAVKHIKYSFTRDWINHVRSATGKNMFAVAEFWKNDLGAIENYLQKTNWNHSVFDVPLHYNLYNASKSGGNYDMRNIFNGTVVQRHPSHAVTFVDNHDSQPEEALESFVEEWFKPLAYALTLTREQGYPSVFYGDYYGIPTHGVPAMRSKIDPILEARQKYAYGPQHDYLDHPDVIGWTREGDSSHPKSGLATLITDGPGGSKRMYAGLKNAGETWYDITGNRSDTVKIGSDGWGEFHVNDGSVSIYVQK

SEQ ID NO: 27473 - protein, 483 aa, Bacillus sp.
HHNGTNGTMMQYFEWYLPNDGNHWNRLNSDASNLKSKGITAVWIPPAWKGASQNDVGYGAYDLYDLGEFNQKGTVRTKYGTRSQLQAAVTSLKNNGIQVYGDVVMNHKGGADATEMVRAVEVNPNNRNQEVTGEYTIEAWTRFDFPGRGNTHSSFKWRWYHFDGVDWDQSRNTQNRIYKFRGKAWDWEVDTEFGNYDYLMYADYDMDHPEVVNELRNWGVWYTNTLGLDGFRIDAVKHIKYSFTRDWINHVRSATGKNMFAVAEFWKNDLGAIENYLQKTNWNHSVFDVPLHYNLYNASKRGGNYDMRNIFNGTVVQRHPSHAVTFVDNHDSQPEEALESFVEEWFKPLAYALTLTREQGYPSVFYGDYYGIPTHGVPAMRSKIDPILEARQKYAYGPQHDYLDHPDVIGWTREGDSSHPKSGLATLITDGPGGSKRMYAGLKNAGETWYDITGNRSDTVKIGSDGWGEFHVNDGSVSIYVQK

SEQ ID NO: 27474 - protein, 483 aa, Bacillus sp.
HHNGTNGTMMQYFEWYLPNDGNHWNRLNSDASNLKSKGITAVWIPPAWKAVSQNDVGYGAYDLYDLGEFNQKGTVRTKYGTRSQLQAAVTSLKNNGIQVYGDVVMNHKGGADATEMVRAVEVNPNNRNQEVTGEYTIEAWTRFDFPGRGNTHSSFKWRWYHFDGVDWDQSRDFQNRIYKFRGKAWDWEVDTEFGNYDYLMYTDYDMDHPEVVNELRNWGVWYTNTLGLDGFRIDAVKHIKYSFTRDWINHVRSATGKNMFAVAEFWKNDLGAIENYLQKTNWNHSVFDVPLHYNLYNASKSGGNYDMRNIFNGTVVQRHPSHAVTFVDNHDSQPEEALESFVEEWFKPLAYALTLTREQGYPSVFYGDYYGIPTHGVPAMRSKIDPILEARQKYAYGPQHDYLDHPDVIGWTREGDSSHPKSGLATLITDGPGGSKRMYAGLKNAGETWYDITGNRSDTVKIGSDGWGEFHVNDGSVSIYVQK

SEQ ID NO: 27475 - protein, 485 aa, Synthetic construct
HHNGTNGTMMQYFEWYLPNDGNHWNRLNSDASNLKSKGITAVWIPPAWKGASQNDVGYGAYDLYDLGEFNQKGTVRTKYGTRSQLQAAVTSLKNNGIQVYGDVVMNHKGGADATEMVRAVEVNPNNRNQEVTGEYTIEAWTRFDFPGRGNTHSSFKWRWYHFDGVDWDQSRRLNNRIYKFRGHGKAWDWEVDTENGNYDYLMYADIDMDHPEVVNELRNWGVWYTNTLGLDGFRIDAVKHIKYSFTRDWINHVRSATGKNMFAVAEFWKNDLGAIENYLQKTNWNHSVFDVPLHYNLYNASKSGGNYDMRNIFNGTVVQRHPSHAVTFVDNHDSQPEEALESFVEEWFKPLAYALTLTREGGYPSVFYGDYYGIPTHGVPAMRSKIDPILEARQKYAYGPQHDYLDHPDVIGWTREGDSSHPKSGLATLITDGPGGSKRMYAGLKNAGETWYDITGNRSDTVKIGSDGWGEFHVNDGSVSIYVQK

SEQ ID NO: 27476 - protein, 485 aa, Synthetic construct
HHNGTNGTMMQYFEWYLPNDGNHWNRLNSDASNLKSKGITAVWIPPAWKGASQNDVGYGAYDLYDLGEFNQKGTVRTKYGTRSQLQAAVTSLKNNGIQVYGDVVMNHKGGADATEMVRAVEVNPNNRNQEVTGEYTIEAWTRFDFPGRGNTHSSFKWRWYHFDGVDWDQSRRLNNRIYKFRGHGKAWDWEVDTENGNYDYLMYADIDMDHPEVVNELRNWGVWYTNTLGLDGFRIDAVKHIKYSFTRDWINHVRSATGKNMFAVAEFWKNDLGAIENYLQKTNWNQSVFDVPLHYNLYNASKSGGNYDMRNIFNGTVVQRHPSHAVTFVDNHDSQPEEALESFVEEWFKPLAYALTLTREQGYPSVFYGDYYGIPTHGVPAMRSKIDPILEARQKYAYGPQHDYLDHPDVIGWTREGDSSHPKSGLATLITDGPGGSKRMYAGLKNAGETWYDITGNRSDTVKIGSDGWGEFHVNDGSVSIYVQK

SEQ ID NO: 27477 - protein, 483 aa, Bacillus sp.
HHNGTNGTMMQYFEWYLPNDGNHWNRLNSDASNLKSKGITAVWIPPAWKGISQNDVGYGAYDLYDLGEFNQKGTVRTKYGTRSQLQAAVTSLKNNGIQVYGDVVMNHKGGADATEMVRAVEVNPNNRNQEVTGEYTIEAWTRFDFPGRGNTHSSFKWRWYHFDGVDWDQSRKVHNRIYKFRGKAWDWEVDTEFGNYDYLMYADYDMDHPEVVNELRNWGVWYTNTLGLDGFRIDAVKHIKYSFTRDWINHVRSATGKNMFAVAEFWKNDLGAIENYLQKTNWNHSVFDVPLHYNLYNASKSGGNYDMRNIFNGTVVQRHPSHAVTFVDNHDSQPEEALESFVEEWFKPLAYALTLTREQGYPSVFYGDYYGIPTHGVPAMRSKIDPILEARQKYAYGPQHDYLDHPDVIGWTREGDSSHPKSGLATLITDGPGGSKRMYAGLKNAGKTWYDITGNRSDTVKIGSDGWGEFHVNDGSVSIYVQK

SEQ ID NO: 27478 - protein, 483 aa, Bacillus sp.
HHNGTNGTMMQYFEWYLPNDGNHWNRLNSDASNLKSKGITAVWIPPAWKGASQNDVGYGAYDLYDLGEFNQKGTVRTKYGTRSQLQAAVTSLKNNGIQVYGDVVMNHKGGADATEMVRAVEVNPNNRNQEVTGEYTIEAWTRFDFPGRGNTHSSFKWRWYHFDGVDWDQSRNVNNRIYKFRGKAWDWEVDTEFGNYDYLMYADYDMDHPEVVNELRNWGVWYTNTLGLDGFRIDAVKHIKYSFTRDWINHVRSATGKNMFAVAEFWKNDLGAIENYLQKTNWNHSVFDVPLHYNLYNASKSGGNYDMRNIFNGTVVQRHPSHAVTFVDNHDSQPEEALESFVDPWFKPLAYALTLTREQGYPSVFYGDYYGIPTHGVPAMRSKIDPILEARQKYAYGPQHDYLDHPDVIGWTREGDSSHPKSGLATLITDGPGGSKRMYAGLKNAGETWYDITGNRSDTVKIGSDGWGEFHVNGGSVSIYVQK

SEQ ID NO: 27479 - protein, 483 aa, Bacillus sp.
HHNGTNGTMMQYFEWYLPNDGNHWNRLNSDASNLKSKGITAVWIPPAWKGASQNDVGYGAYDLYDLGEFNQKGTVRTKYGTRSQLQAAVTSLKNNGIQVYGDVVMNHKGGADATEMVRAVEVNPNNRNQEVTGEYTIEAWTRFDFPGRGNTHSSFKWRWYHFDGVDWDQSRRLNNRIYKFRGKAWDWEVDTEFGNYDYLMYADYDMDHPEVVNELRNWGVWYTNTLGLDGFRIDAVKHIKYSFTRDWINHVRSATGKNMFAVAEFWKNDLGAIENYLQKTNWNHSVFDVPLHYNLYNASASGGNYDMRNIFNGTVVQRHPSHAVTFVDNHDSQPEEALESFVEEWFKPLAYALTLTREQGYPSVFYGDYYGIPTHGVPAMRSKIDPILEARQKYAYGPQHDYLDHPDVIGWTREGDSSHPKSGLATLITDGPGGSKRMYAGLKNAGETWYDITGNRSDTVKIGSDGWGEFHVNDGSVSIYVQK

SEQ ID NO: 27480 - protein, 483 aa, Cytophaga sp.
HHNGTNGTMMQYFEWYLPNDGNHWNRLNSDASNLKSKGITAVWIPPAWKGASQNDVGYGAYDLYDLGEFNQKGTVRTKYGTRSQLQAAVTSLKNNGIQVYGDVVMNHKGGADATEMVRAVEVNPNNRNQEVTGEYTIEAWTRFDFPGRGNTHSSFKWRWYHFDGVDWDQSRRLNNRIYKFRGKAWDWEVDTENGNYDYLMYADIDMDHPEVVNELRNWGVWYTNTLGLDGFRIDAVKHIKYSFTRDWINHVRSATGKNMFAVAEFWKNDLGAIENYLQKTNWNHSVFDVPLHYNLYNASKSGGNYDMRNIFNGTVVQRHPSHAVTFVDNHDSQPEEALESFVEEWFKPLAYALTLTREQGYPSVFYGDYYGIPTHGVPAMRSKIDPILEARQKYAYGPQRDYIDHPDVIGWTREGDSTKAKSGLATVISDGPGGSKRMFVGRSNAGEIWYDLTGNRTDKITIGADGYGTFPVNGGSVSIWVQQ

SEQ ID NO: 27481 - protein, 483 aa, Bacillus sp.
HHNGTNGTMMQYFEWYLPNDGNHWNRLNSDASNLKSKGITAVWIPPAWKAASQNDVGYGAYDLYDLGEFNQKGTVRTKYGTRSQLQAAVTSLKNNGIQVYGDVVMNHKGGADATEMVRAVEVNPNNRNQEVTGEYTIEAWTRFDFPGRGNTHSSFKWRWYHFDGVDWDQSRDLQNRIYKFRGKAWDWEVDTEFGNYDYLMYADYDMDHPEVVNELRNWGVWYTNTLGLDGFRIDAVKHIKYSFTRDWINHVRSATGKNMFAVAEFWKNDLGAIENYLQKTNWNHSVFDVPLHYNLYNASKSGGNYDMRNIFNGTVVQRHPSHAVTFVDNHDSQPEEALESFVEEWFKPLAYALTLTREQGYPSVFYGDYYGIPTHGVPAMRSKIDPILEARQKYAYGPQHDYLDHPDVIGWTREGDSSHPKSGLATLITDGPGGSKRMYAGLKNAGETWYDITGNRSDTVKIGSDGWGEFHVNDGSVSIYVQK

SEQ ID NO: 27482 - protein, 485 aa, Synthetic construct
HHNGTNGTMMQYFEWYLPNDGNHWNRLNSDASNLKSKGITAVWIPPAWKGASQNDVGYGAYDLYDLGEFNQKGTVRTKYGTRSQLQAAVTSLKNNGIQVYGDVVMNHKGGADATEMVRAVEVNPNNRNQEVTGEYTIEAWTRFDFPGRGNTHSSFKWRWYHFDGVDWDQSRRLNNRIYKFRGHGKAWDWEVDTENGNYDYLMYADIDMDHPEVVNELRNWGVWYTNTLGLDGFRIDAVKHIKYSFTRDWINHVRSATGKNMFAVAEFWKNDLGAIENYLQKTNWNHSVFDVPLHYNLYNASKSGGNYDMRNIFNGTVVQRHPSHAVTFVDNHDSQPEEALESFVETWFKPLAYALTLTREQGYPSVFYGDYYGIPTHGVPAMRSKIDPILEARQKYAYGPQHDYLDHPDVIGWTREGDSSHPKSGLATLITDGPGGSKRMYAGLKNAGETWYDITGNRSDTVKIGSDGWGEFHVNDGSVSIYVQK

SEQ ID NO: 27483 - protein, 483 aa, Synthetic construct
HHNGTNGTMMQYFEWYLPNDGNHWNRLNSDASNLKSKGITAVWIPPAWKGASQNDVGYGAYDLYDLGEFNQKGTVRTKYGTRSQLQAAVTSLKNNGIQVYGDVVMNHKGGADATEMVRAVEVNPNNRNQEVTGEYTIEAWTRFDFPGRGNTHSSFKWRWYHFDGVDWDQSRRLNNRIYKFRGKAWDWEVDTENGNYDYLMYADIDMDCPEVVNELRNWGVWYTNTLGLDGFRIDAVKHIKYSFTRDWINHVRSATGKNMFAVAEFWKNDLGAIENYLQKTNWNHSVFDVPLHYNLYNASKSGGNYDMRNIFNGTVVQRHPSHAVTFVDNHDSQPEEALESFVEEWFKPLAYALTLTREQGYPSVFYGDYYGIPTHGVPAMRSKIDPILEARQKYAYGPQHDYLDHPDVIGWTREGDSSHPKSGLATLITDGPGGSKRMYAGLKNAGETWYDITGNRSDTVKIGSDGWGEFHVNDGSVSIYVQK

SEQ ID NO: 27484 - protein, 485 aa, Bacillus sp.
HHNGTNGTMMQYFEWYLPNDGNHWNRLNSDASNLKSKGITAVWIPPAWKGASQNDVGYGAYDLYDLGEFNQKGTVRTKYGTRSQLQAAVTSLKNNGIQVYGDVVMNHKGGADATEMVRAVEVNPNNRNQEVTGDYTIEAWTRFDFPGRGNTHSSFKWRWYHFDGVDWDQSRRLNNRIYKFRGHGKEWDWEVDTEFGNYDYLMYADYDMDHPEVVNELRNWGVWYTNTLGLDGFRIDAVKHIKYSFTRDWINHVRSATGKNMFAVAEFWKNDLGAIENYLQKTNWNHSVFDVPLHYNLYNASKSGGNYDMRNIFNGTVVQRHPSHAVTFVDNHDSQPEEALESFVEEWFKPLAYALTLTREQGYPSVFYGDYYGIPTHGVPAMRSKIDPILEARQKYAYGPQHDYLDHPDVIGWTREGDSSHPKSGLATLITDGPGGSKRMYAGLKNAGETWYDITGNRSDTVKIGSDGWGEFHVNDGSVSIYVQK

SEQ ID NO: 27485 - protein, 483 aa, Bacillus sp.
HHNGTNGTMMQYFEWYLPNDGNHWNRLNSDASNLKSKGITAVWIPPAWKAASQNDVGYGAYDLYDLGEFNQKGTVRTKYGTRSQLQAAVTSLKNNGIQVYGDVVMNHKGGADATEMVRAVEVNPNNRNQEVTGEYTIEAWTRFDFPGRGNTHSSFKWRWYHFDGVDWDQSRRFENRIYKFRGKAWDWEVDTEFGNYDYLMYADYDMDHPEVVNELRNWGVWYTNTLGLDGFRIDAVKHIKYSFTRDWINHVRSATGKNMFAVAEFWKNDLGAIENYLQKTNWNHSVFDVPLHYNLYNASKSGGNYDMRNIFNGTVVQRHPSHAVTFVDNHDSQPEEALESFVEEWFKPLAYALTLTREQGYPSVFYGDYYGIPTHGVPAMRSKIDPILEARQKYAYGPQHDYLDHPDVIGWTREGDSSHPKSGLATLITDGPGGSKRMYAGLKNAGETWYDITGNRSDTVKIGSDGWGEFHVNDGSVSIYVQK

SEQ ID NO: 27486 - protein, 483 aa, Bacillus sp.
HHNGTNGTMMQYFEWYLPNDGNHWNRLNSDASNLKSKGITAVWIPPAWKGASQNDVGYGAYDLYDLGEFNQKGTVRTKYGTRSQLQAAVTSLKNNGIQVYGDVVMNHKGGADATEMVRAVEVNPNNRNQEVTGEYTIEAWTRFDFPGRGNTHSSFKWRWYHFDGVDWDQSRRLNNRIYKFRGKAWDWEVDTEFGNYDYLMYADYDMDHPEVVNELRNWGVWYTNTLGLDGFRIDAVKHIKYSFTRDWINHVRSATGKNMFAVAEFWKNDLGAIENYLQKTNWNHSVFDVPLHYNLYNASKSGGNYDMRNIFNGTVVQRHPSHAVTFVDNHDSQPEEALESFVEEWFKPLAYALTLTREQGYPSVFYGDYYGIPTHGVPAMRSKIDPILEARQKYAYGPQHDYLDHPDVIGWTREGDSSHPKSGLATLLTDGPGGSKRMYAGLKNAGETWYDITGNRSDTVKIGSDGWGEFHVNDGSVSIYVQK

SEQ ID NO: 27487 - protein, 485 aa, Bacillus sp.
HHNGTNGTMMQYFEWYLPNDGNHWNRLNSDASNLKSKGITAVWIPPAWKGASQNDVGYGAYDLYDLGEFNQKGTVRTKYGTRSQLQAAVTSLKNNGIQVYGDVVMNHKGGADATEMVRAVEVNPNNRNQEVTGEYTIEAWTRFDFPGRGNTHSSFKWRWYHFDGVDWDQSRRLENRIYKFRGHGKAWDWEVDTEFGNYDYLMYADYDMDHPEVVNELRNWGVWYTNTLGLDGFRIDAVKHIKYSFTRDWINHVRSATGKNMFAVAEFWKNDLGAIENYLQKTNWNHSVFDVPLHYNLYNASKSGGNYDMRNIFNGTVVQRHPSHAVTFVDNHDSQPEEALESFVEEWFKPLAYALTLTREQGYPSVFYGDYYGIPTHGVPAMRSKIDPILEARQKYAYGPQHDYLDHPDVIGWTREGDSSHPKSGLATLITDGPGGSKRMYAGLKNAGETWYDITGNRSDTVKIGSDGWGEFHVNDGSVSIYVQK

SEQ ID NO: 27488 - protein, 485 aa, Bacillus sp.
HHNGTNGTMMQYFEWYLPNDGNHWNRLNSDASNLKSKGITAVWIPPAWKGASQNDVGYGAYDLYDLGEFNQKGTVRTKYGTRSQLQAAVTSLKNNGIQVYGDVVMNHKGGADATEMVRAVEVNPNNRNQEVTGEYTIEAWTRFDFPGRGNTHSSFKWRWYHFDGVDWDQSRRLNNRIYKFRGHGKAWDWEVDTEFGNYDYLMYADYDMDHPEVVNELRNWGVWYTNTLGLDGFRIDAVKHIKYSFTRDWINHVRSATGKNMFAVAEFWKNDLGAIENYLQKTNWNHSVFDVPLHYNLYNASKSGGNYDMRNIFNGTVVQRHPSHAVTFVDNHDSQPEEALESFVEEWFKPLAYALTLTREQGYPSVFYGDYYGIPTHGVPAMRSKIDPILEARQKYAYGPQHDYLDHPDVIGWTREGDSSHPKSGLATLITDGPGGSKRMYAGLKNAGETWYDITGNRSDTVKILSDGWGEFHVNDGSVSIYVQK

SEQ ID NO: 27489 - protein, 483 aa, Bacillus sp.
HHNGTNGTMMQYFEWYLPNDGNHWNRLNSDASNLKSKGITAVWIPPAWKGASQNDVGYGAYDLYDLGEFNQKGTVRTKYGTRSQLQAAVTSLKNNGIQVYGDVVMNHKGGADATEMVRAVEVNPNNRNQEVTGEYTIEAWTRFDFPGRGNTHSSFKWRWYHFDGVDWDQSRRLNNRIYKFRGKAWDWEVDTEFGNYDYLMYADYDMDHPEVVNELRNWGVWYTNTLGLDGFRIDAVKHIKYSFTRDWINHVRSATGKNMFAVAEFWKNDLGAIENYLQKTNWNHSVFDVPLHYNLYNASKSGGNYDMRNIFNGTVVQTHPSHAVTFVDNHDSQPEEALESFVEEWFKPLAYALTLTREQGYPSVFYGDYYGIPTHGVPAMRSKIDPILEARQKYAYGPQHDYLDHPDVIGWTREGDSSHPKSGLATLITDGPGGSKRMYAGLKNAGETWYDITGNRSDTVKIGSDGWGEFHVNDGSVSIYVQK

SEQ ID NO: 27490 - protein, 485 aa, Synthetic construct
HHNGTNGTMMQYFEWYLPNDGNHWNRLNSDASNLKSKGITAVWIPPAWKGASQNDVGYGAYDLYDLGEFNQKGTVRTKYGTRSQLQAAVTSLKNNGIQVYGDVVMNHKGGADATEMVRAVEVNPNNRNQEVTGEYTIEAWTRFDFPGRGNTHSSFKWRWYHFDGVDWDQSRRLNNRIYKFRGHGKAWDWEVDTENGNYDYLMYADIDMDHPEVVNELRNWGVWYTNTLGLDGFRIDAVKHIKYSFTRDWINHVRSATGKNMFAVAEFWKNDLGAIENYLQKTNWNHSVFDVPLHYNLYAASKSGGNYDMRNIFNGTVVQRHPSHAVTFVDNHDSQPEEALESFVEEWFKPLAYALTLTREQGYPSVFYGDYYGIPTHGVPAMRSKIDPILEARQKYAYGPQHDYLDHPDVIGWTREGDSSHPKSGLATLITDGPGGSKRMYAGLKNAGETWYDITGNRSDTVKIGSDGWGEFHVNDGSVSIYVQK

SEQ ID NO: 27491 - protein, 483 aa, Synthetic construct
HHNGTNGTMMQYFEWYLPNDGNHWNRLNSDASNLKSKGITAVWIPPAWKGASQNDVGYGAYDLYDLGEFNQKGTVRTKYGTRSQLQAAVTSLKNNGIQVYGDVVMNHKGGADATEMVRAVEVNPNNRNQEVTGEYTIEAWTRFDFPGRGNTHSSFKWRWYHFDGVDWDQSRRLNNRIYKFRGKAWDWEVDTENGNYDYLMYADYDMDHPEVVNEMRNWGVWYTNTLGLDGFRIDAVKHIKYSFTRDWINHVRSATGKNMFAVAEFWKNDLGAIENYLQKTNWNHSVFDVPLHYNLYNASKSGGNYDMRNIFNGTVVQRHPSHAVTFVDNHDSQPEEALESFVEEWFKPLAYALTLTREQGYPSVFYGDYYGIPTHGVPAMRSKIDPILEARQKYAYGPQHDYLDHPDVIGWTREGDSSHPKSGLATLITDGPGGSKRMYAGLKNAGETWYDITGNRSDTVKIGSDGWGEFHVNDGSVSIYVQK

SEQ ID NO: 27492 - protein, 485 aa, Synthetic construct
HHNGTNGTMMQYFEWYLPNDGNHWNRLNSDASNLKSKGITAVWIPPAWKGASQNDVGYGAYDLYDLGEFNQKGTVRTKYGTRSQLQAAVTSLKNNGIQVYGDVVMNHKGGADATEMVRAVEVNPNNRNQEVTGEYTIEAWTRFDFPGRGNTHSSFKWYWYHFDGVDWDQSRRLNNRIYKFRGHGKAWDWEVDTENGNYDYLMYADIDMDHPEVVNELRNWGVWYTNTLGLDGFRIDAVKHIKYSFTRDWINHVRSATGKNMFAVAEFWKNDLGAIENYLQKTNWNHSVFDVPLHYNLYNASKSGGNYDMRNIFNGTVVQRHPSHAVTFVDNHDSQPEEALESFVEEWFKPLAYALTLTREQGYPSVFYGDYYGIPTHGVPAMRSKIDPILEARQKYAYGPQHDYLDHPDVIGWTREGDSSHPKSGLATLITDGPGGSKRMYAGLKNAGETWYDITGNRSDTVKIGSDGWGEFHVNDGSVSIYVQK

SEQ ID NO: 27493 - protein, 485 aa, Synthetic construct
HHNGTNGTMMQYFEWYLPNDGNHWNRLNSDSSNLKSKGITAVWIPPAWKGASQNDVGYGAYDLYDLGEFNQKGTVRTKYGTRSQLQAAVTSLKNNGIQVYGDVVMNHKGGADATEMVRAVEVNPNNRNQEVTGEYTIEAWTRFDFPGRGNTHSSFKWRWYHFDGVDWDQSRRLNNRIYKFRGHGKAWDWEVDTENGNYDYLMYADIDMDHPEVVNELRNWGVWYTNTLGLDGFRIDAVKHIKYSFTRDWINHVRSATGKNMFAVAEFWKNDLGAIENYLQKTNWNHSVFDVPLHYNLYNASKSGGNYDMRNIFNGTVVQRHPSHAVTFVDNHDSQPEEALESFVEEWFKPLAYALTLTREQGYPSVFYGDYYGIPTHGVPAMRSKIDPILEARQKYAYGPQHDYLDHPDVIGWTREGDSSHPKSGLATLITDGPGGSKRMYAGLKNAGETWYDITGNRSDTVKIGSDGWGEFHVNDGSVSIYVQK

SEQ ID NO: 27494 - protein, 485 aa, Synthetic construct
HHNGTNGTMMQYFEWYLPNDGNHWNRLNSDASNLKSKGITAVWIPPAWKGASQNDVGYGAYDLYDLGEFNQKGTVRTKYGTRSQLQAAVTSLKNNGIQVYGDVVLNHKGGADATEMVRAVEVNPNNRNQEVTGEYTIEAWTRFDFPGRGNTHSSFKWRWYHFDGVDWDQSRRLNNRIYKFRGHGKAWDWEVDTENGNYDYLMYADFDMDHPEVVNELRNWGVWYTNTLGLDGFRIDAVKHIKYSFTRDWINHVRSATGKNMFAVAEFWKNDLGAIENYLQKTNWNHSVFDVPLHYNLYNASKSGGNYDMRNIFNGTVVQRHPSHAVTFVDNHDSQPEEALESFVEEWFKPLAYALTLTREQGYPSVFYGDYYGIPTHGVPAMRSKIDPILEARQKYAYGPQHDYLDHPDVIGWTREGDSSHPKSGLATLITDGPGGSKRMYAGLKNAGETWYDITGNRSDTVKIGSDGWGEFHVNDGSVSIYVQK

SEQ ID NO: 27495 - protein, 485 aa, Synthetic construct
HHNGTNGTMMQYFEWYLPNDGNHWNRLNSDASNLKSKGITAVWIPPAWKGASQNDVGYGAYDLYDLGEFNQKGTVRTKYGTRSQLQAAVTSLKNNGIQVYGDVVMNHKGGADATEMVRAVEVNPNNRNQEVTGEYTIEAWTRFDFPGRGNTHSSFKWRWYHFDGVDWDQSRRLNNRIYKFRGHGKAWDWEVDTENGNYDYLMYADIDMDHPEVVNELRNWGVWYTNTLGLDGFRIDAVKHIKYSFTRDWINHVRSATGKNMFAVAEFWKNDLGAIENYLQKTNWNHSVFDVPLHYNLYNASKSGGNYDMRNIFNGTVVQRHPSHAVTFVDNHDSQPEEALESFVEEWFKPLAYALTLTREQGYPSVFYGDYYGIPTHGVPAMRSKIDPILEARQKYAYGPQHDYLDHPDVIGWTREGDSSHPKSGLATLITDGPGGSKRMYAGLKNAGETWYDITGNRSDTVKIGSDGWGEFHVNDESVSIYVQK

SEQ ID NO: 27496 - protein, 483 aa, Bacillus sp.
HHNGTNGTMMQYFEWYLPNDGNHWNRLNSDASNLKSKGITAVWIPPAWKGASQNDVGYGAYDLYDLGEFNQKGTVRTKYGTRSQLQAAVTSLKNNGIQVYGDVVMNHKGGADATEMVRAVEVNPNNRNQEVTGEYTIEAWTRFDFPGRGNTHSSFKWRWYHFDGVDWDQSRMLNNRIYKFRGKAWDWEVDTEFGNYDYLMYADYDMDHPEVVNELRNWGVWYTNTLGLDGFRIDAVKHIKYSFTRDWINHVRSATGKNMFAVAEFWKNDLGAIENYLQKTNWNHSVFDVPLHYNLYNASKSGGNYDMRNIFNGTVVQRHPSHAVTFVDNHDSQPEEALESFVEEWFKPLAYALTLTREQGYPSVFYGDYYGIPTHGVPAMRSKIDPILEARQKYAYGPQHDYLDHPDVIGWTREGDSSHPKSGLATLITDGPGGSKRMYAGLKNAGETWYDITGNRSDTVKIGSDGWGEFHVNDGSVSIYVQK

SEQ ID NO: 27497 - protein, 485 aa, Synthetic construct
HHNGTNGTMMQYFEWYLPNDGNHWNRLNSDASNLKSKGITAVWIPPAWKGASQSDVGYGAYDLYDLGEFNQKGTVRTKYGTRSQLQAAVTSLKNNGIQVYGDVVMNHKGGADATEMVRAVEVNPNNRNQEVTGEYTIEAWTRFDFPGRGNTHSSFKWRWYHFDGVDWDQSRRLNNRIYKFRGHGKAWDWEVDTENGNYDYLMYADIDMDHPEVVNELRNWGVWYTNTLGLDGFRIDAVKHIKYSFTRDWINHVRSATGKNMFAVAEFWKNDLGAIENYLQKTNWNHSVFDVPLHYNLYNASKSGGNYDMRNIFNGTVVQRHPSHAVTFVDNHDSQPEEALESFVEEWFKPLAYALTLTREQGYPSVFYGDYYGIPTHGVPAMRSKIDPILEARQKYAYGPQHDYLDHPDVIGWTREGDSSHPKSGLATLITDGPGGSKRMYAGLKNAGETWYDITGNRSDTVKIGSDGWGEFHVNDGSVSIYVQK

SEQ ID NO: 27498 - protein, 483 aa, Bacillus sp.
HHNGTNGTMMQYFEWYLPNDGNHWNRLNSDASNLKSKGITAVWIPPAWKGASQNDVGYGAYDLYDLGEFNQKGTVRTKYGTRSQLQAAVTSLKNNGIQVYGDVVMNHKGGADATEMVRAVEVNPNNRNQEVTGEYTIEAWTRFDFPGRGNTHSSFKWRWYHFDGVDWDQSRDISNRIYKFRGKAWDWEVDTEFGNYDYLMYADYDMDHPEVVNELRNWGVWYTNTLGLDGFRIDAVKHIKYSFTRDWINHVRSATGKNMFAVAEFWKNDLGAIENYLQKTNWNHSVFDVPLHYNLYNASKSGGNYDMRNIFNGTVVQRHPSHAVTFVDNHDSQPEEALESFVEEWFKPLAYALTLTREQGYPSVFYGDYYGIPTHGVPAMRSKIDPILEARQKYAYGPQHDYLDHPDVIGWTREGDSSHPKSGLATLITDGPGGSKRMYAGLKNAGETWYDITGNRSDTVKIGSDGWGEFHVNDGSVSIYVQK

SEQ ID NO: 27499 - protein, 485 aa, Bacillus sp.
HHNGTNGTMMQYFEWYLPNDGNHWNRLNSDASNLKSKGITAVWIPPAWKGASQNDVGYGAYDLYDLGEFNQKGTVRTKYGTRSQLQAAVTSLKNNGIQVYGDVVMNHKGGADATEMVRAVEVNPNNRNQEVTGEYTIEAWTRFDFPGRGNTHSSFKWRWYHFDGVDWDQSRRLNNRIYKFRGHGKAWDWEVDTEFGNYDYLMYADYDMDHPEVVNELRNWGVWYTNTLGLDGFRIDAVKHIKYSFTRDWINHVRSATGKNMFAVAEFWKNDLGAIENYLQKTNWNHSVFDVPLHYNLYNASKSGGNYDMRNIFNGTVVQRHPSHAVTFVDNHDSQPEEALESFVEEWFKPLAYALTLTREQGYPSVFYGDYYGIPTHGVPAMRSKIDPILEARQKYAYGPQHDYLDHPDVIGWTREGDSSHPKSGLATLITDGPGGSKRMYAGLKNAGKTWYDITGNRSDTVKIGSDGWGEFHVNDGSVSIYVQK

SEQ ID NO: 27500 - protein, 485 aa, Bacillus sp.
HHNGTNGTMMQYFEWYLPNDGNHWNRLNSDASNLKSKGITAVWIPPAWKGASQNDVGYGAYDLYDLGEFNQKGTVRTKYGTRSQLQDAVTSLKNNGIQVYGDVVMNHKGGADATEMVRAVEVNPNNRNQEVTGEYTIEAWTRFDFPGRGNTHSSFKWRWYHFDGVDWDQSRRLNNRIYKFRGHGKAWDWEVDTEFGNYDYLMYADYDMDHPEVVNELRNWGVWYTNTLGLDGFRIDAVKHIKYSFTRDWINHVRSATGKNMFAVAEFWKNDLGAIENYLQKTNWNHSVFDVPLHYNLYNASKSGGNYDMRNIFNGTVVQRHPSHAVTFVDNHDSQPEEALESFVEEWFKPLAYALTLTREQGYPSVFYGDYYGIPTHGVPAMRSKIDPILEARQKYAYGPQHDYLDHPDVIGWTREGDSSHPKSGLATLITDGPGGSKRMYAGLKNAGETWYDITGNRSDTVKIGSDGWGEFHVNDGSVSIYVQK

SEQ ID NO: 27501 - protein, 485 aa, Synthetic construct
HHNGTNGTMMQYFEWYLPNDGNHWNRLNSDASNLKSKGISAVWIPPAWKGASQNDVGYGAYDLYDLGEFNQKGTVRTKYGTRSQLQAAVTSLKNNGIQVYGDVVMNHKGGADATEMVRAVEVNPNNRNQEVTGEYTIEAWTRFDFPGRGNTHSSFKWRWYHFDGVDWDQSRRLNNRIYKFRGHGKAWDWEVDTENGNYDYLMYADIDMDHPEVVNELRNWGVWYTNTLGLDGFRIDAVKHIKYSFTRDWINHVRSATGKNMFAVAEFWKNDLGAIENYLQKTNWNHSVFDVPLHYNLYNASKSGGNYDMRNIFNGTVVQRHPSHAVTFVDNHDSQPEEALESFVEEWFKPLAYALTLTREQGYPSVFYGDYYGIPTHGVPAMRSKIDPILEARQKYAYGPQHDYLDHPDVIGWTREGDSSHPKSGLATLITDGPGGSKRMYAGLKNAGETWYDITGNRSDTVKIGSDGWGEFHVNDGSVSIYVQK

SEQ ID NO: 27502 - protein, 485 aa, Synthetic construct
HHNGTNGTMMQYFEWYLPNDGNHWNRLNSDASNLKSKGITAVWIPPAWKGASQNDVGYGAYDLYDLGEFNQKGTVRTKYGTRSQLQAAVTSLKNNGIQVYGDVVMNHKGGADATEMVRAVEVNPNNRNQEVTGEYTIEAWTRFDFPGRGNTHSSFKWQWYHFDGVDWDQSRRLNNRIYKFRGHGKAWDWEVDTENGNYDYLMYADIDMDHPEVVNELRNWGVWYTNTLGLDGFRIDAVKHIKYSFTRDWINHVRSATGKNMFAVAEFWKNDLGAIENYLQKTNWNHSVFDVPLHYNLYNASKSGGNYDMRNIFNGTVVQRHPSHAVTFVDNHDSQPEEALESFVEEWFKPLAYALTLTREQGYPSVFYGDYYGIPTHGVPAMRSKIDPILEARQKYAYGPQHDYLDHPDVIGWTREGDSSHPKSGLATLITDGPGGSKRMYAGLKNAGETWYDITGNRSDTVKIGSDGWGEFHVNDGSVSIYVQK

SEQ ID NO: 27503 - protein, 485 aa, Bacillus sp.
HHNGTNGTMMQYFEWYLPNDGNHWNRLNSDASNLKSKGITAVWIPPAWKAASQNDVGYGAYDLYDLGEFNQKGTVRTKYGTRSQLQAAVTSLKNNGIQVYGDVVMNHKGGADATEMVRAVEVNPNNRNQEVTGEYTIEAWTRFDFPGRGNTHSSFKWRWYHFDGVDWDQSRQLNNRIYKFRGHGKAWDWEVDTEFGNYDYLMYADYDMDHPEVVNELRNWGVWYTNTLGLDGFRIDAVKHIKYSFTRDWINHVRSATGKNMFAVAEFWKNDLGAIENYLQKTNWNHSVFDVPLHYNLYNASKSGGNYDMRNIFNGTVVQRHPSHAVTFVDNHDSQPEEALESFVEEWFKPLAYALTLTREQGYPSVFYGDYYGIPTHGVPAMRSKIDPILEARQKYAYGPQHDYLDHPDVIGWTREGDSSHPKSGLATLITDGPGGSKRMYAGLKNAGETWYDITGNRSDTVKIGSDGWGEFHVNDGSVSIYVQK

SEQ ID NO: 27504 - protein, 485 aa, Synthetic construct
HHNGTNGTMMQYFEWYLPNDGNHWNRLNSDASNLKSKGITAVWIPPAWKGASQNDVGYGAYDLYDLGEFNQKGTVRTKYGTRSQLQAAVTSLKNNGIQVYGDVVMNHKGGADATEMVRAVEVNPNNRNQEVTGEYTIEAWTRFDFPGRGNTHSSFKWRWYHFDGVDWDQSRRLNNRIYKFRGHGKAWDWEVDTENGNYDYLMYADYDMDHPEVVNEVRNWGVWYTNTLGLDGFRIDAVKHIKYSFTRDWINHVRSATGKNMFAVAEFWKNDLGAIENYLQKTNWNHSVFDVPLHYNLYNASKSGGNYDMRNIFNGTVVQRHPSHAVTFVDNHDSQPEEALESFVEEWFKPLAYALTLTREQGYPSVFYGDYYGIPTHGVPAMRSKIDPILEARQKYAYGPQHDYLDHPDVIGWTREGDSSHPKSGLATLITDGPGGSKRMYAGLKNAGETWYDITGNRSDTVKIGSDGWGEFHVNDGSVSIYVQK

SEQ ID NO: 27505 - protein, 485 aa, Bacillus sp.
HHNGTNGTMMQYFEWYLPNDGNHWNRLNSDASNLKSKGITAVWIPPAWKSASQNDVGYGAYDLYDLGEFNQKGTVRTKYGTRSQLQAAVTSLKNNGIQVYGDVVMNHKGGADATEMVRAVEVNPNNRNQEVTGEYTIEAWTRFDFPGRGNTHSSFKWRWYHFDGVDWDQSRNLQNRIYKFRGHGKAWDWEVDTEFGNYDYLMYADYDMDHPEVVNELRNWGVWYTNTLGLDGFRIDAVKHIKYSFTRDWINHVRSATGKNMFAVAEFWKNDLGAIENYLQKTNWNHSVFDVPLHYNLYNASKSGGNYDMRNIFNGTVVQRHPSHAVTFVDNHDSQPEEALESFVEEWFKPLAYALTLTREQGYPSVFYGDYYGIPTHGVPAMRSKIDPILEARQKYAYGPQHDYLDHPDVIGWTREGDSSHPKSGLATLITDGPGGSKRMYAGLKNAGETWYDITGNRSDTVKIGSDGWGEFHVNDGSVSIYVQK

SEQ ID NO: 27506 - protein, 483 aa, Synthetic construct
HHNGTNGTMMQYFEWYLPNDGNHWNRLNSDASNLKSKGITAVWIPPAWKGASQNDVGYGAYDLYDLGEFNQKGTVRTKYGTRSQLQAAVTSLKNNGIQVYGDVVMNHKGGADATEMVRAVEVNPNNRNQEVTGEYTIEAWTRFDFPGRGNTHSSFKWRWYHFDGVDWDQSRRLNNRIYKFRGKAWDWEVDTENGNYDYLMYADIDMDHPECVNELRNWGVWYTNTLGLDGFRIDAVKHIKYSFTRDWINHVRSATGKNMFAVAEFWKNDLGAIENYLQKTNWNHSVFDVPLHYNLYNASKSGGNYDMRNIFNGTVVQRHPSHAVTFVDNHDSQPEEALESFVEEWFKPLAYALTLTREQGYPSVFYGDYYGIPTHGVPAMRSKIDPILEARQKYAYGPQHDYLDHPDVIGWTREGDSSHPKSGLATLITDGPGGSKRMYAGLKNAGETWYDITGNRSDTVKIGSDGWGEFHVNDGSVSIYVQK

SEQ ID NO: 27507 - protein, 483 aa, Bacillus sp.
HHNGTNGTMMQYFEWYLPNDGNHWNRLNSDASNLKSKGITAVWIPPAWKGLSQNDVGYGAYDLYDLGEFNQKGTVRTKYGTRSQLQAAVTSLKNNGIQVYGDVVMNHKGGADATEMVRAVEVNPNNRNQEVTGEYTIEAWTRFDFPGRGNTHSSFKWRWYHFDGVDWDQSRDLNNRIYKFRGKAWDWEVDTEFGNYDYLMYADYDMDHPEVVNELRNWGVWYTNTLGLDGFRIDAVKHIKYSFTRDWINHVRSATGKNMFAVAEFWKNDLGAIENYLQKTNWNHSVFDVPLHYNLYNASKSGGNYDMRNIFNGTVVQRHPSHAVTFVDNHDSQPEEALESFVEEWFKPLAYALTLTREQGYPSVFYGDYYGIPTHGVPAMRSKIDPILEARQKYAYGPQHDYLDHPDVIGWTREGDSSHPKSGLATLITDGPGGSKRMYAGLKNAGETWYDITGNRSDTVKIGSDGWGEFHVNDGSVSIYVQK

SEQ ID NO: 27508 - protein, 485 aa, Synthetic construct
HHNGTNGTMMQYFEWYLPNDGNHWNRLNSDASNLKSKGITAVWIPPAWKGASQNDVGYGAYDLYDLGEFNQKGTVRTKYGTRSQLQAAVTSLKNNGIQVYGDVVMNHKGGADATEMVRAVEVNPNNRNQEVTGEYTIEAWTRFDFPGRGNTHSSFKWRWYHFDGVDWDQSRRLNNRIYKFRGHGKAWDWEVDTENGNYDYLMYADIDMDHPEVVNELRNWGVWYTNTLGLDGFRIDAVKHIKYSFTRDWINHVRSATGKNMFAVAEFWKNDLGAIENYLQKTNWNHSVFDVPLHYNLYNASKSGGNYDMRNIFNGTVVQRHPSKAVTFVDNHDSQPEEALESFVEEWFKPLAYALTLTREQGYPSVFYGDYYGIPTHGVPAMRSKIDPILEARQKYAYGPQHDYLDHPDVIGWTREGDSSHPKSGLATLITDGPGGSKRMYAGLKNAGETWYDITGNRSDTVKIGSDGWGEFHVNDGSVSIYVQK

SEQ ID NO: 27509 - protein, 485 aa, Bacillus sp.
HHNGTNGTMMQYFEWYLPNDGNHWNRLNSDASNLKSKGITAVWIPPAWKGASQNDVGYGAYDLYDLGEFNQKGTVRTKYGTRSQLQAAVTSLKNNGIQVYGDVVMNHKGGADATEMVRAVEVNPNNRNQEVTGEYTIEAWTRFDFPGRGNTHSSFKWRWYHFDGVDWDQSRRLNNRIYKFRGHGKAWDWEVDTEFGNYDYLMYADYDMDHPEVVNELRNWGVWYTNTLGLDGFRIDAVKHIKYSFTRDWINHVRSATGKNMFAVAEFWKNDLGAIENYLQKTNWNHSVFDVPLHYNLYNASKSGGNYDMRNIFNGTVVQRHPSHAVTFVDNHDSQPEEALESFVEEWFKPLAYALTLTREQGYPSVFYGDYYGIPTHGVPAMRSKIDPILEARQKYAYGPQHDYLDHPDVIGWTREGDSSHPKSGLATLITDGPGGSKGMYAGLKNAGETWYDITGNRSDTVKIGSDGWGEFHVNDGSVSIYVQK

SEQ ID NO: 27510 - protein, 485 aa, Synthetic construct
HHNGTNGTMMQYFEWYLPNDGNHWNRLNSDAQNLKSKGITAVWIPPAWKGASQNDVGYGAYDLYDLGEFNQKGTVRTKYGTRSQLQAAVTSLKNNGIQVYGDVVMNHKGGADATEMVRAVEVNPNNRNQEVTGEYTIEAWTRFDFPGRGNTHSSFKWRWYHFDGVDWDQSRRLNNRIYKFRGHGKAWDWEVDTENGNYDYLMYADIDMDHPEVVNELRNWGVWYTNTLGLDGFRIDAVKHIKYSFTRDWINHVRSATGKNMFAVAEFWKNDLGAIENYLQKTNWNHSVFDVPLHYNLYNASKSGGNYDMRNIFNGTVVQRHPSHAVTFVDNHDSQPEEALESFVEEWFKPLAYALTLTREQGYPSVFYGDYYGIPTHGVPAMRSKIDPILEARQKYAYGPQHDYLDHPDVIGWTREGDSSHPKSGLATLITDGPGGSKRMYAGLKNAGETWYDITGNRSDTVKIGSDGWGEFHVNDGSVSIYVQK

SEQ ID NO: 27511 - protein, 483 aa, Synthetic construct
HHNGTNGTMMQYFEWYLPNDGNHWNRLNSDASNLKSKGITAVWIPPAWKGASQNDVGYGAYDLYDLGEFNQKGTVRTKYGTRSQLQAAVTSLKNNGIQVYGDVVMNHKGGADATEMVRAVEVNPNNRNQEVTGEYTIEAWTRFDFPGRGNTHSSFKWRWYHFDGVDWDQSRRLNNRIYKFRGKAWDWEVDTEKGNYDYLMYADIDMDHPEVVNELRNWGVWYTNTLGLDGFRIDAVKHIKYSFTRDWINHVRSATGKNMFAVAEFWKNDLGAIENYLQKTNWNHSVFDVPLHYNLYNASKSGGNYDMRNIFNGTVVQRHPSHAVTFVDNHDSQPEEALESFVEEWFKPLAYALTLTREQGYPSVFYGDYYGIPTHGVPAMRSKIDPILEARQKYAYGPQHDYLDHPDVIGWTREGDSSHPKSGLATLITDGPGGSKRMYAGLKNAGETWYDITGNRSDTVKIGSDGWGEFHVNDGSVSIYVQK

SEQ ID NO: 27512 - protein, 483 aa, Synthetic construct
HHNGTNGTMMQYFEWYLPNDGNHWNRLNSDASNLKSKGITAVWIPPAWKGASQNDVGYGAYDVYDLGEFNQKGTVRTKYGTRSQLQAAVTSLKNNGIQVYGDVVMNHKGGADATEMVRAVEVNPNNRNQEVTGEYTIEAWTRFDFPGRGNTHSSFKWRWYHFDGVDWDQSRRLNNRIYKFRGKAWDWEVDTENGNYDYLMYADIDMDHPEVVNELRNWGVWYTNTLGLDGFRIDAVKHIKYSFTRDWINHVRSATGKNMFAVAEFWKNDLGAIENYLQKTNWNHSVFDVPLHYNLYNASKSGGNYDMRNIFNGTVVQRHPSHAVTFVDNHDSQPEEALESFVEEWFKPLAYALTLTREQGYPSVFYGDYYGIPTHGVPAMRSKIDPILEARQKYAYGPQHDYLDHPDVIGWTREGDSSHPKSGLATLITDGPGGSKRMYAGLKNAGETWYDITGNRSDTVKIGSDGWGEFHVNDGSVSIYVQK

SEQ ID NO: 27513 - protein, 485 aa, Bacillus sp.
HHNGTNGTMMQYFEWYLPNDGNHWNRLNSDASNLKSKGITAVWIPPAWKGASQNDVGYGAYDLYDLGEFNQKGTVRTKYGTRSQLQAAVTSLKNNGIQVYGDVVMNHKGGADATEMVSAVEVNPNNRNQEVTGEYTIEAWTRFDFPGRGNTHSSFKWRWYHFDGVDWDQSRRLNNRIYKFRGHGKAWDWEVDTEFGNYDYLMYADYDMDHPEVVNELRNWGVWYTNTLGLDGFRIDAVKHIKYSFTRDWINHVRSATGKNMFAVAEFWKNDLGAIENYLQKTNWNHSVFDVPLHYNLYNASKSGGNYDMRNIFNGTVVQRHPSHAVTFVDNHDSQPEEALESFVEEWFKPLAYALTLTREQGYPSVFYGDYYGIPTHGVPAMRSKIDPILEARQKYAYGPQHDYLDHPDVIGWTREGDSSHPKSGLATLITDGPGGSKRMYAGLKNAGETWYDITGNRSDTVKIGSDGWGEFHVNDGSVSIYVQK

SEQ ID NO: 27514 - protein, 485 aa, Bacillus sp.
HHNGTNGTMMQYFEWYLPNDGNHWNRLNSDASNLKSKGITAVWIPPAWKGASQNDVGYGAYDLYDLGEFNQKGTVRTKYGTRSQLQAAVTSLKNNGIQVYGDVVMNHKGGADATEMVRAVEVNPNNRNQEVTGEYTIEAWTRFDFPGRGNTHSSFKWRWYHFDGVDWDQSRRLNNRIYKFRGHGKAWDWEVDTEFGNYDYLMYADYDMDHPEVVNELRNWGVWYTNTLGLDGFRIDAVKHIKYSFTRDWINHVRSATGKNMFAVAEFWKNDLGAIENYLSKTNWNHSVFDVPLHYNLYNASKSGGNYDMRNIFNGTVVQRHPSHAVTFVDNHDSQPEEALESFVEEWFKPLAYALTLTREQGYPSVFYGDYYGIPTHGVPAMRSKIDPILEARQKYAYGPQHDYLDHPDVIGWTREGDSSHPKSGLATLITDGPGGSKRMYAGLKNAGETWYDITGNRSDTVKIGSDGWGEFHVNDGSVSIYVQK

SEQ ID NO: 27515 - protein, 483 aa, Bacillus sp.
HHNGTNGTMMQYFEWYLPNDGNHWNRLNSDASNLKSKGITAVWIPPAWKGISQNDVGYGAYDLYDLGEFNQKGTVRTKYGTRSQLQAAVTSLKNNGIQVYGDVVMNHKGGADATEMVRAVEVNPNNRNQEVTGEYTIEAWTRFDFPGRGNTHSSFKWRWYHFDGVDWDQSRDLTNRIYKFRGKAWDWEVDTEFGNYDYLMYADYDMDHPEVVNELRNWGVWYTNTLGLDGFRIDAVKHIKYSFTRDWINHVRSATGKNMFAVAEFWKNDLGAIENYLQKTNWNHSVFDVPLHYNLYNASKSGGNYDMRNIFNGTVVQRHPSHAVTFVDNHDSQPEEALESFVEEWFKPLAYALTLTREQGYPSVFYGDYYGIPTHGVPAMRSKIDPILEARQKYAYGPQHDYLDHPDVIGWTREGDSSHPKSGLATLITDGPGGSKRMYAGLKNAGETWYDITGNRSDTVKIGSDGWGEFHVNDGSVSIYVQK

SEQ ID NO: 27516 - protein, 485 aa, Synthetic construct
HHNGTNGTMMQYFEWYLPNDGNHWNRLNSDASNLKSKGITAVWIPPAWKGASQNDVGYGAYDLYDLGEFNQKGTVRTKYGTRSELQAAVTSLKNNGIQVYGDVVMNHKGGADATEMVRAVEVNPNNRNQEVTGEYTIEAWTRFDFPGRGNTHSSFKWRWYHFDGVDWDQSRRLNNRIYKFRGHGKAWDWEVDTENGNYDYLMYADIDMDHPEVVNELRNWGVWYTNTLGLDGFRIDAVKHIKYSFTRDWINHVRSATGKNMFAVAEFWKNDLGAIENYLQKTNWNHSVFDVPLHYNLYNASKSGGNYDMRNIFNGTVVQRHPSHAVTFVDNHDSQPEEALESFVEEWFKPLAYALTLTREQGYPSVFYGDYYGIPTHGVPAMRSKIDPILEARQKYAYGPQHDYLDHPDVIGWTREGDSSHPKSGLATLITDGPGGSKRMYAGLKNAGETWYDITGNRSDTVKIGSDGWGEFHVNDGSVSIYVQK

SEQ ID NO: 27517 - protein, 485 aa, Bacillus sp.
HHNGTNGTMMQYFEWYLPNDGNHWNRLNSDASNLKSKGITAVWIPPAWKGASQNDVGYGAYDLYDLGEFNQKGTVRTKYGTRSQLQAAVTSLKNNGIQVYGDVVMNHKGGADATEMVRAVEVNPNNRNQEVTGEYTIEAWTRFDFPGRGNTHSSFKWRWYHFDGVDWDQSRRLNNRIYKFRGHGKAWDWEVDTEFGNYDYLMYADYDMDHPEVVNELRNWGVWYTNTLGLDGFRIDAVKHIKYSFTRDWINHVRSATGKNMFAVAEFWKNDLGAIENYLQKTNWNHSVFDVPLHYNLYNASKSGGNYDMRNIFNGTVVQRHPNHAVTFVDNHDSQPEEALESFVEEWFKPLAYALTLTREQGYPSVFYGDYYGIPTHGVPAMRSKIDPILEARQKYAYGPQHDYLDHPDVIGWTREGDSSHPKSGLATLITDGPGGSKRMYAGLKNAGETWYDITGNRSDTVKIGSDGWGEFHVNDGSVSIYVQK

SEQ ID NO: 27518 - protein, 485 aa, Bacillus sp.
HHNGKNGTMMQYFEWYLPNDGNHWNRLNSDASNLKSKGITAVWIPPAWKGASQNDVGYGAYDLYDLGEFNQKGTVRTKYGTRSQLQAAVTSLKNNGIQVYGDVVMNHKGGADATEMVRAVEVNPNNRNQEVTGEYTIEAWTRFDFPGRGNTHSSFKWRWYHFDGVDWDQSREFNNRIYKFRGHGKAWDWEVDTEFGNYDYLMYADYDMDHPEVVNELRNWGVWYTNTLGLDGFRIDAVKHIKYSFTRDWINHVRSATGKNMFAVAEFWKNDLGAIENYLQKTNWNHSVFDVPLHYNLYNASKSGGNYDMRNIFNGTVVQAHPNHAVTFVDNHDSQPEEALESFVEEWFKPLAYALTLTREQGYPSVFYGDYYGIPTHGVPAMRSKIDPILEARQKYAYGPQHDYLDHPDVIGWTREGDSSHPKSGLATLITDGPGGSKRMYAGLKNAGETWYDITGNRSDTVKIGSDGWGEFHVNDGSVSIYVQK

SEQ ID NO: 27519 - protein, 483 aa, Synthetic construct
HHNGTNGTMMQYFEWYLPNDGNHWNRLNSDASNLKSKGITAVWIPPAWKGASQNDVGYGAYDLYDLGEFNQKGTVRTKYGTRSQLQAAVTSLKNNGIQVYGDVVMNHKGGADATEMVRAVEVNPNNRNQEVTGEYTIEAWTRFDFPGRGNTHSSFKWRWYHFDGVDWDQSRRLNNRIYKFRGKSWDWEVDTENGNYDYLMYADIDMDHPEVVNELRNWGVWYTNTLGLDGFRIDAVKHIKYSFTRDWINHVRSATGKNMFAVAEFWKNDLGAIENYLQKTNWNHSVFDVPLHYNLYNASKSGGNYDMRNIFNGTVVQRHPSHAVTFVDNHDSQPEEALESFVEEWFKPLAYALTLTREQGYPSVFYGDYYGIPTHGVPAMRSKIDPILEARQKYAYGPQHDYLDHPDVIGWTREGDSSHPKSGLATLITDGPGGSKRMYAGLKNAGETWYDITGNRSDTVKIGSDGWGEFHVNDGSVSIYVQK

SEQ ID NO: 27520 - protein, 485 aa, Synthetic construct
HHNGTNGTMMQYFEWYLPNDGNHWNRLNSDASNLKSKGITAVWIPPAWKGASQNDVGYGAYDLYDLGEFNQKGTVRTKYGTRSQLQAAVTSLKNNGIQVYGDVVMNHKGGADATEMVRAVEVNPNNRNQEVTGEYTIEAWTRFDFPGRGNTHSSFKWRWYHFDGVDWDQSRRLNNRIYKFRPHGKEWDWEVDTENGNYDYLMYADIDMDHPEVVNELRNWGVWYTNTLGLDGFRIDAVKHIKYSFTRDWINHVRSATGKNMFAVAEFWKNDLGAIENYLQKTNWNHSVFDVPLHYNLYNASKSGGNYDMRNIFNGTVVQRHPSHAVTFVDNHDSQPEEALESFVEEWFKPLAYALTLTREQGYPSVFYGDYYGIPTHGVPAMRSKIDPILEARQKYAYGPQHDYLDHPDVIGWTREGDSSHPKSGLATLITDGPGGSKRMYAGLKNAGETWYDITGNRSDTVKIGSDGWGEFHVNDGSVSIYVQK

SEQ ID NO: 27521 - protein, 485 aa, Synthetic construct
HHNGTNGTMMQYFEWYLPNDGNHWNRLNSDASNLKSKGITAVWIPPAWKGASQNDVGYGAYDLYDLGEFNQKGTVRTKYGTRSQLQAAVTSLKNNGIQVYGDVVMNHKGGADATEMVRAVEVNPNNRNQEVTGEYTIEAWTRFDFPGRGNTHSSFKWRWYHFDGVDWDQSRRLNNRIYKFRVHGKKWDWEVDTENGNYDYLMYADIDMDHPEVVNELRNWGVWYTNTLGLDGFRIDAVKHIKYSFTRDWINHVRSATGKNMFAVAEFWKNDLGAIENYLQKTNWNHSVFDVPLHYNLYNASKSGGNYDMRNIFNGTVVQRHPSHAVTFVDNHDSQPEEALESFVEEWFKPLAYALTLTREQGYPSVFYGDYYGIPTHGVPAMRSKIDPILEARQKYAYGPQHDYLDHPDVIGWTREGDSSHPKSGLATLITDGPGGSKRMYAGLKNAGETWYDITGNRSDTVKIGSDGWGEFHVNDGSVSIYVQK

SEQ ID NO: 27522 - protein, 483 aa, Bacillus sp.
HHNGTNGTMMQYFEWYLPNDGNHWNRLNSDASNLKSKGITAVWIPPAWKGASQNDVGYGAYDLYDLGEFNQKGTVRTKYGTRSQLQAAVTSLKNNGIQVYGDVVMNHKGGADATEMVDAVEVNPNNRNQEVTGEYTIEAWTRFDFPGRGNTHSSFKWRWYHFDGVDFDQSRQLDNRIYKFRGKAWDWEVDTEFGNYDYLMYADYDMDHPEVVNELRNWGVWYTNTLGLDGFRIDAVKHIKYSFTRDWINHVRSATGKNMFAVAEFWKNDLGAIENYLQKTNWNHSVFDVPLHYNLYNASKSGGNYDMRNIFNGTVVQRHPSHAVTFVDNHDSQPEEALESFVEEWFKPLAYALTLTREQGYPSVFYGDYYGIPTHGVPAMRSKIDPILEARQKYAYGPQHDYLDHPDVIGWTREGDSSHPKSGLATLITDGPGGSKRMYAGLKNAGETWYDITGNRSDTVKIGSDGWGEFHVNDGSVSIYVQK

SEQ ID NO: 27523 - protein, 485 aa, Synthetic construct
HHNGTNGTMMQYFEWYLPNDGNHWNRLNSDASNLKSKGITAVWIPPAYKGASQNDVGYGAYDLYDLGEFNQKGTVRTKYGTRSQLQAAVTSLKNNGIQVYGDVVMNHKGGADATEMVRAVEVNPNNRNQEVTGEYTIEAWTRFDFPGRGNTHSSFKWRWYHFDGVDWDQSRRLNNRIYKFRGHGKAWDWEVDTENGNYDYLMYADIDMDHPEVVNELRNWGVWYTNTLGLDGFRIDAVKHIKYSFTRDWINHVRSATGKNMFAVAEFWKNDLGAIENYLQKTNWNHSVFDVPLHYNLYNASKSGGNYDMRNIFNGTVVQRHPSHAVTFVDNHDSQPEEALESFVEEWFKPLAYALTLTREQGYPSVFYGDYYGIPTHGVPAMRSKIDPILEARQKYAYGPQHDYLDHPDVIGWTREGDSSHPKSGLATLITDGPGGSKRMYAGLKNAGETWYDITGNRSDTVKIGSDGWGEFHVNDGSVSIYVQK

SEQ ID NO: 27524 - protein, 483 aa, Bacillus sp.
HHNGTNGTMMQYFEWYLPNDGNHWNRLNSDASNLKSKGITAVWIPPAWKGASQNDVGYGAYDLYDLGEFNQKGTVRTKYGTRSQLQAAVTSLKNNGIQVYGDVVMNHKGGADATEMVRAVEVNPNNRNQEVTGEYTIEAWTRFDFPGRGNTHSSFKWRWYHFDGVDWDQSRRLGNRIYKFRGKAWDWEVDTEFGNYDYLMYADYDMDHPEVVNELRNWGVWYTNTLGLDGFRIDAVKHIKYSFTRDWINHVRSATGKNMFAVAEFWKNDLGAIENYLQKTNWNHSVFDVPLHYNLYNASKSGGNYDMRNIFNGTVVQRHPSHAVTFVDNHDSQPEEALESFVEEWFKPLAYALTLTREQGYPSVFYGDYYGIPTHGVPAMRSKIDPILEARQKYAYGPQHDYLDHPDVIGWTREGDSSHPKSGLATLITDGPGGSKRMYAGLKNAGETWYDITGNRSDTVKIGSDGWGEFHVNDGSVSIYVQK

SEQ ID NO: 27525 - protein, 483 aa, Synthetic construct
HHNGTNGTMMQYFEWYLPNDGNHWNRLNSDASNLKSKGITAVWIPPAWKGASQNDVGYGAYDLYDLGEFNQKGTVRTKYGTRSQLQAAVTSLKNNGIQVYGDVVMNHKGGADATEMVRAVEVNPNNRNQEVTGEYTIEAWTRFDFPGRGNTHSSFKWRWYHFDGVDWDQSRRLNNRIYKFRGKAWDWEVDTENGNYDYLMYADFDMDHPEVVNEIRNWGVWYTNTLGLDGFRIDAVKHIKYSFTRDWINHVRSATGKNMFAVAEFWKNDLGAIENYLQKTNWNHSVFDVPLHYNLYNASKSGGNYDMRNIFNGTVVQRHPSHAVTFVDNHDSQPEEALESFVEEWFKPLAYALTLTREQGYPSVFYGDYYGIPTHGVPAMRSKIDPILEARQKYAYGPQHDYLDHPDVIGWTREGDSSHPKSGLATLITDGPGGSKRMYAGLKNAGETWYDITGNRSDTVKIGSDGWGEFHVNDGSVSIYVQK

SEQ ID NO: 27526 - protein, 483 aa, Synthetic construct
HHNGTNGTMMQYFEWYLPNDGNHWNRLNSDASNLKSKGITAVWIPPAWKGASQNDVGYGAYDLYDLGEFNQKGTVRTKYGTRSQLQAAVTSLKNNGIQVYGDVVMNHKGGADATEMVRAVEVNPNNRNQEVTGEYTIEAWTRFDFPGRGNTHSSFKWRWYHFDGVDWDQSRRLNNRIYKFRGKAWDWEVDTENGNYDYLMYADIDMDHPELVNELRNWGVWYTNTLGLDGFRIDAVKHIKYSFTRDWINHVRSATGKNMFAVAEFWKNDLGAIENYLQKTNWNHSVFDVPLHYNLYNASKSGGNYDMRNIFNGTVVQRHPSHAVTFVDNHDSQPEEALESFVEEWFKPLAYALTLTREQGYPSVFYGDYYGIPTHGVPAMRSKIDPILEARQKYAYGPQHDYLDHPDVIGWTREGDSSHPKSGLATLITDGPGGSKRMYAGLKNAGETWYDITGNRSDTVKIGSDGWGEFHVNDGSVSIYVQK

SEQ ID NO: 27527 - protein, 485 aa, Bacillus sp.
HHNGTNATMMQYFEWYLPNDGNHWNRLNSDASNLKSKGITAVWIPPAWKGASQNDVGYGAYDLYDLGEFNQKGTVRTKYGTRSQLQAAVTSLKNNGIQVYGDVVMNHKGGADATEMVRAVEVNPNNRNQEVTGEYTIEAWTRFDFPGRGNTHSSFKWRWYHFDGVDWDQSRRLNNRIYKFRGHGKAWDWEVDTEFGNYDYLMYADYDMDHPEVVNELRNWGVWYTNTLGLDGFRIDAVKHIKYSFTRDWINHVRSATGKNMFAVAEFWKNDLGAIENYLQKTNWNHSVFDVPLHYNLYNASKSGGNYDMRNIFNGTVVQAHPMHAVTFVDNHDSQPEEALESFVEEWFKPLAYALTLTREQGYPSVFYGDYYGIPTHGVPAMRSKIDPILEARQKYAYGPQHDYLDHPDVIGWTREGDSSHPKSGLATLITDGPGGSKRMYAGLKNAGETWYDITGNRSDTVKIGSDGWGEFHVNDGSVSIYVQK

SEQ ID NO: 27528 - protein, 485 aa, Synthetic construct
HHNGTNGTMMQYFEWYLPNDGNHWNRLNSDASNLKSKGITAVWIPPAWKGASQNDVGYGAYDLYDLGEFNQKGTVRTKYGTRSQLQAAVTSLKNNGIQVYGDVVMNHKGGADATEMVRAVEVNPNNRNQEVTGEYTIEAWTRFDFPGRGNTHSSFKWRWYHFDGVDWDQSRRLNNRIYKFRGHGKAWDWEVDTENGNYDYLMYADIDMDHPEVVNELRNWGVWYTNTLGLDGFRIDAVKHIKYSFTRDWINHVRSATGKNMFAVAEFWKNDLGAIENYLQKTNWNHSVFDVPLHYNLYNASKSGGNYDMRNIFNGTVVQRHPSHAVTFVDNHDSQPEEALESFVEERFKPLAYALTLTREQGYPSVFYGDYYGIPTHGVPAMRSKIDPILEARQKYAYGPQHDYLDHPDVIGWTREGDSSHPKSGLATLITDGPGGSKRMYAGLKNAGETWYDITGNRSDTVKIGSDGWGEFHVNDGSVSIYVQK

SEQ ID NO: 27529 - protein, 483 aa, Bacillus sp.
HHNGTNETMMQYFEWYLPNDGNHWNRLNSDASNLKSKGITAVWIPPAWKGASQNDVGYGAYDLYDLGEFNQKGTVRTKYGTRSQLQAAVTSLKNNGIQVYGDVVMNHKGGADATEMVRAVEVNPNNRNQEVTGEYTIEAWTRFDFPGRGNTHSSFKWRWYHFDGVDWDQSRRLNNRIYKFRGKAWDWEVDTEFGNYDYLMYADYDMDHPEVVNELRNWGVWYTNTLGLDGFRIDAVKHIKYSFTRDWINHVRSATGKNMFAVAEFWKNDLGAIENYLQKTNWNHSVFDVPLHYNLYNASKSGGNYDMRNIFNGTVVQQHPMHAVTFVDNHDSQPEEALESFVEEWFKPLAYALTLTREQGYPSVFYGDYYGIPTHGVPAMRSKIDPILEARQKYAYGPQHDYLDHPDVIGWTREGDSSHPKSGLATLITDGPGGSKRMYAGLKNAGETWYDITGNRSDTVKIGSDGWGEFHVNDGSVSIYVQK

SEQ ID NO: 27530 - protein, 485 aa, Synthetic construct
HHNGTNGTMMQYFEWYLPNDGNHWNRLNSDASNLKSKGITAVWIPPAWKGASQNDVGYGAYDLYDLGEFNQKGTVRTKYGTRSQLQAAVTSLKNNGIQVYGDVVMNHKGGADATEMVRAVEVNPNNRNQEVTGEYTIEAWTRFDFPGRGNTHSSFKWRWYHFDGVDWDQSRRLNNRIYKFRGHGKAWDWEVDTENGNYDYLMYADIDMDHPEVVNELRNWGVWYTNTLGLDGFRIDAVKHIKYSFTRDWINHVRSATGKNMFAVAEFWKNDLGAIENYLQKTNWNHSVFDVPLHYNLYNASKSGGNYDMRNIFNGTVVQRHPSHAVTFVDNHDSQPEEALESFVEEWFKPLAYALTLTREQGYPSVFYGDYYGIPTHGVPAMRSQIDPILEARQKYAYGPQHDYLDHPDVIGWTREGDSSHPKSGLATLITDGPGGSKRMYAGLKNAGETWYDITGNRSDTVKIGSDGWGEFHVNDGSVSIYVQK

SEQ ID NO: 27531 - protein, 483 aa, Bacillus sp.
HHNGTNGTMMQYFEWYLPNDGNHWNRLNSDASNLKSKGITAVWIPPAWKGTSQNDVGYGAYDLYDLGEFNQKGTVRTKYGTRSQLQAAVTSLKNNGIQVYGDVVMNHKGGADATEMVRAVEVNPNNRNQEVTGEYTIEAWTRFDFPGRGNTHSSFKWRWYHFDGVDWDQSRRLDNRIYKFRGKAWDWEVDTEFGNYDYLMYVDYDMDHPEVVNELRNWGVWYTNTLGLDGFRIDAVKHIKYSFTRDWINHVRSATGKNMFAVAEFWKNDLGAIENYLQKTNWNHSVFDVPLHYNLYNASKSGGNYDMRNIFNGTVVQRHPSHAVTFVDNHDSQPEEALESFVEEWFKPLAYALTLTREQGYPSVFYGDYYGIPTHGVPAMRSKIDPILEARQKYAYGPQHDYLDHPDVIGWTREGDSSHPKSGLATLITDGPGGSKRMYAGLKNAGETWYDITGNRSDTVKIGSDGWGEFHVNDGSVSIYVQK

SEQ ID NO: 27532 - protein, 483 aa, Bacillus sp.
HHNGTNGTMMQYFEWYLPNDGNHWNRLNSDASNLKSKGITAVWIPPAWKGASQNDVGYGAYDLYDLGEFNQKGTVRTKYGTRSQLQAAVTSLKNNGIQVYGDVVMNHKGGADATEMVRAVEVNPNNRNQEVTGEYTIEAWTRFDFPGRGNTHSSFKWRWYHFDGVDWDQSRNLQNRIYKFRGKAWDWEVDTEFGNYDYLMYADYDMDHPEVVNELRNWGVWYTNTLGLDGFRIDAVKHIKYSFTRDWINHVRSATGKNMFAVAEFWKNDLGAIENYLQKTNWNHSVFDVPLHYNLYNASKSGGNYDMRNIFNGTVVQRHPSHAVTFVDNHDSQPEEALESFVDEWFKPLAYALTLTREQGYPSVFYGDYYGIPTHGVPAMRSKIDPILEARQKYAYGPQHDYLAHPDVMGWTREGDSSHPKSGLATLITDGPGGSKRMYAGLKKAGETWYDITGNRSDTVKIGSDGWGEFHVNDGSVSIYVQK

SEQ ID NO: 27533 - protein, 483 aa, Synthetic construct
HHNGTNGTMMQYFEWYLPNDGNHWNRLNSDASNLKSKGITAVWIPPAWKGASQNDVGYGAYDLYDLGEFNQKGTVRTKYGTRSQLQAAVTSLKNNGIQVYGDVVMNHKGGADATEMVRAVEVNPNNRNQEVTGEYTIEAWTRFDFPGRGNTHSSFKWRWYHFDGVDWDQSRRLNNRIYKFRGKAWDWEVDTEFGNYDYLMYADIDMDHPEVVNELRNWGVWYTNTLGLDGFRIDAVKHIKYSFTRDWINHVRSATGKNMFAVAEFWKNDLGAIENYLQKTNWNHSVFDVPLHYNLYNASKSGGNYDMRNIFNGTVVQRHPSHAVTFVDNHDSQPEEALESFVEEWFKPLAYALTLTREQGYPSVFYGDYYGIPTHGVPAMRSKIDPILEARQKYAYGPQHDYLDHPDVIGWTREGDSSHPKSGLATLITDGPGGSKRMYAGLKNAGETWYDITGNRSDTVKIGSDGWGEFHVNDGSVSIYVQK

SEQ ID NO: 27534 - protein, 483 aa, Synthetic construct
HHNGTNGTMMQYFEWYLPNDGNHWNRLNSDASNLKSKGITAVWIPPAWKGASQNDVGYGAYDLYDLGEFNQKGTVRTKYGTRSQLQAAVTSLKNNGIQVYGDVVMNHKGGADATEMVRAVEVNPNNRNQEVTGEYTIEAWTRFDFPGRGNTHSSFKWRWYHFDGVDWDQSRRLNNRIYKFRGKAWDWEVDTENGNYDYLMYADFDMDHPEVVNELRNWGVWYTNTLGLDGFRIDAVKHIKYSFVRDWINHVRSATGKNMFAVAEFWKNDLGAIENYLQKTNWNHSVFDVPLHYNLYNASKSGGNYDMRNIFNGTVVQRHPSHAVTFVDNHDSQPEEALESFVEEWFKPLAYALTLTREQGYPSVFYGDYYGIPTHGVPAMRSKIDPILEARQKYAYGPQHDYLDHPDVIGWTREGDSSHPKSGLATLITDGPGGSKRMYAGLKNAGETWYDITGNRSDTVKIGSDGWGEFHVNDGSVSIYVQK

SEQ ID NO: 27535 - protein, 485 aa, Bacillus sp.
HHNGTNGTMMQYFEWYLPNDGNHWNRLNSDASNLKSKGITAVWIPPAWKGASQNDVGYGAYDLYDLGEFNQKGTVRTKYGTRSQLQAAVTSLKNNGIQVYGDVVMNHKGGADATEMVRAVEVNPNNRNQEVTGEYTIEAWTRFDFPGRGNTHSSFKWRWYHFDGVDWDQSRQVNNRIYKFRGHGKAWDWEVDTEFGNYDYLMYVDYDMDHPEVVNELRNWGVWYTNTLGLDGFRIDAVKHIKYSFTRDWINHVRSATGKNMFAVAEFWKNDLGAIENYLQKTNWNHSVFDVPLHYNLYNASKSGGNYDMRNIFNGTVVQRHPSHAVTFVDNHDSQPEEALESFVEEWFKPLAYALTLTREQGYPSVFYGDYYGIPTHGVPAMRSKIDPILEARQKYAYGPQHDYLDHPDVIGWTREGDSSHPKSGLATLITDGPGGSKRMYAGLKNAGETWYDITGNRSDTVKIGSDGWGEFHVNDGSVSIYVQK

SEQ ID NO: 27536 - protein, 485 aa, Bacillus sp.
HHNGTNGTMMQYFEWYLPNDGNHWNRLNSDASNLKSKGITAVWIPPAWKGASQNDVGYGAYDLYDLGEFNQKGTVRTKYGTRSQLQAAVTSLKNNGIQVYGDVVMNHKGGADATEMVRAVEVNPNNRNQEVTGEYTIEAWTRFDFPGRGNTHSSFKWRWYHFDGVDWDQSRKTNNRIYKFRGHGKAWDWEVDTEFGNYDYLMYADYDMDHPEVVNELRNWGVWYTNTLGLDGFRIDAVKHIKYSFTRDWINHVRSATGKNMFAVAEFWKNDLGAIENYLQKTNWNHSVFDVPLHYNLYNASKSGGNYDMRNIFNGTVVQRHPSHAVTFVDNHDSQPEEALESFVEEWFKPLAYALTLTREQGYPSVFYGDYYGIPTHGVPAMRSKIDPILEARQKYAYGPQHDYLDHPDVIGWTREGDSSHPKSGLATLITDGPGGSKRMYAGLKNAGETWYDITGNRSDTVKIGSDGWGEFHVNDGSVSIYVQK

SEQ ID NO: 27537 - protein, 483 aa, Bacillus sp.
HHNGTNGTMMQYFEWYLPNDGNHWNRLNSDASNLKSKGITAVWIPPAWKGASQNDVGYGAYDLYDLGEFNQKGTVRTKYGTRSQLQAAVTSLKNNGIQVYGDVVMNHKGGADATEMVRAVEVNPNNRNQEVTGEYTIEAWTRFDFPGRGNTHSSFKWRWYHFDGVDWDQSRRLNNRIYKFRGKAWDWEVDTEFGNYDYLMYADYDMDHPEVVNELRNWGVWYTNTLGLDGFRIDAVKHIKYSFTRDWINHVRSATGKNMFAVAEFWKNDLGAIENYLQKTNWNHSVFDVPLHYNLYNASQSGGNYDMRNIFNGTVVQRHPSHAVTFVDNHDSQPEEALESFVEEWFKPLAYALTLTREQGYPSVFYGDYYGIPTHGVPAMRSKIDPILEARQKYAYGPQHDYLDHPDVIGWTREGDSSHPKSGLATLITDGPGGSKRMYAGLKNAGETWYDITGNRSDTVKIGSDGWGEFHVNGQSVSIYVQK

SEQ ID NO: 27538 - protein, 483 aa, Bacillus sp.
HHNGTNGTMMQYFEWYLPNDGNHWNRLNSDASNLKSKGITAVWIPPAWKGVSQNDVGYGAYDLYDLGEFNQKGTVRTKYGTRSQLQAAVTSLKNNGIQVYGDVVMNHKGGADATEMVRAVEVNPNNRNQEVTGEYTIEAWTRFDFPGRGNTHSSFKWRWYHFDGVDWDQSRQLNNRIYKFRGKAWDWEVDTEFGNYDYLMYVDYDMDHPEVVNELRNWGVWYTNTLGLDGFRIDAVKHIKYSFTRDWINHVRSATGKNMFAVAEFWKNDLGAIENYLQKTNWNHSVFDVPLHYNLYNASKSGGNYDMRNIFNGTVVQRHPSHAVTFVDNHDSQPEEALESFVEEWFKPLAYALTLTREQGYPSVFYGDYYGIPTHGVPAMRSKIDPILEARQKYAYGPQHDYLDHPDVIGWTREGDSSHPKSGLATLITDGPGGSKRMYAGLKNAGETWYDITGNRSDTVKIGSDGWGEFHVNDGSVSIYVQK

SEQ ID NO: 27539 - protein, 485 aa, Synthetic construct
HHNGTNGTMMQYFEWYLPNDGNHWNRLNSDASNLKSKGITAVWIPPAWKGASQNDVGYGAYDLYDLGEFNQKGTVRTKYGTRSQLQAAVTSLKNNGIQVYGDVVMNHKGGADATEMVRAVEVNPNNRNQEVTGEYTIEAWTRFDFPGRGNTHSSFKWRWYHFDGVDWDQSRRLNNRIYKFRGHGKGWDWEVDTENGNYDYLMYADIDMDHPEVVNELRNWGVWYTNTLGLDGFRIDAVKHIKYSFTRDWINHVRSATGKNMFAVAEFWKNDLGAIENYLQKTNWNHSVFDVPLHYNLYNASKSGGNYDMRNIFNGTVVQRHPSHAVTFVDNHDSQPEEALESFVEEWFKPLAYALTLTREQGYPSVFYGDYYGIPTHGVPAMRSKIDPILEARQKYAYGPQHDYLDHPDVIGWTREGDSSHPKSGLATLITDGPGGSKRMYAGLKNAGETWYDITGNRSDTVKIGSDGWGEFHVNDGSVSIYVQK

SEQ ID NO: 27540 - protein, 485 aa, Bacillus sp.
HHNGTNGTMMQYFEWYLPNDGNHWNRLNSDASNLKSKGITAVWIPPAWKGASQNDVGYGAYDLYDLGEFNQKGTVRTKYGTRSQLQAAVTSLKNNGIQVYGDVVMNHKGGADATEMVGAVEVNPNNRNQEVTGEYTIEAWTRFDFPGRGNTHSSFKWRWYHFDGVDWDQSRRLNNRIYKFRGHGKAWDWEVDTEFGNYDYLMYADYDMDHPEVVNELRNWGVWYTNTLGLDGFRIDAVKHIKYSFTRDWINHVRSATGKNMFAVAEFWKNDLGAIENYLQKTNWNHSVFDVPLHYNLYNASKSGGNYDMRNIFNGTVVQRHPSHAVTFVDNHDSQPEEALESFVEEWFKPLAYALTLTREQGYPSVFYGDYYGIPTHGVPAMRSKIDPILEARQKYAYGPQHDYLDHPDVIGWTREGDSSHPKSGLATLITDGPGGSKRMYAGLKNAGETWYDITGNRSDTVKIGSDGWGEFHVNDGSVSIYVQK

SEQ ID NO: 27541 - protein, 483 aa, Synthetic construct
HHNGTNGTMMQYFEWYLPNDGNHWNRLNSDASNLKSKGITAVWIPPAWKGASQNDVGYGAYDLYDLGEFNQKGTVRTKYGTRSQLQAAVTSLKNNGIQVYGDVVMNHKGGADATEMVRAVEVNPNNRNQEVTGEYTIEAWTRFDFPGRGNTHSSFKWRWYHFDGVDWDQSRRLNNRIYKFRGKAWDWEVDTENGNYDYLMYADIDMDDPEVVNELRNWGVWYTNTLGLDGFRIDAVKHIKYSFTRDWINHVRSATGKNMFAVAEFWKNDLGAIENYLQKTNWNHSVFDVPLHYNLYNASKSGGNYDMRNIFNGTVVQRHPSHAVTFVDNHDSQPEEALESFVEEWFKPLAYALTLTREQGYPSVFYGDYYGIPTHGVPAMRSKIDPILEARQKYAYGPQHDYLDHPDVIGWTREGDSSHPKSGLATLITDGPGGSKRMYAGLKNAGETWYDITGNRSDTVKIGSDGWGEFHVNDGSVSIYVQK

SEQ ID NO: 27542 - protein, 485 aa, Synthetic construct
HHNGTNGTMMQYFEWYLPNDGNHWNRLNSDASNLKSKGITAVWIPPAWKGASQNDVGYGAYDLYDLGEFNQKGTVRTKYGTRSQLQAAVTSLKNNGIQVYGDVVMNHKGGADATEMVRAVEVNPNNRNQEVTGEYTIEAWTRFDFPGRGNTHSSFKWRWYHFDGVDWDQSRRLNNRIYKFRGHGKAWDWEVDTENGNYDYLMYADIDMDHPEVVNELKNWGVWYTNTLGLDGFRIDAVKHIKYSFTRDWINHVRSATGKNMFAVAEFWKNDLGAIENYLQKTNWNHSVFDVPLHYNLYNASKSGGNYDMRNIFNGTVVQRHPSHAVTFVDNHDSQPEEALESFVEEWFKPLAYALTLTREQGYPSVFYGDYYGIPTHGVPAMRSKIDPILEARQKYAYGPQHDYLDHPDVIGWTREGDSSHPKSGLATLITDGPGGSKRMYAGLKNAGETWYDITGNRSDTVKIGSDGWGEFHVNDGSVSIYVQK

SEQ ID NO: 27543 - protein, 483 aa, Bacillus sp.
HHNGTNGTMMQYFEWYLPNDGNHWNRLNSDASNLKSKGITAVWIPPAWKGASQNDVGYGAYDLYDLGEFNQKGTVRTKYGTRSQLQAAVTSLKNNGIQVYGDVVMNHKGGADATEMVRAVEVNPNNRNQEVTGEYTIEAWTRFDFPGRGNTHSSFKWRWYHFDGVDWDQSRDVNNRIYKFRGKAWDWEVDTEFGNYDYLMYADYDMDHPEVVNELRNWGVWYTNTLGLDGFRIDAVKHIKYSFTRDWINHVRSATGKNMFAVAEFWKNDLGAIENYLQKTNWNHSVFDVPLHYNLYNASKSGGNYDMRNIFNGTVVQRHPSHAVTFVDNHDSQPEEALESFVEEWFKPLAYALTLTREQGYPSVFYGDYYGIPTHGVPAMRSKIDPILEARQKYAYGPQHDYLDHPDVIGWTREGDSSHPKSGLATLITDGPGGSKRMYAGLKNAGETWYDITGNRSDTVKIGSDGWGEFHVNDGSVSIYVQK

SEQ ID NO: 27544 - protein, 483 aa, Bacillus sp.
HHNGTNGTMMQYFEWYLPNDGNHWNRLNSDASNLKSKGITAVWIPPAWKGASQNDVGYGAYDLYDLGEFNQKGTVRTKYGTRSQLQAAVTSLKNNGILVYGDVVMNHKGGADATEMVRAVEVNPNNRNQEVTGEYTIEAWTRFDFPGRGNTHSSFKWRWYHFDGVDWDQSRRLNNRIYKFRGKAWDWEVDTEFGNYDYLMYADYDMDHPEVVNELRNWGVWYTNTLGLDGFRIDAVKHIKYSFTRDWINHVRSATGKNMFAVAEFWKNDLGAIENYLQKTNWNHSVFDVPLHYNLYNASKSGGNYDMRNIFNGTVVQMHPMHAVTFVDNHDSQPEEALESFVEEWFKPLAYALTLTREQGYPSVFYGDYYGIPTHGVPAMRSKIDPILEARQKYAYGPQHDYLDHPDVIGWTREGDSSHPKSGLATLITDGPGGSKRMYAGLKNAGETWYDITGNRSDTVKIGSDGWGEFHVNDGSVSIYVQK

SEQ ID NO: 27545 - protein, 483 aa, Bacillus sp.
HHNGTNGTMMQYFEWYLPNDGNHWNRLNSDASNLKSKGITAVWIPPAWKGASQNDVGYGAYDLYDLGEFNQKGTVRTKYGTRSQLQAAVTSLKNNGIQVYGDVVMNHKGGADATEMVRAVEVNPNNRNQEVTGEYTIEAWTRFDFPGRGNTHSSFKWRWYHFDGVDWDQSRRLNNRIYKFRGKAWDWEVDGEFGNYDYLMYADYDMDHPEVVNELRNWGVWYTNTLGLDGFRIDAVKHIKYSFTRDWINHVRSATGKNMFAVAEFWKNDLGAIENYLQKTNWNHSVFDVPLHYNLYNASKSGGNYDMRNIFNGTVVQRHPSHAVTFVDNHDSQPEEALESFVEEWFKPLAYALTLTREQGYPSVFYGDYYGIPTHGVPAMRSKIDPILEARQKYAYGPQHDYLDHPDVIGWTREGDSSHPKSGLATLITDGPGGSKRMYAGLKNAGETWYDITGNRSDTVKIGSDGWGEFHVNDGSVSIYVQK

SEQ ID NO: 27546 - protein, 483 aa, Bacillus sp.
HHNGTNGTMMQYFEWYLPNDGNHWNRLNSDASNLKSKGITAVWIPPAWKATSQNDVGYGAYDLYDLGEFNQKGTVRTKYGTRSQLQAAVTSLKNNGIQVYGDVVMNHKGGADATEMVRAVEVNPNNRNQEVTGEYTIEAWTRFDFPGRGNTHSSFKWRWYHFDGVDWDQSREVTNRIYKFRGKAWDWEVDTEFGNYDYLMYADYDMDHPEVVNELRNWGVWYTNTLGLDGFRIDAVKHIKYSFTRDWINHVRSATGKNMFAVAEFWKNDLGAIENYLQKTNWNHSVFDVPLHYNLYNASKSGGNYDMRNIFNGTVVQRHPSHAVTFVDNHDSQPEEALESFVEEWFKPLAYALTLTREQGYPSVFYGDYYGIPTHGVPAMRSKIDPILEARQKYAYGPQHDYLDHPDVIGWTREGDSSHPKSGLATLITDGPGGSKRMYAGLKNAGETWYDITGNRSDTVKIGSDGWGEFHVNDGSVSIYVQK

SEQ ID NO: 27547 - protein, 485 aa, Bacillus sp.
HHNGTNGTMMQYFEWYLPNDGNHWNRLNSDASNLKSKGITAVWIPPAWKGASQNDVGYGAYDLYDLGEFNQKGTVRTKYGTRSQLQAAVTSLKNNGIQVYGDVVMNHKGGADATEMVRAVEVNPNNRNQEVTGEYTIEAWTRFDFPGRGNTHSSFKWRWYHFDGVDWDQSRDVNNRIYKFRGHGKAWDWEVDTEFGNYDYLMYADYDMDHPEVVNELRNWGVWYTNTLGLDGFRIDAVKHIKYSFTRDWINHVRSATGKNMFAVAEFWKNDLGAIENYLQKTNWNHSVFDVPLHYNLYNASKSGGNYDMRNIFNGTVVQRHPSHAVTFVDNHDSQPEEALESFVEEWFKPLAYALTLTREQGYPSVFYGDYYGIPTHGVPAMRSKIDPILEARQKYAYGPQHDYLDHPDVIGWTREGDSSHPKSGLATLITDGPGGSKRMYAGLKNAGETWYDITGNRSDTVKIGSDGWGEFHVNDGSVSIYVQK

SEQ ID NO: 27548 - protein, 483 aa, Bacillus sp.
HHNGTNGTMMQYFEWYLPNDGNHWNRLNSDASNLKSKGITAVWIPPAWKGASQNDVGYGAYDLYDLGEFNQKGTVRTKYGTRSQLQAAVTSLKNNGIQVYGDVVMNHKGGADATEMVRAVEVNPNNRNQEVTGEYTIEAWTRFDFPGRGNTHSSFKWRWYHFDGVDWDQSRRLNNRIYKFRGKAWDWEVDTEFGNYDYLMYADYDMDHPEVVNELRNWGVWYTNTLGLDGFRIDAVKHIKYSFTRDWINHVRSATGKNMFAVAEFWKNDLGAIENYLQKTNWNHSVFDVPLHYNLYNASKSGGNYDMRHIFNGTVVQRHPSHAVTFVDNHDSQPEEALESFVEEWFKPLAYALTLTREQGYPSVFYGDYYGIPTHGVPAMRSKIDPILEARQKYAYGPQHDYLDHPDVIGWTREGDSSHPKSGLATLITDGPGGSKRMYAGLKNAGETWYDITGNRSDTVKIGSDGWGEFHVNDGSVSIYVQK

SEQ ID NO: 27549 - protein, 483 aa, Bacillus sp.
HHNGTNGTMMQYFEWYLPNDGNHWNRLNSDASNLKSKGITAVWIPPAWKAASQNDVGYGAYDLYDLGEFNQKGTVRTKYGTRSQLQAAVTSLKNNGIQVYGDVVMNHKGGADATEMVRAVEVNPNNRNQEVTGEYTIEAWTRFDFPGRGNTHSSFKWRWYHFDGVDWDQSREFQNRIYKFRGKAWDWEVDTEFGNYDYLMYTDYDMDHPEVVNELRNWGVWYTNTLGLDGFRIDAVKHIKYSFTRDWINHVRSATGKNMFAVAEFWKNDLGAIENYLQKTNWNHSVFDVPLHYNLYNASKSGGNYDMRNIFNGTVVQRHPSHAVTFVDNHDSQPEEALESFVEEWFKPLAYALTLTREQGYPSVFYGDYYGIPTHGVPAMRSKIDPILEARQKYAYGPQHDYLDHPDVIGWTREGDSSHPKSGLATLITDGPGGSKRMYAGLKNAGETWYDITGNRSDTVKIGSDGWGEFHVNDGSVSIYVQK

SEQ ID NO: 27550 - protein, 483 aa, Synthetic construct
HHNGTNGTMMQYFEWYLPNDGNHWNRLNSDASNLKSKGITAVWIPPAWKGASQNDVGYGAYDLYDLGEFNQKGTVRTKYGTRSQLQAAVTSLKNNGIQVYGDVVMNHKGGADATEMVRAVEVNPNNRNQEVTGEYTIEAWTRFDFPGRGNTHSSFKWRWYHFDGVDWDQSRRLNNRIYKFRGKAWDWEVDTENGNYDYLMYADIDMDHMEVVNELRNWGVWYTNTLGLDGFRIDAVKHIKYSFTRDWINHVRSATGKNMFAVAEFWKNDLGAIENYLQKTNWNHSVFDVPLHYNLYNASKSGGNYDMRNIFNGTVVQRHPSHAVTFVDNHDSQPEEALESFVEEWFKPLAYALTLTREQGYPSVFYGDYYGIPTHGVPAMRSKIDPILEARQKYAYGPQHDYLDHPDVIGWTREGDSSHPKSGLATLITDGPGGSKRMYAGLKNAGETWYDITGNRSDTVKIGSDGWGEFHVNDGSVSIYVQK

SEQ ID NO: 27551 - protein, 485 aa, Bacillus sp.
HHNGTNGTMMQYFEWYLPNDGNHWNRLNSDASNLKSKGITAVWIPPAWKGASQNDVGYGAYDLYDLGEFNQKGTVRTKYGTRSQLQAAVTSLKNNGIQVYGDVVMNHKGGADATEMVRAVEVNPNNRNQEVTGEYTIEAWTRFDFPGRGNTHSSFKWRWYHFDGVDWDQSRRTNNRIYKFRGHGKAWDWEVDTEFGNYDYLMYADYDMDHPEVVNELRNWGVWYTNTLGLDGFRIDAVKHIKYSFTRDWINHVRSATGKNMFAVAEFWKNDLGAIENYLQKTNWNHSVFDVPLHYNLYNASKSGGNYDMRNIFNGTVVQRHPSHAVTFVDNHDSQPEEALESFVEEWFKPLAYALTLTREQGYPSVFYGDYYGIPTHGVPAMRSKIDPILEARQKYAYGPQHDYLDHPDVIGWTREGDSSHPKSGLATLITDGPGGSKRMYAGLKNAGETWYDITGNRSDTVKIGSDGWGEFHVNDGSVSIYVQK

SEQ ID NO: 27552 - protein, 485 aa, Bacillus sp.
HHNGTNGTMMQYFEWYLPNDGNHWNRLNSDASNLKSKGITAVWIPPAWKGASQNDVGYGAYDLYDLGEFNQKGTVRTKYGTRSQLQAAVTSLKNNGIQVYGDVVMNHKGGADATEMVRAVEVNPNNRNQEVTGEYTIEAWTRFDFPGRGNTHSSFKWRWYHFDGVDWDQSRRLHNRIYKFRGHGKAWDWEVDTEFGNYDYLMYADYDMDHPEVVNELRNWGVWYTNTLGLDGFRIDAVKHIKYSFTRDWINHVRSATGKNMFAVAEFWKNDLGAIENYLQKTNWNHSVFDVPLHYNLYNASKSGGNYDMRNIFNGTVVQRHPSHAVTFVDNHDSQPEEALESFVEEWFKPLAYALTLTREQGYPSVFYGDYYGIPTHGVPAMRSKIDPILEARQKYAYGPQHDYLDHPDVIGWTREGDSSHPKSGLATLITDGPGGSKRMYAGLKNAGETWYDITGNRSDTVKIGSDGWGEFHVNDGSVSIYVQK

SEQ ID NO: 27553 - protein, 483 aa, Bacillus sp.
HHNGTNGTMMQYFEWYLPNDGNHWNRLNSDASNLKSKGITAVWIPPAWKAASQNDVGYGAYDLYDLGEFNQKGTVRTKYGTRSQLQAAVTSLKNNGIQVYGDVVMNHKGGADATEMVRAVEVNPNNRNQEVTGEYTIEAWTRFDFPGRGNTHSSFKWRWYHFDGVDWDQSRRTQNRIYKFRGKAWDWEVDTEFGNYDYLMYADYDMDHPEVVNELRNWGVWYTNTLGLDGFRIDAVKHIKYSFTRDWINHVRSATGKNMFAVAEFWKNDLGAIENYLQKTNWNHSVFDVPLHYNLYNASKSGGNYDMRNIFNGTVVQRHPSHAVTFVDNHDSQPEEALESFVEEWFKPLAYALTLTREQGYPSVFYGDYYGIPTHGVPAMRSKIDPILEARQKYAYGPQHDYLDHPDVIGWTREGDSSHPKSGLATLITDGPGGSKRMYAGLKNAGETWYDITGNRSDTVKIGSDGWGEFHVNDGSVSIYVQK

SEQ ID NO: 27554 - protein, 485 aa, Bacillus sp.
HHNGTNGTMMQYFEWYLPNDGNHWNRLNSDASNLKSKGITAVWIPPAWKAASQNDVGYGAYDLYDLGEFNQKGTVRTKYGTRSQLQAAVTSLKNNGIQVYGDVVMNHKGGADATEMVRAVEVNPNNRNQEVTGEYTIEAWTRFDFPGRGNTHSSFKWRWYHFDGVDWDQSRRFNNRIYKFRGHGKAWDWEVDTEFGNYDYLMYADYDMDHPEVVNELRNWGVWYTNTLGLDGFRIDAVKHIKYSFTRDWINHVRSATGKNMFAVAEFWKNDLGAIENYLQKTNWNHSVFDVPLHYNLYNASKSGGNYDMRNIFNGTVVQRHPSHAVTFVDNHDSQPEEALESFVEEWFKPLAYALTLTREQGYPSVFYGDYYGIPTHGVPAMRSKIDPILEARQKYAYGPQHDYLDHPDVIGWTREGDSSHPKSGLATLITDGPGGSKRMYAGLKNAGETWYDITGNRSDTVKIGSDGWGEFHVNDGSVSIYVQK

SEQ ID NO: 27555 - protein, 485 aa, Synthetic construct
HHNGTNGTMMQYFEWYLPNDGNHWNRLNSDASNLKSKGITAVWIPPAWKGASQNDVGYGAYDLYDLGEFNQKGTVRTKYGTRSQLQAAVTSLKNNGIQVYGDVVMNHKGGADATEMVRAVEVNPNNRNQEVTGEYTIEAWTRFDFPGRGNTHSSFKWRWYHFDGVDWDQSRRLNNRIYKFRGHGKAWDWEVDTENGNYDYLMYADIDMDHPEVINELRNWGVWYTNTLGLDGFRIDAVKHIKYSFTRDWINHVRSATGKNMFAVAEFWKNDLGAIENYLQKTNWNHSVFDVPLHYNLYNASKSGGNYDMRNIFNGTVVQRHPSHAVTFVDNHDSQPEEALESFVEEWFKPLAYALTLTREQGYPSVFYGDYYGIPTHGVPAMRSKIDPILEARQKYAYGPQHDYLDHPDVIGWTREGDSSHPKSGLATLITDGPGGSKRMYAGLKNAGETWYDITGNRSDTVKIGSDGWGEFHVNDGSVSIYVQK

SEQ ID NO: 27556 - protein, 485 aa, Synthetic construct
HHNGTNGTMMQYFEWYLPNDGNHWNRLNSDASNLKSKGITAVWIPPAWKGASQNDVGYGAYDLYDLGEFNQKGTVRTKYGTRSQLQAAVTSLKNNGIQVYGDVVMNHKGGADATEMVRAVEVNPNNRNQEVTGEYTIEAWTRFDFPGRGNTHSSFKWRWYHFDGVDWDQSRRLNNRIYKFRGHGKAWDWEVDTENGNYDYLMYADIDMDHPEVVNELRNWGVWYTNTLGLDGFRIDAVKHIKYSFTRDWINHVRSATGKNMFAVAEFWKNDLGAIENYLQKTNWNHSVFDVPLHYNFYNASKSGGNYDMRNIFNGTVVQRHPSHAVTFVDNHDSQPEEALESFVEEWFKPLAYALTLTREQGYPSVFYGDYYGIPTHGVPAMRSKIDPILEARQKYAYGPQHDYLDHPDVIGWTREGDSSHPKSGLATLITDGPGGSKRMYAGLKNAGETWYDITGNRSDTVKIGSDGWGEFHVNDGSVSIYVQK

SEQ ID NO: 27557 - protein, 483 aa, Bacillus sp.
HHNGTNGTMMQYFEWYLPNDGNHWNRLNSDASNLKSKGITAVWIPPAWKGASQNDVGYGAYDLYDLGEFNQKGTVRTKYGTRSQLQAAVTSLKNNGIQVYGDVVMNHKGGADATEMVRAVEVNPNNRNQEVTGEYTIEAWTRFDFPGRGNTHSSFKWRWYHFDGVDWDQSRRLNNRIYKFRGKAWDWEVDTEFGNYDYLMYADYDMDHPEVVNELRNWGVWYTNTLGLDGFRIDAVKHIKYSFTRDWINHVRSATGKNMFAVAEFWKNDLGAIENYLQKTNWNHSVFDVPLHYNLYNASKSGGNYDMRNIFNGTVVQRHPEHAVTFVDNHDSQPEEALESFVEEWFKPLAYALTLTREQGYPSVFYGDYYGIPTHGVPAMRSKIDPILEARQKYAYGPQHDYLDHPDVIGWTREGDSSHPKSGLATLITDGPGGSKRMYAGLKNAGETWYDITGNRSDTVKIGSDGWGEFHVNDGSVSIYVQK

SEQ ID NO: 27558 - protein, 483 aa, Synthetic construct
HHNGTNGTMMQYFEWYLPNDGNHWNRLNSDASNLKSKGITAVWIPPAWKGASQNDVGYGAYDLYDLGEFNQKGTVRTKYGTRSQLQAAVTSLKNNGIQVYGDVVMNHKGGADATEMVRAVEVNPNNRNQEVTGEYTIEAWTRFDFPGRGNTHSSFKWRWYHFDGVDWDQSRRLNNRIYKFRGKAWDWEVDAEFGNYDYLMYADIDMDHPEVVNELRNWGVWYTNTLGLDGFRIDAVKHIKYSFTRDWINHVRSATGKNMFAVAEFWKNDLGAIENYLQKTNWNHSVFDVPLHYNLYNASKSGGNYDMRNIFNGTVVQRHPSHAVTFVDNHDSQPEEALESFVEEWFKPLAYALTLTREQGYPSVFYGDYYGIPTHGVPAMRSKIDPILEARQKYAYGPQHDYLDHPDVIGWTREGDSSHPKSGLATLITDGPGGSKRMYAGLKNAGETWYDITGNRSDTVKIGSDGWGEFHVNDGSVSIYVQK

SEQ ID NO: 27559 - protein, 485 aa, Synthetic construct
HHNGTNGTMMQYFEWYLPNDGNHWNRLNSDASNLKSKGITAVWIPPAWKGASQNDVGYGAYDLYDLGEFNQKGTVRTKYGTRSQLQAAVTSLKNNGIQVYGDVVMNHKGGADATEMVRAVEVNPNNRNQEVTGEYTIEAWTRFDFPGRGNTHSSFKWRWYHFDGVDWDQSRRLNNRIYKFRGHGKAWDWEVDTENGNYDYLMYADYDYDHPEVVNELRNWGVWYTNTLGLDGFRIDAVKHIKYSFTRDWINHVRSATGKNMFAVAEFWKNDLGAIENYLQKTNWNHSVFDVPLHYNLYNASKSGGNYDMRNIFNGTVVQRHPSHAVTFVDNHDSQPEEALESFVEEWFKPLAYALTLTREQGYPSVFYGDYYGIPTHGVPAMRSKIDPILEARQKYAYGPQHDYLDHPDVIGWTREGDSSHPKSGLATLITDGPGGSKRMYAGLKNAGETWYDITGNRSDTVKIGSDGWGEFHVNDGSVSIYVQK

SEQ ID NO: 27560 - protein, 485 aa, Bacillus sp.
HHNGKNGTMMQYFEWYLPNDGNHWNRLNSDASNLKSKGITAVWIPPAWKGASQNDVGYGAYDLYDLGEFNQKGTVRTKYGTRSQLQAAVTSLKNNGIQVYGDVVMNHKGGADATEMVRAVEVNPNNRNQEVTGEYTIEAWTRFDFPGRGNTHSSFKWRWYHFDGVDWDQSREFNNRIYKFRGHGKAWDWEVDTEFGNYDYLMYADYDMDHPEVVNELRNWGVWYTNTLGLDGFRIDAVKHIKYSFTRDWINHVRSATGKNMFAVAEFWKNDLGAIENYLQKTNWNHSVFDVPLHYNLYNASKSGGNYDMRNIFNGTVVQVHPSHAVTFVDNHDSQPEEALESFVEEWFKPLAYALTLTREQGYPSVFYGDYYGIPTHGVPAMRSKIDPILEARQKYAYGPQHDYLDHPDVIGWTREGDSSHPKSGLATLITDGPGGSKRMYAGLKNAGETWYDITGNRSDTVKIGSDGWGEFHVNYGSVSIYVQK

SEQ ID NO: 27561 - protein, 483 aa, Synthetic construct
HHNGTNGTMMQYFEWYLPNDGNHWNRLNSDASNLKSKGITAVWIPPAWKGASQNDVGYGAYDLYDLGEFNQKGTVRTKYGTRSQLQAAVTSLKNNGIQVYGDVVMNHKGGADATEMVRAVEVNPNNRNQEVTGEYTIEAWTRFDFPGRGNTHSSFKWRWYHFDGVDWDQSRRLNNRIYKFRGKAWDWEVDTENGNYDYLMYADIDMDHSEVVNELRNWGVWYTNTLGLDGFRIDAVKHIKYSFTRDWINHVRSATGKNMFAVAEFWKNDLGAIENYLQKTNWNHSVFDVPLHYNLYNASKSGGNYDMRNIFNGTVVQRHPSHAVTFVDNHDSQPEEALESFVEEWFKPLAYALTLTREQGYPSVFYGDYYGIPTHGVPAMRSKIDPILEARQKYAYGPQHDYLDHPDVIGWTREGDSSHPKSGLATLITDGPGGSKRMYAGLKNAGETWYDITGNRSDTVKIGSDGWGEFHVNDGSVSIYVQK

SEQ ID NO: 27562 - protein, 483 aa, Synthetic construct
HHNGTNGTMMQYFEWYLPNDGNHWNRLNSDASNLKSKGITAVWIPPAWKGASQNDVGYGAYDLYDLGEFNQKGTVRTKYGTRSQLQAAVTSLKNNGIQVYGDVVMNHKGGADATEMVRAVEVNPNNRNQEVTGEYTIEAWTRFDFPGRGNTHSSFKWRWYHFDGVDWDQSRRLNNRIYKFRGKAWDWEVDTENGNYDYLMYADIDMDHPETVNELRNWGVWYTNTLGLDGFRIDAVKHIKYSFTRDWINHVRSATGKNMFAVAEFWKNDLGAIENYLQKTNWNHSVFDVPLHYNLYNASKSGGNYDMRNIFNGTVVQRHPSHAVTFVDNHDSQPEEALESFVEEWFKPLAYALTLTREQGYPSVFYGDYYGIPTHGVPAMRSKIDPILEARQKYAYGPQHDYLDHPDVIGWTREGDSSHPKSGLATLITDGPGGSKRMYAGLKNAGETWYDITGNRSDTVKIGSDGWGEFHVNDGSVSIYVQK

SEQ ID NO: 27563 - protein, 483 aa, Synthetic construct
HHNGTNGTMMQYFEWYLPNDGNHWNRLNSDASNLKSKGITAVWIPPAWKGASQNDVGYGAYDLYDLGEFNQKGTVRTKYGTRSQLQAAVTSLKNNGIQVYGDVVMNHKGGADATEMVRAVEVNPNNRNQEVTGEYTIEAWTRFDFPGRGNTHSSFKWRWYHFDGVDWDQSRRLNNRIYKFRGKAWDWEVDDEFGNYDYLMYADIDMDHPEVVNELRNWGVWYTNTLGLDGFRIDAVKHIKYSFTRDWINHVRSATGKNMFAVAEFWKNDLGAIENYLQKTNWNHSVFDVPLHYNLYNASKSGGNYDMRNIFNGTVVQRHPSHAVTFVDNHDSQPEEALESFVEEWFKPLAYALTLTREQGYPSVFYGDYYGIPTHGVPAMRSKIDPILEARQKYAYGPQHDYLDHPDVIGWTREGDSSHPKSGLATLITDGPGGSKRMYAGLKNAGETWYDITGNRSDTVKIGSDGWGEFHVNDGSVSIYVQK

SEQ ID NO: 27564 - protein, 485 aa, Bacillus sp.
HHNGTNGTMMQYFEWYLPNDGNHWNRLNSDASNLKSKGITAVWIPPAWKGASQNDVGYGAYDLYDLGEFNQKGTVRTKYGTRSQLQAAVTSLKNNGIQVYGDVVMNHKGGADATEMVRAVEVNPNNRNQEVTGEYTIEAWTRFDFPGRGNTHSSFKWRWYHFDGVDWDQSRSLNNRIYKFRGHGKAWDWEVDTEFGNYDYLMYADYDMDHPEVVNELRNWGVWYTNTLGLDGFRIDAVKHIKYSFTRDWINHVRSATGKNMFAVAEFWKNDLGAIENYLQKTNWNHSVFDVPLHYNLYNASKSGGNYDMRNIFNGTVVQRHPSHAVTFVDNHDSQPEEALESFVEEWFKPLAYALTLTREQGYPSVFYGDYYGIPTHGVPAMRSKIDPILEARQKYAYGPQHDYLDHPDVIGWTREGDSSHPKSGLATLITDGPGGSKRMYAGLKNAGETWYDITGNRSDTVKIGSDGWGEFHVNDGSVSIYVQK

SEQ ID NO: 27565 - protein, 485 aa, Bacillus sp.
HHNGTNGTMMQYFEWYLPNDGNHWNRLNSDASNLKSKGITAVWIPPAWKAASQNDVGYGAYDLYDLGEFNQKGTVRTKYGTRSQLQAAVTSLKNNGIQVYGDVVMNHKGGADATEMVRAVEVNPNNRNQEVTGEYTIEAWTRFDFPGRGNTHSSFKWRWYHFDGVDWDQSRQTDNRIYKFRGHGKAWDWEVDTEFGNYDYLMYADYDMDHPEVVNELRNWGVWYTNTLGLDGFRIDAVKHIKYSFTRDWINHVRSATGKNMFAVAEFWKNDLGAIENYLQKTNWNHSVFDVPLHYNLYNASKSGGNYDMRNIFNGTVVQRHPSHAVTFVDNHDSQPEEALESFVEEWFKPLAYALTLTREQGYPSVFYGDYYGIPTHGVPAMRSKIDPILEARQKYAYGPQHDYLDHPDVIGWTREGDSSHPKSGLATLITDGPGGSKRMYAGLKNAGETWYDITGNRSDTVKIGSDGWGEFHVNDGSVSIYVQK

SEQ ID NO: 27566 - protein, 485 aa, Bacillus sp.
HHNGTNGTMMQYFEWYLPNDGNHWNRLNSDASNLKSKGITAVWIPPAWKGASQNDVGYGAYDLYDLGEFNQKGTVRTKYGTRSQLQAAVTSLKNNGIQVYGDVVMNHKGGADATEMVRAVEVNPNNRNQEVTGEYTIEAWTRFDFPGRGNTHSSFKWRWYHFDGVDWDQSRRLQNRIYKFRGHGKAWDWEVDTEFGNYDYLMYVDYDMDHPEVVNELRNWGVWYTNTLGLDGFRIDAVKHIKYSFTRDWINHVRSATGKNMFAVAEFWKNDLGAIENYLQKTNWNHSVFDVPLHYNLYNASKSGGNYDMRNIFNGTVVQRHPSHAVTFVDNHDSQPEEALESFVEEWFKPLAYALTLTREQGYPSVFYGDYYGIPTHGVPAMRSKIDPILEARQKYAYGPQHDYLDHPDVIGWTREGDSSHPKSGLATLITDGPGGSKRMYAGLKNAGETWYDITGNRSDTVKIGSDGWGEFHVNDGSVSIYVQK

SEQ ID NO: 27567 - protein, 485 aa, Bacillus sp.
HHNGTNGTMMQYFEWYLPNDGNHWNRLNSDASNLKSKGITAVWIPPAWKGASQNDVGYGAYDLYDLGEFNQKGTVRTKYGTRSQLQAAVTSLKNNGIQVYGDVVMNHKGGADATEMVRAVEVNPNNRNQEVTGEYTIEAWTRFDFPGRGNTHSSFKWRWYHFDGVDWDQSRRLNNRIYKFRGHGKAWDWEVDTEFGNYDYLMYADYDMDHPEVVNELRNWGVWYTNTLGLDGFRIDAVKHIKYSFTRDWINHVRSATGKNMFAVAEFWKNDLGAIENYLQKTNWNHSVFDVPLHYNLYNASKSGGNYDMRNIFNGTVVQRHPSHAVTFVDNHDSQPEEALESFVEEWFKPLAYALTLTREQGYPSVFYGDYYGIPTHGVPAMRSKIDPILEARQKYAYGPQHDYLDHPDVIGWTREGDSSHPKSGLATLITDGPGGSKRMYAGLKNAGETWYDITGNRSDTVKIGSDGWGEFHVNKGSVSIYVQK

SEQ ID NO: 27568 - protein, 485 aa, Bacillus sp.
HHNGTNGTMMQYFEWYLPNDGNHWNRLNSDASNLKSKGITAVWIPPAWKAVSQNDVGYGAYDLYDLGEFNQKGTVRTKYGTRSQLQAAVTSLKNNGIQVYGDVVMNHKGGADATEMVRAVEVNPNNRNQEVTGEYTIEAWTRFDFPGRGNTHSSFKWRWYHFDGVDWDQSRRFENRIYKFRGHGKAWDWEVDTEFGNYDYLMYADYDMDHPEVVNELRNWGVWYTNTLGLDGFRIDAVKHIKYSFTRDWINHVRSATGKNMFAVAEFWKNDLGAIENYLQKTNWNHSVFDVPLHYNLYNASKSGGNYDMRNIFNGTVVQRHPSHAVTFVDNHDSQPEEALESFVEEWFKPLAYALTLTREQGYPSVFYGDYYGIPTHGVPAMRSKIDPILEARQKYAYGPQHDYLDHPDVIGWTREGDSSHPKSGLATLITDGPGGSKRMYAGLKNAGETWYDITGNRSDTVKIGSDGWGKFHVNDGSVSIYVQK

SEQ ID NO: 27569 - protein, 485 aa, Synthetic construct
HHNGTNGTMMQYFEWYLPNDGNHWNRLNSDASNLKSKGITAVWIPPAWKGASQNDVGYGAYDLYDLGEFNQKGTVRTKYGTRSQLQAAVTSLKANGIQVYGDVVMNHKGGADATEMVRAVEVNPNNRNQEVTGEYTIEAWTRFDFPGRGNTHSSFKWRWYHFDGVDWDQSRRLNNRIYKFRGHGKAWDWEVDTENGNYDYLMYADIDMDHPEVVNELRNWGVWYTNTLGLDGFRIDAVKHIKYSFTRDWINHVRSATGKNMFAVAEFWKNDLGAIENYLQKTNWNHSVFDVPLHYNLYNASKSGGNYDMRNIFNGTVVQRHPSHAVTFVDNHDSQPEEALESFVEEWFKPLAYALTLTREQGYPSVFYGDYYGIPTHGVPAMRSKIDPILEARQKYAYGPQHDYLDHPDVIGWTREGDSSHPKSGLATLITDGPGGSKRMYAGLKNAGETWYDITGNRSDTVKIGSDGWGEFHVNDGSVSIYVQK

SEQ ID NO: 27570 - protein, 485 aa, Bacillus sp.
HHNGTNGTMMQYFEWYLPNDGNHWNRLNSDASNLKSKGITAVWIPPAWKGASQNDVGYGAYDLYDLGEFNQKGTVRTKYGTRSQLQAAVTSLKNNGIQVYGDVVMNHKGGADATEMVRAVEVNPNNRNQEVTGEYTIEAWTRFDFPGRGNTHSSFKWRWYHFDGVDWDQSRRLNNRIYKFRGHSKAWDWEVDTEFGNYDYLMYADYDMDHPEVVNELRNWGVWYTNTLGLDGFRIDAVKHIKYSFTRDWINHVRSATGKNMFAVAEFWKNDLGAIENYLQKTNWNHSVFDVPLHYNLYNASKSGGNYDMRNIFNGTVVQRHPSHAVTFVDNHDSQPEEALESFVEEWFKPLAYALTLTREQGYPSVFYGDYYGIPTHGVPAMRSKIDPILEARQKYAYGPQHDYLDHPDVIGWTREGDSSHPKSGLATLITDGPGGSKRMYAGLKNAGETWYDITGNRSDTVKIGSDGWGEFHVNDGSVSIYVQK

SEQ ID NO: 27571 - protein, 485 aa, Bacillus sp.
HHNGTNGTMMQYFEWYLPNDGNHWNRLNSDASNLKSKGITAVWIPPAWKGASQNDVGYGAYDLYDLGEFNQKGTVRTKYGTRSQLQAAVTSLKNNGIQVYGDVVMNHKGGADATEMVRAVEVNPNNRNQEVTGEYTIEAWTRFDFPGRGNTHSSFKWRWYHFDGVDWDQSRRLNNRIYKFRGHGKAWDWEVDTEFGNYDYLMYADYDMDHPEVVNELRNWGVWYTNTLGLDGFRIDAVKHIKYSFTRDWINHVRSATGKNMFAVAEFWKNDLGAIENYLQKTNWNHSVFDVPLHYNLYNASKSGGNYDMRNIFNGTVVQRHPSHAVTFVDNHDSQPEEALESFVDEWFKPLAYALTLTREQGYPSVFYGDYYGIPTHGVPAMRSKIDPILEARQKYAYGPQHDYLDHPDVIGWTREGDSSHPKSGLATLITDGPGGSKRMYAGLKNAGETWYDITGNRSDTVKIGSDGWGEFHVNGSSVSIYVQK

SEQ ID NO: 27572 - protein, 485 aa, Bacillus sp.
HHNGTNGTMMQYFEWYLPNDGNHWNRLNSDASNLKSKGITAVWIPPAWKAVSQNDVGYGAYDLYDLGEFNQKGTVRTKYGTRSQLQAAVTSLKNNGIQVYGDVVMNHKGGADATEMVDAVEVNPNNRNQEVTGEYTIEAWTRFDFPGRGNTHSSFKWRWYHFDGVDWDQSRDFNNRIYKFRGHGKAWDWEVDTEFGNYDYLMYADYDMDHPEVVNELRNWGVWYTNTLGLDGFRIDAVKHIKYSFTRDWINHVRSATGKNMFAVAEFWKNDLGAIENYLQKTNWNHSVFDVPLHYNLYNASKSGGNYDMRNIFNGTVVQRHPSHAVTFVDNHDSQPEEALESFVEEWFKPLAYALTLTREQGYPSVFYGDYYGIPTHGVPAMRSKIDPILEARQKYAYGPQHDYLDHPDVIGWTREGDSSHPKSGLATLITDGPGGSKRMYAGLKNAGETWYDITGNRSDTVKIGSDGWGEFHVNDGSVSIYVQK

SEQ ID NO: 27573 - protein, 485 aa, Bacillus sp.
HHNGTNGTMMQYFEWYLPNDGNHWNRLRDDAANLKSKGITAVWIPPAWKGTSQNDVGYGAYDLYDLGEFNQKGTVRTKYGTRNQLQAAVTSLKNNGIQVYGDVVMNHKGGADGTEIVNAVEVNRSNRNQETSGEYAIEAWTKFDFPGRGNNHSSFKWRWYHFDGTDWDQSRQLQNKIYKFRGTGKAWDWEVDTENGNYDYLMYADVDMDHPEVIHELRNWGVWYTNTLNLDGFRIDAVKHIKYSFTRDWLTHVRNTTGKPMFAVAEFWKNDLGAIENYLNKTSWNHSVFDVPLHYNLYNASNSGGYYDMRNILNGSVVQKHPTHAVTFVDNHDSQPGEALESFVQQWFKPLAYALVLTREQGYPSVFYGDYYGIPTHGVPAMKSKIDPLLQARQTFAYGPQHDYLDHPDVIGWTREGDSSAAKSGLAALITDGPGGSKRMYAGLKNAGETWYDITGNRSDTVKIGSDGWGEFHVNDGSVSIYVQK

SEQ ID NO: 27574 - protein, 485 aa, Synthetic construct
HHNGTNGTMMQYFEWYLPNDGNHWNRLNSDASNLKSKGITAVWIPPAWKGASQNDVGYGAYDLYDLGEFHQKGTVRTKYGTRSQLQAAVTSLKNNGIQVYGDVVMNHKGGADATEMVRAVEVNPNNRNQEVTGEYTIEAWTRFDFPGRGNTHSSFKWRWYHFDGVDWDQSRRLNNRIYKFRGHGKAWDWEVDTENGNYDYLMYADIDMDHPEVVNELRNWGVWYTNTLGLDGFRIDAVKHIKYSFTRDWINHVRSATGKNMFAVAEFWKNDLGAIENYLQKTNWNHSVFDVPLHYNLYNASKSGGNYDMRNIFNGTVVQRHPSHAVTFVDNHDSQPEEALESFVEEWFKPLAYALTLTREQGYPSVFYGDYYGIPTHGVPAMRSKIDPILEARQKYAYGPQHDYLDHPDVIGWTREGDSSHPKSGLATLITDGPGGSKRMYAGLKNAGETWYDITGNRSDTVKIGSDGWGEFHVNDGSVSIYVQK

SEQ ID NO: 27575 - protein, 485 aa, Bacillus sp.
HHNGTNGTMMQYFEWYLPNDGNHWNRLNSDASNLKSKGITAVWIPPAWKGASQNDVGYGAYDLYDLGEFNQKGTVRTKYGTRSQLQAAVTSLKNNGIQVYGDVVMNHKGGANATEMVRAVEVNPNNRNQEVTGEYTIEAWTRFDFPGRGNTHSSFKWRWYHFDGVDWDQSRRLNNRIYKFRGHGKAWDWEVDTEFGNYDYLMYADYDMDHPEVVNELRNWGVWYTNTLGLDGFRIDAVKHIKYSFTRDWINHVRSATGKNMFAVAEFWKNDLGAIENYLQKTNWNHSVFDVPLHYNLYNASKSGGNYDMRNIFNGTVVQMHPMHAVTFVDNHDSQPEEALESFVEEWFKPLAYALTLTREQGYPSVFYGDYYGIPTHGVPAMRSKIDPILEARQKYAYGPQHDYLDHPDVIGWTREGDSSHPKSGLATLITDGPGGSKRMYAGLKNAGGTWYDITGNRSDTVKIGSDGWGEFHVNDGSVSIYVQK

SEQ ID NO: 27576 - protein, 485 aa, Bacillus sp.
HHNGTNGTMMQYFEWYLPNDGNHWNRLNSDASNLKSKGITAVWIPPAWKSASQNDVGYGAYDLYDLGEFNQKGTVRTKYGTRSQLQAAVTSLKNNGIQVYGDVVMNHKGGADATEMVRAVEVNPNNRNQEVTGEYTIEAWTRFDFPGRGNTHSSFKWRWYHFDGVDWDQSRNLQNRIYKFRGHGKAWDWEVDTEFGNYDYLMYADYDMDHPEVVNELRNWGVWYTNTLGLDGFRIDAVKHIKYSFTRDWINHVRSATGKNMFAVAEFWKNDLGAIENYLQKTNWNHSVFDVPLHYNLYNASKSGGNYDMRNIFNGTVVQRHPSHAVTFVDNHDSQPEEALESFVDPWFKPLAYALTLTREQGYPSVFYGDYYGIPTHGVPAMRSKIDPILEARQKYAYGPQHDYLDHPDVIGWTREGDSSHPKSGLATLITDGPGGSKRMYAGLKNAGETWYDITGNRSDTVKIGSDGWGEFHVNGGSVSIYVQK

SEQ ID NO: 27577 - protein, 485 aa, Bacillus sp.
HHNGTNLTMMQYFEWYLPNDGNHWNRLNSDASNLKSKGITAVWIPPAWKGSSQNDVGYGAYDLYDLGEFNQKGTVRTKYGTRSQLQAAVTSLKNNGIQVYGDVVMNHKGGADATEMVRAVEVNPNNRNQEVTGEYTIEAWTRFDFPGRGNTHSSFKWRWYHFDGVDWDQSRRLNNRIYKFRGHGKAWDWEVDTEFGNYDYLMYADYDMDHPEVVNELRNWGVWYTNTLGLDGFRIDAVKHIKYSFTRDWINHVRSATGKNMFAVAEFWKNDLGAIENYLQKTNWNHSVFDVPLHYNLYNASKSGGNYDMRNIFNGTVVQSHPMHAVTFVDNHDSQPEEALESFVEEWFKPLAYALTLTREQGYPSVFYGDYYGIPTHGVPAMRSKIDPILEARQKYAYGPQHDYLDHPDVIGWTREGDSSHPKSGLATLITDGPGGSKRMYAGLKNAGETWYDITGNRSDTVKIGSDGWGEFHVNDGSVSIYVQK

SEQ ID NO: 27578 - protein, 483 aa, Bacillus sp.
HHNGTNGTMMQYFEWYLPNDGNHWNRLNSDASNLKSKGITAVWIPPAWKGASQNDVGYGAYDLYDLGEFNQKGTVRTKYGTRSQLQAAVTSLKNNGIQVYGDVVMNHKGGADATEMVRAVEVNPNNRNQEVTGEYTIEAWTRFDFPGRGNTHSSFKWRWYHFDGVDWDQSRNINNRIYKFRGKAWDWEVDTEFGNYDYLMYADYDMDHPEVVNELRNWGVWYTNTLGLDGFRIDAVKHIKYSFTRDWINHVRSATGKNMFAVAEFWKNDLGAIENYLQKTNWNHSVFDVPLHYNLYNASKSGGNYDMRNIFNGTVVQRHPSHAVTFVDNHDSQPEEALESFVEEWFKPLAYALTLTREQGYPSVFYGDYYGIPTHGVPAMRSKIDPILEARQKYAYGPQHDYLDHPDVIGWTREGDSSHPKSGLATLITDGPGGSKRMYAGLKNAGETWYDITGNRSDTVKIGSDGWGEFHVNDGSVSIYVQK

SEQ ID NO: 27579 - protein, 485 aa, Bacillus sp.
HHNGTNGTMMQYFEWYLPNDGNHWNRLNSDASNLKSKGITAVWIPPAWKGASQNDVGYGAYDLYDLGEFNQKGTVRTKYGTRSQLQAAVTSLKNNGIQVYGDVVMNHKGGADATEMVRAVEVNPNNRNQEVTGEYTIEAWTRFDFPGRGNTHSSFKWRWYHFDGVDWDQSRTLNNRIYKFRGHGKAWDWEVDTEFGNYDYLMYADYDMDHPEVVNELRNWGVWYTNTLGLDGFRIDAVKHIKYSFTRDWINHVRSATGKNMFAVAEFWKNDLGAIENYLQKTNWNHSVFDVPLHYNLYNASKSGGNYDMRNIFNGTVVQRHPSHAVTFVDNHDSQPEEALESFVEEWFKPLAYALTLTREQGYPSVFYGDYYGIPTHGVPAMRSKIDPILEARQKYAYGPQHDYLDHPDVIGWTREGDSSHPKSGLATLITDGPGGSKRMYAGLKNAGETWYDITGNRSDTVKIGSDGWGEFHVNDGSVSIYVQK

SEQ ID NO: 27580 - protein, 485 aa, Bacillus sp.
HHNGTNGTMMQYFEWYLPNDGNHWNRLNSDASNLKSKGITAVWIPPAWKGASQNDVGYGAYDLYDLGEFNQKGTVRTKYGTRSQLQAAVTSLKNNGIQVYGDVVMNHKGGADATEMVRAVEVNPNNRNQEVTGEYTIEAWTRFDFPGRGNTHSSFKWRWYHFDGVDWDQSRRLNNRIYKFRGHGKAWDWEVDTEFGNYDYLMYADYDMDHPEVVNELRNWGVWYTNTLGLDGFRIDAVKHIKYSFTRDWINHVRSATGKNMFAVAEFWKNDLGAIENYLQKTNWNHSVFDVPLHYNLYNASKSGGNYDMRNIFNGTVVQMHPSHAVTFVDNHDSQPEEALESFVEEWFKPLAYALTLTREQGYPSVFYGDYYGIPTHGVPAMRSKIDPILEARQKYAYGPQHDYLDHPDVIGWTREGDSSHPKSGLATLITDGPGGSKRMYAGLKNAGETWYDITGNRSDTVKIGSDGWGEFHVNDGSVSIYVQK

SEQ ID NO: 27581 - protein, 483 aa, Bacillus sp.
HHNGTNQTMMQYFEWYLPNDGNHWNRLNSDASNLKSKGITAVWIPPAWKGASQNDVGYGAYDLYDLGEFNQKGTVRTKYGTRSQLHAAVTSLKNNGIQVYGDVVMNHKGGADATEMVRAVEVNPNNRNQEVTGEYTIEAWTRFDFPGRGNTHSSFKWRWYHFDGVDWDQSRRLNNRIYKFRGKAWDWEVDTEFGNYDYLMYADYDMDHPEVVNELRNWGVWYTNTLGLDGFRIDAVKHIKYSFTRDWINHVRSATGKNMFAVAEFWKNDLGAIENYLQKTNWNHSVFDVPLHYNLYNASKSGGNYDMRNIFNGTVVQAHPMHAVTFVDNHDSQPEEALESFVEEWFKPLAYALTLTREQGYPSVFYGDYYGIPTHGVPAMRSKIDPILEARQKYAYGPQHDYLDHPDVIGWTREGDSSHPKSGLATLITDGPGGSKRMYAGLKNAGETWYDITGNRSDTVKIGSDGWGEFHVNDGSVSIYVQK

SEQ ID NO: 27582 - protein, 483 aa, Bacillus sp.
HHNGTNGTMMQYFEWYLPNDGNHWNRLNSDASNLKSKGITAVWIPPAWKGASQNDVGYGAYDLYDLGEFNQKGTVRTKYGTRSQLQAAVTSLKNNGIQVYGDVVMNHKGGADATEMVRAVEVNPNNRNQEVTGEYTIEAWTRFDFPGRGNTHSSFKWRWYHFDGVDWDQSRRVDNRIYKFRGKAWDWEVDTEFGNYDYLMYADYDMDHPEVVNELRNWGVWYTNTLGLDGFRIDAVKHIKYSFTRDWINHVRSATGKNMFAVAEFWKNDLGAIENYLQKTNWNHSVFDVPLHYNLYNASKSGGNYDMRNIFNGTVVQRHPSHAVTFVDNHDSQPEEALESFVEEWFKPLAYALTLTREQGYPSVFYGDYYGIPTHGVPAMRSKIDPILEARQKYAYGPQHDYLDHPDVIGWTREGDSSHPKSGLATLITDGPGGSKRMYAGLKNAGETWYDITGNRSDTVKIGSDGWGEFHVNDGSVSIYVQK

SEQ ID NO: 27583 - protein, 485 aa, Bacillus sp.
HHNGTNGTMMQYFEWYLPNDGNHWNRLNSDASNLKSKGITAVWIPPAWKGASQNDVGYGAYDLYDLGEFNQKGTVRTKYGTRSQLQAAVTSLKNNGIQVYGDVVMNHKGGADATEMVRAVEVNPNNRNQEVTGEYTIEAWTRFDFPGRGNTHSSFKWRWYHFDGVDWDQSRNLQNRIYKFRGHGKAWDWEVDTEFGNYDYLMYADYDMDHPEVVNELRNWGVWYTNTLGLDGFRIDAVKHIKYSFTRDWINHVRSATGKNMFAVAEFWKNDLGAIENYLQKTNWNHSVFDVPLHYNLYNASKSGGNYDMRNIFNGTVVQRHPSHAVTFVDNHDSQPEEALESFVDEWFKPLAYALTLTREQGYPSVFYGDYYGIPTHGVPAMRSKIDPILEARQKYAYGPQHDYLAHPDVMGWTREGDSSHPKSGLATLITDGPGGSKRMYAGLKKAGETWYDITGNRSDTVKIGSDGWGEFHVNDGSVSIYVQK

SEQ ID NO: 27584 - protein, 485 aa, Synthetic construct
HHNGTNGTMMQYFEWYLPNDGNHWNRLNSDASNLKSKGITAVWIPPAWKGASQNDVGYGAYDVYDLGEFNQKGTVRTKYGTRSQLQAAVTSLKNNGIQVYGDVVMNHKGGADATEMVRAVEVNPNNRNQEVTGEYTIEAWTRFDFPGRGNTHSSFKWRWYHFDGVDWDQSRRLNNRIYKFRGHGKAWDWEVDTENGNYDYLMYADYDMDHPEVVNELRNWGVWYTNTLGLDGFRIDAVKHIKYSFTRDWINHVRSATGKNMFAVAEFWKNDLGAIENYLQKTNWNHSVFDVPLHYNLYNASKSGGNYDMRNIFNGTVVQRHPSHAVTFVDNHDSQPEEALESFVEEWFKPLAYALTLTREQGYPSVFYGDYYGIPTHGVPAMRSKIDPILEARQKYAYGPQHDYLDHPDVIGWTREGDSSHPKSGLATLITDGPGGSKRMYAGLKNAGETWYDITGNRSDTVKIGSDGWGEFHVNDGSVSIYVQK

SEQ ID NO: 27585 - protein, 483 aa, Bacillus sp.
HHNGTNGTMMQYFEWYLPNDGNHWNRLNSDASNLKSKGITAVWIPPAWKAVSQNDVGYGAYDLYDLGEFNQKGTVRTKYGTRSQLQAAVTSLKNNGIQVYGDVVMNHKGGADATEMVRAVEVNPNNRNQEVTGEYTIEAWTRFDFPGRGNTHSSFKWRWYHFDGVDWDQSRQLNNRIYKFRGKAWDWEVDTEFGNYDYLMYADYDMDHPEVVNELRNWGVWYTNTLGLDGFRIDAVKHIKYSFTRDWINHVRSATGKNMFAVAEFWKNDLGAIENYLQKTNWNHSVFDVPLHYNLYNASKSGGNYDMRNIFNGTVVQRHPSHAVTFVDNHDSQPEEALESFVEEWFKPLAYALTLTREQGYPSVFYGDYYGIPTHGVPAMRSKIDPILEARQKYAYGPQHDYLDHPDVIGWTREGDSSHPKSGLATLITDGPGGSKRMYAGLKNAGETWYDITGNRSDTVKIGSDGWGEFHVNDGSVSIYVQK

SEQ ID NO: 27586 - protein, 483 aa, Bacillus sp.
HHNGTNGTMMQYFEWYLPNDGNHWNRLNSDASNLKSKGITAVWIPPAWKGASQNDVGYGAYDLYDLGEFNQKGTVRTKYGTRSQLQAAVTSLKNNGIQVYGDVVMNHKGGADATEMVRAVEVNPNNRNQEVTGEYTIEAWTRFDFPGRGNTHSSFKWRWYHFDGVDWDQSREFDNRIYKFRGKAWDWEVDTEFGNYDYLMYADYDMDHPEVVNELRNWGVWYTNTLGLDGFRIDAVKHIKYSFTRDWINHVRIATGKNMFAVAEFWKNDLGAIENYLQKTNWNHSVFDVPLHYNLYNASKSGGNYDMRNIFNGTVVQRHPSHAVTFVDNHDSQPEEALESFVDEWFKPLAYALTLTREQGYPSVFYGDYYGIPTHGVPAMRSKIDPILEARQKYAYGPQHDYLDHPDVIGWTREGDSSHPKSGLATLITDGPGGSKRMYAGLKNAGETWYDITGNRSDTVKIGSDGWGEFHVNDQSVSIYVQK

SEQ ID NO: 27587 - protein, 483 aa, Bacillus sp.
HHNGTNLTMMQYFEWYLPNDGNHWNRLNSDASNLKSKGITAVWIPPAWKGASQNDVGYGAYDLYDLGEFNQKGTVRTKYGTRSQLQAAVTSLKNNGIQVYGDVVMNHKGGADATEMVRAVEVNPNNRNQEVTGEYTIEAWTRFDFPGRGNTHSSFKWRWYHFDGVDWDQSRRLNNRIYKFRGKAWDWEVDTEFGNYDYLMYADYDMDHPEVVNELRNWGVWYTNTLGLDGFRIDAVKHIKYSFTRDWINHVRSATGKNMFAVAEFWKNDLGAIENYLQKTNWNHSVFDVPLHYNLYNASKSGGNYDMRNIFNGTVVQSHPMHAVTFVDNHDSQPEEALESFVEEWFKPLAYALTLTREQGYPSVFYGDYYGIPTHGVPAMRSKIDPILEARQKYAYGPQHDYLDHPDVIGWTREGDSSHPKSGLATLITDGPGGSKRMYAGLKNAGETWYDITGNRSDTVKIGSDGWGEFHVNDGSVSIYVQK

SEQ ID NO: 27588 - protein, 485 aa, Bacillus sp.
HHNGTNGTMMQYFEWYLPNDGNHWNRLNSDASNLKSKGITAVWIPPAWKGASQNDVGYGAYDLYDLGEFNQKGTVRTKYGTRSQLQAAVTSLKNNGIQVYGDVVMNHKGGADATEMVRAVEVNPNNRQQEVTGEYTIEAWTRFDFPGRGNTHSSFKWRWYHFDGVDWDQSRRLNNRIYKFRGHGKAWDWEVDTEFGNYDYLMYADYDMDHPEVVNELRNWGVWYTNTLGLDGFRIDAVKHIKYSFTRDWINHVRSATGKNMFAVAEFWKNDLGAIENYLQKTNWNHSVFDVPLHYNLYNASKSGGNYDMRNIFNGTVVQRHPSHAVTFVDNHDSQPEEALESFVEEWFKPLAYALTLTREQGYPSVFYGDYYGIPTHGVPAMRSKIDPILEARQKYAYGPQHDYLDHPDVIGWTREGDSSHPKSGLATLITDGPGGSKRMYVGLKNAGETWYDITGNRSDTVKIGSDGWGEFHVNDGSVSIYVQK

SEQ ID NO: 27589 - protein, 485 aa, Bacillus sp.
HHNGTNGTMMQYFEWYLPNDGNHWNRLNSDASNLKSKGITAVWIPPAWKGASQNDVGYGAYDLYDLGEFNQKGTVRTKYGTRSQLQAAVTSLKNNGIQVYGDVVMNHKGGADATEMVRAVEVNPNNRNQEVTGEYTIEAWTRFDFPGRGNTHSSFKWRWYHFDGVDWDQSRQLTNRIYKFRGHGKAWDWEVDTEFGNYDYLMYTDYDMDHPEVVNELRNWGVWYTNTLGLDGFRIDAVKHIKYSFTRDWINHVRSATGKNMFAVAEFWKNDLGAIENYLQKTNWNHSVFDVPLHYNLYNASKSGGNYDMRNIFNGTVVQRHPSHAVTFVDNHDSQPEEALESFVEEWFKPLAYALTLTREQGYPSVFYGDYYGIPTHGVPAMRSKIDPILEARQKYAYGPQHDYLDHPDVIGWTREGDSSHPKSGLATLITDGPGGSKRMYAGLKNAGETWYDITGNRSDTVKIGSDGWGEFHVNDGSVSIYVQK

SEQ ID NO: 27590 - protein, 485 aa, Bacillus sp.
HHNGTNGTMMQYFEWYLPNDGNHWNRLNSDASNLKSKGITAVWIPPAWKGVSQNDVGYGAYDLYDLGEFNQKGTVRTKYGTRSQLQAAVTSLKNNGIQVYGDVVMNHKGGADATEMVRAVEVNPNNRNQEVTGEYTIEAWTRFDFPGRGNTHSSFKWRWYHFDGVDWDQSRRVNNRIYKFRGHGKAWDWEVDTEFGNYDYLMYADYDMDHPEVVNELRNWGVWYTNTLGLDGFRIDAVKHIKYSFTRDWINHVRSATGKNMFAVAEFWKNDLGAIENYLQKTNWNHSVFDVPLHYNLYNASKSGGNYDMRNIFNGTVVQRHPSHAVTFVDNHDSQPEEALESFVEEWFKPLAYALTLTREQGYPSVFYGDYYGIPTHGVPAMRSKIDPILEARQKYAYGPQHDYLDHPDVIGWTREGDSSHPKSGLATLITDGPGGSKRMYAGLKNAGETWYDITGNRSDTVKIGSDGWGEFHVNDGSVSIYVQK

SEQ ID NO: 27591 - protein, 483 aa, Bacillus sp.
HHNGTNGTMMQYFEWYLPNDGNHWNRLNSDASNLKSKGITAVWIPPAWKGASQNDVGYGAYDLYDLGEFNQKGTVRTKYGTRSQLQAAVTSLKNNGIQVYGDVVMNHKGGADATEMVRAVEVNPNNRNQEVTGEYTIEAWTRFDFPGRGNTHSSFKWRWYHFDGVDWDQSRRLNNRIYKFRGKAWDWEVDTEFGNYDYLMYADYDMDHPEVVNELRNWGVWYTNTLGLDGFRIDAVKHIKYSFTRDWINHVRSATGKNMFAVAEFWKNDLGAIENYLQKTNWNHSVFDVPLHYNLYNASKSGGNYDMRNIFNGTVVQRHPSHAVTFVDNHDSQPEEALESFVDEWFKPLAYALTLTREQGYPSVFYGDYYGIPTHGVPAMRSKIDPILEARQKYAYGPQHDYLDHPDVIGWTREGDSSHPKSGLATLITDGPGGSKRMYAGLKNAGETWYDITGNRSDTVKIGSDGWGEFHVNGSSVSIYVQK

SEQ ID NO: 27592 - protein, 485 aa, Bacillus sp.
HHNGTNGTMMQYFEWYLPNDGNHWNRLNSDASNLKSKGITAVWIPPAWKGVSQNDVGYGAYDLYDLGEFNQKGTVRTKYGTRSQLQAAVTSLKNNGIQVYGDVVMNHKGGADATEMVRAVEVNPNNRNQEVTGEYTIEAWTRFDFPGRGNTHSSFKWRWYHFDGVDWDQSRRISNRIYKFRGHGKAWDWEVDTEFGNYDYLMYADYDMDHPEVVNELRNWGVWYTNTLGLDGFRIDAVKHIKYSFTRDWINHVRSATGKNMFAVAEFWKNDLGAIENYLQKTNWNHSVFDVPLHYNLYNASKSGGNYDMRNIFNGTVVQRHPSHAVTFVDNHDSQPEEALESFVEEWFKPLAYALTLTREQGYPSVFYGDYYGIPTHGVPAMRSKIDPILEARQKYAYGPQHDYLDHPDVIGWTREGDSSHPKSGLATLITDGPGGSKRMYAGLKNAGETWYDITGNRSDTVKIGSDGWGEFHVNDGSVSIYVQK

SEQ ID NO: 27593 - protein, 485 aa, Bacillus sp.
HHNGTNGTMMQYFEWYLPNDGNHWNRLSSDASNLKSKGITAVWIPPAWKGASQNDVGYGAYDLYDLGEFNQKGTVRTKYGTRSQLQAAVTSLKNNGIQVYGDVVMNHKGGADATEMVRAVEVNPNNRNQEVTGEYTIEAWTRFDFPGRGNTHSSFKWRWYHFDGVDWDQSRRLNNRIYKFRGHGKAWDWEVDTEFGNYDYLMYADYDMDHPEVVNELRNWGVWYTNTLGLDGFRIDAVKHIKYSFTRDWINHVRSATGKNMFAVAEFWKNDLGAIENYLQKTNWNHSVFDVPLHYNLYNASKSGGNYDMRNIFNGTVVQRHPSHAVTFVDNHDSQPEEALESFVEEWFKPLAYALTLTREQGYPSVFYGDYYGIPTHGVPAMRSKIDPILEARQKYAYGPQHDYLDHPDVIGWTREGDSSHPKSGLATLITDGPGGSKRMYAGLKNAGETWYDITGNRSDTVKIGSDGWGEFHVNDGSVSIYVQK

SEQ ID NO: 27594 - protein, 483 aa, Synthetic construct
HHNGTNGTMMQYFEWYLPNDGNHWNRLNSDASNLKSKGITAVWIPPAWKGASQNDVGYGAYDLYDLGEFNQKGTVRTKYGTRSQLQAAVTSLKNNGIQVYGDVVMNHKGGADATEMVRAVEVNPNNRNQEVTGEYTIEAWTHFHFPGRGNTHSSFKWRWYHFDGVDWDQSRRLNNRIYKFRGKAWDWEVDTENGNYDYLMYADIDMDHPEVVNELRNWGVWYTNTLGLDGFRIDAVKHIKYSFTRDWINHVRSATGKNMFAVAEFWKNDLGAIENYLQKTNWNHSVFDVPLHYNLYNASKSGGNYDMRNIFNGTVVQRHPSHAVTFVDNHDSQPEEALESFVEEWFKPLAYALTLTREQGYPSVFYGDYYGIPTHGVPAMRSKIDPILEARQKYAYGPQHDYLDHPDVIGWTREGDSSHPKSGLATLITDGPGGSKRMYAGLKNAGETWYDITGNRSDTVKIGSDGWGEFHVNDGSVSIYVQK

SEQ ID NO: 27595 - protein, 483 aa, Bacillus sp.
HHNGTNGTMMQYFEWYLPNDGNHWNRLNSDASNLKSKGITAVWIPPAWKGASQNDVGYGAYDLYDLGEFNQKGTVRTKYGTRSQLQAAVTSLKNNGIQVYGDVVMNHKGGADATEMVRAVEVNPNNRNQEVTGEYTIEAWTRFDFPGRGNTHSSFKWRWYHFDGVDWDQSRKTNNRIYKFRGKAWDWEVDTEFGNYDYLMYADYDMDHPEVVNELRNWGVWYTNTLGLDGFRIDAVKHIKYSFTRDWINHVRSATGKNMFAVAEFWKNDLGAIENYLQKTNWNHSVFDVPLHYNLYNASKSGGNYDMRNIFNGTVVQRHPSHAVTFVDNHDSQPEEALESFVEEWFKPLAYALTLTREQGYPSVFYGDYYGIPTHGVPAMRSKIDPILEARQKYAYGPQHDYLDHPDVIGWTREGDSSHPKSGLATLITDGPGGSKRMYAGLKNAGETWYDITGNRSDTVKIGSDGWGEFHVNDGSVSIYVQK

SEQ ID NO: 27596 - protein, 483 aa, Bacillus sp.
HHNGTNGTMMQYFEWYLPNDGNHWNRLNSDASNLKSKGITAVWIPPAWKGASQNDVGYGAYDLYDLGEFNQKGTVRTKYGTRSQLQAAVTSLKNNGIQVYGDVVMNHKGGADATEMVRAVEVNPNNRNQEVTGEYTIEAWTRFDFPGRGNTHSSFKWRWYHFDGVDWDQSRRIDNRIYKFRGKAWDWEVDTEFGNYDYLMYADYDMDHPEVVNELRNWGVWYTNTLGLDGFRIDAVKHIKYSFTRDWINHVRSATGKNMFAVAEFWKNDLGAIENYLQKTNWNHSVFDVPLHYNLYNASKSGGNYDMRNIFNGTVVQRHPSHAVTFVDNHDSQPEEALESFVEEWFKPLAYALTLTREQGYPSVFYGDYYGIPTHGVPAMRSKIDPILEARQKYAYGPQHDYLDHPDVIGWTREGDSSHPKSGLATLITDGPGGSKRMYAGLKNAGETWYDITGNRSDTVKIGSDGWGEFHVNDGSVSIYVQK

SEQ ID NO: 27597 - protein, 485 aa, Bacillus sp.
HHNGTNGTMMQYFEWYLPNDGNHWNRLNSDASNLKSKGITAVWIPPAWKAASQNDVGYGAYDLYDLGEFNQKGTVRTKYGTRSQLQAAVTSLKNNGIQVYGDVVMNHKGGADATEMVRAVEVNPNNRNQEVTGEYTIEAWTRFDFPGRGNTHSSFKWRWYHFDGVDWDQSRQLQNRIYKFRGHGKAWDWEVDTEFGNYDYLMYTDYDMDHPEVVNELRNWGVWYTNTLGLDGFRIDAVKHIKYSFTRDWINHVRSATGKNMFAVAEFWKNDLGAIENYLQKTNWNHSVFDVPLHYNLYNASKSGGNYDMRNIFNGTVVQRHPSHAVTFVDNHDSQPEEALESFVEEWFKPLAYALTLTREQGYPSVFYGDYYGIPTHGVPAMRSKIDPILEARQKYAYGPQHDYLDHPDVIGWTREGDSSHPKSGLATLITDGPGGSKRMYAGLKNAGETWYDITGNRSDTVKIGSDGWGEFHVNDGSVSIYVQK

SEQ ID NO: 27598 - protein, 483 aa, Bacillus sp.
HHNGTNGTMMQYFEWYLPNDGNHWNRLNSDASNLKSKGITAVWIPPAWKGASQNDVGYGAYDLYDLGEFNQKGTVRTKYGTRSQLQAAVTSLKNNGIQVYGDVVMNHKGGADATEMVRAVEVNPNNRNQEVTGEYTIEAWTRFDFPGRGNTHSSFKWRWYHFDGVDWDQSRRLNNRIYKFRGKAWDWEVDTEFGNYDYLMYADYDMDHPEVVNELRNWGVWYTNTLGLDGFRIDAVKHIKYSFTRDWINHVRSATGKNMFAVAEFWKNDLGAIENYLSKTNWNHSVFDVPLHYNLYNASKSGGNYDMRNIFNGTVVQRHPSHAVTFVDNHDSQPEEALESFVEEWFKPLAYALTLTREQGYPSVFYGDYYGIPTHGVPAMRSKIDPILEARQKYAYGPQHDYLDHPDVIGWTREGDSSHPKSGLATLITDGPGGSKRMYAGLKNAGETWYDITGNRSDTVKIGSDGWGEFHVNDGSVSIYVQK

SEQ ID NO: 27599 - protein, 486 aa, Bacillus sp.
HHNGTNGTMMQYFEWYLPNDGNHWNRLNSDASNLKSKGITAVWIPPAWKGASQNDVGYGAYDLYDLGEFNQKGTVRTKYGTRSQLQAAVTSLKNNGIQVYGDVVMNHKGGADATEMVRAVEVNPNNRNQEVTGEYTIEAWTRFDFPGRGNTHSSFKWRWYHFDGVDWDQSRRLNNRIYKFRGHGKAWDWEVDTEFGNYDYLMYADYDMDHPEVVNELRNWGVWYTNTLGLDGFRIDAVKHIKYSFTRDWINHVRSATGKNMFAVAEFWKNDLGAIENYLQKTNWNHSVFDVPLHYNLYNASKSGGNYDMRNIFNGTVVQRHPSHAVTFVDNHDSQHPEEALESFVEEWFKPLAYALTLTREQGYPSVFYGDYYGIPTHGVPAMRSKIDPILEARQKYAYGPQHDYLDHPDVIGWTREGDSSHPKSGLATLITDGPGGSKRMYAGLKNAGETWYDITGNRSDTVKIGSDGWGEFHVNDGSVSIYVQK

SEQ ID NO: 27600 - protein, 483 aa, Bacillus sp.
HHNGTNGTMMQYFEWYLPNDGNHWNRLNSDASNLKSKGITAVWIPPAWKAASQNDVGYGAYDLYDLGEFNQKGTVRTKYGTRSQLQAAVTSLKNNGIQVYGDVVMNHKGGADATEMVRAVEVNPNNRNQEVTGEYTIEAWTRFDFPGRGNTHSSFKWRWYHFDGVDWDQSRQLSNRIYKFRGKAWDWEVDTEFGNYDYLMYADYDMDHPEVVNELRNWGVWYTNTLGLDGFRIDAVKHIKYSFTRDWINHVRSATGKNMFAVAEFWKNDLGAIENYLQKTNWNHSVFDVPLHYNLYNASKSGGNYDMRNIFNGTVVQRHPSHAVTFVDNHDSQPEEALESFVEEWFKPLAYALTLTREQGYPSVFYGDYYGIPTHGVPAMRSKIDPILEARQKYAYGPQHDYLDHPDVIGWTREGDSSHPKSGLATLITDGPGGSKRMYAGLKNAGETWYDITGNRSDTVKIGSDGWGEFHVNDGSVSIYVQK

SEQ ID NO: 27601 - protein, 485 aa, Bacillus sp.
HHNGTNGTMMQYFEWYLPNDGNHWNRLNSDASNLKSKGITAVWIPPAWKGASQNDVGYGAYDLYDLGEFNQKGTVRTKYGTRSQLQAAVTSLKNNGIQVYGDVVMNHKGGADATEMVRAVEVNPNNRNQEVTGEYTIEAWTRFDFPGRGNTHSSFKWRWYHFDGVDWDQSRRLNNRIYKFRGHGKAWDWEVDTEFGNYDYLMYADYDMDHPEVVNELRNWGVWYTNTLGLDGFRIDAVKHIKYSFTRDWINHVRSATGKNMFAVAEFWKNDLGAIENYLQKTNWNHSVFDVPLHYNLYNASKSGGNYDMRNIFNGTVVQRHPSHAVTFVDNHDSQPEEALESFVEEWFKPLAYALTLTREQGYPSVFYGDYYGIPTHGVPAMRSKIDPILEARQKYAYGPQHDYLDHPDVIGWTREGHSSHPKSGLATLITDGPGGSKRMYAGLKNAGETWYDITGNRSDTVKIGSDGWGEFHVNDGSVSIYVQK

SEQ ID NO: 27602 - protein, 483 aa, Bacillus sp.
HHNGTNGTMMQYFEWYLPNDGNHWNRLNSDASNLKSKGITAVWIPPAWKAVSQNDVGYGAYDLYDLGEFNQKGTVRTKYGTRSQLQAAVTSLKNNGIQVYGDVVMNHKGGADATEMVRAVEVNPNNRNQEVTGEYTIEAWTRFDFPGRGNTHSSFKWRWYHFDGVDWDQSRRLQNRIYKFRGKAWDWEVDTEFGNYDYLMYADYDMDHPEVVNELRNWGVWYTNTLGLDGFRIDAVKHIKYSFTRDWINHVRSATGKNMFAVAEFWKNDLGAIENYLQKTNWNHSVFDVPLHYNLYNASKSGGNYDMRNIFNGTVVQRHPSHAVTFVDNHDSQPEEALESFVEEWFKPLAYALTLTREQGYPSVFYGDYYGIPTHGVPAMRSKIDPILEARQKYAYGPQHDYLDHPDVIGWTREGDSSHPKSGLATLITDGPGGSKRMYAGLKNAGETWYDITGNRSDTVKIGSDGWGEFHVNDGSVSIYVQK

SEQ ID NO: 27603 - protein, 483 aa, Bacillus sp.
HHNGTNGTMMQYFEWYLPNDGNHWNRLNSDASNLKSKGITAVWIPPAWKGASQNDVGYGAYDLYDLGEFNQKGTVRTKYGTRSQLQAAVTSLKNNGIQVYGDVVMNHKGGADATEMVRAVEVNPNNRNQEVTGEYTIEAWTRFDFPGRGNTHSSFKWRWYHFDGVDWDQSRRLNNRIYKFRGKAWDWEVDTENGNYDYLMYADIDYDHPEVVNELRIWGVWYTNTLGLDGFRIDAVKHIKYSFTRDWINHVRSATGKNMFAVAEFWKNDLGAIENYLQKTNWNHSVFDVPLHYNLYNASKSGGNYDMRNIFNGTVVQRHPSHAVTFVDNHDSQPEEALESFVEEWFKPLAYALTLTREQGYPSVFYGDYYGIPTHGVPAMRSKIDPILEARQKYAYGPQHDYLDHPDVIGWTREGDSSHPKSGLATLITDGPGGSKRMYAGLKNAGETWYDITGNRSDTVKIGSDGWGEFHVNDGSVSIYVQK

SEQ ID NO: 27604 - protein, 485 aa, Bacillus sp.
HHNGTNGTMMQYFEWYLPNDGNHWNRLNSDASNLKSKGITAVWIPPAWKGISQNDVGYGAYDLYDLGEFNQKGTVRTKYGTRSQLQAAVTSLKNNGIQVYGDVVMNHKGGADATEMVRAVEVNPNNRNQEVTGEYTIEAWTRFDFPGRGNTHSSFKWRWYHFDGVDWDQSRRLNNRIYKFRGHGKAWDWEVDTEFGNYDYLMYADYDMDHPEVVNELRNWGVWYTNTLGLDGFRIDAVKHIKYSFTRDWINHVRSATGKNMFAVAEFWKNDLGAIENYLQKTNWNHSVFDVPLHYNLYNASKSGGNYDMRNIFNGTVVQRHPSHAVTFVDNHDSQPEEALESFVEEWFKPLAYALTLTREQGYPSVFYGDYYGIPTHGVPAMRSKIDPILEARQKYAYGPQHDYLDHPDVIGWTREGDSSHPKSGLATLITDGPGGSKRMYAGLKNAGETWYDITGNRSDTVKIGSDGWGEFHVNDGSVSIYVQK

SEQ ID NO: 27605 - protein, 485 aa, Synthetic construct
HHNGTNGTMMQYFEWYLPNDGNHWNRLNSDASNLKSKGITAVWIPPAWKGASQNDVGYGAYDLYDLGEFNQKGTVRTKYGTRSQLQAAVTSLKNNGIQVYGDVVMNHKGGADATEMVRAVEVNPSNRNQEVTGEYTIEAWTRFDFPGRGNTHSSFKWRWYHFDGVDWDQSRRLNNRIYKFRGHGKAWDWEVDTENGNYDYLMYADIDMDHPEVVNELRNWGVWYTNTLGLDGFRIDAVKHIKYSFTRDWINHVRSATGKNMFAVAEFWKNDLGAIENYLQKTNWNHSVFDVPLHYNLYNASKSGGNYDMRNIFNGTVVQRHPSHAVTFVDNHDSQPEEALESFVEEWFKPLAYALTLTREQGYPSVFYGDYYGIPTHGVPAMRSKIDPILEARQKYAYGPQHDYLDHPDVIGWTREGDSSHPKSGLATLITDGPGGSKRMYAGLKNAGETWYDITGNRSDTVKIGSDGWGEFHVNDGSVSIYVQK

SEQ ID NO: 27606 - protein, 483 aa, Bacillus sp.
HHNGTNGTMMQYFEWYLPNDGNHWNRLNSDASNLKSKGITAVWIPPAWKATSQNDVGYGAYDLYDLGEFNQKGTVRTKYGTRSQLQAAVTSLKNNGIQVYGDVVMNHKGGADATEMVRAVEVNPNNRNQEVTGEYTIEAWTRFDFPGRGNTHSSFKWRWYHFDGVDWDQSRRTQNRIYKFRGKAWDWEVDTEFGNYDYLMYADYDMDHTEVVNELRNWGVWYTNTLGLDGFRIDAVKHIKYSFTRDWINHVRSATGKNMFAVAEFWKNDLGAIENYLQKTNWNHSVFDVPLHYNLYNASKSGGNYDMRNIFNGTVVQRHPSHAVTFVDNHDSQPEEALESFVEEWFKPLAYALTLTREQGYPSVFYGDYYGIPTHGVPAMRSKIDPILEARQKYAYGPQHDYLDHPDVIGWTREGDSSHPKSGLATLITDGPGGSKRMYAGLKNAGETWYDITGNRSDTVKIGSDGWGEFHVNDGSVSIYVQK

SEQ ID NO: 27607 - protein, 483 aa, Synthetic construct
HHNGTNGTMMQYFEWYLPNDGNHWNRLNSDASNLKSKGITAVWIPPAWKGASQNDVGYGAYDLYDLGEFNQKGTVRTKYGTRSQLQAAVTSLKNNGIQVYGDVVMNHKGGADATEMVRAVEVNPNNRNQEVTGEYTIEAWTRFDFPGRGNTHSSFKWRWYHFDGVDWDQSRRLNNRIYKFRGKAWDWEVDTEFGNYDYLMYADFDMDHPEVVNELRNWGVWYTNTLGLDGFRIDAVKHIKYSFTRDWINHVRSATGKNMFAVAEFWKNDLGAIENYLQKTNWNHSVFDVPLHYNLYNASKSGGNYDMRNIFNGTVVQRHPSHAVTFVDNHDSQPEEALESFVEEWFKPLAYALTLTREQGYPSVFYGDYYGIPTHGVPAMRSKIDPILEARQKYAYGPQHDYLDHPDVIGWTREGDSSHPKSGLATLITDGPGGSKRMYAGLKNAGETWYDITGNRSDTVKIGSDGWGEFHVNDGSVSIYVQK

SEQ ID NO: 27608 - protein, 485 aa, Synthetic construct
HHNGTNGTLMQYFEWYLPNDGNHWNRLNSDASNLKSKGITAVWIPPAWKGASQNDVGYGAYDLYDLGEFNQKGTVRTKYGTRSQLQAAVTSLKNNGIQVYGDVVMNHKGGADATEMVRAVEVNPNNRNQEVTGEYTIEAWTRFDFPGRGNTHSSFKWRWYHFDGVDWDQSRRLNNRIYKFRGHGKAWDWEVDTENGNYDYLMYADIDMDHPEVVNELRNWGVWYTNTLGLDGFRIDAVKHIKYSFTRDWINHVRSATGKNMFAVAEFWKNDLGAIENYLQKTNWNHSVFDVPLHYNLYNASKSGGNYDMRNIFNGTVVQRHPSHAVTFVDNHDSQPEEALESFVEEWFKPLAYALTLTREQGYPSVFYGDYYGIPTHGVPAMRSKIDPILEARQKYAYGPQHDYLDHPDVIGWTREGDSSHPKSGLATLITDGPGGSKRMYAGLKNAGETWYDITGNRSDTVKIGSDGWGEFHVNDGSVSIYVQK

SEQ ID NO: 27609 - protein, 485 aa, Bacillus sp.
HHNGTNGTMMQYFEWYLPNDGNHWNRLNSDASNLKSKGITAVWIPPAWKGASQNDVGYGAYDLYDLGEFNQKGTVRTKYGTRSQLQAAVTSLKNNGIQVYGDVVMNHKGGADATEMVRAVEVNPNNRNQEVTGEYTIEAWTRFDFPGRGNTHSSFKWRWYHFDGVDWDQSRELNNRIYKFRGHGKAWDWEVDTEFGNYDYLMYADYDMDHPEVVNELRNWGVWYTNTLGLDGFRIDAVKHIKYSFTRDWINHVRSATGKNMFAVAEFWKNDLGAIENYLQKTNWNHSVFDVPLHYNLYNASKSGGNYDMRNIFNGTVVQRHPSHAVTFVDNHDSQPEEALESFVEEWFKPLAYALTLTREQGYPSVFYGDYYGIPTHGVPAMRSKIDPILEARQKYAYGPQHDYLDHPDVIGWTREGDSSHPKSGLATLITDGPGGSKRMYAGLKNAGETWYDITGNRSDTVKIGSDGWGEFHVNDGSVSIYVQK

SEQ ID NO: 27610 - protein, 485 aa, Bacillus sp.
HHNGTNGTMMQYFEWYLPNDGNHWNRLNSDASNLKSKGITAVWIPPAWKGASQNDVGYGAYDLYDLGEFNQKGTVRTKYGTRSQLQAAVTSLKNNGIQVYGDVVMNHKGGADATEMVRAVEVNPNNRNQEVTGEYTIEAWTRFDFPGRGNTHSSFKWRWYHFDGVDWDQSRRLNNRIYKFRGHGKAWDWEVDTEFGNYDYLMYADYDMDHPEVVNELRNWGVWYTNTLGLDGFRIDAVKHIKYSFTRDWINHVRSATGKNMFAVAEFWKNDLGAIENYLQKTNWNHSVFDVPLHYNLYNASNSGGNYDMRNIFNGTVVQRHPSHAVTFVDNHDSQPEEALESFVDEWFKPLAYALTLTREQGYPSVFYGDYYGIPTHGVPAMRSKIDPILEARQKYAYGPQHDYLDHPDVIGWTREGDSSHPKSGLATLITDGPGGSKRMYAGLKNAGETWYDITGNRSDTVKIGSDGWGEFHVNQQSVSIYVQK

SEQ ID NO: 27611 - protein, 483 aa, Synthetic construct
HHNGTNGTMMQYFEWYLPNDGNHWNRLNSDASNLKSKGITAVWIPPAWKGASQNDVGYGAYDLYDLGEFNQKGTVRTKYGTRSQLQAAVTSLKNNGIQVYGDVVMNHKGGADATEMVRAVEVNPNNRNQEVTGEYTIEAWTRFDFPGRGNTHSSFKWRWYHFDGVDWDQSRRLNNRIYKFRGKAWDWEVDTENGNYDYLMYADIDMDHREVVNELRNWGVWYTNTLGLDGFRIDAVKHIKYSFTRDWINHVRSATGKNMFAVAEFWKNDLGAIENYLQKTNWNHSVFDVPLHYNLYNASKSGGNYDMRNIFNGTVVQRHPSHAVTFVDNHDSQPEEALESFVEEWFKPLAYALTLTREQGYPSVFYGDYYGIPTHGVPAMRSKIDPILEARQKYAYGPQHDYLDHPDVIGWTREGDSSHPKSGLATLITDGPGGSKRMYAGLKNAGETWYDITGNRSDTVKIGSDGWGEFHVNDGSVSIYVQK

SEQ ID NO: 27612 - protein, 485 aa, Synthetic construct
HHNGTNGTMMQYFEWYLPNDGNHWNRLNSNASNLKSKGITAVWIPPAWKGASQNDVGYGAYDLYDLGEFNQKGTVRTKYGTRSQLQAAVTSLKNNGIQVYGDVVMNHKGGADATEMVRAVEVNPNNRNQEVTGEYTIEAWTRFDFPGRGNTHSSFKWRWYHFDGVDWDQSRRLNNRIYKFRGHGKAWDWEVDTENGNYDYLMYADIDMDHPEVVNELRNWGVWYTNTLGLDGFRIDAVKHIKYSFTRDWINHVRSATGKNMFAVAEFWKNDLGAIENYLQKTNWNHSVFDVPLHYNLYNASKSGGNYDMRNIFNGTVVQRHPSHAVTFVDNHDSQPEEALESFVEEWFKPLAYALTLTREQGYPSVFYGDYYGIPTHGVPAMRSKIDPILEARQKYAYGPQHDYLDHPDVIGWTREGDSSHPKSGLATLITDGPGGSKRMYAGLKNAGETWYDITGNRSDTVKIGSDGWGEFHVNDGSVSIYVQK

SEQ ID NO: 27613 - protein, 483 aa, Bacillus sp.
HHNGTNGTMMQYFEWYLPNDGNHWNRLNSDASNLKSKGITAVWIPPAWKGASQNDVGYGAYDLYDLGEFNQKGTVRTKYGTRSQLQAAVTSLKNNGIQVYGDVVMNHKGGADATEMVRAVEVNPNNRNQEVTGEYTIEAWTRFDFPGRGNTHSSFKWRWYHFDGVDWDQSRRLNNRIYKFRGKAWDWEVDTEFGNYDYLMYADYDMDHPEVVNELRNWGVWYTNTLGLDGFRIDAVKHIKYSFTRDWINHVRSATGKNMFAVAEFWKNDLGAIENYLQKTNWNHSVFDVPLHYNLYNASKSGGNYDMRNIFNGTVVQRHPKHAVTFVDNHDSQPEEALESFVEEWFKPLAYALTLTREQGYPSVFYGDYYGIPTHGVPAMRSKIDPILEARQKYAYGPQHDYLDHPDVIGWTREGDSSHPKSGLATLITDGPGGSKRMYAGLKNAGETWYDITGNRSDTVKIGSDGWGEFHVNDGSVSIYVQK

SEQ ID NO: 27614 - protein, 485 aa, Bacillus sp.
HHNGTNGTMMQYFEWYLPNDGNHWNRLNSDASNLKSKGITAVWIPPAWKATSQNDVGYGAYDLYDLGEFNQHGTVRTKYGTRSQLQAAVTSLKNNGIQVYGDVVMNHKGGADATEMVRAVEVNPNNRNQEVTGEYTIEAWTRFDFPGRGNTHSSFKWRWYHFDGVDWDQSRQLQNRIYKFRGHGKAWDWEVDTEFGNYDYLMYVDYDMDHPEVVNELRNWGVWYTNTLGLDGFRIDAVKHIKYSFTRDWINHVRSATGKNMFAVAEFWKNDLGAIENYLQKTNWNHSVFDVPLHYNLYNASKSGGNYDMRNIFNGTVVQRHPSHAVTFVDNHDSQPEEALESFVEEWFKPLAYALTLTREQGYPSVFYGDYYGIPTHGVPAMRSKIDPILEARQKYAYGPQHDYLDHPDVIGWTREGDSSHPKSGLATLITDGPGGSKRMYAGLKNAGETWYDITGNRSDTVKIGSDGWGEFHVNDGSVSIYVQK

SEQ ID NO: 27615 - protein, 483 aa, Bacillus sp.
HHNGTNGTMMQYFEWYLPNDGNHWNRLNSDASNLKSKGITAVWIPPAWKGASQNDVGYGAYDLYDLGEFNQKGTVRTKYGTRSQLQAAVTSLKNNGIQVYGDVVMNHKGGADATEMVRAVEVNPNNRNQEVTGEYTIEAWTRFDFPGRGNTHSSFKWRWYHFDGVDWDQSRPLNNRIYKFRGKAWDWEVDTEFGNYDYLMYADYDMDHPEVVNELRNWGVWYTNTLGLDGFRIDAVKHIKYSFTRDWINHVRSATGKNMFAVAEFWKNDLGAIENYLQKTNWNHSVFDVPLHYNLYNASKSGGNYDMRNIFNGTVVQRHPSHAVTFVDNHDSQPEEALESFVEEWFKPLAYALTLTREQGYPSVFYGDYYGIPTHGVPAMRSKIDPILEARQKYAYGPQHDYLDHPDVIGWTREGDSSHPKSGLATLITDGPGGSKRMYAGLKNAGETWYDITGNRSDTVKIGSDGWGEFHVNDGSVSIYVQK

SEQ ID NO: 27616 - protein, 485 aa, Bacillus sp.
HHNGTNGTMMQYFEWYLPNDGNHWNRLNSDASNLKSKGITAVWIPPAWKGASQNDVGYGAYDLYDLGEFNQKGTVRTKYGTRSQLQAAVTSLKNNGIQVYGDVVMNHKGGADATEMVRAVEVNPNNRNQEVTGEYTIEAWTRFDFPGRGNTHSSFKWRWYHFDGVDWDQSRRFDNRIYKFRGHGKAWDWEVDTEFGNYDYLMYSDYDMDHPEVVNELRNWGVWYTNTLGLDGFRIDAVKHIKYSFTRDWINHVRSATGKNMFAVAEFWKNDLGAIENYLQKTNWNHSVFDVPLHYNLYNASKSGGNYDMRNIFNGTVVQRHPSHAVTFVDNHDSQPEEALESFVEEWFKPLAYALTLTREQGYPSVFYGDYYGIPTHGVPAMRSKIDPILEARQKYAYGPQHDYLDHPDVIGWTREGDSSHPKSGLATLITDGPGGSKRMYAGLKNAGETWYDITGNRSDTVKIGSDGWGEFHVNDGSVSIYVQK

SEQ ID NO: 27617 - protein, 485 aa, Bacillus sp.
HHNGTNGTMMQYFEWYLPNDGNHWNRLNSDASNLKSKGITAVWIPPAWKAASQNDVGYGAYDLYDLGEFNQKGTVRTKYGTRSQLQAAVTSLKNNGIQVYGDVVMNHKGGADATEMVRAVEVNPNNRNQEVTGEYTIEAWTRFDFPGRGNTHSSFKWRWYHFDGVDWDQSRRFTNRIYKFRGHGKAWDWEVDTEFGNYDYLMYADYDMDHPEVVNELRNWGVWYTNTLGLDGFRIDAVKHIKYSFTRDWINHVRSATGKNMFAVAEFWKNDLGAIENYLQKTNWNHSVFDVPLHYNLYNASKSGGNYDMRNIFNGTVVQRHPSHAVTFVDNHDSQPEEALESFVEEWFKPLAYALTLTREQGYPSVFYGDYYGIPTHGVPAMRSKIDPILEARQKYAYGPQHDYLDHPDVIGWTREGDSSHPKSGLATLITDGPGGSKRMYAGLKNAGETWYDITGNRSDTVKIGSDGWGEFHVNDGSVSIYVQK

SEQ ID NO: 27618 - protein, 483 aa, Bacillus sp.
HHNGTNGTMMQYFEWYLPNDGNHWNRLNSDASNLKSKGITAVWIPPAWKAASQNDVGYGAYDLYDLGEFNQKGTVRTKYGTRSQLQAAVTSLKNNGIQVYGDVVMNHKGGADATEMVRAVEVNPNNRNQEVTGEYTIEAWTRFDFPGRGNTHSSFKWRWYHFDGVDWDQSRDLQNRIYKFRGKAWDWEVDTEFGNYDYLMYADYDMDHPEVVNELRNWGVWYTNTLGLDGFRIDAVKHIKYSFTRDWINHVRSATGKNMFAVAEFWKNDLGAIENYLQKTNWNHSVFDVPLHYNLYNASKSGGNYDMRNIFNGTVVQRHPSHAVTFVDNHDSQPEEALESFVDPWFKPLAYALTLTREQGYPSVFYGDYYGIPTHGVPAMRSKIDPILEARQKYAYGPQHDYLDHPDVIGWTREGDSSHPKSGLATLITDGPGGSKRMYAGLKNAGETWYDITGNRSDTVKIGSDGWGEFHVNGGSVSIYVQK

SEQ ID NO: 27619 - protein, 485 aa, Bacillus sp.
HHNGTNGTMMQYFEWYLPNDGNHWNRLNSDASNLKSKGITAVWIPPAWKGTSQNDVGYGAYDLYDLGEFNQKGTVRTKYGTRSQLQAAVTSLKNNGIQVYGDVVMNHKGGADATEMVRAVEVNPNNRNQEVTGEYTIEAWTRFDFPGRGNTHSSFKWRWYHFDGVDWDQSRRLDNRIYKFRGHGKAWDWEVDTEFGNYDYLMYVDYDMDHPEVVNELRNWGVWYTNTLGLDGFRIDAVKHIKYSFTRDWINHVRSATGKNMFAVAEFWKNDLGAIENYLQKTNWNHSVFDVPLHYNLYNASKSGGNYDMRNIFNGTVVQRHPSHAVTFVDNHDSQPEEALESFVEEWFKPLAYALTLTREQGYPSVFYGDYYGIPTHGVPAMRSKIDPILEARQKYAYGPQHDYLDHPDVIGWTREGDSSHPKSGLATLITDGPGGSKRMYAGLKNAGETWYDITGNRSDTVKIGSDGWGEFHVNDGSVSIYVQK

SEQ ID NO: 27620 - protein, 483 aa, Bacillus sp.
HHNGTNGTMMQYFEWYLPNDGNHWNRLNSDASNLKSKGITAVWIPPAWKGASQNDVGYGAYDLYDLGEFNQKGTVRTKYGTRSQLQAAVTSLKNNGIQVYGDVVMNHKGGADATEMVRAVEVNPNNRNQEVTGEYTIEAWTRFDFPGRGNTHSSFKWRWYHFDGVDWDQSRRLNNRIYKFRGKAWDWEVDTENGNYDYLMYADIDLDHPEVVNELRVWGVWYTNTLGLDGFRIDAVKHIKYSFTRDWINHVRSATGKNMFAVAEFWKNDLGAIENYLQKTNWNHSVFDVPLHYNLYNASKSGGNYDMRNIFNGTVVQRHPSHAVTFVDNHDSQPEEALESFVEEWFKPLAYALTLTREQGYPSVFYGDYYGIPTHGVPAMRSKIDPILEARQKYAYGPQHDYLDHPDVIGWTREGDSSHPKSGLATLITDGPGGSKRMYAGLKNAGETWYDITGNRSDTVKIGSDGWGEFHVNDGSVSIYVQK

SEQ ID NO: 27621 - protein, 483 aa, Bacillus sp.
HHNGTNNTMMQYFEWYLPNDGNHWNRLNSDASNLKSKGITAVWIPPAWKGASQNDVGYGAYDLYDLGEFNQKGTVRTKYGTRSQLQAAVTSLKNNGIQVYGDVVMNHKGGADATEMVRAVEVNPNNRNQEVTGEYTIEAWTRFDFPGRGNTHSSFKWRWYHFDGVDWDQSRRLNNRIYKFRGKAWDWEVDTEFGNYDYLMYADYDMDHPEVVNELRNWGVWYTNTLGLDGFRIDAVKHIKYSFTRDWINHVRSATGKNMFAVAEFWKNDLGAIENYLQKTNWNHSVFDVPLHYNLYNASKSGGNYDMRNIFNGTVVQMHPMHAVTFVDNHDSQPEEALESFVEEWFKPLAYALTLTREQGYPSVFYGDYYGIPTHGVPAMRSKIDPILEARQKYAYGPQHDYLDHPDVIGWTREGDSSHPKSGLATLITDGPGGSKRMYAGLKNAGETWYDITGNRSDTVKIGSDGWGEFHVNDGSVSIYVQK

SEQ ID NO: 27622 - protein, 485 aa, Bacillus sp.
HHNGTNLTMMQYFEWYLPNDGNHWNRLNSDASNLKSKGITAVWIPPAWKGASQNDVGYGAYDLYDLGEFNQKGTVRTKYGTRSQLQAAVTSLKNNGIQVYGDVVMNHKGGADATEMVRAVEVNPNNRNQEVTGEYTIEAWTRFDFPGRGNTHSSFKWRWYHFDGVDWDQSRRLNNRIYKFRGHGKAWDWEVDTEFGNYDYLMYADYDMDHPEVVNELRNWGVWYTNTLGLDGFRIDAVKHIKYSFTRDWINHVRSATGKNMFAVAEFWKNDLGAIENYLQKTNWNHSVFDVPLHYNLYNASKSGGNYDMRNIFNGTVVQAHPMHAVTFVDNHDSQPEEALESFVEEWFKPLAYALTLTREQGYPSVFYGDYYGIPTHGVPAMRSKIDPILEARQKYAYGPQHDYLDHPDVIGWTREGDSSHPKSGLATLITDGPGGSKRMYAGLKNAGETWYDITGNRSDTVKIGSDGWGEFHVNDGSVSIYVQK

SEQ ID NO: 27623 - protein, 485 aa, Bacillus sp.
HHNGTNGTMMQYFEWYLPNDGNHWNRLSSDASNLKSKGITAVWIPPAWKGASQNDVGYGAYDLYDLGEFNQKGTVRTKYGTRSQLQAAVTSLKNNGIQVYGDVVMNHKGGADATEMVRAVEVNPNNRNQEVTGEYTIEAWTRFDFPGRGNTHSSFKWRWYHFDGVDWDQSRRLNNRIYKFRGHGKAWDWEVDTEFGNYDYLMYADYDMDHPEVVNELRNWGVWYTNTLGLDGFRIDAVKHIKYSFTRDWINHVRSATGKNMFAVAEFWKNDLGAIENYLQKTNWNHSVFDVPLHYNLYNASKSGGNYDMRNIFNGTVVQMHPNHAVTFVDNHDSQPEEALESFVEEWFKPLAYALTLTREQGYPSVFYGDYYGIPTHGVPAMRSKIDPILEARQKYAYGPQHDYLDHPDVIGWTREGDSSHPKSGLATLITDGPGGSKRMYAGLKNAGETWYDITGNRSDTVKIGSDGWGEFHVNDGSVSIYVQK

SEQ ID NO: 27624 - protein, 485 aa, Bacillus sp.
HHNGTNGTMMQYFEWYLPNDGNHWNRLNSDASNLKSKGITAVWIPPAWKGASQNDVGYGAYDLYDLGEFNQKGTVRTKYGTRSQLQAAVTSLKNNGIQVYGDVVMNHKGGADATEMVRAVEVNPNNRNQEVTGEYTIEAWTRFDFPGRGNTHSSFKWRWYHFDGVDWDQSRRVSNRIYKFRGHGKAWDWEVDTEFGNYDYLMYADYDMDHPEVVNELRNWGVWYTNTLGLDGFRIDAVKHIKYSFTRDWINHVRSATGKNMFAVAEFWKNDLGAIENYLQKTNWNHSVFDVPLHYNLYNASKSGGNYDMRNIFNGTVVQRHPSHAVTFVDNHDSQPEEALESFVEEWFKPLAYALTLTREQGYPSVFYGDYYGIPTHGVPAMRSKIDPILEARQKYAYGPQHDYLDHPDVIGWTREGDSSHPKSGLATLITDGPGGSKRMYAGLKNAGETWYDITGNRSDTVKIGSDGWGEFHVNDGSVSIYVQK

SEQ ID NO: 27625 - protein, 485 aa, Bacillus sp.
HHNGTNGTMMQYFEWYLPNDGNHWNRLNSDASNLKSKGITAVWIPPAWKAASQNDVGYGAYDLYDLGEFNQKGTVRTKYGTRSQLQAAVTSLKNNGIQVYGDVVMNHKGGADATEMVRAVEVNPNNRNQEVTGEYTIEAWTRFDFPGRGNTHSSFKWRWYHFDGVDWDQSRDFSNRIYKFRGHGKAWDWEVDTEFGNYDYLMYADYDMDHPEVVNELRNWGVWYTNTLGLDGFRIDAVKHIKYSFTRDWINHVRSATGKNMFAVAEFWKNDLGAIENYLQKTNWNHSVFDVPLHYNLYNASKSGGNYDMRNIFNGTVVQRHPSHAVTFVDNHDSQPEEALESFVEEWFKPLAYALTLTREQGYPSVFYGDYYGIPTHGVPAMRSKIDPILEARQKYAYGPQHDYLDHPDVIGWTREGDSSHPKSGLATLITDGPGGSKRMYAGLKNAGETWYDITGNRSDTVKIGSDGWGEFHVNDGSVSIYVQK

SEQ ID NO: 27626 - protein, 485 aa, Synthetic construct
HHNGTNGTMMQYFEWYLPNDGNHWNRLNSDASNLKSKGITAVWIPPAWKGASQNDVGYGAYDVYDLGEFNQKGTVRTKYGTRSQLQAAVTSLKNNGIQVYGDVVMNHKGGADATEMVRAVEVNPNNRNQEVTGEYTIEAWTRFDFPGRGNTHSSFKWRWYHFDGVDWDQSRRLNNRIYKFRGHGKAWDWEVDTENGNYDYLMYADFDMDHPEVVNELRNWGVWYTNTLGLDGFRIDAVKHIKYSFTRDWINHVRSATGKNMFAVAEFWKNDLGAIENYLQKTNWNHSVFDVPLHYNLYNASKSGGNYDMRNIFNGTVVQRHPSHAVTFVDNHDSQPEEALESFVEEWFKPLAYALTLTREQGYPSVFYGDYYGIPTHGVPAMRSKIDPILEARQKYAYGPQHDYLDHPDVIGWTREGDSSHPKSGLATLITDGPGGSKRMYAGLKNAGETWYDITGNRSDTVKIGSDGWGEFHVNDGSVSIYVQK

SEQ ID NO: 27627 - protein, 483 aa, Bacillus sp.
HHNGTNGTMMQYFEWYLPNDGNHWNRLNSDASNLKSKGITAVWIPPAWKGASQNDVGYGAYDLYDLGEFNQKGTVRTKYGTRSQLQAAVTSLKNNGIQVYGDVVMNHKGGADATEMVRAVEVNPNNRNQEVTGEYTIEAWTRFDFPGRGNTHSSFKWRWYHFDGVDWDQSRRLNNRIYKFRGKAWDWEVDTEFGNYDYLMYADYDMDHPEVVNELRNWGVWYTNTLGLDGFRIDAVKHIKYSFTRDWINHVRSATGKNMFAVAEFWKNDLGAIENYLQKTNWNHSVFDVPLHYNLYNASKSGGNYDMRNIFNGTVVQRHPWHAVTFVDNHDSQPEEALESFVEEWFKPLAYALTLTREQGYPSVFYGDYYGIPTHGVPAMRSKIDPILEARQKYAYGPQHDYLDHPDVIGWTREGDSSHPKSGLATLITDGPGGSKRMYAGLKNAGETWYDITGNRSDTVKIGSDGWGEFHVNDGSVSIYVQK

SEQ ID NO: 27628 - protein, 485 aa, Bacillus sp.
HHNGTNGTMMQYFEWYLPNDGNHWNRLNSDASNLKSKGITAVWIPPAWKGASQNDVGYGAYDLYDLGEFNQKGTVRTKYGTRSQLQAAVTSLKNNGIQVYGDVVMNHKGGADATEMVSAVEVNPNNRNQEVTGEYTIEAWTRFDFPGRGNTHSSFKWRWYHFDGVDWDQSRRLNNRIYKFRAHGKAWDWEVDTEFGNYDYLMYADYDMDHPEVVNELRNWGVWYTNTLGLDGFRIDAVKHIKYSFTRDWINHVRSATGKNMFAVAEFWKNDLGAIENYLQKTNWNHSVFDVPLHYNLYNASKSGGNYDMRNIFNGTVVQRHPSHAVTFVDNHDSQPEEALESFVEEWFKPLAYALTLTREQGYPSVFYGDYYGIPTHGVPAMRSKIDPILEARQKYAYGPQHDYLDHPDVIGWTREGDSSHPKSGLATLITDGPGGSKRMYAGLKNAGETWYDITGNRSDTVKIGSDGWGEFHVNDGSVSIYVQK

SEQ ID NO: 27629 - protein, 485 aa, Bacillus sp.
HHNGTNGTMMQYFEWYLPNDGNHWNRLNSDASNLKSKGITAVWIPPAWKATSQNDVGYGAYDLYDLGEFNQKGTVRTKYGTRSQLQAAVTSLKNNGIQVYGDVVMNHKGGADATEMVRAVEVNPNNRNQEVTGEYTIEAWTRFDFPGRGNTHSSFKWRWYHFDGVDWDQSRELSNRIYKFRGHGKAWDWEVDTEFGNYDYLMYADYDMDHPEVVNELRNWGVWYTNTLGLDGFRIDAVKHIKYSFTRDWINHVRSATGKNMFAVAEFWKNDLGAIENYLQKTNWNHSVFDVPLHYNLYNASKSGGNYDMRNIFNGTVVQRHPSHAVTFVDNHDSQPEEALESFVEEWFKPLAYALTLTREQGYPSVFYGDYYGIPTHGVPAMRSKIDPILEARQKYAYGPQHDYLDHPDVIGWTREGDSSHPKSGLATLITDGPGGSKRMYAGLKNAGETWYDITGNRSDTVKIGSDGWGEFHVNDGSVSIYVQK

SEQ ID NO: 27630 - protein, 485 aa, Bacillus sp.
HHNGTNGTMMQYFEWYLPNDGNHWNRLNSDASNLKSKGITAVWIPPAWKGASQNDVGYGAYDLYDLGEFNQKGTVRTKYGTRSQLQAAVTSLKNNGIQVYGDVVMNHKGGADLTEMVRAVEVNPNNRNQEVTGEYTIEAWTRFDFPGRGNTHSSFKWRWYHFDGVDWDQSRQLDNRIYKFRGHGKAWDWEVDTEFGNYDYLMYADYDMDHPEVVNELRNWGVWYTNTLGLDGFRIDAVKHIKYSFTRDWINHVRSATGKNMFAVAEFWKNDLGAIENYLQKTNWNHSVFDVPLHYNLYNASKSGGNYDMRNIFNGTVVQRHPSHAVTFVDNHDSQPEEALESFVEEWFKPLAYALTLTREQGYPSVFYGDYYGIPTHGVPAMRSKIDPILEARQKYAYGPQHDYLDHPDVIGWTREGDSSHPKSGLATLITDGPGGSKRMYAGLKNAGETWYDITGNRSDTVKIGSDGWGEFHVNDGSVSIYVQK

SEQ ID NO: 27631 - protein, 483 aa, Bacillus sp.
HHNGTNGTMMQYFEWYLPNDGNHWNRLNSDASNLKSKGITAVWIPPAWKGASQNDVGYGAYDLYDLGEFNQKGTVRTKYGTRSQLQAAVTSLKNNGIQVYGDVVMNHKGGADATEMVRAVEVNPNNRNQEVTGEYTIEAWTRFDFPGRGNTHSSFKWRWYHFDGVDWDQSRTLNNRIYKFRGKAWDWEVDTEFGNYDYLMYADYDMDHPEVVNELRNWGVWYTNTLGLDGFRIDAVKHIKYSFTRDWINHVRSATGKNMFAVAEFWKNDLGAIENYLQKTNWNHSVFDVPLHYNLYNASKSGGNYDMRNIFNGTVVQRHPSHAVTFVDNHDSQPEEALESFVEEWFKPLAYALTLTREQGYPSVFYGDYYGIPTHGVPAMRSKIDPILEARQKYAYGPQHDYLDHPDVIGWTREGDSSHPKSGLATLITDGPGGSKRMYAGLKNAGETWYDITGNRSDTVKIGSDGWGEFHVNDGSVSIYVQK

SEQ ID NO: 27632 - protein, 485 aa, Synthetic construct
HHNGTNGTMMQYFEWYLPNDGNHWNRLNSDASNLKSKGITAVWIPPAWKGASQNDVGYGAYDLYDLGEFNQKGTVRTKYGTRSQLQAAVTSLKNNGIQVYGDVVMNHKGGADATEMVRAVEVNPNNRNQEVTGEYTIEAWTRFDFPGRGNTHSSFKWRWYHFDGVDWDQSRRLNNRIYKFRGHGKAWDWEVDTENGNYDYLMYADIDMDHPEVVNELRNWGVWYTNTVGLDGFRIDAVKHIKYSFTRDWINHVRSATGKNMFAVAEFWKNDLGAIENYLQKTNWNHSVFDVPLHYNLYNASKSGGNYDMRNIFNGTVVQRHPSHAVTFVDNHDSQPEEALESFVEEWFKPLAYALTLTREQGYPSVFYGDYYGIPTHGVPAMRSKIDPILEARQKYAYGPQHDYLDHPDVIGWTREGDSSHPKSGLATLITDGPGGSKRMYAGLKNAGETWYDITGNRSDTVKIGSDGWGEFHVNDGSVSIYVQK

SEQ ID NO: 27633 - protein, 483 aa, Bacillus sp.
HHNGTNGTMMQYFEWYLPNDGNHWNRLSSDASNLKSKGITAVWIPPAWKGASQNDVGYGAYDLYDLGEFNQKGTVRTKYGTRSQLQAAVTSLKNNGIQVYGDVVMNHKGGADATEMVRAVEVNPNNRNQEVTGEYTIEAWTRFDFPGRGNTHSSFKWRWYHFDGVDWDQSRRLNNRIYKFRGKAWDWEVDTEFGNYDYLMYADYDMDHPEVVNELRNWGVWYTNTLGLDGFRIDAVKHIKYSFTRDWINHVRSATGKNMFAVAEFWKNDLGAIENYLQKTNWNHSVFDVPLHYNLYNASKSGGNYDMRNIFNGTVVQMHPNHAVTFVDNHDSQPEEALESFVEEWFKPLAYALTLTREQGYPSVFYGDYYGIPTHGVPAMRSKIDPILEARQKYAYGPQHDYLDHPDVIGWTREGDSSHPKSGLATLITDGPGGSKRMYAGLKNAGETWYDITGNRSDTVKIGSDGWGEFHVNDGSVSIYVQK

SEQ ID NO: 27634 - protein, 485 aa, Bacillus sp.
HHNGTNGTMMQYFEWYLPNDGNHWNRLNSDASNLKSKGITAVWIPPAWKGASQNDVGYGAYDLYDLGEFNQKGTVRTKYGTRSQLQAAVTSLKNNGIQVYGDVVMNHKGGADATEMVRAVEVNPNNRNQEVTGEYTIEAWTRFDFPGRGNTHSSFKWRWYHFDGVDWDQSRRTQNRIYKFRGHGKAWDWEVDTEFGNYDYLMYVDYDMDHPEVVNELRNWGVWYTNTLGLDGFRIDAVKHIKYSFTRDWINHVRSATGKNMFAVAEFWKNDLGAIENYLQKTNWNHSVFDVPLHYNLYNASKSGGNYDMRNIFNGTVVQRHPSHAVTFVDNHDSQPEEALESFVEEWFKPLAYALTLTREQGYPSVFYGDYYGIPTHGVPAMRSKIDPILEARQKYAYGPQHDYLDHPDVIGWTREGDSSHPKSGLATLITDGPGGSKRMYAGLKNAGETWYDITGNRSDTVKIGSDGWGEFHVNDGSVSIYVQK

SEQ ID NO: 27635 - protein, 483 aa, Synthetic construct
HHNGTNGTMMQYFEWYLPNDGNHWNRLNSDASNLKSKGITAVWIPPAWKGASQNDVGYGAYDLYDLGEFNQKGTVRTKYGTRSQLQAAVTSLKNNGIQVYGDVVMNHKGGADATEMVRAVEVNPNNRNQEVTGEYTIEAWTRFDFPGRGNTHSSFKWRWYHFDGVDWDQSRRLNNRIYKFRGKAWDWEVDTENGNYDYLMYADIDMDHPEGVNELRNWGVWYTNTLGLDGFRIDAVKHIKYSFTRDWINHVRSATGKNMFAVAEFWKNDLGAIENYLQKTNWNHSVFDVPLHYNLYNASKSGGNYDMRNIFNGTVVQRHPSHAVTFVDNHDSQPEEALESFVEEWFKPLAYALTLTREQGYPSVFYGDYYGIPTHGVPAMRSKIDPILEARQKYAYGPQHDYLDHPDVIGWTREGDSSHPKSGLATLITDGPGGSKRMYAGLKNAGETWYDITGNRSDTVKIGSDGWGEFHVNDGSVSIYVQK

SEQ ID NO: 27636 - protein, 485 aa, Synthetic construct
HHDGTNGTMMQYFEWYLPNDGNHWNRLNSDASNLKSKGITAVWIPPAWKGASQNDVGYGAYDLYDLGEFNQKGTVRTKYGTRSQLQAAVTSLKNNGIQVYGDVVMNHKGGADATEMVRAVEVNPNNRNQEVTGEYTIEAWTRFDFPGRGNTHSSFKWRWYHFDGVDWDQSRRLNNRIYKFRGHGKAWDWEVDTENGNYDYLMYADIDMDHPEVVNELRNWGVWYTNTLGLDGFRIDAVKHIKYSFTRDWINHVRSATGKNMFAVAEFWKNDLGAIENYLQKTNWNHSVFDVPLHYNLYNASKSGGNYDMRNIFNGTVVQRHPSHAVTFVDNHDSQPEEALESFVEEWFKPLAYALTLTREQGYPSVFYGDYYGIPTHGVPAMRSKIDPILEARQKYAYGPQHDYLDHPDVIGWTREGDSSHPKSGLATLITDGPGGSKRMYAGLKNAGETWYDITGNRSDTVKIGSDGWGEFHVNDGSVSIYVQK

SEQ ID NO: 27637 - protein, 485 aa, Bacillus sp.
HHNGTNGTMMQYFEWYLPNDGNHWNRLNSDASNLKSKGITAVWIPPAWKGASQNDVGYGAYDLYDLGEFNQKGTVRTKYGTRSQLQAAVTSLKNNGIQVYGDVVMNHKGGADATEMVRAVEVNPNNRNQEVTGEYTIEAWTRFDFPGRGNTHSSFKWRWYHFDGVDWDQSRRLNNRIYKFRGHGKAWDWEVDTEFGNYDYLMYADYDMDHPEVVNELRNWGVWYTNTLGLDGFRIDAVKHIKYSFTRDWINHVRSATGKNMFAVAEFWKNDLGAIENYLHKTNWNHSVFDVPLHYNLYNASKSGGNYDMRNIFNGTVVQRHPSHAVTFVDNHDSQPEEALESFVEEWFKPLAYALTLTREQGYPSVFYGDYYGIPTHGVPAMRSKIDPILEARQKYAYGPQHDYLDHPDVIGWTREGDSSHPKSGLATLITDGPGGSKRMYAGLKNAGETWYDITGNRSDTVKIGSDGWGEFHVNDGSVSIYVQK

SEQ ID NO: 27638 - protein, 485 aa, Bacillus sp.
HHNGTNGTMMQYFEWYLPNDGNHWNRLNSDASNLKSKGITAVWIPPAWKAASQNDVGYGAYDLYDLGEFNQKGTVRTKYGTRSQLQAAVTSLKNNGIQVYGDVVMNHKGGADATEMVRAVEVNPNNRNQEVTGEYTIEAWTRFDFPGRGNTHSSFKWRWYHFDGVDWDQSREFDNRIYKFRGHGKAWDWEVDTEFGNYDYLMYADYDMDHPEVVNELRNWGVWYTNTLGLDGFRIDAVKHIKYSFTRDWINHVRSATGKNMFAVAEFWKNDLGAIENYLQKTNWNHSVFDVPLHYNLYNASKSGGNYDMRNIFNGTVVQRHPSHAVTFVDNHDSQPEEALESFVEEWFKPLAYALTLTREQGYPSVFYGDYYGIPTHGVPAMRSKIDPILEARQKYAYGPQHDYLDHPDVIGWTREGDSSHPKSGLATLITDGPGGSKRMYAGLKNAGETWYDITGNRSDTVKIGSDGWGEFHVNDGSVSIYVQK

SEQ ID NO: 27639 - protein, 485 aa, Bacillus sp.
HHNGTNGTMMQYFEWYLPNDGNHWNRLNSDASNLKSKGITAVWIPPAWKGASQNDVGYGAYDLYDLGEFNQKGTVRTKYGTRSQLQAAVTSLKNNGIQVYGDVVMNHKGGADATEMVRAVEVNPNNRNQEVTGEYTIEAWTRFDFPGRGNTHSSFKWRWYHFDGVDWDQSRDLSNRIYKFRGHGKAWDWEVDTEFGNYDYLMYADYDMDHPEVVNELRNWGVWYTNTLGLDGFRIDAVKHIKYSFTRDWINHVRSATGKNMFAVAEFWKNDLGAIENYLQKTNWNHSVFDVPLHYNLYNASKSGGNYDMRNIFNGTVVQRHPSHAVTFVDNHDSQPEEALESFVEEWFKPLAYALTLTREQGYPSVFYGDYYGIPTHGVPAMRSKIDPILEARQKYAYGPQHDYLDHPDVIGWTREGDSSHPKSGLATLITDGPGGSKRMYAGLKNAGETWYDITGNRSDTVKIGSDGWGEFHVNDGSVSIYVQK

SEQ ID NO: 27640 - protein, 485 aa, Bacillus sp.
HHNGTNGTMMQYFEWYLPNDGNHWNRLNSDASNLKSKGITAVWIPPAWKGASQNDVGYGAYDLYDLGEFNQKGTVRTKYGTRSQLQAAVTSLKNNGIQVYGDVVMNHKGGADATEMVRAVEVNPNNRNQEVTGEYTIEAWTRFDFPGRGNTHSSFKWRWYHFDGVDWDQSRRLGNRIYKFRGHGKAWDWEVDTEFGNYDYLMYADYDMDHPEVVNELRNWGVWYTNTLGLDGFRIDAVKHIKYSFTRDWINHVRSATGKNMFAVAEFWKNDLGAIENYLQKTNWNHSVFDVPLHYNLYNASKSGGNYDMRNIFNGTVVQRHPSHAVTFVDNHDSQPEEALESFVEEWFKPLAYALTLTREQGYPSVFYGDYYGIPTHGVPAMRSKIDPILEARQKYAYGPQHDYLDHPDVIGWTREGDSSHPKSGLATLITDGPGGSKRMYAGLKNAGETWYDITGNRSDTVKIGSDGWGEFHVNDGSVSIYVQK

SEQ ID NO: 27641 - protein, 485 aa, Bacillus sp.
HHNGTNGTMMQYFEWYLPNDGNHWNRLNSDASNLKSKGITAVWIPPAWKGASQNDVGYGAYDLYDLGEFNQKGTVRTKYGTRSQLQAAVTSLKNNGIQVYGDVVMNHKGGADATEMVRAVEVNPNNRNQEVTGEYTIEAWTRFDFPGRGNTHSSFKWRWYHFDGVDWDQSRRIDNRIYKFRGHGKAWDWEVDTEFGNYDYLMYADYDMDHPEVVNELRNWGVWYTNTLGLDGFRIDAVKHIKYSFTRDWINHVRSATGKNMFAVAEFWKNDLGAIENYLQKTNWNHSVFDVPLHYNLYNASKSGGNYDMRNIFNGTVVQRHPSHAVTFVDNHDSQPEEALESFVEEWFKPLAYALTLTREQGYPSVFYGDYYGIPTHGVPAMRSKIDPILEARQKYAYGPQHDYLDHPDVIGWTREGDSSHPKSGLATLITDGPGGSKRMYAGLKNAGETWYDITGNRSDTVKIGSDGWGEFHVNDGSVSIYVQK

SEQ ID NO: 27642 - protein, 483 aa, Bacillus sp.
HHNGTNGTMMQYFEWYLPNDGNHWNRLNSDASNLKSKGITAVWIPPAWKGASQNDVGYGAYDLYDLGEFNQKGTVRTKYGTRSQLQAAVTSLKNNGIQVYGDVVMNHKGGADATEMVRAVEVNPNNRNQEVTGDYTIEAWTRFDFPGRGNTHSSFKWRWYHFDGVDWDQSRRLNNRIYLFRGKAWDWEVDTEFGNYDYLMYADYDMDHPEVVNELRNWGVWYTNTLGLDGFRIDAVKHIKYSFTRDWINHVRSATGKNMFAVAEFWKNDLGAIENYLQKTNWNHSVFDVPLHYNLYNASKSGGNYDMRNIFNGTVVQRHPSHAVTFVDNHDSQPEEALESFVEEWFKPLAYALTLTREQGYPSVFYGDYYGIPTHGVPAMRSKIDPILEARQKYAYGPQHDYLDHPDVIGWTREGDSSHPKSGLATLITDGPGGSKRMYAGLKNAGETWYDITGNRSDTVKIGSDGWGEFHVNDGSVSIYVQK

SEQ ID NO: 27643 - protein, 485 aa, Bacillus sp.
HHNGTNGTMMQYFEWYLPNDGNHWNRLNSDASNLKSKGITAVWIPPAWKAASQNDVGYGAYDLYDLGEFNQKGTVRTKYGTRSQLQAAVTSLKNNGIQVYGDVVMNHKGGADATEMVRAVEVNPNNRNQEVTGEYTIEAWTRFDFPGRGNTHSSFKWRWYHFDGVDWDQSRDLQNRIYKFRGHGKAWDWEVDTEFGNYDYLMYADYDMDHPEVVNELRNWGVWYTNTLGLDGFRIDAVKHIKYSFTRDWINHVRSATGKNMFAVAEFWKNDLGAIENYLQKTNWNHSVFDVPLHYNLYNASKSGGNYDMRNIFNGTVVQVHPSHAVTFVDNHDSQPEEALESFVEEWFKPLAYALTLTREQGYPSVFYGDYYGIPTHGVPAMRSKIDPILEARQKYAYGPQHDYLDHPDVIGWTREGDSSHPKSGLATLITDGPGGSKRMYAGLKNAGETWYDITGNRSDTVKIGSDGWGEFHVNDGSVSIYVQK

SEQ ID NO: 27644 - protein, 483 aa, Synthetic construct
HHNGTNGTMMQYFEWYLPNDGNHWNRLNSDASNLKSKGITAVWIPPAWKGASQNDVGYGAYDLYDLGEFNQKGTVRTKYGTRSQLQAAVTSLKNNGIQVYGDVVMNHKGGADATEMVRAVEVNPNNRNQEVTGEYTIEAWTRFDFPGRGNTHSSFKWRWYHFDGVDWDQSRRLNNRIYKFRGKAWDWEVDTENGNYDYLMYADIDMDHPEVVNELRNWGVWYTNTLGLDGFRIDAVKHIKFSFTRDWINHVRSATGKNMFAVAEFWKNDLGAIENYLQKTNWNHSVFDVPLHYNLYNASKSGGNYDMRNIFNGTVVQRHPSHAVTFVDNHDSQPEEALESFVEEWFKPLAYALTLTREQGYPSVFYGDYYGIPTHGVPAMRSKIDPILEARQKYAYGPQHDYLDHPDVIGWTREGDSSHPKSGLATLITDGPGGSKRMYAGLKNAGETWYDITGNRSDTVKIGSDGWGEFHVNDGSVSIYVQK

SEQ ID NO: 27645 - protein, 485 aa, Bacillus sp.
HHNGTNNTMMQYFEWYLPNDGNHWNRLNSDASNLKSKGITAVWIPPAWKGASQNDVGYGAYDLYDLGEFNQKGTVRTKYGTRSQLQAAVTSLKNNGIQVYGDVVMNHKGGADATEMVRAVEVNPNNRNQEVTGEYTIEAWTRFDFPGRGNTHSSFKWRWYHFDGVDWDQSRRLNNRIYKFRGHGKAWDWEVDTEFGNYDYLMYADYDMDHPEVVNELRNWGVWYTNTLGLDGFRIDAVKHIKYSFTRDWINHVRSATGKNMFAVAEFWKNDLGAIENYLQKTNWNHSVFDVPLHYNLYNASKSGGNYDMRNIFNGTVVQMHPMHAVTFVDNHDSQPEEALESFVEEWFKPLAYALTLTREQGYPSVFYGDYYGIPTHGVPAMRSKIDPILEARQKYAYGPQHDYLDHPDVIGWTREGDSSHPKSGLATLITDGPGGSKRMYAGLKNAGETWYDITGNRSDTVKIGSDGWGEFHVNDGSVSIYVQK

SEQ ID NO: 27646 - protein, 485 aa, Bacillus sp.
HHNGTNGTMMQYFEWYLPNDGNHWNRLNSDASNLKSKGITAVWIPPAWKGASQNDVGYGAYDLYDLGEFNQKGTVRTKYGTRSQLQAAVTSLKNNGIQVYGDVVMNHKGGADATEMVRAVEVNPNNRNQEVTGEYTIEAWTRFDFPGRGNTHSSFKWRWYHFDGVDWDQSRRLNNRIYKFRGHGKAWDWEVDTEFGNYDYLMYADYDMDHPEVVNELRNWGVWYTNTLGLDGFRIDAVKHIKYSFTRDWINHVRSATGKNMFAVAEFWKNDLGAIENYLQKTNWNHSVFDVPLHYNLYNASKSGGNYDMRNIFNGTVVQRHPSHAVTFVDNHDSQPEEALESFVEEWFKPLAYALTLTREQGYPSVFYGDYYGIPTHGVPAMRSKIDPILEARQKYAYGPQHDYLDHPDVIGWTREGDSSHPKSGLATLITDGPGGSKRMYAGLKNAGETWYDITGNRSDTVKIGSDGWGEFHVNGSSVSIYVQK

SEQ ID NO: 27647 - protein, 483 aa, Bacillus sp.
HHNGTNATMMQYFEWYLPNDGNHWNRLNSDASNLKSKGITAVWIPPAWKGASQNDVGYGAYDLYDLGEFNQKGTVRTKYGTRSQLQAAVTSLKNNGIQVYGDVVMNHKGGADATEMVRAVEVNPNNRNQEVTGEYTIEAWTRFDFPGRGNTHSSFKWRWYHFDGVDWDQSRRLNNRIYKFRGKAWDWEVDTEFGNYDYLMYADYDMDHPEVVNELRNWGVWYTNTLGLDGFRIDAVKHIKYSFTRDWINHVRSATGKNMFAVAEFWKNDLGAIENYLQKTNWNHSVFDVPLHYNLYNASKSGGNYDMRNIFNGTVVQSHPMHAVTFVDNHDSQPEEALESFVEEWFKPLAYALTLTREQGYPSVFYGDYYGIPTHGVPAMRSKIDPILEARQKYAYGPQHDYLDHPDVIGWTREGDSSHPKSGLATLITDGPGGSKRMYAGLKNAGETWYDITGNRSDTVKIGSDGWGEFHVNDGSVSIYVQK

SEQ ID NO: 27648 - protein, 483 aa, Synthetic construct
HHNGTNGTMMQYFEWYLPNDGNHWNRLNSDASNLKSKGITAVWIPPAWKGASQNDVGYGAYDVYDLGEFNQKGTVRTKYGTRSQLQAAVTSLKNNGIQVYGDVVMNHKGGADATEMVRAVEVNPNNRNQEVTGEYTIEAWTRFDFPGRGNTHSSFKWRWYHFDGVDWDQSRRLNNRIYKFRGKAWDWEVDTENGNYDYLMYADYDMDHPEVVNELRNWGVWYTNTLGLDGFRIDAVKHIKYSFTRDWINHVRSATGKNMFAVAEFWKNDLGAIENYLQKTNWNHSVFDVPLHYNLYNASKSGGNYDMRNIFNGTVVQRHPSHAVTFVDNHDSQPEEALESFVEEWFKPLAYALTLTREQGYPSVFYGDYYGIPTHGVPAMRSKIDPILEARQKYAYGPQHDYLDHPDVIGWTREGDSSHPKSGLATLITDGPGGSKRMYAGLKNAGETWYDITGNRSDTVKIGSDGWGEFHVNDGSVSIYVQK

SEQ ID NO: 27649 - protein, 483 aa, Synthetic construct
HHNGTNGTMMQYFEWYLPNDGNHWNRLNSDASNLKSKGITAVWIPPAWKGASQNDVGYGAYDLYDLGEFNQKGTVRTKYGTRSQLQAAVTSLKNNGIQVYGDVVMNHKGGADATEMVRAVEVNPNNRNQEVTGEYTIEAWTRFDFPGRGNTHSSFKWRWYHFDGVDWDQSRRLNNRIYKFRGKAWDWEVDTEFGNYDYLMYADHDMDHPEVVNELRNWGVWYTNTLGLDGFRIDAVKHIKYSFTRDWINHVRSATGKNMFAVAEFWKNDLGAIENYLQKTNWNHSVFDVPLHYNLYNASKSGGNYDMRNIFNGTVVQRHPSHAVTFVDNHDSQPEEALESFVEEWFKPLAYALTLTREQGYPSVFYGDYYGIPTHGVPAMRSKIDPILEARQKYAYGPQHDYLDHPDVIGWTREGDSSHPKSGLATLITDGPGGSKRMYAGLKNAGETWYDITGNRSDTVKIGSDGWGEFHVNDGSVSIYVQK

SEQ ID NO: 27650 - protein, 485 aa, Bacillus sp.
HHNGTNGTMMQYFEWYLPNDGNHWNRLNSDASNLKSKGITAVWIPPAWKGVSQNDVGYGAYDLYDLGEFNQKGTVRTKYGTRSQLQAAVTSLKNNGIQVYGDVVMNHKGGADATEMVRAVEVNPNNRNQEVTGEYTIEAWTRFDFPGRGNTHSSFKWRWYHFDGVDWDQSRQLSNRIYKFRGHGKAWDWEVDTEFGNYDYLMYVDYDMDHPEVVNELRNWGVWYTNTLGLDGFRIDAVKHIKYSFTRDWINHVRSATGKNMFAVAEFWKNDLGAIENYLQKTNWNHSVFDVPLHYNLYNASKSGGNYDMRNIFNGTVVQRHPSHAVTFVDNHDSQPEEALESFVEEWFKPLAYALTLTREQGYPSVFYGDYYGIPTHGVPAMRSKIDPILEARQKYAYGPQHDYLDHPDVIGWTREGDSSHPKSGLATLITDGPGGSKRMYAGLKNAGETWYDITGNRSDTVKIGSDGWGEFHVNDGSVSIYVQK

SEQ ID NO: 27651 - protein, 485 aa, Bacillus sp.
HHNGTNGTMMQYFEWYLPNDGNHWNRLNSDASNLKSKGITAVWIPPAWKGASQNDVGYGAYDLYDLGEFNQKGTVRTKYGTRSQLQAAVTSLKNNGIQVYGDVVMNHKGGADATEMVRAVEVNPNNRNQEVTGEYTIEAWTRFDFPGRGNTHSSFKWRWYHFDGVDWDQSRRLNNRIYKFRGHGKAWDWEVDTEFGNYDYLMYADYDMDHPEVVNELRNWGVWYTNTLGLDGFRIDAVKHIKYSFTRDWINHVRSATGKNMFAVAEFWKNDLGAIENYLQKTNWNHSVFDVPLHYNLYNASKSGGNYDMRDIFNGTVVQRHPSHAVTFVDNHDSQPEEALESFVEEWFKPLAYALTLTREQGYPSVFYGDYYGIPTHGVPAMRSKIDPILEARQKYAYGPQHDYLDHPDVIGWTREGDSSHPKSGLATLITDGPGGSKRMYAGLKNAGETWYDITGNRSDTVKIGSDGWGEFHVNDGSVSIYVQK

SEQ ID NO: 27652 - protein, 483 aa, Bacillus sp.
HHNGTNGTMMQYFEWYLPNDGNHWNRLNSDASNLKSKGITAVWIPPAWKGASQNDVGYGAYDLYDLGEFNQKGTVRTKYGTRSQLQAAVTSLKNNGITVYGDVVMNHKGGADATEMVRAVEVNPNNRNQEVTGEYTIEAWTRFDFPGRGNTHSSFKWRWYHFDGVDWDQSRRLNNRIYKFRGKAWDWEVDTEFGNYDYLMYADYDMDHPEVVNELRNWGVWYTNTLGLDGFRIDAVKHIKYSFTRDWINHVRSATGKNMFAVAEFWKNDLGAIENYLQKTNWNHSVFDVPLHYNLYNASKSGGNYDMRNIFNGTVVQSHPMHAVTFVDNHDSQPEEALESFVEEWFKPLAYALTLTREQGYPSVFYGDYYGIPTHGVPAMRSKIDPILEARQKYAYGPQHDYLDHPDVIGWTREGDSSHPKSGLATLITDGPGGSKRMYAGLKNAGETWYDITGNRSDTVKIGSDGWGEFHVNDGSVSIYVQK

SEQ ID NO: 27653 - protein, 485 aa, Bacillus sp.
HHNGTNGTMMQYFEWYLPNDGNHWNRLNSDASNLKSKGITAVWIPPAWKGASQNDVGYGAYDLYDLGEFNQKGTVRTKYGTRSQLQAAVTSLKNNGIQVYGDVVMNHKGGADATEMVRAVEVNPNNRNQEVTGEYTIEAWTRFDFPGRGNTHSSFKWRWYHFDGVDWDQSRRLNNRIYKFRGHGKAWDWEVDTEFGNYDYLMYADYDMDHPEVVNELRNWGVWYTNTLGLDGFRIDAVKHIKYSFTRDWINHVRSATGKNMFAVAEFWKNDLGAIENYLQKTNWNHSVFDVPLHYNLYNASKSGGNYDMRNIFNGTVVQAHPSHAVTFVDNHDSQPEEALESFVEEWFKPLAYALTLTREQGYPSVFYGDYYGIPTHGVPAMRSKIDPILEARQKYAYGPQHDYLDHPDVIGWTREGDSSHPKSGLATLITDGPGGSKRMYAGLKNAGETWYDITGNRSDTVKIGSDGWGEFHVNDGSVSIYVQK

SEQ ID NO: 27654 - protein, 485 aa, Bacillus sp.
HHNGTNGTMMQYFEWYLPNDGNHWNRLNSDASNLKSKGITAVWIPPAWKGASQNDVGYGAYDLYDLGEFNQKGTVRTKYGTRSQLQAAVTSLKNNGIQVYGDVVMNHKGGADATEMVRAVEVNPNNRNQEVTGEYTIEAWTRFDFPGRGNTHSSFKWRWYHFDGVDWDQSRRLNNRIYKFRGHGKAWDWEVDTEFGNYDYLMYADYDMDHPEVVNELRNWGVWYTNTLGLDGFRIDAVKHIKYSFTRDWINHVRSATGKNMFAVAEFWKNDLGAIENYLQKTNWNHSVFDVPLHYNLYNASKSGGNYDMRNIFNGTVVQRHPSHAVTFVDNHDSQPEEALESFVEEWFKPLAYALTLTREQGYPSVFYGDYYGIPTHGVPAMRSKIDPILEARQKYAYGPQHDYLDHPDVIGWTREGDSSHPLSGLATLITDGPGGSKRMYAGLKNAGETWYDITGNRSDTVKIGSDGWGEFHVNDGSVSIYVQK

SEQ ID NO: 27655 - protein, 485 aa, Bacillus sp.
HHNGTNGTMMQYFEWYLPNDGNHWNRLNSDASNLKSKGITAVWIPPAWKGISQNDVGYGAYDLYDLGEFNQKGTVRTKYGTRSQLQAAVTSLKNNGIQVYGDVVMNHKGGADATEMVRAVEVNPNNRNQEVTGEYTIEAWTRFDFPGRGNTHSSFKWRWYHFDGVDWDQSRELTNRIYKFRGHGKAWDWEVDTEFGNYDYLMYADYDMDHPEVVNELRNWGVWYTNTLGLDGFRIDAVKHIKYSFTRDWINHVRSATGKNMFAVAEFWKNDLGAIENYLQKTNWNHSVFDVPLHYNLYNASKSGGNYDMRNIFNGTVVQRHPSHAVTFVDNHDSQPEEALESFVEEWFKPLAYALTLTREQGYPSVFYGDYYGIPTHGVPAMRSKIDPILEARQKYAYGPQHDYLDHPDVIGWTREGDSSHPKSGLATLITDGPGGSKRMYAGLKNAGETWYDITGNRSDTVKIGSDGWGEFHVNDGSVSIYVQK

SEQ ID NO: 27656 - protein, 485 aa, Bacillus sp.
HHNGTNGTMMQYFEWYLPNDGNHWNRLNSDASNLKSKGITAVWIPPAWKGASQNDVGYGAYDLYDLGEFNQKGTVRTKYGTRSQLHAAVTSLKNNGIQVYGDVVMNHKGGADATEMVRAVEVNPNNRNQEVTGEYTIEAWTRFDFPGRGNTHSSFKWRWYHFDGVDWDQSRRLNNRIYKFRGHGKAWDWEVDTEFGNYDYLMYADYDMDHPEVVNELRNWGVWYTNTLGLDGFRIDAVKHIKYSFTRDWINHVRSATGKNMFAVAEFWKNDLGAIENYLQKTNWNHSVFDVPLHYNLYNASKSGGNYDMRNIFNGTVVQRHPSHAVTFVDNHDSQPEEALESFVEEWFKPLAYALTLTREQGYPSVFYGDYYGIPTHGVPAMRSKIDPILEARQKYAYGPQHDYLDHPDVIGWTREGDSSHPKSGLATLITDGPGGSKRMYAGLKNAGETWYDITGNRSDTVKIGSDGWGEFHVNDGSVSIYVQK

SEQ ID NO: 27657 - protein, 485 aa, Synthetic construct
HHNGTNGTMMQYFEWYLPNDGNHWNRLNSDASNLKSKGITAVWIPPAWKGASQNDVGYGAYDLYDLGEFNQKGTVRTKYGTRSQLQAAVTSLKNNGIQVYGDVVMNHKGGADATEMVRAVEVNPNNRNQEVTGEYTIEAWTRFDFPGRGNTHSSFKWRWYHFDGVDWDQSRRLNNRIYKFRGHGKAWDWEVDTENGNYDYLMYADIDMDHPEVVNELRNWGVWYTNTLGLDGYRIDAVKHIKYSFTRDWINHVRSATGKNMFAVAEFWKNDLGAIENYLQKTNWNHSVFDVPLHYNLYNASKSGGNYDMRNIFNGTVVQRHPSHAVTFVDNHDSQPEEALESFVEEWFKPLAYALTLTREQGYPSVFYGDYYGIPTHGVPAMRSKIDPILEARQKYAYGPQHDYLDHPDVIGWTREGDSSHPKSGLATLITDGPGGSKRMYAGLKNAGETWYDITGNRSDTVKIGSDGWGEFHVNDGSVSIYVQK

SEQ ID NO: 27658 - protein, 485 aa, Synthetic construct
HHNGTNGTMMQYFEWYLPNDGNHWNRLNSDASNLKSKGITAVWIPPAWKGASQNDVGYGAYDLYDLGEFNQKGTVRTKYGTRSQLQAAVTSLKNNGIQVYGDVVMNHKGGADATEMVRAVEVNPNNRNQEVTGEYTIEAWTRFDFPGRGNTHSSFKWRWYHFDGVDWDQSRRLNNRIYKFRGHGKAWDWEVDTENGNYDYLMYADIDMDHPEVVNELRNWGVWYTNTLGLDGFRIDAVKHIKYSFTRDWINHVRSATGKNLFAVAEFWKNDLGAIENYLQKTNWNHSVFDVPLHYNLYNASKSGGNYDMRNIFNGTVVQRHPSHAVTFVDNHDSQPEEALESFVEEWFKPLAYALTLTREQGYPSVFYGDYYGIPTHGVPAMRSKIDPILEARQKYAYGPQHDYLDHPDVIGWTREGDSSHPKSGLATLITDGPGGSKRMYAGLKNAGETWYDITGNRSDTVKIGSDGWGEFHVNDGSVSIYVQK

SEQ ID NO: 27659 - protein, 485 aa, Bacillus sp.
HHNGTNGTMMQYFEWYLPNDGNHWNRLNSDASNLKSKGITAVWIPPAWKATSQNDVGYGAYDLYDLGEFNQKGTVRTKYGTRSQLQAAVTSLKNNGIQVYGDVVMNHKGGADATEMVRAVEVNPNNRNQEVTGEYTIEAWTRFDFPGRGNTHSSFKWRWYHFDGVDWDQSREINNRIYKFRGHGKAWDWEVDTEFGNYDYLMYADYDMDHPEVVNELRNWGVWYTNTLGLDGFRIDAVKHIKYSFTRDWINHVRSATGKNMFAVAEFWKNDLGAIENYLQKTNWNHSVFDVPLHYNLYNASKSGGNYDMRNIFNGTVVQRHPSHAVTFVDNHDSQPEEALESFVEEWFKPLAYALTLTREQGYPSVFYGDYYGIPTHGVPAMRSKIDPILEARQKYAYGPQHDYLDHPDVIGWTREGDSSHPKSGLATLITDGPGGSKRMYAGLKNAGETWYDITGNRSDTVKIGSDGWGEFHVNDGSVSIYVQK

SEQ ID NO: 27660 - protein, 483 aa, Bacillus sp.
HHNGTNGTMMQYFEWYLPNDGNHWNRLNSDASNLKSKGITAVWIPPAWKGASQNDVGYGAYDLYDLGEFNQKGTVRTKYGTRSQLQAAVTSLKNNGIQVYGDVVMNHKGGADATEMVRAVEVNPNNRNQEVTGEYTIEAWTRFDFPGRGNTHSSFKWRWYHFDGVDWDQSRRLNNRIYKFRGKAWDWEVDTEFGNYDYLMYADYDMDHPEVVNELRNWGVWYTNTLGLDGFRIDAVKHIKYSFTRDWINHVRSATGKNMFAVAEFWKNDLGAIENYLQKTNWNHSVFDVPLHYNLYNASNSGGNYDMRNIFNGTVVQRHPSHAVTFVDNHDSQPEEALESFVDEWFKPLAYALTLTREQGYPSVFYGDYYGIPTHGVPAMRSKIDPILEARQKYAYGPQHDYLDHPDVIGWTREGDSSHPKSGLATLITDGPGGSKRMYAGLKNAGETWYDITGNRSDTVKIGSDGWGEFHVNKSSVSIYVQK

SEQ ID NO: 27661 - protein, 483 aa, Bacillus sp.
HHNGTNGTMMQYFEWYLPNDGNHWNRLNSDASNLKSKGIIAVWIPPAWKGLSQNDVGYGAYDLYDLGEFNQKGTVRTKYGTRSQLQAAVTSLKNNGIQVYGDVVMNHKGGADATEMVRAVEVNPNNRNQEVTGEYTIEAWTRFDFPGRGNTHSSFKWRWYHFDGVDWDQSRDFNNRIYKFRGKAWDWEVDTEFGNYDYLMYADYDMDHPEVVNELRNWGVWYTNTLGLDGFRIDAVKHIKYSFTRDWINHVRSATGKNMFAVAEFWKNDLGAIENYLQKTNWNHSVFDVPLHYNLYNASKSGGNYDMRNIFNGTVVQRHPSHAVTFVDNHDSQPEEALESFVEEWFKPLAYALTLTREQGYPSVFYGDYYGIPTHGVPAMRSKIDPILEARQKYAYGPQHDYLDHPDVIGWTREGDSSHPKSGLATLITDGPGGSKRMYAGLKNAGETWYDITGNRSDTVKIGSDGWGEFHVNDGSVSIYVQK

SEQ ID NO: 27662 - protein, 483 aa, Bacillus sp.
HHNGTNGTMMQYFEWYLPNDGNHWNRLNSDASNLKSKGITAVWIPPAWKGASQNDVGYGAYDLYDLGEFNQKGTVRTKYGTRSQLQAAVTSLKNNGIQVYGDVVMNHKGGADATEMVRAVEVNPNNRNQEVTGEYTIEAWTRFDFPGRGNTHSSFKWRWYHFDGVDWDQSRRLNNRIYKFRGKAWDWEVDTEFGNYDYLMYADYDMDHPEVVNELRSWGVWYTNTLGLDGFRIDAVKHIKYSFTRDWINHVRSATGKNMFAVAEFWKNDLGAIENYLQKTNWNHSVFDVPLHYNLYNASKSGGNYDMRNIFNGTVVQRHPSHAVTFVDNHDSQPEEALESFVEEWFKPLAYALTLTREQGYPSVFYGDYYGIPTHGVPAMRSKIDPILEARQKYAYGPQHDYLDHPDVIGWTREGDSSHPKSGLATLITDGPGGSKRMYAGLKNAGETWYDITGNRSDTVKIGSDGWGEFHVNDGSVSIYVQK

SEQ ID NO: 27663 - protein, 483 aa, Bacillus sp.
HHNGTNGTMMQYFEWYLPNDGNHWNRLNSDASNLKSKGITAVWIPPAWKGASQNDVGYGAYDLYDLGEFNQKGTVRTKYGTRSQLQAAVTSLKNNGIQVYGDVVMNHKGGADATEMVSAVEVNPNNRNQEVTGEYTIEAWTRFDFPGRGNTHSSFKWRWYHFDGVDWDQSRRLNNRIYKFRGKAWDWEVDTEFGNYDYLMYADYDMDHPEVVNELRNWGVWYTNTLGLDGFRIDAVKHIKYSFTRDWINHVRSATGKNMFAVAEFWKNDLGAIENYLQKTNWNHSVFDVPLHYNLYNASKSGGNYDMRNIFNGTVVQRHPSHAVTFVDNHDSQPEEALESFVEEWFKPLAYALTLTREQGYPSVFYGDYYGIPTHGVPAMRSKIDPILEARQKYAYGPQHDYLDHPDVIGWTREGDSSHPKSGLATLITDGPGGSKRMYAGLKNAGETWYDITGNRSDTVKIGSDGWGEFHVNDGSVSIYVQK

SEQ ID NO: 27664 - protein, 483 aa, Synthetic construct
HHNGTNGTMMQYFEWYLPNDGNHWNRLNSDASNLKSKGITAVWIPPAWKGASQNDVGYGAYDLYDLGEFNQKGTVRTKYGTRSQLQAAVTSLKNNGIQVYGDVVMNHKGGADRTEMVRAVEVNPNNRNQEVTGEYTIEAWTRFDFPGRGNTHSSFKWRWYHFDGVDWDQSRRLNNRIYKFRGKAWDWEVDTENGNYDYLMYADIDMDHPEVVNELRNWGVWYTNTLGLDGFRIDAVKHIKYSFTRDWINHVRSATGKNMFAVAEFWKNDLGAIENYLQKTNWNHSVFDVPLHYNLYNASKSGGNYDMRNIFNGTVVQRHPSHAVTFVDNHDSQPEEALESFVEEWFKPLAYALTLTREQGYPSVFYGDYYGIPTHGVPAMRSKIDPILEARQKYAYGPQHDYLDHPDVIGWTREGDSSHPKSGLATLITDGPGGSKRMYAGLKNAGETWYDITGNRSDTVKIGSDGWGEFHVNDGSVSIYVQK

SEQ ID NO: 27665 - protein, 485 aa, Bacillus sp.
HHNGTNGTMMQYFEWYLPNDGNHWNRLNSDASNLKSKGITAVWIPPAWKATSQNDVGYGAYDLYDLGEFNQKGTVRTKYGTRSQLQAAVTSLKNNGIQVYGDVVMNHKGGADATEMVRAVEVNPNNRNQEVTGEYTIEAWTRFDFPGRGNTHSSFKWRWYHFDGVDWDQSRQLSNRIYKFRGHGKAWDWEVDTEFGNYDYLMYVDYDMDHPEVVNELRNWGVWYTNTLGLDGFRIDAVKHIKYSFTRDWINHVRSATGKNMFAVAEFWKNDLGAIENYLQKTNWNHSVFDVPLHYNLYNASKSGGNYDMRNIFNGTVVQRHPSHAVTFVDNHDSQPEEALESFVEEWFKPLAYALTLTREQGYPSVFYGDYYGIPTHGVPAMRSKIDPILEARQKYAYGPQHDYLDHPDVIGWTREGDSSHPKSGLATLITDGPGGSKRMYAGLKNAGETWYDITGNRSDTVKIGSDGWGEFHVNDGSVSIYVQK

SEQ ID NO: 27666 - protein, 485 aa, Bacillus sp.
HHNGTNGTMMQYFEWYLPNDGNHWNRLNSDASNLKSKGITAVWIPPAWKATSQNDVGYGAYDLYDLGEFNQKGTVRTKYGTRSQLQAAVTSLKNNGIQVYGDVVMNHKGGADATEMVRAVEVNPNNRNQEVTGEYTIEAWTRFDFPGRGNTHSSFKWRWYHFDGVDWDQSREVTNRIYKFRGHGKAWDWEVDTEFGNYDYLMYADYDMDHPEVVNELRNWGVWYTNTLGLDGFRIDAVKHIKYSFTRDWINHVRSATGKNMFAVAEFWKNDLGAIENYLQKTNWNHSVFDVPLHYNLYNASKSGGNYDMRNIFNGTVVQRHPSHAVTFVDNHDSQPEEALESFVEEWFKPLAYALTLTREQGYPSVFYGDYYGIPTHGVPAMRSKIDPILEARQKYAYGPQHDYLDHPDVIGWTREGDSSHPKSGLATLITDGPGGSKRMYAGLKNAGETWYDITGNRSDTVKIGSDGWGEFHVNDGSVSIYVQK

SEQ ID NO: 27667 - protein, 485 aa, Bacillus sp.
HHNGTNGTMMQYFEWYLPNDGNHWNRLNSDASNLKSKGITAVWIPPAWKGASQNDVGYGAYDLYDLGEFNQKGTVRTKYGTRSQLQAAVTSLKNNGIQVYGDVVMNHKGGADATEMVRAVEVNPNNRNQEVTGEYTIEAWTRFDFPGRGNTHSSFKWRWYHFDGVDWDQSRRLNNRIYKFRGHGKAWDWEVDTEFGNYDYLMYADYDMDHPEVVNELRNWGVWYTNTLGLDGFRIDAVKHIKYSFTRDWINHVRSATGKNMFAVAEFWKNDLGAIENYLQKTNWNHSVFDVPLHYNLYNASKSGGNYDMRNIFNGTVVQMHPNHAVTFVDNHDSQPEEALESFVEEWFKPLAYALTLTREQGYPSVFYGDYYGIPTHGVPAMRSKIDPILEARQKYAYGPQHDYLDHPDVIGWTREGDSSHPKSGLATLITDGPGGSKRMYAGLKNAGETWYDITGNRSDTVKIGSDGWGEFHVNDGSVSIYVQK

SEQ ID NO: 27668 - protein, 485 aa, Bacillus sp.
HHNGTNGTMMQYFEWYLPNDGNHWNRLNSDASNLKSKGITAVWIPPAWKGASQNDVGYGAYDLYDLGEFNQKGTVRTKYGTRSQLQAAVTSLKNNGIQVYGDVVMNHKGGADATEMVRAVEVNPNNRNQEVTGEYTIEAWTRFDFPGRGNTHSSFKWRWYHFDGVDWDQSRDISNRIYKFRGHGKAWDWEVDTEFGNYDYLMYADYDMDHPEVVNELRNWGVWYTNTLGLDGFRIDAVKHIKYSFTRDWINHVRSATGKNMFAVAEFWKNDLGAIENYLQKTNWNHSVFDVPLHYNLYNASKSGGNYDMRNIFNGTVVQRHPSHAVTFVDNHDSQPEEALESFVEEWFKPLAYALTLTREQGYPSVFYGDYYGIPTHGVPAMRSKIDPILEARQKYAYGPQHDYLDHPDVIGWTREGDSSHPKSGLATLITDGPGGSKRMYAGLKNAGETWYDITGNRSDTVKIGSDGWGEFHVNDGSVSIYVQK

SEQ ID NO: 27669 - protein, 485 aa, Synthetic construct
HHNGTNGTMMQYFEWYLPNDGNHWNRLNSDASNLKSKGITAVWIPPAWKGASQNDVGYGAYDLYDLGEFNQKGTVRTKYGTRSQLQAAVTSLKNNGIQVYGDVVMNHKGGADATEMVRAVEVNPNNRNQEVTGEYTIEAWTRFDFPGRGNTHSSFKWRWYHFDGVDWDQSRRLNNRIYKFRGHGKAWDWEVDTENGNYDYLMYADIDMDHPEVVNEMRNWGVWYTNTLGLDGFRIDAVKHIKYSFTRDWINHVRSATGKNMFAVAEFWKNDLGAIENYLQKTNWNHSVFDVPLHYNLYNASKSGGNYDMRNIFNGTVVQRHPSHAVTFVDNHDSQPEEALESFVEEWFKPLAYALTLTREQGYPSVFYGDYYGIPTHGVPAMRSKIDPILEARQKYAYGPQHDYLDHPDVIGWTREGDSSHPKSGLATLITDGPGGSKRMYAGLKNAGETWYDITGNRSDTVKIGSDGWGEFHVNDGSVSIYVQK

SEQ ID NO: 27670 - protein, 485 aa, Synthetic construct
HHNGTNGTMMQYFEWYLPNDGNHWNRLNSDASNLKSKGITAVWIPPAWKGASQNDVGYGAYDLYDLGEFNQKGTVRTKYGTRSQLQAAVTSLKNNGIQVYGDVVMNHKGGADATEMVRAVEVNPNNRNQEVTGEYTIEAWTRFDFPGRGNTHSSFKWRWYHFDGVDWDQSRRLNNRIYKFRGHGKAWDWEVDTENGNYDYLMYADYDMDHPESVNELRNWGVWYTNTLGLDGFRIDAVKHIKYSFTRDWINHVRSATGKNMFAVAEFWKNDLGAIENYLQKTNWNHSVFDVPLHYNLYNASKSGGNYDMRNIFNGTVVQRHPSHAVTFVDNHDSQPEEALESFVEEWFKPLAYALTLTREQGYPSVFYGDYYGIPTHGVPAMRSKIDPILEARQKYAYGPQHDYLDHPDVIGWTREGDSSHPKSGLATLITDGPGGSKRMYAGLKNAGETWYDITGNRSDTVKIGSDGWGEFHVNDGSVSIYVQK

SEQ ID NO: 27671 - protein, 485 aa, Synthetic construct
HHNGTNGTMMQYFEWYLPNDGNHWNRLNSDASNLKSKGITAVWIPPAWKGASQNDVGYGAYDLYDLGEFNQKGTVRTKYGTRSQLQAAVTSLKNNGIQVYGDVVMNHKGGADATEMVRAVEVNPNNRNQEVTGEYTIEAWTRFDFPGRGNTHSSFKWRWYHFDGVDWDQSRRLNNRIYKFRGHGKAWDWEVDTENGNYDYLMYADIDMDHPEVVNELRNWGVWYTNTLGLDGFRIDAVKHIKYSFTRDWINHVRSATGKNMFAVAEFWKNDLGAIENYLQKTNWNHSLFDVPLHYNLYNASKSGGNYDMRNIFNGTVVQRHPSHAVTFVDNHDSQPEEALESFVEEWFKPLAYALTLTREQGYPSVFYGDYYGIPTHGVPAMRSKIDPILEARQKYAYGPQHDYLDHPDVIGWTREGDSSHPKSGLATLITDGPGGSKRMYAGLKNAGETWYDITGNRSDTVKIGSDGWGEFHVNDGSVSIYVQK

SEQ ID NO: 27672 - protein, 483 aa, Synthetic construct
HHNGTNGTMMQYFEWYLPNDGNHWNRLNSDASNLKSKGITAVWIPPAWKGASQNDVGYGAYDLYDLGEFNQKGTVRTKYGTRSQLQAAVTSLKNNGIQVYGDVVMNHKGGADATEMVRAVEVNPNNRNQEVTGEYTIEAWTRFDFPGRGNTHSSFKWRWYHFDGVDWDQSRRLNNRIYKFRGKAWDWEVDTENGNYDYLMYADIDMDHPEAVNELRNWGVWYTNTLGLDGFRIDAVKHIKYSFTRDWINHVRSATGKNMFAVAEFWKNDLGAIENYLQKTNWNHSVFDVPLHYNLYNASKSGGNYDMRNIFNGTVVQRHPSHAVTFVDNHDSQPEEALESFVEEWFKPLAYALTLTREQGYPSVFYGDYYGIPTHGVPAMRSKIDPILEARQKYAYGPQHDYLDHPDVIGWTREGDSSHPKSGLATLITDGPGGSKRMYAGLKNAGETWYDITGNRSDTVKIGSDGWGEFHVNDGSVSIYVQK

SEQ ID NO: 27673 - protein, 483 aa, Bacillus sp.
HHNGTNGTMMQYFEWYLPNDGNHWNRLNSDASNLKSKGITAVWIPPAWKGASQNDVGYGAYDLYDLGEFNQKGTVRTKYGTRSQLQAAVTSLKNNGIQVYGDVVMNHKGGADATEMVRAVEVNPNNRNQEVTGEYTIEAWTRFDFPGRGNTHSSFKWRWYHFDGVDWDQSRRLNNRIYKFRGKAWDWEVDTEFGNYDYLMYADYDMDHPEVVNELRNWGVWYTNTLGLDGFRIDAVKHIKYSFTRDWINHVRSATGKNMFAVAEFWKNDLGAIENYLQKTNWNHSVFDVPLHYNLYNASKSGGNYDMRNIFNGTVVQAHPMLAVTFVDNHDSQPEEALESFVEEWFKPLAYALTLTREQGYPSVFYGDYYGIPTHGVPAMRSKIDPILEARQKYAYGPQHDYLDHPDVIGWTREGDSSHPKSGLATLITDGPGGSKRMYAGLKNAGETWYDITGNRSDTVKIGSDGWGEFHVNDGSVSIYVQK

SEQ ID NO: 27674 - protein, 485 aa, Bacillus sp.
HHNGTNGTMMQYFEWYLPNDGNHWNRLNSDASNLKSKGITAVWIPPAWKGASQNDVGYGAYDLYDLGEFNQKGTVRTKYGTRSQLQAAVTSLKNNGIQVYGDVVMNHKGGADATEMVRAVEVNPNNRNQEVTGEYTIEAWTRFDFPGRGNTHSSFKWRWYHFDGVDWDQSRRLNNRIYKFRGHGKAWDWEVDTEFGNYDYLMYADYDMDHPEVVNELRNWGVWYTNTLGLDGFRIDAVKHIKYSFTRDWINHVRSATGKNMFAVAEFWKNDLGAIENYLQKTNWNHSVFDVPLHYNLYNASKSGGNYDMRNIFNGTVVQRHPKHAVTFVDNHDSQPEEALESFVEEWFKPLAYALTLTREQGYPSVFYGDYYGIPTHGVPAMRSKIDPILEARQKYAYGPQHDYLDHPDVIGWTREGDSSHPKSGLATLITDGPGGSKRMYAGLKNAGETWYDITGNRSDTVKIGSDGWGEFHVNDGSVSIYVQK

SEQ ID NO: 27675 - protein, 483 aa, Bacillus sp.
HHNGTNGTMMQYFEWYLPNDGNHWNRLNSDASNLKSKGITAVWIPPAWKGASQNDVGYGAYDLYDLGEFNQKGTVRTKYGTRSQLQAAVTSLKNNGIQVYGDVVMNHKGGADATEMVRAVEVNPNNRNQEVTGEYTIEAWTRFDFPGRGNTHSSFKWRWYHFDGVDWDQSRNLNNRIYKFRGKAWDWEVDTEFGNYDYLMYADYDMDHPEVVNELRNWGVWYTNTLGLDGFRIDAVKHIKYSFTRDWINHVRSATGKNMFAVAEFWKNDLGAIENYLQKTNWNHSVFDVPLHYNLYNASKSGGNYDMRNIFNGTVVQRHPSHAVTFVDNHDSQPEEALESFVEEWFKPLAYALTLTREQGYPSVFYGDYYGIPTHGVPAMRSKIDPILEARQKYAYGPQHDYLDHPDVIGWTREGDSSHPKSGLATLITDGPGGSKRMYAGLKNAGETWYDITGNRSDTVKIGSDGWGEFHVNDGSVSIYVQK

SEQ ID NO: 27676 - protein, 485 aa, Synthetic construct
HHNGTNGTMMQYFEWYLPNDGNHWNRLNSDAPNLKSKGITAVWIPPAWKGASQNDVGYGAYDLYDLGEFNQKGTVRTKYGTRSQLQAAVTSLKNNGIQVYGDVVMNHKGGADATEMVRAVEVNPNNRNQEVTGEYTIEAWTRFDFPGRGNTHSSFKWRWYHFDGVDWDQSRRLNNRIYKFRGHGKAWDWEVDTENGNYDYLMYADIDMDHPEVVNELRNWGVWYTNTLGLDGFRIDAVKHIKYSFTRDWINHVRSATGKNMFAVAEFWKNDLGAIENYLQKTNWNHSVFDVPLHYNLYNASKSGGNYDMRNIFNGTVVQRHPSHAVTFVDNHDSQPEEALESFVEEWFKPLAYALTLTREQGYPSVFYGDYYGIPTHGVPAMRSKIDPILEARQKYAYGPQHDYLDHPDVIGWTREGDSSHPKSGLATLITDGPGGSKRMYAGLKNAGETWYDITGNRSDTVKIGSDGWGEFHVNDGSVSIYVQK

SEQ ID NO: 27677 - protein, 485 aa, Bacillus sp.
HHNGTNGTMMQYFEWYLPNDGNHWNRLNSDASNLKSKGITAVWIPPAWKGASQNDVGYGAYDLYDLGEFNQKGTVRTKYGTRSQLQAAVTSLKNNGIQVYGDVVMNHKGGADATEMVPAVEVNPNNRNQEVTGEYTIEAWTRFDFPGRGNTHSSFKWRWYHFDGVDWDQSRRLNNRIYKFRSHGKAWDWEVDTEFGNYDYLMYADYDMDHPEVVNELRNWGVWYTNTLGLDGFRIDAVKHIKYSFTRDWINHVRSATGKNMFAVAEFWKNDLGAIENYLQKTNWNHSVFDVPLHYNLYNASKSGGNYDMRNIFNGTVVQRHPSHAVTFVDNHDSQPEEALESFVEEWFKPLAYALTLTREQGYPSVFYGDYYGIPTHGVPAMRSKIDPILEARQKYAYGPQHDYLDHPDVIGWTREGDSSHPKSGLATLITDGPGGSKRMYAGLKNAGETWYDITGNRSDTVKIGSDGWGEFHVNDGSVSIYVQK

SEQ ID NO: 27678 - protein, 485 aa, Bacillus sp.
HHNGTNGTMMQYFEWYLPNDGNHWNRLNSDASNLKSKGITAVWIPPAWKAASQNDVGYGAYDLYDLGEFNQKGTVRTKYGTRSQLQAAVTSLKNNGIQVYGDVVMNHKGGADATEMVRAVEVNPNNRNQEVTGEYTIEAWTRFDFPGRGNTHSSFKWRWYHFDGVDWDQSREFTNRIYKFRGHGKAWDWEVDTEFGNYDYLMYADYDMDHPEVVNELRNWGVWYTNTLGLDGFRIDAVKHIKYSFTRDWINHVRSATGKNMFAVAEFWKNDLGAIENYLQKTNWNHSVFDVPLHYNLYNASKSGGNYDMRNIFNGTVVQRHPSHAVTFVDNHDSQPEEALESFVEEWFKPLAYALTLTREQGYPSVFYGDYYGIPTHGVPAMRSKIDPILEARQKYAYGPQHDYLDHPDVIGWTREGDSSHPKSGLATLITDGPGGSKRMYAGLKNAGETWYDITGNRSDTVKIGSDGWGEFHVNDGSVSIYVQK

SEQ ID NO: 27679 - protein, 485 aa, Bacillus sp.
HHNGTNGTMMQYFEWYLPNDGNHWNRLNSDASNLKSKGITAVWIPPAWKAASQNDVGYGAYDLYDLGEFNQKGTVRTKYGTRSQLQAAVTSLKNNGIQVYGDVVMNHKGGADATEMVRAVEVNPNNRNQEVTGEYTIEAWTRFDFPGRGNTHSSFKWRWYHFDGVDWDQSREFQNRIYKFRGHGKAWDWEVDTEFGNYDYLMYTDYDMDHPEVVNELRNWGVWYTNTLGLDGFRIDAVKHIKYSFTRDWINHVRSATGKNMFAVAEFWKNDLGAIENYLQKTNWNHSVFDVPLHYNLYNASKSGGNYDMRNIFNGTVVQRHPSHAVTFVDNHDSQPEEALESFVEEWFKPLAYALTLTREQGYPSVFYGDYYGIPTHGVPAMRSKIDPILEARQKYAYGPQHDYLDHPDVIGWTREGDSSHPKSGLATLITDGPGGSKRMYAGLKNAGETWYDITGNRSDTVKIGSDGWGEFHVNDGSVSIYVQK

SEQ ID NO: 27680 - protein, 485 aa, Synthetic construct
HHNGTNGTMMQYFEWYLPNDGNHWNRLNSDASNLKSKGITAVWIPPAWKGASQNDVGYGAYDLYDLGEFNQKGTVRTKYGTRSQLQAAVTSLKNNGIQVYGDVVMNHKGGADATEMVRAVEVNPNNRNQEVTGEYTIEAWTRFDFPGRGNTHSSFKWRWYHFDGVDWDQSRRLNNRIYKFRGHGKAWDWEVDTENGNYDYLMYADIDMDHPEVVNELRNWGVWYTNTLGLDGFRIDAVKHIKYSFTRDWINHVRSATGKNMFAVAEFWKNDLGAIENYLQFTNWNHSVFDVPLHYNLYNASKSGGNYDMRNIFNGTVVQRHPSHAVTFVDNHDSQPEEALESFVEEWFKPLAYALTLTREQGYPSVFYGDYYGIPTHGVPAMRSKIDPILEARQKYAYGPQHDYLDHPDVIGWTREGDSSHPKSGLATLITDGPGGSKRMYAGLKNAGETWYDITGNRSDTVKIGSDGWGEFHVNDGSVSIYVQK

SEQ ID NO: 27681 - protein, 485 aa, Synthetic construct
HHNGTNGTMMQYFEWYLPNDGNHWNRLNSDASNLKSKGITAVWIPPAWKGASQNDVGYGAYDLYDLGEFNQKGTVRTKYGTRSQLQAAVTSLKNNGIQVYGDVVMNHKGGADATEMVRAVEVNPNNRNQEVTGEYTIEAWTRFDFPGRGNTHSSFKWRWYHFDGVDWDQSRRLNNRIYKFRGHGKAWDWEVDTENGNYDYLMYADIDMDHPEVVNEIRNWGVWYTNTLGLDGFRIDAVKHIKYSFTRDWINHVRSATGKNMFAVAEFWKNDLGAIENYLQKTNWNHSVFDVPLHYNLYNASKSGGNYDMRNIFNGTVVQRHPSHAVTFVDNHDSQPEEALESFVEEWFKPLAYALTLTREQGYPSVFYGDYYGIPTHGVPAMRSKIDPILEARQKYAYGPQHDYLDHPDVIGWTREGDSSHPKSGLATLITDGPGGSKRMYAGLKNAGETWYDITGNRSDTVKIGSDGWGEFHVNDGSVSIYVQK

SEQ ID NO: 27682 - protein, 485 aa, Synthetic construct
HHNGTNGTMMQYFEWYLPNDGNHWNRLNSDASNLKSKGITAVWIPPAWKGASQNDTGYGAYDLYDLGEFNQKGTVRTKYGTRSQLQAAVTSLKNNGIQVYGDVVMNHKGGADATEMVRAVEVNPNNRNQEVTGEYTIEAWTRFDFPGRGNTHSSFKWRWYHFDGVDWDQSRRLNNRIYKFRGHGKAWDWEVDTENGNYDYLMYADIDMDHPEVVNELRNWGVWYTNTLGLDGFRIDAVKHIKYSFTRDWINHVRSATGKNMFAVAEFWKNDLGAIENYLQKTNWNHSVFDVPLHYNLYNASKSGGNYDMRNIFNGTVVQRHPSHAVTFVDNHDSQPEEALESFVEEWFKPLAYALTLTREQGYPSVFYGDYYGIPTHGVPAMRSKIDPILEARQKYAYGPQHDYLDHPDVIGWTREGDSSHPKSGLATLITDGPGGSKRMYAGLKNAGETWYDITGNRSDTVKIGSDGWGEFHVNDGSVSIYVQK

SEQ ID NO: 27683 - protein, 485 aa, Bacillus sp.
HHNGTNGTMMQYFEWYLPNDGNHWNRLNSDASNLKSKGITAVWIPPAWKGASQNDVGYGAYDLYDLGEFNQKGTVRTKYGTRSQLQAAVTSLKNNGIQVYGDVVMNHKGGADATEMVRAVEVNPNNRNQEVTGEYTIEAWTRFDFPGRGNTHSSFKWRWYHFDGVDWDQSRPLNNRIYKFRGHGKAWDWEVDTEFGNYDYLMYADYDMDHPEVVNELRNWGVWYTNTLGLDGFRIDAVKHIKYSFTRDWINHVRSATGKNMFAVAEFWKNDLGAIENYLQKTNWNHSVFDVPLHYNLYNASKSGGNYDMRNIFNGTVVQRHPSHAVTFVDNHDSQPEEALESFVEEWFKPLAYALTLTREQGYPSVFYGDYYGIPTHGVPAMRSKIDPILEARQKYAYGPQHDYLDHPDVIGWTREGDSSHPKSGLATLITDGPGGSKRMYAGLKNAGETWYDITGNRSDTVKIGSDGWGEFHVNDGSVSIYVQK

SEQ ID NO: 27684 - protein, 485 aa, Bacillus sp.
HHNGTNGTMMQYFEWYLPNDGNHWNRLNSDASNLKSKGITAVWIPPAWKGASQNDVGYGAYDLYDLGEFNQKGTVRTKYGTRSQLQAAVTSLKNNGIQVYGDVVMNHKGGADATEMVRAVEVNPNNRNQEVTGEYTIEAWTRFDFPGRGNTHSSFKWRWYHFDGVDWDQSRRLNNRIYKFRGHGKAWDWEVDTEFGNYDYLMYADYDMDHPEVVNELRNWGVWYTNTLGLDGFRIDAVKHIKYSFTRDWINHVRSATGKNMFAVAEFWKNDLGAIENYLQKTNWNHSVFDVPLHYNLYNASKSGGNYDMRNIFNGTVVQRHPSHAVTFVDNHDSQPEEALESFVEEWFKPLAYALTLTREQGYPSVFYGDYYGIPTHGVPAMRSKIDPILEARQKYAYGPQHDYLDHPDVIGWTREGDSSHPPSGLATLITDGPGGSKRMYAGLKNAGETWYDITGNRSDTVKIGSDGWGEFHVNDGSVSIYVQK

SEQ ID NO: 27685 - protein, 483 aa, Bacillus sp.
HHNGTNGTMMQYFEWYLPNDGNHWNRLNSDASNLKSKGITAVWIPPAWKGASQNDVGYGAYDLYDLGEFNQKGTVRTKYGTRSQLQAAVTSLKNNGIQVYGDVVMNHKGGADATEMVRAVEVNPNNRNQEVTGEYTIEAWTRFDFPGRGNTHSSFKWRWYHFDGVDWDQSRRLNNRIYKFRGKAWDWEVDTEFGNYDYLMYADYDMDHPEVVNELRNWGVWYTNTLGLDGFRIDAVKHIKYSFTRDWINHVRSATGKNMFAVAEFWKNDLGAIENYLQKTNWNHSVFDVPLHYNLYNASKSGGNYDMRNIFNGTVVQRHPSHAVTFVDNHDSQPEEALESFVDEWFKPLAYALTLTREQGYPSVFYGDYYGIPTHGVPAMRSKIDPILEARQKYAYGPQHDYLDHPDVIGWTREGDSSHPKSGLATLITDGPGGSKRMYAGLKNAGETWYDITGNRSDTVKIGSDGWGEFHVNGQSVSIYVQK

SEQ ID NO: 27686 - protein, 485 aa, Bacillus sp.
HHNGTNGTMMQYFEWYLPNDGNHWNRLNSDASNLKSKGITAVWIPPAWKATSQNDVGYGAYDLYDLGEFNQKGTVRTKYGTRSQLQAAVTSLKNNGIQVYGDVVMNHKGGADATEMVRAVEVNPNNRNQEVTGEYTIEAWTRFDFPGRGNTHSSFKWRWYHFDGVDWDQSRDLNNRIYKFRGHGKAWDWEVDTEFGNYDYLMYADYDMDHPEVVNELRNWGVWYTNTLGLDGFRIDAVKHIKYSFTRDWINHVRSATGKNMFAVAEFWKNDLGAIENYLQKTNWNHSVFDVPLHYNLYNASKSGGNYDMRNIFNGTVVQAHPNHAVTFVDNHDSQPEEALESFVEEWFKPLAYALTLTREQGYPSVFYGDYYGIPTHGVPAMRSKIDPILEARQKYAYGPQHDYLDHPDVIGWTREGDSSHPKSGLATLITDGPGGSKRMYAGLKNAGETWYDITGNRSDTVKIGSDGWGEFHVNDGSVSIYVQK

SEQ ID NO: 27687 - protein, 483 aa, Bacillus sp.
HHNGKNGTMMQYFEWYLPNDGNHWNRLNSDASNLKSKGITAVWIPPAWKGASQNDVGYGAYDLYDLGEFNQKGTVRTKYGTRSQLQAAVTSLKNNGIQVYGDVVMNHKGGADATEMVRAVEVNPNNRNQEVTGEYTIEAWTRFDFPGRGNTHSSFKWRWYHFDGVDWDQSREFNNRIYKFRGKAWDWEVDTEFGNYDYLMYADYDMDHPEVVNELRNWGVWYTNTLGLDGFRIDAVKHIKYSFTRDWINHVRSATGKNMFAVAEFWKNDLGAIENYLQKTNWNHSVFDVPLHYNLYNASKSGGNYDMRNIFNGTVVQRHPSHAVTFVDNHDSQPEEALESFVEEWFKPLAYALTLTREQGYPSVFYGDYYGIPTHGVPAMRSKIDPILEARQKYAYGPQHDYLDHPDVIGWTREGDSSHPKSGLATLITDGPGGSKRMYAGLKNAGETWYDITGNRSDTVKIGSDGWGEFHVNDGSVSIYVQK

SEQ ID NO: 27688 - protein, 485 aa, Bacillus sp.
HHNGTNGTMMQYFEWYLPNDGNHWNRLNSDASNLKSKGITAVWIPPAWKGASQNDVGYGAYDLYDLGEFNQKGTVRTKYGTRSQLQAAVTSLKNNGIQVYGDVVMNHKGGADATEMVRAVEVNPNNRNQEVTGEYTIEAWTRFDFPGRGNTHSSFKWRWYHFDGVDWDQSRQVNNRIYKFRGHGKAWDWEVDTEFGNYDYLMYTDYDMDHPEVVNELRNWGVWYTNTLGLDGFRIDAVKHIKYSFTRDWINHVRSATGKNMFAVAEFWKNDLGAIENYLQKTNWNHSVFDVPLHYNLYNASKSGGNYDMRNIFNGTVVQRHPSHAVTFVDNHDSQPEEALESFVEEWFKPLAYALTLTREQGYPSVFYGDYYGIPTHGVPAMRSKIDPILEARQKYAYGPQHDYLDHPDVIGWTREGDSSHPKSGLATLITDGPGGSKRMYAGLKNAGETWYDITGNRSDTVKIGSDGWGEFHVNDGSVSIYVQK

SEQ ID NO: 27689 - protein, 483 aa, Synthetic construct
HHNGTNGTMMQYFEWYLPNDGNHWNRLNSDASNLKSKGITAVWIPPAWKGASQNDVGYGAYDLYDLGEFNQKGTVRTKYGTRSQLQAAVTSLKNNGIQVYGDVVMNHKGGADATEMVRAVEVNPNNRNQEVTGEYTIEAWTRFDFPGRGNTHSSFKWRWYHFDGVDWDQSRRLNNRIYKFRGKAWDWEVDTENGNYDYLMYADIDMDHPSVVNELRNWGVWYTNTLGLDGFRIDAVKHIKYSFTRDWINHVRSATGKNMFAVAEFWKNDLGAIENYLQKTNWNHSVFDVPLHYNLYNASKSGGNYDMRNIFNGTVVQRHPSHAVTFVDNHDSQPEEALESFVEEWFKPLAYALTLTREQGYPSVFYGDYYGIPTHGVPAMRSKIDPILEARQKYAYGPQHDYLDHPDVIGWTREGDSSHPKSGLATLITDGPGGSKRMYAGLKNAGETWYDITGNRSDTVKIGSDGWGEFHVNDGSVSIYVQK

SEQ ID NO: 27690 - protein, 483 aa, Bacillus sp.
HHNGTNGTMMQYFEWYLPNDGNHWNRLNSDASNLKSKGITAVWIPPAWKATSQNDVGYGAYDLYDLGEFNQKGTVRTKYGTRSQLQAAVTSLKNNGIQVYGDVVMNHKGGADATEMVRAVEVNPNNRNQEVTGEYTIEAWTRFDFPGRGNTHSSFKWRWYHFDGVDWDQSRNVNNRIYKFRGKAWDWEVDTEFGNYDYLMYADYDMDHPEVVNELRNWGVWYTNTLGLDGFRIDAVKHIKYSFTRDWINHVRSATGKNMFAVAEFWKNDLGAIENYLQKTNWNHSVFDVPLHYNLYNASKSGGNYDMRNIFNGTVVQRHPSHAVTFVDNHDSQPEEALESFVEEWFKPLAYALTLTREQGYPSVFYGDYYGIPTHGVPAMRSKIDPILEARQKYAYGPQHDYLDHPDVIGWTREGDSSHPKSGLATLITDGPGGSKRMYAGLKNAGETWYDITGNRSDTVKIGSDGWGEFHVNDGSVSIYVQK

SEQ ID NO: 27691 - protein, 485 aa, Bacillus sp.
HHNGTNGTMMQYFEWYLPNDGNHWNRLNSDASNLKSKGITAVWIPPAWKGASQNDVGYGAYDLYDLGEFNQKGTVRTKYGTRSQLQAAVTSLKNNGIQVYGDVVMNHKGGADATEMVRAVEVNPNNRNQEVTGEYTIEAWTRFDFPGRGNTHSSFKWRWYHFDGVDWDQSRRLSNRIYKFRGHGKAWDWEVDTEFGNYDYLMYADYDMDHPEVVNELRNWGVWYTNTLGLDGFRIDAVKHIKYSFTRDWINHVRSATGKNMFAVAEFWKNDLGAIENYLQKTNWNHSVFDVPLHYNLYNASKSGGNYDMRNIFNGTVVQRHPSHAVTFVDNHDSQPEEALESFVEEWFKPLAYALTLTREQGYPSVFYGDYYGIPTHGVPAMRSKIDPILEARQKYAYGPQHDYLDHPDVIGWTREGDSSHPKSGLATLITDGPGGSKRMYAGLKNAGETWYDITGNRSDTVKIGSDGWGEFHVNDGSVSIYVQK

SEQ ID NO: 27692 - protein, 485 aa, Bacillus sp.
HHNGTNGTMMQYFEWYLPNDGNHWNRLNSDASNLKSKGITAVWIPPAWKGASQNDVGYGAYDLYDLGEFNQKGTVRTKYGTRSQLQAAVTSLKNNGIQVYGDVVMNHKGGADATEMVRAVEVNPNNRNQEVTGEYTIEAWTRFDFPGRGNTHSSFKWRWYHFDGVDWDQSRRFSNRIYKFRGHGKAWDWEVDTEFGNYDYLMYTDYDMDHPEVVNELRNWGVWYTNTLGLDGFRIDAVKHIKYSFTRDWINHVRSATGKNMFAVAEFWKNDLGAIENYLQKTNWNHSVFDVPLHYNLYNASKSGGNYDMRNIFNGTVVQRHPSHAVTFVDNHDSQPEEALESFVEEWFKPLAYALTLTREQGYPSVFYGDYYGIPTHGVPAMRSKIDPILEARQKYAYGPQHDYLDHQDVIGWTREGDSSHPKSGLATLITDGPGGSKRMYAGLKNAGETWYDITGNRSDTVKIGSDGWGEFHVNDGSVSIYVQK

SEQ ID NO: 27693 - protein, 483 aa, Bacillus sp.
HHNGTNGTMMQYFEWYLPNDGNHWNRLNSDASNLKSKGITAVWIPPAWKGASQNDVGYGAYDLYDLGEFNQKGTVRTKYGTRSQLQAAVTSLKNNGIQVYGDVVMNHKGGADATEMVRAVEVNPNNRNQEVTGEYTIEAWTRFDFPGRGNTHSSFKWRWYHFDGVDWDQSRRLNNRIYKFRGKAWDWEVDTEFGNYDYLMYADYDMDHPEVVNELRNWGVWYTNTLGLDGFRIDAVKHIKYSFTRDWINHVRSATGKNMFAVAEFWKNDLGAIENYLQKTNWNHSVFDVPLHYNLYNASKSGGNYDMRNIFNGTVVQRHPSHAVTFVDNHDSQPEEALESFVEEWFKPLAYALTLTREQGYPSVFYGDYYGIPTHGVPAMRSKIDPILEARQKYAYGPQHDYLDHPDVIGWTREGDSSHPPSGLATLITDGPGGSKRMYAGLKNAGETWYDITGNRSDTVKIGSDGWGEFHVNDGSVSIYVQK

SEQ ID NO: 27694 - protein, 483 aa, Bacillus sp.
HHNGTNGTMMQYFEWYLPNDGNHWNRLNSDASNLKSKGITAVWIPPAWKAASQNDVGYGAYDLYDLGEFNQKGTVRTKYGTRSQLQAAVTSLKNNGIQVYGDVVMNHKGGADATEMVRAVEVNPNNRNQEVTGEYTIEAWTRFDFPGRGNTHSSFKWRWYHFDGVDWDQSREFNNRIYKFRGKAWDWEVDTEFGNYDYLMYADYDMDHPEVVNELRNWGVWYTNTLGLDGFRIDAVKHIKYSFTRDWINHVRSATGKNMFAVAEFWKNDLGAIENYLQKTNWNHSVFDVPLHYNLYNASKSGGNYDMRNIFNGTVVQRHPSHAVTFVDNHDSQPEEALESFVEEWFKPLAYALTLTREQGYPSVFYGDYYGIPTHGVPAMRSKIDPILEARQKYAYGPQHDYLDHPDVIGWTREGDSSHPKSGLATLITDGPGGSKRMYAGLKNAGETWYDITGNRSDTVKIGSDGWGEFHVNDGSVSIYVQK

SEQ ID NO: 27695 - protein, 485 aa, Bacillus sp.
HHNGTNGTMMQYFEWYLPNDGNHWNRLNSDASNLKSKGITAVWIPPAWKGASQNDVGYGAYDLYDLGEFNQKGTVRTKYGTRSQLQAAVTSLKNNGIQVYGDVVMNHKGGADATEMVRAVEVNPNNRNQEVTGEYTIEAWTRFDFPGRGNTHSSFKWRWYHFDGVDWDQSRDTDNRIYKFRGHGKAWDWEVDTEFGNYDYLMYADYDMDHPEVVNELRNWGVWYTNTLGLDGFRIDAVKHIKYSFTRDWINHVRSATGKNMFAVAEFWKNDLGAIENYLQKTNWNHSVFDVPLHYNLYNASKSGGNYDMRNIFNGTVVQRHPSHAVTFVDNHDSQPEEALESFVEEWFKPLAYALTLTREQGYPSVFYGDYYGIPTHGVPAMRSKIDPILEARQKYAYGPQHDYLDHPDVIGWTREGDSSHPKSGLATLITDGPGGSKRMYAGLKNAGETWYDITGNRSDTVKIGSDGWGEFHVNDGSVSIYVQK

SEQ ID NO: 27696 - protein, 485 aa, Bacillus sp.
HHNGTNGTMMQYFEWYLPNDGNHWNRLNSDASNLKSKGITAVWIPPAWKGASQNDVGYGAYDLYDLGEFNQKGTVRTKYGTRSQLQAAVTSLKNNGIQVYGDVVMNHKGGADATEMVRAVEVNPNNRNQEVTGEYTIEAWTRFDFPGRGNTHSSFKWRWYHFDGVDWDQSRRLNNRIYKFRGHGKAWDWEVDTEFGNYDYLMYADYDMDHPEVVNELRNWGVWYTNTLGLDGFRIDAVKHIKYSFTRDWINHVRIATGKNMFAVAEFWKNDLGAIENYLQKTNWNHSVFDVPLHYNLYNASKSGGNYDMRNIFNGTVVQRHPSHAVTFVDNHDSQPEEALESFVEEWFKPLAYALTLTREQGYPSVFYGDYYGIPTHGVPAMRSKIDPILEARQKYAYGPQHDYLDHPDVIGWTREGDSSHPKSGLATLITDGPGGSKRMYAGLKNAGETWYDITGNRSDTVKIGSDGWGEFHVNDGSVSIYVQK

SEQ ID NO: 27697 - protein, 485 aa, Synthetic construct
HHNGTNGTMMQYFEWYLPNDGNHWNRLNSDASNLKSKGITAVWIPPAWKGASQNDVGYGAYDLYDLGEFNQKGTVRTKYGTRSQLQAAVTSLKNNGIQVYGDVVMNHKGGADATEMVRAVEVNPNNRNQEVTGEYTIEAWTRFDFPGRGNTHSSFKWRWYHFDGVDWDQSRRLNNRIYKFRGHGKAWDWEVDTENGNYDYLMYADIDMDHPEVVNELRNWGVWYTNTLGLDGFRIDAVKHIKYSFTRDWINHVRSATGKNMFAVAEFWKNDLGAIENYLQKTNWNHSVFDVPLHYNLYNASKSGGNYDMRNIFNGTVVQRHPSHAVTFVDNHDSQPEEALESFVEEWFKPLAYALTLTREQGYPSVFYGDYYGIPTHGVPAMRSKIDPILKARQKYAYGPQHDYLDHPDVIGWTREGDSSHPKSGLATLITDGPGGSKRMYAGLKNAGETWYDITGNRSDTVKIGSDGWGEFHVNDGSVSIYVQK

SEQ ID NO: 27698 - protein, 485 aa, Bacillus sp.
HHNGTNGTMMQYFEWYLPNDGNHWNRLNSDASNLKSKGITAVWIPPAWKGASQNDVGYGAYDLYDLGEFNQKGTVRTKYGTRSQLQAAVTSLKNNGIAVYGDVVMNHKGGADATEMVRAVEVNPNNRNQEVTGEYTIEAWTRFDFPGRGNTHSSFKWRWYHFDGVDWDQSRRLNNRIYKFRGHGKAWDWEVDTEFGNYDYLMYADYDMDHPEVVNELRNWGVWYTNTLGLDGFRIDAVKHIKYSFTRDWINHVRSATGKNMFAVAEFWKNDLGAIENYLQKTNWNHSVFDVPLHYNLYNASKSGGNYDMRNIFNGTVVQSHPMHAVTFVDNHDSQPEEALESFVEEWFKPLAYALTLTREQGYPSVFYGDYYGIPTHGVPAMRSKIDPILEARQKYAYGPQHDYLDHPDVIGWTREGDSSHPKSGLATLITDGPGGSKRMYAGLKNAGETWYDITGNRSDTVKIGSDGWGEFHVNDGSVSIYVQK

SEQ ID NO: 27699 - protein, 485 aa, Bacillus sp.
HHNGTNGTMMQYFEWYLPNDGNHWNRLNSDASNLKSKGITAVWIPPAWKGASQNDVGYGAYDLYDLGEFNQKGTVRTKYGTRSQLQAAVTSLKNNGIQVYGDVVMNHKGGADATEMVRAVEVNPNNRNQEVTGEYTIEAWTRFDFPGRGNTHSSFKWRWYHFDGVDWDQSRNINNRIYKFRGHGKAWDWEVDTEFGNYDYLMYADYDMDHPEVVNELRNWGVWYTNTLGLDGFRIDAVKHIKYSFTRDWINHVRSATGKNMFAVAEFWKNDLGAIENYLQKTNWNHSVFDVPLHYNLYNASKSGGNYDMRNIFNGTVVQRHPSHAVTFVDNHDSQPEEALESFVEEWFKPLAYALTLTREQGYPSVFYGDYYGIPTHGVPAMRSKIDPILEARQKYAYGPQHDYLDHPDVIGWTREGDSSHPKSGLATLITDGPGGSKRMYAGLKNAGETWYDITGNRSDTVKIGSDGWGEFHVNDGSVSIYVQK

SEQ ID NO: 27700 - protein, 485 aa, Bacillus sp.
HHNGTNGTMMQYFEWYLPNDGNHWNRLNSDASNLKSKGITAVWIPPAWKGASQNDVGYGAYDLYDLGEFNQKGTVRTKYGTRSQLQAAVTSLKNNGIQVYGDVVMNHKGGADATEMVRAVEVNPNNRNQEVTGEYTIEAWTRFDFPGRGNTHSSFKWRWYHFDGVDWDQSRDLDNRIYKFRGHGKAWDWEVDTEFGNYDYLMYADYDMDHPEVVNELRNWGVWYTNTLGLDGFRIDAVKHIKYSFTRDWINHVRSATGKNMFAVAEFWKNDLGAIENYLQKTNWNHSVFDVPLHYNLYNASKSGGNYDMRNIFNGTVVQRHPSHAVTFVDNHDSQPEEALESFVEEWFKPLAYALTLTREQGYPSVFYGDYYGIPTHGVPAMRSKIDPILEARQKYAYGPQHDYLDHPDVIGWTREGDSSHPKSGLATLITDGPGGSKRMYAGLKNAGETWYDITGNRSDTVKIGSDGWGEFHVNDGSVSIYVQK

SEQ ID NO: 27701 - protein, 485 aa, Bacillus sp.
HHNGTNGTMMQYFEWYLPNDGNHWNRLNSDASNLKSKGITAVWIPPAWKGASQNDVGYGAYDLYDLGEFNQKGTVRTKYGTRSQLQAAVTSLKNNGIQVYGDVVMNHKGGADATEMVRAVEVNPNNRNQEVTGEYTIEAWTRFDFPGRGNTHSSFKWRWYHFDGVDWDQSRRLNNRIYKFRGHGKAWDWEVDTEFGNYDYLMYADYDMDHPEVVNELRNWGVWYTNTLGLDGFRIDAVKHIKYSFTRDWINHVRSATGKNMFAVAEFWKNDLGAIENYLQKTNWNHSVFDVPLHYNLYNASKSGGNYDMRNIFNGTVVQRHPEHAVTFVDNHDSQPEEALESFVEEWFKPLAYALTLTREQGYPSVFYGDYYGIPTHGVPAMRSKIDPILEARQKYAYGPQHDYLDHPDVIGWTREGDSSHPKSGLATLITDGPGGSKRMYAGLKNAGETWYDITGNRSDTVKIGSDGWGEFHVNDGSVSIYVQK

SEQ ID NO: 27702 - protein, 483 aa, Synthetic construct
HHNGTNGTMMQYFEWYLPNDGNHWNRLNSDASNLKSKGITAVWIPPAWKGASQNDVGYGAYDLYDLGEFNQKGTVRTKYGTRSQLQAAVTSLKNNGIQVYGDVVMNHKGGADATEMVRAVEVNPNNRNQEVTGEYTIEAWTRFDFPGRGNTHSSFKWRWYHFDGVDWDQSRRLNNRIYKFRGKAWDWEVDTENGNYDYLMYADIDMDHPEVVNELRNWGVWYTNTLGLDGFRIDAVKHIKYSFQRDWINHVRSATGKNMFAVAEFWKNDLGAIENYLQKTNWNHSVFDVPLHYNLYNASKSGGNYDMRNIFNGTVVQRHPSHAVTFVDNHDSQPEEALESFVEEWFKPLAYALTLTREQGYPSVFYGDYYGIPTHGVPAMRSKIDPILEARQKYAYGPQHDYLDHPDVIGWTREGDSSHPKSGLATLITDGPGGSKRMYAGLKNAGETWYDITGNRSDTVKIGSDGWGEFHVNDGSVSIYVQK

SEQ ID NO: 27703 - protein, 483 aa, Bacillus sp.
HHNGTNGTMMQYFEWYLPNDGNHWNRLNSDASNLKSKGITAVWIPPAWKSASQNDVGYGAYDLYDLGEFNQKGTVRTKYGTRSQLQAAVTSLKNNGIQVYGDVVMNHKGGADATEMVRAVEVNPNNRNQEVTGEYTIEAWTRFDFPGRGNTHSSFKWRWYHFDGVDWDQSRNLQNRIYKFRGKAWDWEVDTEFGNYDYLMYADYDMDHPEVVNELRNWGVWYTNTLGLDGFRIDAVKHIKYSFTRDWINHVRSATGKNMFAVAEFWKNDLGAIENYLQKTNWNHSVFDVPLHYNLYNASKSGGNYDMRNIFNGTVVQRHPSHAVTFVDNHDSQPEEALESFVDEWFKPLAYALTLTREQGYPSVFYGDYYGIPTHGVPAMRSKIDPILEARQKYAYGPQHDYLDHPDVIGWTREGDSSHPKSGLATLITDGPGGSKRMYAGLKNAGETWYDITGNRSDTVKIGSDGWGEFHVNDGSVSIYVQK

SEQ ID NO: 27704 - protein, 485 aa, Synthetic construct
HHNGTNGTMMQYFEWYLPNDGNHWNRLNSDASNLKSKGITAVWIPPAWKGASQNDVGYGAYDLYDLGEFNQKGTVRTKYGTRSQLQAAVTSLKNNGIQVYGDVVMNHKGGADATEMVRAVEVNPNNRNQEVTGEHTIEAWTRFDFPGRGNTHSSFKWRWYHFDGVDWDQSRRLNNRIYKFRGHGKAWDWEVDTENGNYDYLMYADIDMDHPEVVNELRNWGVWYTNTLGLDGFRIDAVKHIKYSFTRDWINHVRSATGKNMFAVAEFWKNDLGAIENYLQKTNWNHSVFDVPLHYNLYNASKSGGNYDMRNIFNGTVVQRHPSHAVTFVDNHDSQPEEALESFVEEWFKPLAYALTLTREQGYPSVFYGDYYGIPTHGVPAMRSKIDPILEARQKYAYGPQHDYLDHPDVIGWTREGDSSHPKSGLATLITDGPGGSKRMYAGLKNAGETWYDITGNRSDTVKIGSDGWGEFHVNDGSVSIYVQK

SEQ ID NO: 27705 - protein, 485 aa, Synthetic construct
HHNGTNGTMMQYFEWYLPNDGNHWNRLNSDASNLKSKGITAVWIPPAWKGASQNDVGYGAYDLYDLGEFNQKGTVRTKYGTRSQLQAAVTSLKNNGIQVYGDVVMNHKGGADATEMVRAVEVNPNNRNQEVTGEYTIEAWTRFDFPGRGNTHSSFKWRWYHFDGVDWDQSRRLNNRIYKFRGHGKAWDWEVDTENGNYDYLMYADIDMDHPEVVNELRNWGVWYTNTLGLDGFRIDAVKHIKYSFTRDWINHVRSATGKNMFAVAEFWKNDLGAINNYLQKTNWNHSVFDVPLHYNLYNASKSGGNYDMRNIFNGTVVQRHPSHAVTFVDNHDSQPEEALESFVEEWFKPLAYALTLTREQGYPSVFYGDYYGIPTHGVPAMRSKIDPILEARQKYAYGPQHDYLDHPDVIGWTREGDSSHPKSGLATLITDGPGGSKRMYAGLKNAGETWYDITGNRSDTVKIGSDGWGEFHVNDGSVSIYVQK

SEQ ID NO: 27706 - protein, 485 aa, Synthetic construct
HHNGTNGTMMQYFEWYLPNDGNHWNRLNSDASNLKSKGITAVWIPPAWKGASQNDVGYGAYDLYDLGEFNQKGTVRTKYGTRSQLQAAVTSLKNNGIQVYGDVVMNHKGGADATEMVRAVEVNPNNRNQEVTGEYTIEAWTRFDFPGRGNTHSSFKWRWYHFDGVDWDQSRRLNNRIYKFRGHGKAWDWEVDTENGNYDYLMYADIDMDHPEVVNELRNWGVWYTNTLGLDGFRIDAVKHIKYSFTRDWINHVRSATGKNMFAVAEFWKNDLGAIENYLQKTNWNHSVFDVPLHYNLYNASKSGGNYDMRNIFNGTVVQRNPSHAVTFVDNHDSQPEEALESFVEEWFKPLAYALTLTREQGYPSVFYGDYYGIPTHGVPAMRSKIDPILEARQKYAYGPQHDYLDHPDVIGWTREGDSSHPKSGLATLITDGPGGSKRMYAGLKNAGETWYDITGNRSDTVKIGSDGWGEFHVNDGSVSIYVQK

SEQ ID NO: 27707 - protein, 485 aa, Bacillus sp.
HHNGTNGTMMQYFEWYLPNDGNHWNRLNSDASNLKSKGITAVWIPPAWKGASQNDVGYGAYDLYDLGEFNQKGTVRTKYGTRSQLQAAVTSLKNNGIQVYGDVVMNHKGGADATEMVRAVEVNPNNRNQEVTGEYTIEAWTRFDFPGRGNTHSSFKWRWYHFDGVDWDQSRLLNNRIYKFRGHGKAWDWEVDTEFGNYDYLMYADYDMDHPEVVNELRNWGVWYTNTLGLDGFRIDAVKHIKYSFTRDWINHVRSATGKNMFAVAEFWKNDLGAIENYLQKTNWNHSVFDVPLHYNLYNASKSGGNYDMRNIFNGTVVQRHPSHAVTFVDNHDSQPEEALESFVEEWFKPLAYALTLTREQGYPSVFYGDYYGIPTHGVPAMRSKIDPILEARQKYAYGPQHDYLDHPDVIGWTREGDSSHPKSGLATLITDGPGGSKRMYAGLKNAGETWYDITGNRSDTVKIGSDGWGEFHVNDGSVSIYVQK

SEQ ID NO: 27708 - protein, 485 aa, Synthetic construct
HHNGTNGTMMQYFEWYLPNDGNHWNRLNSDASNLKSKGITAVWIPPAWKGASQNDVGYGAYDLYDLGEFNQKGTVRTKYGTRSQLQAAVTSLKNNGIQVYGDVVMNHKGGADATEMVRAVEVNPNNRNQEVTGEYTIEAWTRFDFPGRGNTHSSFKWRWYHFDGVDWDQSRRLNSRIYKFRGHGKAWDWEVDTENGNYDYLMYADIDMDHPEVVNELRNWGVWYTNTLGLDGFRIDAVKHIKYSFTRDWINHVRSATGKNMFAVAEFWKNDLGAIENYLQKTNWNHSVFDVPLHYNLYNASKSGGNYDMRNIFNGTVVQRHPSHAVTFVDNHDSQPEEALESFVEEWFKPLAYALTLTREQGYPSVFYGDYYGIPTHGVPAMRSKIDPILEARQKYAYGPQHDYLDHPDVIGWTREGDSSHPKSGLATLITDGPGGSKRMYAGLKNAGETWYDITGNRSDTVKIGSDGWGEFHVNDGSVSIYVQK

SEQ ID NO: 27709 - protein, 485 aa, Bacillus sp.
HHNGTNGTMMQYFEWYLPNDGNHWNRLNSDASNLKSKGITAVWIPPAWKGASQNDVGYGAYDLYDLGEFNQKGTVRTKYGTRSQLQAAVTSLKNNGILVYGDVVMNHKGGADATEMVRAVEVNPNNRNQEVTGEYTIEAWTRFDFPGRGNTHSSFKWRWYHFDGVDWDQSRRLNNRIYKFRGHGKAWDWEVDTEFGNYDYLMYADYDMDHPEVVNELRNWGVWYTNTLGLDGFRIDAVKHIKYSFTRDWINHVRSATGKNMFAVAEFWKNDLGAIENYLQKTNWNHSVFDVPLHYNLYNASKSGGNYDMRNIFNGTVVQMHPMHAVTFVDNHDSQPEEALESFVEEWFKPLAYALTLTREQGYPSVFYGDYYGIPTHGVPAMRSKIDPILEARQKYAYGPQHDYLDHPDVIGWTREGDSSHPKSGLATLITDGPGGSKRMYAGLKNAGETWYDITGNRSDTVKIGSDGWGEFHVNDGSVSIYVQK

SEQ ID NO: 27710 - protein, 485 aa, Bacillus sp.
HHNGTNGTMMQYFEWYLPNDGNHWNRLNSDASNLKSKGITAVWIPPAWKASSQNDVGYGAYDLYDLGEFNQKGTVRTKYGTRSQLQAAVTSLKNNGIQVYGDVVMNHKGGADATEMVRAVEVNPNNRNQEVTGEYTIEAWTRFDFPGRGNTHSSFKWRWYHFDGVDWDQSRDLQNRIYKFRGHGKAWDWEVDTEFGNYDYLMYADYDMDHPEVVNELRNWGVWYTNTLGLDGFRIDAVKHIKYSFTRDWINHVRSATGKNMFAVAEFWKNDLGAIENYLQKTNWNHSVFDVPLHYNLYNASKSGGNYDMRNIFNGTVVQRHPSHAVTFVDNHDSQPEEALESFVEEWFKPLAYALTLTREQGYPSVFYGDYYGIPTHGVPAMRSKIDPILEARQKYAYGPQHDYLDHPDVIGWTREGDSSHPKSGLATLITDGPGGSKRMYAGLKNAGETWYDITGNRSDTVKIGSDGWGEFHVNDGSVSIYVQK

SEQ ID NO: 27711 - protein, 485 aa, Synthetic construct
HHNGTNGTMMQYFEWYLPNDGNHWNRLNSDASNLKSKGITAVWIPPAWKGASQNDVGYGAYDLYDLGEFNQKGTVRTKYGTRSQLQAAVTSLKNNGIQVYGDVVMNHKGGADATEMVRAVEVNPNNRNQEVTGEYTIEAWTRFDFPGRGNTHSSFKWRWYHFDGVDWDQSRRLNNRIYKFRGHGKAWDWEVDTENGNYDYLMYADIDMDHPEVVNELRNWGVWYTNTLGLDGFRIDAVKHIKYSFTKDWINHVRSATGKNMFAVAEFWKNDLGAIENYLQKTNWNHSVFDVPLHYNLYNASKSGGNYDMRNIFNGTVVQRHPSHAVTFVDNHDSQPEEALESFVEEWFKPLAYALTLTREQGYPSVFYGDYYGIPTHGVPAMRSKIDPILEARQKYAYGPQHDYLDHPDVIGWTREGDSSHPKSGLATLITDGPGGSKRMYAGLKNAGETWYDITGNRSDTVKIGSDGWGEFHVNDGSVSIYVQK

SEQ ID NO: 27712 - protein, 485 aa, Synthetic construct
HHNGTNGTMMQYFEWYLPNDGNQWNRLNSDASNLKSKGITAVWIPPAWKGASQNDVGYGAYDLYDLGEFNQKGTVRTKYGTRSQLQAAVTSLKNNGIQVYGDVVMNHKGGADATEMVRAVEVNPNNRNQEVTGEYTIEAWTRFDFPGRGNTHSSFKWRWYHFDGVDWDQSRRLNNRIYKFRGHGKAWDWEVDTENGNYDYLMYADIDMDHPEVVNELRNWGVWYTNTLGLDGFRIDAVKHIKYSFTRDWINHVRSATGKNMFAVAEFWKNDLGAIENYLQKTNWNHSVFDVPLHYNLYNASKSGGNYDMRNIFNGTVVQRHPSHAVTFVDNHDSQPEEALESFVEEWFKPLAYALTLTREQGYPSVFYGDYYGIPTHGVPAMRSKIDPILEARQKYAYGPQHDYLDHPDVIGWTREGDSSHPKSGLATLITDGPGGSKRMYAGLKNAGETWYDITGNRSDTVKIGSDGWGEFHVNDGSVSIYVQK

SEQ ID NO: 27713 - protein, 485 aa, Synthetic construct
HHNGTNGTMMQYFEWYLPNDGNHWNRLNSDASNLKSKGITAVWIPPAWKGASQNDVGYGAYDLYDLGEFNQKGTVRTKYGTRSQLQAAVTSLKNNGIQVYGDVVMNHKGGADATEMVRAVEVNPNNRNQEVTGEYTIEAWTRFDFPGRGNTHSSFKWRWYHFDGVDWDQSRRLNNRIYKFRGHGKAWDWEVSTENGNYDYLMYADIDMDHPEVVNELRNWGVWYTNTLGLDGFRIDAVKHIKYSFTRDWINHVRSATGKNMFAVAEFWKNDLGAIENYLQKTNWNHSVFDVPLHYNLYNASKSGGNYDMRNIFNGTVVQRHPSHAVTFVDNHDSQPEEALESFVEEWFKPLAYALTLTREQGYPSVFYGDYYGIPTHGVPAMRSKIDPILEARQKYAYGPQHDYLDHPDVIGWTREGDSSHPKSGLATLITDGPGGSKRMYAGLKNAGETWYDITGNRSDTVKIGSDGWGEFHVNDGSVSIYVQK

SEQ ID NO: 27714 - protein, 485 aa, Synthetic construct
HHNGTNGTMMQYFEWYLPNDGNHWNRLNSDASNLKSKGITAVWIPPAWKGASQNDVGYGAYDLYDLGEFNQKGTVRTKYGTRSQLQAAVTSLKNNGIQVYGDVVMNHKGGADATEMVRAVEVNPNNRNQEVTGEYTIEAWTRFDFPGRGNTHSSFKWRWYHFDGVDWDQSRRLNNRIYKFRGHGKAWDWEVDTENGNYDYLMYADIDMDHPEVVNELRNWGVWYTNTLGLDGFRIDAVKHIKYSFTRDWINHVRSATGKNMFAVAEFWKNDLGAIENYLQKTNWNMSVFDVPLHYNLYNASKSGGNYDMRNIFNGTVVQRHPSHAVTFVDNHDSQPEEALESFVEEWFKPLAYALTLTREQGYPSVFYGDYYGIPTHGVPAMRSKIDPILEARQKYAYGPQHDYLDHPDVIGWTREGDSSHPKSGLATLITDGPGGSKRMYAGLKNAGETWYDITGNRSDTVKIGSDGWGEFHVNDGSVSIYVQK

SEQ ID NO: 27715 - protein, 483 aa, Synthetic construct
HHNGTNGTMMQYFEWYLPNDGNHWNRLNSDASNLKSKGITAVWIPPAWKGASQNDVGYGAYDLYDLGEFNQKGTVRTKYGTRSQLQAAVTSLKNNGIQVYGDVVMNHKGGADATEMVRAVEVNPNNRNQEVTGEYTIEAWTRFDFPGRGNTHSSFKWRWYHFDGVDWDQSRRLNNRIYKFRGKAWDWEVDNEFGNYDYLMYADIDMDHPEVVNELRNWGVWYTNTLGLDGFRIDAVKHIKYSFTRDWINHVRSATGKNMFAVAEFWKNDLGAIENYLQKTNWNHSVFDVPLHYNLYNASKSGGNYDMRNIFNGTVVQRHPSHAVTFVDNHDSQPEEALESFVEEWFKPLAYALTLTREQGYPSVFYGDYYGIPTHGVPAMRSKIDPILEARQKYAYGPQHDYLDHPDVIGWTREGDSSHPKSGLATLITDGPGGSKRMYAGLKNAGETWYDITGNRSDTVKIGSDGWGEFHVNDGSVSIYVQK

SEQ ID NO: 27716 - protein, 485 aa, Bacillus sp.
HHNGTNGTMMQYFEWYLPNDGNHWNRLNSDASNLKSKGITAVWIPPAWKGASQNDVGYGAYDLYDLGEFNQKGTVRTKYGTRSQLQAAVTSLKNNGIQVYGDVVMNHKGGADATEMVRAVEVNPNNRNQEVTGEYTIEAWTRFDFPGRGNTHSSFKWRWYHFDGVDWDQSRRLNNRIYKFRGHGKAWDWEVDVEFGNYDYLMYADYDMDHPEVVNELRNWGVWYTNTLGLDGFRIDAVKHIKYSFTRDWINHVRSATGKNMFAVAEFWKNDLGAIENYLQKTNWNHSVFDVPLHYNLYNASKSGGNYDMRNIFNGTVVQRHPSHAVTFVDNHDSQPEEALESFVEEWFKPLAYALTLTREQGYPSVFYGDYYGIPTHGVPAMRSKIDPILEARQKYAYGPQHDYLDHPDVIGWTREGDSSHPKSGLATLITDGPGGSKRMYAGLKNAGETWYDITGNRSDTVKIGSDGWGEFHVNDGSVSIYVQK

SEQ ID NO: 27717 - protein, 485 aa, Bacillus sp.
HHNGTNGTMMQYFEWYLPNDGNHWNRLNSDASNLKSKGITAVWIPPAWKGASQNDVGYGAYDLYDLGEFNQKGTVRTKYGTRSQLQAAVTSLKNNGIQVYGDVVMNHKGGADATEMVRAVEVNPNNRNQEVTGEYTIEAWTRFDFPGRGNTHSSFKWRWYHFDGVDWDQSRRLNNRIYKFRVHGKAWDWEVDTEFGNYDYLMYADYDMDHPEVVNELRNWGVWYTNTLGLDGFRIDAVKHIKYSFTRDWINHVRSATGKNMFAVAEFWKNDLGAIENYLQKTNWNHSVFDVPLHYNLYNASKSGGNYDMRNIFNGTVVQRHPSHAVTFVDNHDSQPEEALESFVEEWFKPLAYALTLTREQGYPSVFYGDYYGIPTHGVPAMRSKIDPILEARQKYAYGPQHDYLDHPDVIGWTREGDSSHPKSGLATLITDGPGGSKRMYAGLKNAGETWYDITGNRSDTVKIGSDGWGEFHVNDGSVSIYVQK

SEQ ID NO: 27718 - protein, 485 aa, Bacillus sp.
HHNGTNGTMMQYFEWYLPNDGNHWNRLNSDASNLKSKGITAVWIPPAWKGASQNDVGYGAYDLYDLGEFNQKGTVRTKYGTRSQLQAAVTSLKNNGIQVYGDVVMNHKGGADATEMVRAVEVNPNNRNQEVTGEYTIEAWTRFDFPGRGNTHSSFKWRWYHFDGVDWDQSRRISNRIYKFRGHGKAWDWEVDTEFGNYDYLMYADYDMDHPEVVNELRNWGVWYTNTLGLDGFRIDAVKHIKYSFTRDWINHVRSATGKNMFAVAEFWKNDLGAIENYLQKTNWNHSVFDVPLHYNLYNASKSGGNYDMRNIFNGTVVQRHPSHAVTFVDNHDSQPEEALESFVEEWFKPLAYALTLTREQGYPSVFYGDYYGIPTHGVPAMRSKIDPILEARQKYAYGPQHDYLDHPDVIGWTREGDSSHPKSGLATLITDGPGGSKRMYAGLKNAGETWYDITGNRSDTVKIGSDGWGEFHVNDGSVSIYVQK

SEQ ID NO: 27719 - protein, 485 aa, Bacillus sp.
HHNGTNGTMMQYFEWYLPNDGNHWNRLNSDASNLKSKGITAVWIPPAWKGASQNDVGYGAYDLYDLGEFNQKGTVRTKYGTRSQLQAAVTSLKNNGIQVYGDVVMNHKGGADATEMVRAVEVNPNNRNQEVTGEYTIEAWTRFDFPGRGNTHSSFKWRWYHFDGVDWDQSRRLNNRIYKFRGHGKAWDWEVDTEFGNYDYLMYADYDMDHPEVVNELRNWGVWYTNTLGLDGFRIDAVKHIKYSFTRDWINHVRSATGKNMFAVAEFWKNDLGAIENYLQKTNWNHSVFDVPLHYNLYNASKSGGNYDMRLIFNGTVVQRHPSHAVTFVDNHDSQPEEALESFVEEWFKPLAYALTLTREQGYPSVFYGDYYGIPTHGVPAMRSKIDPILEARQKYAYGPQHDYLDHPDVIGWTREGDSSHPKSGLATLITDGPGGSKRMYAGLKNAGETWYDITGNRSDTVKIGSDGWGEFHVNDGSVSIYVQK

SEQ ID NO: 27720 - protein, 485 aa, Bacillus sp.
HHNGTNGTMMQYFEWYLPNDGNHWNRLNSDASNLKSKGITAVWIPPAWKGASQNDVGYGAYDLYDLGEFNQKGTVRTKYGTRSQLQAAVTSLKNNGIQVYGDVVMNHKGGADATEMVRAVEVNPNNRNQEVTGEYTIEAWTRFDFPGRGNTHSSFKWRWYHFDGVDWDQSRETSNRIYKFRGHGKAWDWEVDTEFGNYDYLMYADYDMDHPEVVNELRNWGVWYTNTLGLDGFRIDAVKHIKYSFTRDWINHVRSATGKNMFAVAEFWKNDLGAIENYLQKTNWNHSVFDVPLHYNLYNASKSGGNYDMRNIFNGTVVQRHPSHAVTFVDNHDSQPEEALESFVEEWFKPLAYALTLTREQGYPSVFYGDYYGIPTHGVPAMRSKIDPILEARQKYAYGPQHDYLDHPDVIGWTREGDSSHPKSGLATLITDGPGGSKRMYAGLKNAGETWYDITGNRSDTVKIGSDGWGEFHVNDGSVSIYVQK

SEQ ID NO: 27721 - protein, 485 aa, Synthetic construct
HHNGTNGTMMQYFEWYLPNDGNHWNRLNSDASNLKSKGITAVWIPPAWKGASQNDVGYGAYDLYDLGEFNQKGTVRTKYGTRSQLQAAVTSLKNNGIQVYGDVVMNHKGGADATEMVRAVEVNPNNRNQEVTGEYTIEAWTRFDFPGRGNTHSSFKWRWYHFDGVDWDQSRRLNNRIYKFRGHGKAWDWEVDTENGNYDYLMYADIDMDHPEVVNELRNWGVWYTNTLGLDGFRIDAVKHIKYSFTRDWINHVRSATGKNMFAVAEFWKNDLGAIENYLQKTNWNHSVFDVPLHYNLYNASKSGGNYDMRNIFNGTVVQRHPSHAVTFVDNHDSQPEEALESFVEEWFKPLAYALTLTREQGYPSVFYGDYYGIPTHGVPAMRSKIDPILEARQKYAYGPQHDYLDNPDVIGWTREGDSSHPKSGLATLITDGPGGSKRMYAGLKNAGETWYDITGNRSDTVKIGSDGWGEFHVNDGSVSIYVQK

SEQ ID NO: 27722 - protein, 485 aa, Bacillus sp.
HHNGTNGTMMQYFEWYLPNDGNHWNRLNSDASNLKSKGITAVWIPPAWKGVSQNDVGYGAYDLYDLGEFNQKGTVRTKYGTRSQLQAAVTSLKNNGIQVYGDVVMNHKGGADATEMVRAVEVNPNNRNQEVTGEYTIEAWTRFDFPGRGNTHSSFKWRWYHFDGVDWDQSRDLNNRIYKFRGHGKAWDWEVDTEFGNYDYLMYADYDMDHPEVVNELRNWGVWYTNTLGLDGFRIDAVKHIKYSFTRDWINHVRSATGKNMFAVAEFWKNDLGAIENYLQKTNWNHSVFDVPLHYNLYNASKSGGNYDMRNIFNGTVVQRHPSHAVTFVDNHDSQPEEALESFVEEWFKPLAYALTLTREQGYPSVFYGDYYGIPTHGVPAMRSKIDPILEARQKYAYGPQHDYLDHPDVIGWTREGDSSHPKSGLATLITDGPGGSKRMYAGLKNAGETWYDITGNRSDTVKIGSDGWGEFHVNDGSVSIYVQK

SEQ ID NO: 27723 - protein, 485 aa, Bacillus sp.
HHNGTNGTMMQYFEWYLPNDGNHWNRLNSDASNLKSKGITAVWIPPAWKGVSQNDVGYGAYDLYDLGEFNQKGTVRTKYGTRSQLQAAVTSLKNNGIQVYGDVVMNHKGGADATEMVRAVEVNPNNRNQEVTGEYTIEAWTRFDFPGRGNTHSSFKWRWYHFDGVDWDQSRRLNNRIYKFRGHGKAWDWEVDTEFGNYDYLMYADYDMDHPEVVNELRNWGVWYTNTLGLDGFRIDAVKHIKYSFTRDWINHVRSATGKNMFAVAEFWKNDLGAIENYLQKTNWNHSVFDVPLHYNLYNASKSGGNYDMRNIFNGTVVQRHPSHAVTFVDNHDSQPEEALESFVEEWFKPLAYALTLTREQGYPSVFYGDYYGIPTHGVPAMRSKIDPILEARQKYAYGPQHDYLDHPDVIGWTREGDSSHPKSGLATLITDGPGGSKRMYAGLKNAGETWYDITGNRSDTVKIGSDGWGEFHVNDGSVSIYVQK

SEQ ID NO: 27724 - protein, 483 aa, Bacillus sp.
HHNGTNGTMMQYFEWYLPNDGNHWNRLNSDASNLKSKGITAVWIPPAWKGASQNDVGYGAYDLYDLGEFNQKGTVRTKYGTRSQLQAAVTSLKNNGIQVYGDVVMNHKGGADATEMVRAVEVNPNNRNQEVTGEYTIEAWTRFDFPGRGNTHSSFKWRWYHFDGVDWDQSRRLNNRIYKFRGKAWDWEVDTEFGNYDYLMYADYDMDHPEVVNELRNWGVWYTNTLGLDGFRIDAVKHIKYSFTRDWINHVRSATGKNMFAVAEFWKNDLGAIENYLQKTNWNHSVFDVPLHYNLYNASKSGGNYDMRNIFNGTVVQAHPNHAVTFVDNHDSQPEEALESFVEEWFKPLAYALTLTREQGYPSVFYGDYYGIPTHGVPAMRSKIDPILEARQKYAYGPQHDYLDHPDVIGWTREGDSSHPKSGLATLITDGPGGSKRMYAGLKNAGETWYDITGNRSDTVKIGSDGWGEFHVNDGSVSIYVQK

SEQ ID NO: 27725 - protein, 485 aa, Synthetic construct
HHNGTNGTMMQYFEWYLPNDGNHWNRLNSDASNLKSKGITAVWIPPAWKGASQNDVGYGAYDLYDLGEFNQKGTVRTKYGTRSQLQAAVTSLKNNGIQVYGDVVMNHKGGADATEMVRAVEVNPNNRNQEVTGEYTIEAWTRFDFPGRGNTHSSFKWRWYHFDGVDWDQSRRLNNRIYKFRGHGKAWDWEVDTENGNYDYLMYADIDMDHPEVVNELRNWGVWYTNTLGLDGFRIDAVKHIKYSFTRDWINHVRSATGKNMFAVAEFWKNDLGAIENYLQKTNWNHSVFDVPLHYNLYNASKSGGNYDMRNIFNGTVVQRHPSHAVTFVDNHDSQPEEALESFVEEWFKPLAYALTLTREQGYPSVFYGDYYGIPTHGVPAMRSKIDPILEARQKYAYGPQHDYLDHPDVIGWTREGDSSHPKSGLATLITDGPGGSKRMYAGLKNAGETWYDITGNRSDTVKIGSAGWGEFHVNDGSVSIYVQK

SEQ ID NO: 27726 - protein, 483 aa, Bacillus sp.
HHNGTNGTMMQYFEWYLPNDGNHWNRLNSDASNLKSKGITAVWIPPAWKGASQNDVGYGAYDLYDLGEFNQKGTVRTKYGTRSQLQAAVTSLKNNGIQVYGDVVMNHKGGADATEMVRAVEVNPNNRNQEVTGEYTIEAWTRFDFPGRGNTHSSFKWRWYHFDGVDWDQSRRLNNRIYKFRGKAWDWEVDTENGNYDYLMYADIDYDHPEVVNELRMWGVWYTNTLGLDGFRIDAVKHIKYSFTRDWINHVRSATGKNMFAVAEFWKNDLGAIENYLQKTNWNHSVFDVPLHYNLYNASKSGGNYDMRNIFNGTVVQRHPSHAVTFVDNHDSQPEEALESFVEEWFKPLAYALTLTREQGYPSVFYGDYYGIPTHGVPAMRSKIDPILEARQKYAYGPQHDYLDHPDVIGWTREGDSSHPKSGLATLITDGPGGSKRMYAGLKNAGETWYDITGNRSDTVKIGSDGWGEFHVNDGSVSIYVQK

SEQ ID NO: 27727 - protein, 483 aa, Bacillus sp.
HHNGTNGTMMQYFEWYLPNDGNHWNRLNSDASNLKSKGITAVWIPPAWKAASQNDVGYGAYDLYDLGEFNQKGTVRTKYGTRSQLQAAVTSLKNNGIQVYGDVVMNHKGGADATEMVRAVEVNPNNRNQEVTGEYTIEAWTRFDFPGRGNTHSSFKWRWYHFDGVDWDQSRDLQNRIYKFRGKAWDWEVDTEFGNYDYLMYADYDMDHPEVVNELRNWGVWYTNTLGLDGFRIDAVKHIKYSFTRDWINHVRSATGKNMFAVAEFWKNDLGAIENYLQKTNWNHSVFDVPLHYNLYNASKSGGNYDMRNIFNGTVVQAHPNHAVTFVDNHDSQPEEALESFVEEWFKPLAYALTLTREQGYPSVFYGDYYGIPTHGVPAMRSKIDPILEARQKYAYGPQHDYLDHPDVIGWTREGDSSHPKSGLATLITDGPGGSKRMYAGLKNAGETWYDITGNRSDTVKIGSDGWGEFHVNDGSVSIYVQK

SEQ ID NO: 27728 - protein, 483 aa, Synthetic construct
HHNGTNGTMMQYFEWYLPNDGNHWNRLNSDASNLKSKGITAVWIPPAWKGASQNDVGYGAYDLYDLGEFNQKGTVRTKYGTRSQLQAAVTSLKNNGIQVYGDVVMNHKGGADITEMVRAVEVNPNNRNQEVTGEYTIEAWTRFDFPGRGNTHSSFKWRWYHFDGVDWDQSRRLNNRIYKFRGKAWDWEVDTENGNYDYLMYADIDMDHPEVVNELRNWGVWYTNTLGLDGFRIDAVKHIKYSFTRDWINHVRSATGKNMFAVAEFWKNDLGAIENYLQKTNWNHSVFDVPLHYNLYNASKSGGNYDMRNIFNGTVVQRHPSHAVTFVDNHDSQPEEALESFVEEWFKPLAYALTLTREQGYPSVFYGDYYGIPTHGVPAMRSKIDPILEARQKYAYGPQHDYLDHPDVIGWTREGDSSHPKSGLATLITDGPGGSKRMYAGLKNAGETWYDITGNRSDTVKIGSDGWGEFHVNDGSVSIYVQK

SEQ ID NO: 27729 - protein, 485 aa, Bacillus sp.
HHNGTNGTMMQYFEWYLPNDGNHWNRLNSDASNLKSKGITAVWIPPAWKAVSQNDVGYGAYDLYDLGEFNQKGTVRTKYGTRSQLQAAVTSLKNNGIQVYGDVVMNHKGGADATEMVRAVEVNPNNRNQEVTGEYTIEAWTRFDFPGRGNTHSSFKWRWYHFDGVDWDQSRRFDNRIYKFRGHGKAWDWEVDTEFGNYDYLMYADYDMDHPEVVNELRNWGVWYTNTLGLDGFRIDAVKHIKYSFTRDWINHVRSATGKNMFAVAEFWKNDLGAIENYLQKTNWNHSVFDVPLHYNLYNASKSGGNYDMRNIFNGTVVQRHPSHAVTFVDNHDSQPEEALESFVEEWFKPLAYALTLTREQGYPSVFYGDYYGIPTHGVPAMRSKIDPILEARQKYAYGPQHDYLDHPDVIGWTREGDSSHPKSGLATLITDGPGGSKRMYAGLKNAGETWYDITGNRSDTVKIGSDGWGEFHVNDGSVSIYVQK

SEQ ID NO: 27730 - protein, 483 aa, Bacillus sp.
HHNGTNGTMMQYFEWYLPNDGNHWNRLNSDASNLKSKGITAVWIPPAWKGASQNDVGYGAYDLYDLGEFNQKGTVRTKYGTRSQLQAAVTSLKNNGIQVYGDVVMNHKGGADATEMVRAVEVNPNNRNQEVTGEYTIEAWTRFDFPGRGNTHSSFKWRWYHFDGVDWDQSRRLLNRIYKFRGKAWDWEVDTEFGNYDYLMYADYDMDHPEVVNELRNWGVWYTNTLGLDGFRIDAVKHIKYSFTRDWINHVRSATGKNMFAVAEFWKNDLGAIENYLQKTNWNHSVFDVPLHYNLYNASKSGGNYDMRNIFNGTVVQRHPSHAVTFVDNHDSQPEEALESFVEEWFKPLAYALTLTREQGYPSVFYGDYYGIPTHGVPAMRSKIDPILEARQKYAYGPQHDYLDHPDVIGWTREGDSSHPKSGLATLITDGPGGSKRMYAGLKNAGETWYDITGNRSDTVKIGSDGWGEFHVNDGSVSIYVQK

SEQ ID NO: 27731 - protein, 483 aa, Bacillus sp.
HHNGTNGTMMQYFEWYLPNDGNHWNRLNSDASNLKSKGITAVWIPPAWKAASQNDVGYGAYDLYDLGEFNQKGTVRTKYGTRSQLQAAVTSLKNNGIQVYGDVVMNHKGGADATEMVRAVEVNPNNRNQEVTGEYTIEAWTRFDFPGRGNTHSSFKWRWYHFDGVDWDQSRQLQNRIYKFRGKAWDWEVDTEFGNYDYLMYTDYDMDHPEVVNELRNWGVWYTNTLGLDGFRIDAVKHIKYSFTRDWINHVRSATGKNMFAVAEFWKNDLGAIENYLQKTNWNHSVFDVPLHYNLYNASKSGGNYDMRNIFNGTVVQRHPSHAVTFVDNHDSQPEEALESFVEEWFKPLAYALTLTREQGYPSVFYGDYYGIPTHGVPAMRSKIDPILEARQKYAYGPQHDYLDHPDVIGWTREGDSSHPKSGLATLITDGPGGSKRMYAGLKNAGETWYDITGNRSDTVKIGSDGWGEFHVNDGSVSIYVQK

SEQ ID NO: 27732 - protein, 485 aa, Bacillus sp.
HHNGTNGTMMQYFEWYLPNDGNHWNRLNSDASNLKSKGITAVWIPPAWKGASQNDVGYGAYDLYDLGEFNQKGTVRTKYGTRSQLQAAVTSLKNNGIQVYGDVVMNHKGGADATEMVRAVEVNPNNRNQEVTGEYTIEAWTRFDFPGRGNTHSSFKWRWYHFDGVDWDQSRRLNNRIYKFRGHGKAWDWEVDTEFGNYDYLMYADYDMDHPEVVNELRNWGVWYTNTLGLDGFRIDAVKHIKYSFTRDWINHVRSATGKNMFAVAEFWKNDLGAIENYLQKTNWNHSVFDVPLHYNLYNASKSGGNYDMRNIFNGTVVQAHPNHAVTFVDNHDSQPEEALESFVEEWFKPLAYALTLTREQGYPSVFYGDYYGIPTHGVPAMRSKIDPILEARQKYAYGPQHDYLDHPDVIGWTREGDSSHPKSGLATLITDGPGGSKRMYAGLKNAGETWYDITGNRSDTVKIGSDGWGEFHVNDGSVSIYVQK

SEQ ID NO: 27733 - protein, 485 aa, Bacillus sp.
HHNGTNGTMMQYFEWYLPNDGNHWNRLNSDASNLKSKGITAVWIPPAWKGASQNDVGYGAYDLYDLGEFNQKGTVRTKYGTRSQLQAAVTSLKNNGIQVYGDVVMNHKGGADATEMVRAVEVNPNNRNQEVTGEYTIEAWTRFDFPGRGNTHSSFKWRWYHFDGVDWDQSRRLNNRIYKFRGHGKAWDWEVDTEFGNYDYLMYADYDMDHPEVVNELRSWGVWYTNTLGLDGFRIDAVKHIKYSFTRDWINHVRSATGKNMFAVAEFWKNDLGAIENYLQKTNWNHSVFDVPLHYNLYNASKSGGNYDMRNIFNGTVVQRHPSHAVTFVDNHDSQPEEALESFVEEWFKPLAYALTLTREQGYPSVFYGDYYGIPTHGVPAMRSKIDPILEARQKYAYGPQHDYLDHPDVIGWTREGDSSHPKSGLATLITDGPGGSKRMYAGLKNAGETWYDITGNRSDTVKIGSDGWGEFHVNDGSVSIYVQK

SEQ ID NO: 27734 - protein, 483 aa, Bacillus sp.
HHNGTNGTMMQYFEWYLPNDGNHWNRLNSDASNLKSKGITAVWIPPAWKGASQNDVGYGAYDLYDLGEFNQKGTVRTKYGTRSQLQAAVTSLKNNGIQVYGDVVMNHKGGADATEMVRAVEVNPNNRNQEVTGEYTIEAWTRFDFPGRGNTHSSFKWRWYHFDGVDWDQSRRLNNRIYKFRGKAWDWEVDTEFGNYDYLMYADYDMDHPEVVNELRNWGVWYTNTLGLDGFRIDAVKHIKYSFTRDWINHVRSATGKNMFAVAEFWKNDLGAIENYLQKTNWNHSVFDVPLHYNLYNASKSGGNYDMRNIFNGTVVQSHPMQAVTFVDNHDSQPEEALESFVEEWFKPLAYALTLTREQGYPSVFYGDYYGIPTHGVPAMRSKIDPILEARQKYAYGPQHDYLDHPDVIGWTREGDSSHPKSGLATLITDGPGGSKRMYAGLKNAGETWYDITGNRSDTVKIGSDGWGEFHVNDGSVSIYVQK

SEQ ID NO: 27735 - protein, 483 aa, Bacillus sp.
HHNGTNGTMMQYFEWYLPNDGNHWNRLNSDASNLKSKGITAVWIPPAWKATSQNDVGYGAYDLYDLGEFNQKGTVRTKYGTRSQLQAAVTSLKNNGIQVYGDVVMNHKGGADATEMVRAVEVNPNNRNQEVTGEYTIEAWTRFDFPGRGNTHSSFKWRWYHFDGVDWDQSRELTNRIYKFRGKAWDWEVDTEFGNYDYLMYADYDMDHPEVVNELRNWGVWYTNTLGLDGFRIDAVKHIKYSFTRDWINHVRSATGKNMFAVAEFWKNDLGAIENYLQKTNWNHSVFDVPLHYNLYNASKSGGNYDMRNIFNGTVVQRHPSHAVTFVDNHDSQPEEALESFVEEWFKPLAYALTLTREQGYPSVFYGDYYGIPTHGVPAMRSKIDPILEARQKYAYGPQHDYLDHPDVIGWTREGDSSHPKSGLATLITDGPGGSKRMYAGLKNAGETWYDITGNRSDTVKIGSDGWGEFHVNDGSVSIYVQK

SEQ ID NO: 27736 - protein, 485 aa, Synthetic construct
HHNGTNGTIMQYFEWYLPNDGNHWNRLNSDASNLKSKGITAVWIPPAWKGASQNDVGYGAYDLYDLGEFNQKGTVRTKYGTRSQLQAAVTSLKNNGIQVYGDVVMNHKGGADATEMVRAVEVNPNNRNQEVTGEYTIEAWTRFDFPGRGNTHSSFKWRWYHFDGVDWDQSRRLNNRIYKFRGHGKAWDWEVDTENGNYDYLMYADIDMDHPEVVNELRNWGVWYTNTLGLDGFRIDAVKHIKYSFTRDWINHVRSATGKNMFAVAEFWKNDLGAIENYLQKTNWNHSVFDVPLHYNLYNASKSGGNYDMRNIFNGTVVQRHPSHAVTFVDNHDSQPEEALESFVEEWFKPLAYALTLTREQGYPSVFYGDYYGIPTHGVPAMRSKIDPILEARQKYAYGPQHDYLDHPDVIGWTREGDSSHPKSGLATLITDGPGGSKRMYAGLKNAGETWYDITGNRSDTVKIGSDGWGEFHVNDGSVSIYVQK

SEQ ID NO: 27737 - protein, 483 aa, Bacillus sp.
HHNGTNGTMMQYFEWYLPNDGNHWNRLNSDASNLKSKGITAVWIPPAWKGASQNDVGYGAYDLYDLGEFNQKGTVRTKYGTRSQLQAAVTSLKNNGIQVYGDVVMNHKGGADATEMVRAVEVNPNNRNQEVTGEYTIEAWTRFDFPGRGNTHSSFKWRWYHFDGVDWDQSRDLSNRIYKFRGKAWDWEVDTEFGNYDYLMYADYDMDHPEVVNELRNWGVWYTNTLGLDGFRIDAVKHIKYSFTRDWINHVRSATGKNMFAVAEFWKNDLGAIENYLQKTNWNHSVFDVPLHYNLYNASKSGGNYDMRNIFNGTVVQRHPSHAVTFVDNHDSQPEEALESFVEEWFKPLAYALTLTREQGYPSVFYGDYYGIPTHGVPAMRSKIDPILEARQKYAYGPQHDYLDHPDVIGWTREGDSSHPKSGLATLITDGPGGSKRMYAGLKNAGETWYDITGNRSDTVKIGSDGWGEFHVNDGSVSIYVQK

SEQ ID NO: 27738 - protein, 483 aa, Bacillus sp.
HHNGTNGTMMQYFEWYLPNDGNHWNRLNSDASNLKSKGITAVWIPPAWKAASQNDVGYGAYDLYDLGEFNQKGTVRTKYGTRSQLQAAVTSLKNNGIQVYGDVVMNHKGGADATEMVRAVEVNPNNRNQEVTGEYTIEAWTRFDFPGRGNTHSSFKWRWYHFDGVDWDQSRQVNNRIYKFRGKAWDWEVDTEFGNYDYLMYADYDMDHPEVVNELRNWGVWYTNTLGLDGFRIDAVKHIKYSFTRDWINHVRSATGKNMFAVAEFWKNDLGAIENYLQKTNWNHSVFDVPLHYNLYNASKSGGNYDMRNIFNGTVVQRHPSHAVTFVDNHDSQPEEALESFVEEWFKPLAYALTLTREQGYPSVFYGDYYGIPTHGVPAMRSKIDPILEARQKYAYGPQHDYLDHPDVIGWTREGDSSHPKSGLATLITDGPGGSKRMYAGLKNAGETWYDITGNRSDTVKIGSDGWGEFHVNDGSVSIYVQK

SEQ ID NO: 27739 - protein, 485 aa, Bacillus sp.
HHNGTNGTMMQYFEWYLPNDGNHWNRLNSDASNLKSKGITAVWIPPAWKGASQNDVGYGAYDLYDLGEFNQKGTVRTKYGTRSQLQAAVTSLKNNGIQVYGDVVMNHKGGADATEMVRAVEVNPNNRNQEVTGEYTIEAWTRFDFPGRGNTHSSFKWRWYHFDGVDWDQSRRLNNRIYKFRGHGKAWDWEVDTEFGNYDYLMYADYDMDHPEVVNELRNWGVWYTNTLGLDGFRIDAVKHIKYSFTRDWINHVRSATGKNMFAVAEFWKNDLGAIENYLQKTNWNHSVFDVPLHYNLYNASKSGGNYDMRNIFNGTVVQRHPWHAVTFVDNHDSQPEEALESFVEEWFKPLAYALTLTREQGYPSVFYGDYYGIPTHGVPAMRSKIDPILEARQKYAYGPQHDYLDHPDVIGWTREGDSSHPKSGLATLITDGPGGSKRMYAGLKNAGETWYDITGNRSDTVKIGSDGWGEFHVNDGSVSIYVQK

SEQ ID NO: 27740 - protein, 485 aa, Bacillus sp.
HHNGTNGTMMQYFEWYLPNDGNHWNRLNSDASNLKSKGITAVWIPPAWKGASQNDVGYGAYDLYDLGEFNQKGTVRTKYGTRSQLQAAVTSLKNNGIQVYGDVVMNHKGGADATEMVRAVEVNPNNRNQEVTGEYTIEAWTRFDFPGRGNTHSSFKWRWYHFDGVDWDQSRMLNNRIYKFRGHGKAWDWEVDTEFGNYDYLMYADYDMDHPEVVNELRNWGVWYTNTLGLDGFRIDAVKHIKYSFTRDWINHVRSATGKNMFAVAEFWKNDLGAIENYLQKTNWNHSVFDVPLHYNLYNASKSGGNYDMRNIFNGTVVQRHPSHAVTFVDNHDSQPEEALESFVEEWFKPLAYALTLTREQGYPSVFYGDYYGIPTHGVPAMRSKIDPILEARQKYAYGPQHDYLDHPDVIGWTREGDSSHPKSGLATLITDGPGGSKRMYAGLKNAGETWYDITGNRSDTVKIGSDGWGEFHVNDGSVSIYVQK

SEQ ID NO: 27741 - protein, 485 aa, Synthetic construct
HHNGTNGTMMQYFEWYLPNDGNHWNRLNSDASNLKSKGITAVWIPPAWKGASQNDVGYGAYDLYDLGEFNQKGTVRTKYGTRSQLQAAVTSLKNNGIQVYGDVVMNHKGGADATEMVRAVEVNPNNRNQEVTGEYTIEAWTRFDFPGRGNTHSSFKWRWYHFDGVDWDQSRRLNNRIYKFRGHGKAWDWEVDTENGNYDYLMYADIDMDHPEVVNELRNWGVWYTNTLGLDGFRIDAVKHIKYSFTRDWINHVRSATGKNMFAVAEFWKNDLGAIENYLQKTNWNHSVFDVPLHYNLYNASKSGGNYDMRNIFNGTVVQRHPSHAVTFVDNHDSQPEEALESFVEEWFKPLAYALTLTRSQGYPSVFYGDYYGIPTHGVPAMRSKIDPILEARQKYAYGPQHDYLDHPDVIGWTREGDSSHPKSGLATLITDGPGGSKRMYAGLKNAGETWYDITGNRSDTVKIGSDGWGEFHVNDGSVSIYVQK

SEQ ID NO: 27742 - protein, 483 aa, Bacillus sp.
HHNGTNGTMMQYFEWYLPNDGNHWNRLNSDASNLKSKGITAVWIPPAWKAASQNDVGYGAYDLYDLGEFNQKGTVRTKYGTRSQLQAAVTSLKNNGIQVYGDVVMNHKGGADATEMVRAVEVNPNNRNQEVTGEYTIEAWTRFDFPGRGNTHSSFKWRWYHFDGVDWDQSRQLTNRIYKFRGKAWDWEVDTEFGNYDYLMYADYDMDHPEVVNELRNWGVWYTNTLGLDGFRIDAVKHIKYSFTRDWINHVRSATGKNMFAVAEFWKNDLGAIENYLQKTNWNHSVFDVPLHYNLYNASKSGGNYDMRNIFNGTVVQRHPSHAVTFVDNHDSQPEEALESFVEEWFKPLAYALTLTREQGYPSVFYGDYYGIPTHGVPAMRSKIDPILEARQKYAYGPQHDYLDHPDVIGWTREGDSSHPKSGLATLITDGPGGSKRMYAGLKNAGETWYDITGNRSDTVKIGSDGWGEFHVNDGSVSIYVQK

SEQ ID NO: 27743 - protein, 483 aa, Bacillus sp.
HHNGTNGTMMQYFEWYLPNDGNHWNRLNSDASNLKSKGITAVWIPPAWKAASQNDVGYGAYDLYDLGEFNQKGTVRTKYGTRSQLQAAVTSLKNNGIQVYGDVVMNHKGGADATEMVRAVEVNPNNRNQEVTGEYTIEAWTRFDFPGRGNTHSSFKWRWYHFDGVDWDQSRQLNNRIYKFRGKAWDWEVDTEFGNYDYLMYADYDMDHPEVVNELRNWGVWYTNTLGLDGFRIDAVKHIKYSFTRDWINHVRSATGKNMFAVAEFWKNDLGAIENYLQKTNWNHSVFDVPLHYNLYNASKSGGNYDMRNIFNGTVVQRHPSHAVTFVDNHDSQPEEALESFVEEWFKPLAYALTLTREQGYPSVFYGDYYGIPTHGVPAMRSKIDPILEARQKYAYGPQHDYLDHPDVIGWTREGDSSHPKSGLATLITDGPGGSKRMYAGLKNAGETWYDITGNRSDTVKIGSDGWGEFHVNDGSVSIYVQK

SEQ ID NO: 27744 - protein, 483 aa, Bacillus sp.
HHNGTNGTMMQYFEWYLPNDGNHWNRLNSDASNLKSKGITAVWIPPAWKGASQNDVGYGAYDLYDLGEFNQKGTVRTKYGTRSQLQAAVTSLKNNGINVYGDVVMNHKGGADATEMVRAVEVNPNNRNQEVTGEYTIEAWTRFDFPGRGNTHSSFKWRWYHFDGVDWDQSRRLNNRIYKFRGKAWDWEVDTEFGNYDYLMYADYDMDHPEVVNELRNWGVWYTNTLGLDGFRIDAVKHIKYSFTRDWINHVRSATGKNMFAVAEFWKNDLGAIENYLQKTNWNHSVFDVPLHYNLYNASKSGGNYDMRNIFNGTVVQAHPMHAVTFVDNHDSQPEEALESFVEEWFKPLAYALTLTREQGYPSVFYGDYYGIPTHGVPAMRSKIDPILEARQKYAYGPQHDYLDHPDVIGWTREGDSSHPKSGLATLITDGPGGSKRMYAGLKNAGETWYDITGNRSDTVKIGSDGWGEFHVNDGSVSIYVQK

SEQ ID NO: 27745 - protein, 485 aa, Bacillus sp.
HHNGTNGTMMQYFEWYLPNDGNHWNRLNSDASNLKSKGITAVWIPPAWKGLSQNDVGYGAYDLYDLGEFNQKGTVRTKYGTRSQLQAAVTSLKNNGIQVYGDVVMNHKGGADATEMVRAVEVNPNNRNQEVTGEYTIEAWTRFDFPGRGNTHSSFKWRWYHFDGVDWDQSRRLNNRIYKFRGHGKAWDWEVDTEFGNYDYLMYADYDMDHPEVVNELRNWGVWYTNTLGLDGFRIDAVKHIKYSFTRDWINHVRSATGKNMFAVAEFWKNDLGAIENYLQKTNWNHSVFDVPLHYNLYNASKSGGNYDMRNIFNGTVVQRHPSHAVTFVDNHDSQPEEALESFVEEWFKPLAYALTLTREQGYPSVFYGDYYGIPTHGVPAMRSKIDPILEARQKYAYGPQHDYLDHPDVIGWTREGDSSHPKSGLATLITDGPGGSKRMYAGLKNAGETWYDITGNRSDTVKIGSDGWGEFHVNDGSVSIYVQK

SEQ ID NO: 27746 - protein, 483 aa, Synthetic construct
HHNGTNGTMMQYFEWYLPNDGNHWNRLNSDASNLKSKGITAVWIPPAWKGASQNDVGYGAYDLYDLGEFNQKGTVRTKYGTRSQLQAAVTSLKNNGIQVYGDVVMNHKGGADATEMVRAVEVNPNNRNQEVTGEYTIEAWTRFDFPGRGNTHSSFKWRWYHFDGVDWDQSRRLNNRIYKFRGKAWDWEVDTENGNYDYLMYADIDMDAPEVVNELRNWGVWYTNTLGLDGFRIDAVKHIKYSFTRDWINHVRSATGKNMFAVAEFWKNDLGAIENYLQKTNWNHSVFDVPLHYNLYNASKSGGNYDMRNIFNGTVVQRHPSHAVTFVDNHDSQPEEALESFVEEWFKPLAYALTLTREQGYPSVFYGDYYGIPTHGVPAMRSKIDPILEARQKYAYGPQHDYLDHPDVIGWTREGDSSHPKSGLATLITDGPGGSKRMYAGLKNAGETWYDITGNRSDTVKIGSDGWGEFHVNDGSVSIYVQK

SEQ ID NO: 27747 - protein, 485 aa, Bacillus sp.
HHNGTNGTMMQYFEWYLPNDGNHWNRLNSDASNLKSKGITAVWIPPAWKGISQNDVGYGAYDLYDLGEFNQKGTVRTKYGTRSQLQAAVTSLKNNGIQVYGDVVMNHKGGADATEMVRAVEVNPNNRNQEVTGEYTIEAWTRFDFPGRGNTHSSFKWRWYHFDGVDWDQSRKVHNRIYKFRGHGKAWDWEVDTEFGNYDYLMYADYDMDHPEVVNELRNWGVWYTNTLGLDGFRIDAVKHIKYSFTRDWINHVRSATGKNMFAVAEFWKNDLGAIENYLQKTNWNHSVFDVPLHYNLYNASKSGGNYDMRNIFNGTVVQRHPSHAVTFVDNHDSQPEEALESFVEEWFKPLAYALTLTREQGYPSVFYGDYYGIPTHGVPAMRSKIDPILEARQKYAYGPQHDYLDHPDVIGWTREGDSSHPKSGLATLITDGPGGSKRMYAGLKNAGKTWYDITGNRSDTVKIGSDGWGEFHVNDGSVSIYVQK

SEQ ID NO: 27748 - protein, 483 aa, Bacillus sp.
HHNGTNGTMMQYFEWYLPNDGNHWNRLNSDASNLKSKGITAVWIPPAWKGASQNDVGYGAYDLYDLGEFNQKGTVRTKYGTRSQLQAAVTSLKNNGIQVYGDVVMNHKGGADATEMVRAVEVNPNNRNQEVTGEYTIEAWTRFDFPGRGNTHSSFKWRWYHFDGVDWDQSRRLNNRIYKFRGKAWDWEVDTEFGNYDYLMYADYDMDHPEVVNELRNWGVWYTNTLGLDGFRIDAVKHIKYSFTRDWINHVRSATGKNMFAVAEFWKNDLGAIENYLQKTNWNHSVFDVPLHYNLYNASKSGGNYDMRSIFNGTVVQRHPSHAVTFVDNHDSQPEEALESFVEEWFKPLAYALTLTREQGYPSVFYGDYYGIPTHGVPAMRSKIDPILEARQKYAYGPQHDYLDHPDVIGWTREGDSSHPKSGLATLITDGPGGSKRMYAGLKNAGETWYDITGNRSDTVKIGSDGWGEFHVNDGSVSIYVQK

SEQ ID NO: 27749 - protein, 483 aa, Bacillus sp.
HHNGTNGTMMQYFEWYLPNDGNHWNRLNSDASNLKSKGITAVWIPPAWKGISQNDVGYGAYDLYDLGEFNQKGTVRTKYGTRSQLQAAVTSLKNNGIQVYGDVVMNHKGGADATEMVRAVEVNPNNRNQEVTGEYTIEAWTRFDFPGRGNTHSSFKWRWYHFDGVDWDQSRELTNRIYKFRGKAWDWEVDTEFGNYDYLMYADYDMDHPEVVNELRNWGVWYTNTLGLDGFRIDAVKHIKYSFTRDWINHVRSATGKNMFAVAEFWKNDLGAIENYLQKTNWNHSVFDVPLHYNLYNASKSGGNYDMRNIFNGTVVQRHPSHAVTFVDNHDSQPEEALESFVEEWFKPLAYALTLTREQGYPSVFYGDYYGIPTHGVPAMRSKIDPILEARQKYAYGPQHDYLDHPDVIGWTREGDSSHPKSGLATLITDGPGGSKRMYAGLKNAGETWYDITGNRSDTVKIGSDGWGEFHVNDGSVSIYVQK

SEQ ID NO: 27750 - protein, 485 aa, Bacillus sp.
HHNGTNGTMMQYFEWYLPNDGNHWNRLNSDASNLKSKGITAVWIPPAWKAASQNDVGYGAYDLYDLGEFNQKGTVRTKYGTRSQLQAAVTSLKNNGIQVYGDVVMNHKGGADATEMVRAVEVNPNNRNQEVTGEYTIEAWTRFDFPGRGNTHSSFKWRWYHFDGVDWDQSRQVSNRIYKFRGHGKAWDWEVDTEFGNYDYLMYADYDMDHPEVVNELRNWGVWYTNTLGLDGFRIDAVKHIKYSFTRDWINHVRSATGKNMFAVAEFWKNDLGAIENYLQKTNWNHSVFDVPLHYNLYNASKSGGNYDMRNIFNGTVVQRHPSHAVTFVDNHDSQPEEALESFVEEWFKPLAYALTLTREQGYPSVFYGDYYGIPTHGVPAMRSKIDPILEARQKYAYGPQHDYLDHPDVIGWTREGDSSHPKSGLATLITDGPGGSKRMYAGLKNAGETWYDITGNRSDTVKIGSDGWGEFHVNDGSVSIYVQK

SEQ ID NO: 27751 - protein, 483 aa, Bacillus sp.
HHNGTNGTMMQYFEWYLPNDGNHWNRLNSDASNLKSKGITAVWIPPAWKATSQNDVGYGAYDLYDLGEFNQKGTVRTKYGTRSQLQAAVTSLKNNGIQVYGDVVMNHKGGADATEMVDAVEVNPNNRNQEVTGEYTIEAWTRFDFPGRGNTHSSFKWRWYHFDGVDWDQSRNVNNRIYKFRGKAWDWEVDTEFGNYDYLMYADYDMDHPEVVNELRNWGVWYTNTLGLDGFRIDAVKHIKYSFTRDWINHVRSATGKNMFAVAEFWKNDLGAIENYLQKTNWNHSVFDVPLHYNLYNASKSGGNYDMRNIFNGTVVQRHPSHAVTFVDNHDSQPEEALESFVEEWFKPLAYALTLTREQGYPSVFYGDYYGIPTHGVPAMRSKIDPILEARQKYAYGPQHDYLDHPDVIGWTREGDSSHPKSGLATLITDGPGGSKRMYAGLKNAGETWYDITGNRSDTVKIGSDGWGEFHVNDGSVSIYVQK

SEQ ID NO: 27752 - protein, 485 aa, Synthetic construct
HHNGTNGTMMQYFEWYLPNDGNHWNRLNSDASNLKSKGITAVWIPPAWKGASQNDVGYGAYDLYDLGEFNQKGTVRTKYGTRSQLQAAVTSLKNNGIQVYGDVVMNHKGGADATEMVRAVEVNPNNRNQEVTGEYTIEAWTRFDFPGRGNTHSSFKWRWYHFDGVDWDQSRRLNNRIYKFRGHGKAWDWEVDTENGNYDYLMYADIDMDHPEVVNELRNWGVWYTNTLGLDGFRIDAVKHIKYSFLRDWINHVRSATGKNMFAVAEFWKNDLGAIENYLQKTNWNHSVFDVPLHYNLYNASKSGGNYDMRNIFNGTVVQRHPSHAVTFVDNHDSQPEEALESFVEEWFKPLAYALTLTREQGYPSVFYGDYYGIPTHGVPAMRSKIDPILEARQKYAYGPQHDYLDHPDVIGWTREGDSSHPKSGLATLITDGPGGSKRMYAGLKNAGETWYDITGNRSDTVKIGSDGWGEFHVNDGSVSIYVQK

SEQ ID NO: 27753 - protein, 485 aa, Synthetic construct
HHNGTNGTMMQYFEWYLPNDGNHWNRLNSDASNLKSKGITAVWIPPAWKGASQNDVGYGAYDLYDLGEFNQKGTVRTKYGTRSQLQAAVTSLKNNGIQVYGDVVMNHKGGADATEMVRAVEVNPNNRNQEVTGEYTIEAWTRFDFPGRGNTHSSFKWRWYHFDGVDWDQSRRLNNRIFKFRGHGKAWDWEVDTENGNYDYLMYADIDMDHPEVVNELRNWGVWYTNTLGLDGFRIDAVKHIKYSFTRDWINHVRSATGKNMFAVAEFWKNDLGAIENYLQKTNWNHSVFDVPLHYNLYNASKSGGNYDMRNIFNGTVVQRHPSHAVTFVDNHDSQPEEALESFVEEWFKPLAYALTLTREQGYPSVFYGDYYGIPTHGVPAMRSKIDPILEARQKYAYGPQHDYLDHPDVIGWTREGDSSHPKSGLATLITDGPGGSKRMYAGLKNAGETWYDITGNRSDTVKIGSDGWGEFHVNDGSVSIYVQK

SEQ ID NO: 27754 - protein, 485 aa, Synthetic construct
HHAGTNGTMMQYFEWYLPNDGNHWNRLNSDASNLKSKGITAVWIPPAWKGASQNDVGYGAYDLYDLGEFNQKGTVRTKYGTRSQLQAAVTSLKNNGIQVYGDVVMNHKGGADATEMVRAVEVNPNNRNQEVTGEYTIEAWTRFDFPGRGNTHSSFKWRWYHFDGVDWDQSRRLNNRIYKFRGHGKAWDWEVDTENGNYDYLMYADIDMDHPEVVNELRNWGVWYTNTLGLDGFRIDAVKHIKYSFTRDWINHVRSATGKNMFAVAEFWKNDLGAIENYLQKTNWNHSVFDVPLHYNLYNASKSGGNYDMRNIFNGTVVQRHPSHAVTFVDNHDSQPEEALESFVEEWFKPLAYALTLTREQGYPSVFYGDYYGIPTHGVPAMRSKIDPILEARQKYAYGPQHDYLDHPDVIGWTREGDSSHPKSGLATLITDGPGGSKRMYAGLKNAGETWYDITGNRSDTVKIGSDGWGEFHVNDGSVSIYVQK

SEQ ID NO: 27755 - protein, 485 aa, Bacillus sp.
HHNGTNGTMMQYFEWYLPNDGNHWNRLNSDASNLKDKGITAVWIPPAWKGASQNDVGYGAYDLYDLGEFNQKGTVRTKYGTRSQLQAAVTSLKNNGIQVYGDVVMNHKGGADATEMVRAVEVNPNNRNQEVTGEYTIEAWTRFDFPGRGNTHSSFKWRWYHFDGVDWDQSRRLNNRIYKFRGHGKAWDWEVDTEFGNYDYLMYADYDMDHPEVVNELRNWGVWYTNTLGLDGFRIDAVKHIKYSFTRDWINHVRSATGKNMFAVAEFWKNDLGAIENYLQKTNWNHSVFDVPLHYNLYNASKSGGNYDMRNIFNGTVVQRHPSHAVTFVDNHDSQPEEALESFVEEWFKPLAYALTLTREQGYPSVFYGDYYGIPTHGVPAMRSKIDPILEARQKYAYGPQHDYLDHPDVIGWTREGDSSHPKSGLATLITDGPGGSKRMYAGLKNAGETWYDITGNRSDTVKIGSDGWGEFHVNDGSVSIYVQK

SEQ ID NO: 27756 - protein, 485 aa, Bacillus sp.
HHNGTNGTMMQYFEWYLPNDGNHWNRLNSDASNLKSKGITAVWIPPAWKGPSQNDVGYGAYDLYDLGEFNQKGTVRTKYGTRSQLQAAVTSLKNNGIQVYGDVVMNHKGGADATEMVRAVEVNPNNRNQEVTGEYTIEAWTRFDFPGRGNTHSSFKWRWYHFDGVDWDQSRRLNNRIYKFRGHGKAWDWEVDTEFGNYDYLMYADYDMDHPEVVNELRNWGVWYTNTLGLDGFRIDAVKHIKYSFTRDWINHVRSATGKNMFAVAEFWKNDLGAIENYLQKTNWNHSVFDVPLHYNLYNASKSGGNYDMRNIFNGTVVQRHPSHAVTFVDNHDSQPEEALESFVEEWFKPLAYALTLTREQGYPSVFYGDYYGIPTHGVPAMRSKIDPILEARQKYAYGPQHDYLDHPDVIGWTREGDSSHPKSGLATLITDGPGGSKRMYAGLKNAGETWYDITGNRSDTVKIGSDGWGEFHVNDGSVSIYVQK

SEQ ID NO: 27757 - protein, 485 aa, Bacillus sp.
HHNGTNGTMMQYFEWYLPNDGNHWNRLNSDASNLKSKGITAVWIPPAWKGASQNDVGYGAYDLYDLGEFNQKGTVRTKYGTRSQLQAAVTSLKNNGIQVYGDVVMNHKGGADATEMVRAVEVNPNNRNQEVTGEYTIEAWTRFDFPGRGNTHSSFKWRWYHFDGVDWDQSRDLNNRIYKFRGHGKAWDWEVDTEFGNYDYLMYADYDMDHPEVVNELRNWGVWYTNTLGLDGFRIDAVKHIKYSFTRDWINHVRSATGKNMFAVAEFWKNDLGAIENYLQKTNWNHSVFDVPLHYNLYNASKSGGNYDMRNIFNGTVVQRHPSHAVTFVDNHDSQPEEALESFVEEWFKPLAYALTLTREQGYPSVFYGDYYGIPTHGVPAMRSKIDPILEARQKYAYGPQHDYLDHPDVIGWTREGDSSHPKSGLATLITDGPGGSKRMYAGLKNAGETWYDITGNRSDTVKIGSDGWGEFHVNDGSVSIYVQK

SEQ ID NO: 27758 - protein, 485 aa, Bacillus sp.
HHNGTNGTMMQYFEWYLPNDGNHWNRLNSDASNLKSKGITAVWIPPAWKATSQNDVGYGAYDLYDLGEFNQKGTVRTKYGTRSQLQAAVTSLKNNGIQVYGDVVMNHKGGADATEMVRAVEVNPNNRNQEVTGEYTIEAWTRFDFPGRGNTHSSFKWRWYHFDGVDWDQSRNLDNRIYKFRVHGKAWDWEVDTEFGNYDYLMYADYDMDHPEVVNELRNWGVWYTNTLGLDGFRIDAVKHIKYSFTRDWINHVRSATGKNMFAVAEFWKNDLGAIENYLQKTNWNHSVFDVPLHYNLYNASKSGGNYDMRNIFNGTVVQRHPSHAVTFVDNHDSQPEEALESFVEEWFKPLAYALTLTREQGYPSVFYGDYYGIPTHGVPAMRSKIDPILEARQKYAYGPQHDYLDHPDVIGWTREGDSSHPKSGLATLITDGPGGSKRMYAGLKNAGETWYDITGNRSDTVKIGSDGWGEFHVNDGSVSIYVQK

SEQ ID NO: 27759 - protein, 485 aa, Bacillus sp.
HHNGTNGTMMQYFEWYLPNDGNHWNRLNSDASNLKSKGITAVWIPPAWKGASQNDVGYGAYDLYDLGEFNQKGTVRTKYGTRSQLQAAVTSLKNNGIQVYGDVVMNHKGGADATEMVRAVEVNPNNRNQEVTGEYTIEAWTRFDFPGRGNTHSSFKWRWYHFDGVDWDQSRALNNRIYKFRGHGKAWDWEVDTEFGNYDYLMYADYDMDHPEVVNELRNWGVWYTNTLGLDGFRIDAVKHIKYSFTRDWINHVRSATGKNMFAVAEFWKNDLGAIENYLQKTNWNHSVFDVPLHYNLYNASKSGGNYDMRNIFNGTVVQRHPSHAVTFVDNHDSQPEEALESFVEEWFKPLAYALTLTREQGYPSVFYGDYYGIPTHGVPAMRSKIDPILEARQKYAYGPQHDYLDHPDVIGWTREGDSSHPKSGLATLITDGPGGSKRMYAGLKNAGETWYDITGNRSDTVKIGSDGWGEFHVNDGSVSIYVQK

SEQ ID NO: 27760 - protein, 483 aa, Bacillus sp.
HHNGTNGTMMQYFEWYLPNDGNHWNRLNSDASNLKSKGITAVWIPPAWKGASQNDVGYGAYDLYDLGEFNQKGTVRTKYGTRSQLQAAVTSLKNNGIQVYGDVVMNHKGGADATEMVRAVEVNPNNRNQEVTGEYTIEAWTRFDFPGRGNTHSSFKWRWYHFDGVDWDQSRRLNNRIYKFRGKAWDWEVDTENGNYDYLMYADIDYDHPEVVNELRVWGVWYTNTLGLDGFRIDAVKHIKYSFTRDWINHVRSATGKNMFAVAEFWKNDLGAIENYLQKTNWNHSVFDVPLHYNLYNASKSGGNYDMRNIFNGTVVQRHPSHAVTFVDNHDSQPEEALESFVEEWFKPLAYALTLTREQGYPSVFYGDYYGIPTHGVPAMRSKIDPILEARQKYAYGPQHDYLDHPDVIGWTREGDSSHPKSGLATLITDGPGGSKRMYAGLKNAGETWYDITGNRSDTVKIGSDGWGEFHVNDGSVSIYVQK

SEQ ID NO: 27761 - protein, 483 aa, Bacillus sp.
HHNGTNATMMQYFEWYLPNDGNHWNRLNSDASNLKSKGITAVWIPPAWKGASQNDVGYGAYDLYDLGEFNQKGTVRTKYGTRSQLQAAVTSLKNNGIQVYGDVVMNHKGGADATEMVRAVEVNPNNRNQEVTGEYTIEAWTRFDFPGRGNTHSSFKWRWYHFDGVDWDQSRRLNNRIYKFRGKAWDWEVDTEFGNYDYLMYADYDMDHPEVVNELRNWGVWYTNTLGLDGFRIDAVKHIKYSFTRDWINHVRSATGKNMFAVAEFWKNDLGAIENYLQKTNWNHSVFDVPLHYNLYNASKSGGNYDMRNIFNGTVVQAHPMHAVTFVDNHDSQPEEALESFVEEWFKPLAYALTLTREQGYPSVFYGDYYGIPTHGVPAMRSKIDPILEARQKYAYGPQHDYLDHPDVIGWTREGDSSHPKSGLATLITDGPGGSKRMYAGLKNAGETWYDITGNRSDTVKIGSDGWGEFHVNDGSVSIYVQK

SEQ ID NO: 27762 - protein, 485 aa, Bacillus sp.
HHNGTNGTMMQYFEWYLPNDGNHWNRLNSDASNLKSKGITAVWIPPAWKGASQNDVGYGAYDLYDLGEFNQKGTVRTKYGTRSQLQAAVTSLKNNGIQVYGDVVMNHKGGADATEMVRAVEVNPNNRNQEVTGEYTIEAWTRFDFPGRGNTHSSFKWRWYHFDGVDWDQSRRLYNRIYKFRGHGKAWDWEVDTEFGNYDYLMYADYDMDHPEVVNELRNWGVWYTNTLGLDGFRIDAVKHIKYSFTRDWINHVRSATGKNMFAVAEFWKNDLGAIENYLQKTNWNHSVFDVPLHYNLYNASKSGGNYDMRNIFNGTVVQRHPSHAVTFVDNHDSQPEEALESFVEEWFKPLAYALTLTREQGYPSVFYGDYYGIPTHGVPAMRSKIDPILEARQKYAYGPQHDYLDHPDVIGWTREGDSSHPKSGLATLITDGPGGSKRMYAGLKNAGETWYDITGNRSDTVKIGSDGWGEFHVNDGSVSIYVQK

SEQ ID NO: 27763 - protein, 485 aa, Bacillus sp.
HHNGTNGTMMQYFEWYLPNDGNHWNRLNSDASNLKSKGITAVWIPPAWKGASQNDVGYGAYDLYDLGEFNQKGTVRTKYGTRSQLQAAVTSLKNNGIQVYGDVVMNHKGGADATEMVDAVEVNPNNRNQEVTGEYTIEAWTRFDFPGRGNTHSSFKWRWYHFDGVDWDQSRRLNNRIYKFRGHGKAWDWEVDTEFGNYDYLMYADYDMDHPEVVNELRNWGVWYTNTLGLDGFRIDAVKHIKYSFTRDWINHVRSATGKNMFAVAEFWKNDLGAIENYLQKTNWNHSVFDVPLHYNLYNASKSGGNYDMRNIFNGTVVQRHPSHAVTFVDNHDSQPEEALESFVEEWFKPLAYALTLTREQGYPSVFYGDYYGIPTHGVPAMRSKIDPILEARQKYAYGPQHDYLDHPDVIGWTREGDSSHPKSGLATLITDGPGGSKRMYAGLKNAGETWYDITGNRSDTVKIGSDGWGEFHVNDGSVSIYVQK

SEQ ID NO: 27764 - protein, 483 aa, Bacillus sp.
HHNGTNGTMMQYFEWYLPNDGNHWNRLNSDASNLKSKGITAVWIPPAWKGASQNDVGYGAYDLYDLGEFNQKGTVRTKYGTRSQLQAAVTSLKNNGIQVYGDVVMNHKGGADATEMVRAVEVNPNNRNQEVTGEYTIEAWTRFDFPGRGNTHSSFKWRWYHFDGVDWDQSRRLNNRIYKFRGKAWDWEVDTEFGNYDYLMYADYDMDHPEVVNELRNWGVWYTNTLGLDGFRIDAVKHIKYSFTRDWINHVRSATGKNMFAVAEFWKNDLGAIENYLQKTNWNHSVFDVPLHYNLYNASKSGGNYDMRNIFNGTVVQSHPMLAVTFVDNHDSQPEEALESFVEEWFKPLAYALTLTREQGYPSVFYGDYYGIPTHGVPAMRSKIDPILEARQKYAYGPQHDYLDHPDVIGWTREGDSSHPKSGLATLITDGPGGSKRMYAGLKNAGETWYDITGNRSDTVKIGSDGWGEFHVNDGSVSIYVQK

SEQ ID NO: 27765 - protein, 485 aa, Bacillus sp.
HHNGTNGTMMQYFEWYLPNDGNHWNRLNSDASNLKSKGITAVWIPPAWKGASQNDVGYGAYDLYDLGEFNQKGTVRTKYGTRSQLQAAVTSLKNNGIQVYGDVVMNHKGGADATEMVRAVEVNPNNRNQEVTGEYTIEAWTRFDFPGRGNTHSSFKWRWYHFDGVDWDQSRRLNNRIYKFRSHGKAWDWEVDTEFGNYDYLMYADYDMDHPEVVNELRNWGVWYTNTLGLDGFRIDAVKHIKYSFTRDWINHVRSATGKNMFAVAEFWKNDLGAIENYLQKTNWNHSVFDVPLHYNLYNASKSGGNYDMRNIFNGTVVQRHPSHAVTFVDNHDSQPEEALESFVEEWFKPLAYALTLTREQGYPSVFYGDYYGIPTHGVPAMRSKIDPILEARQKYAYGPQHDYLDHPDVIGWTREGDSSHPKSGLATLITDGPGGSKRMYAGLKNAGETWYDITGNRSDTVKIGSDGWGEFHVNDGSVSIYVQK

SEQ ID NO: 27766 - protein, 485 aa, Bacillus sp.
HHNGTNGTMMQYFEWYLPNDGNHWNRLNSDASNLKSKGITAVWIPPAWKAASQNDVGYGAYDLYDLGEFNQKGTVRTKYGTRSQLQAAVTSLKNNGIQVYGDVVMNHKGGADATEMVRAVEVNPNNRNQEVTGEYTIEAWTRFDFPGRGNTHSSFKWRWYHFDGVDWDQSREFNNRIYKFRGHGKAWDWEVDTEFGNYDYLMYADYDMDHPEVVNELRNWGVWYTNTLGLDGFRIDAVKHIKYSFTRDWINHVRSATGKNMFAVAEFWKNDLGAIENYLQKTNWNHSVFDVPLHYNLYNASKSGGNYDMRNIFNGTVVQRHPSHAVTFVDNHDSQPEEALESFVEEWFKPLAYALTLTREQGYPSVFYGDYYGIPTHGVPAMRSKIDPILEARQKYAYGPQHDYLDHPDVIGWTREGDSSHPKSGLATLITDGPGGSKRMYAGLKNAGETWYDITGNRSDTVKIGSDGWGEFHVNDGSVSIYVQK

SEQ ID NO: 27767 - protein, 483 aa, Bacillus sp.
HHNGTNGTMMQYFEWYLPNDGNHWNRLNSDASNLKSKGITAVWIPPAWKGASQNDVGYGAYDLYDLGEFNQKGTVRTKYGTRSQLQAAVTSLKNNGIQVYGDVVMNHKGGADATEMVRAVEVNPNNRNQEVTGEYTIEAWTRFDFPGRGNTHSSFKWRWYHFDGVDWDQSRKFNNRIYKFRGKAWDWEVDTEFGNYDYLMYTDYDMDHPEVVNELRNWGVWYTNTLGLDGFRIDAVKHIKYSFTRDWINHVRSATGKNMFAVAEFWKNDLGAIENYLQKTNWNHSVFDVPLHYNLYNASKSGGNYDMRNIFNGTVVQRHPSHAVTFVDNHDSQPEEALESFVEEWFKPLAYALTLTREQGYPSVFYGDYYGIPTHGVPAMRSKIDPILEARQKYAYGPQHDYLDHPDVIGWTREGDSSHPKSGLATLITDGPGGSKRMYAGLKNAGETWYDITGNRSDTVKIGSDGWGEFHVNDGSVSIYVQK

SEQ ID NO: 27768 - protein, 485 aa, Synthetic construct
HHNGTNGTMMQYFEWYLPNDGNHWNRLNSDASNLKSKGITAVWIPPAWKGASQNDVGYGAYDLYDLGEFNQKGTVRTKYGTRSQLQAAVTSLKNNGIQVYGDVVMNHKGGADATEMVRAVEVNPNNRNQVVTGEYTIEAWTRFDFPGRGNTHSSFKWRWYHFDGVDWDQSRRLNNRIYKFRGHGKAWDWEVDTENGNYDYLMYADIDMDHPEVVNELRNWGVWYTNTLGLDGFRIDAVKHIKYSFTRDWINHVRSATGKNMFAVAEFWKNDLGAIENYLQKTNWNHSVFDVPLHYNLYNASKSGGNYDMRNIFNGTVVQRHPSHAVTFVDNHDSQPEEALESFVEEWFKPLAYALTLTREQGYPSVFYGDYYGIPTHGVPAMRSKIDPILEARQKYAYGPQHDYLDHPDVIGWTREGDSSHPKSGLATLITDGPGGSKRMYAGLKNAGETWYDITGNRSDTVKIGSDGWGEFHVNDGSVSIYVQK

SEQ ID NO: 27769 - protein, 485 aa, Bacillus sp.
HHNGTNNTMMQYFEWYLPNDGNHWNRLNSDASNLKSKGITAVWIPPAWKGASQNDVGYGAYDLYDLGEFNQKGTVRTKYGTRSQLQAAVTSLKNNGIQVYGDVVMNHKGGADATEMVRAVEVNPNNRNQEVTGEYTIEAWTRFDFPGRGNTHSSFKWRWYHFDGVDWDQSRRLNNRIYKFRGHGKAWDWEVDTEFGNYDYLMYADYDMDHPEVVNELRNWGVWYTNTLGLDGFRIDAVKHIKYSFTRDWINHVRSATGKNMFAVAEFWKNDLGAIENYLQKTNWNHSVFDVPLHYNLYNASKSGGNYDMRNIFNGTVVQAHPMHAVTFVDNHDSQPEEALESFVEEWFKPLAYALTLTREQGYPSVFYGDYYGIPTHGVPAMRSKIDPILEARQKYAYGPQHDYLDHPDVIGWTREGDSSHPKSGLATLITDGPGGSKRMYAGLKNAGETWYDITGNRSDTVKIGSDGWGEFHVNDGSVSIYVQK

SEQ ID NO: 27770 - protein, 485 aa, Bacillus sp.
HHNGTNGTMMQYFEWYLPNDGNHWNRLNSDASNLKSKGITAVWIPPAWKGASQNDVGYGAYDLYDLGEFNQKGTVRTKYGTRSQLQAAVTSLKNNGIQVYGDVVMNHKGGADATEMVRAVEVNPNNRNQEVTGEYTIEAWTRFDFPGRGNTHSSFKWRWYHFDGVDWDQSRELTNRIYKFRGHGKAWDWEVDTEFGNYDYLMYADYDMDHPEVVNELRNWGVWYTNTLGLDGFRIDAVKHIKYSFTRDWINHVRSATGKNMFAVAEFWKNDLGAIENYLQKTNWNHSVFDVPLHYNLYNASKSGGNYDMRNIFNGTVVQRHPSHAVTFVDNHDSQPEEALESFVEEWFKPLAYALTLTREQGYPSVFYGDYYGIPTHGVPAMRSKIDPILEARQKYAYGPQHDYLDHPDVIGWTREGDSSHPKSGLATLITDGPGGSKRMYAGLKNAGETWYDITGNRSDTVKIGSDGWGEFHVNDGSVSIYVQK

SEQ ID NO: 27771 - protein, 483 aa, Bacillus sp.
HHNGTNGTMMQYFEWYLPNDGNHWNRLNSDASNLKSKGITAVWIPPAWKGVSQNDVGYGAYDLYDLGEFNQKGTVRTKYGTRSQLQAAVTSLKNNGIQVYGDVVMNHKGGADATEMVRAVEVNPNNRNQEVTGEYTIEAWTRFDFPGRGNTHSSFKWRWYHFDGVDWDQSRDLNNRIYKFRGKAWDWEVDTEFGNYDYLMYADYDMDHPEVVNELRNWGVWYTNTLGLDGFRIDAVKHIKYSFTRDWINHVRSATGKNMFAVAEFWKNDLGAIENYLQKTNWNHSVFDVPLHYNLYNASKSGGNYDMRNIFNGTVVQRHPSHAVTFVDNHDSQPEEALESFVEEWFKPLAYALTLTREQGYPSVFYGDYYGIPTHGVPAMRSKIDPILEARQKYAYGPQHDYLDHPDVIGWTREGDSSHPKSGLATLITDGPGGSKRMYAGLKNAGETWYDITGNRSDTVKIGSDGWGEFHVNDGSVSIYVQK

SEQ ID NO: 27772 - protein, 485 aa, Bacillus sp.
HHNGTNGTMMQYFEWYLPNDGNHWNRLNSDASNLKSKGITAVWIPPAWKATSQNDVGYGAYDLYDLGEFNQKGTVRTKYGTRSQLQAAVTSLKNNGIQVYGDVVMNHKGGADATEMVRAVEVNPNNRNQEVTGEYTIEAWTRFDFPGRGNTHSSFKWRWYHFDGVDWDQSRNVNNRIYKFRGHGKAWDWEVDTEFGNYDYLMYADYDMDHPEVVNELRNWGVWYTNTLGLDGFRIDAVKHIKYSFTRDWINHVRSATGKNMFAVAEFWKNDLGAIENYLQKTNWNHSVFDVPLHYNLYNASKSGGNYDMRNIFNGTVVQVHPSHAVTFVDNHDSQPEEALESFVEEWFKPLAYALTLTREQGYPSVFYGDYYGIPTHGVPAMRSKIDPILEARQKYAYGPQHDYLDHPDVIGWTREGDSSHPKSGLATLITDGPGGSKRMYAGLKNAGETWYDITGNRSDTVKIGSDGWGEFHVNYGSVSIYVQK

SEQ ID NO: 27773 - protein, 485 aa, Synthetic construct
HHNGTNGTMMQYFEWYLPNDGNHWNRLNSDASNLKSKGITAVWIPPAWKGASQNDVGYGAYDLYDLGEFNQKGTVRTKYGTRSQLQAAVTSLKNNGIQVYGDVVMNHKGGADATEMVRAVEVNPNNRNQEVTGEYTIEAWTRFDFPGRGNTHSSFKWRWYHFDGVDWDQSRRLNNRIYKFRGHGKAWDWEVDTENGNYDYLMYADIDMDHPEVVNELRNWGVWYTNTLGLDGFRIDAVKHIKYSFTRDWINHARSATGKNMFAVAEFWKNDLGAIENYLQKTNWNHSVFDVPLHYNLYNASKSGGNYDMRNIFNGTVVQRHPSHAVTFVDNHDSQPEEALESFVEEWFKPLAYALTLTREQGYPSVFYGDYYGIPTHGVPAMRSKIDPILEARQKYAYGPQHDYLDHPDVIGWTREGDSSHPKSGLATLITDGPGGSKRMYAGLKNAGETWYDITGNRSDTVKIGSDGWGEFHVNDGSVSIYVQK

SEQ ID NO: 27774 - protein, 483 aa, Bacillus sp.
HHNGTNGTMMQYFEWYLPNDGNHWNRLNSDASNLKSKGITAVWIPPAWKATSQNDVGYGAYDLYDLGEFNQKGTVRTKYGTRSQLQAAVTSLKNNGIQVYGDVVMNHKGGADATEMVRAVEVNPNNRNQEVTGEYTIEAWTRFDFPGRGNTHSSFKWRWYHFDGVDWDQSRNVNNRIYKFRGKAWDWEVDTEFGNYDYLMYADYDMDHPEVVNELRNWGVWYTNTLGLDGFRIDAVKHIKYSFTRDWINHVRSATGKNMFAVAEFWKNDLGAIENYLQKTNWNHSVFDVPLHYNLYNASKSGGNYDMRNIFNGTVVQRHPSHAVTFVDNHDSQPEEALESFVDPWFKPLAYALTLTREQGYPSVFYGDYYGIPTHGVPAMRSKIDPILEARQKYAYGPQHDYLDHPDVIGWTREGDSSHPKSGLATLITDGPGGSKRMYAGLKNAGETWYDITGNRSDTVKIGSDGWGEFHVNGGSVSIYVQK

SEQ ID NO: 27775 - protein, 485 aa, Bacillus sp.
HHNGTNGTMMQYFEWYLPNDGNHWNRLNSDASNLKSKGITAVWIPPAWKGASQNDVGYGAYDLYDLGEFNQKGTVRTKYGTRSQLQAAVTSLKNNGIQVYGDVVMNHKGGADATEMVRAVEVNPNNRNQEVTGEYTIEAWTRFDFPGRGNTHSSFKWRWYHFDGVDWDQSRRLNNRIYKFRGHGKAWDWEVDTEFGNYDYLMYADYDMDHPEVVNELRNWGVWYTNTLGLDGFRIDAVKHIKYSFTRDWINHVRSATGKNMFAVAEFWKNDLGAIENYLKKTNWNHSVFDVPLHYNLYNASKSGGNYDMRNIFNGTVVQRHPSHAVTFVDNHDSQPEEALESFVEEWFKPLAYALTLTREQGYPSVFYGDYYGIPTHGVPAMRSKIDPILEARQKYAYGPQHDYLDHPDVIGWTREGDSSHPKSGLATLITDGPGGSKRMYAGLKNAGETWYDITGNRSDTVKIGSDGWGEFHVNDGSVSIYVQK

SEQ ID NO: 27776 - protein, 483 aa, Bacillus sp.
HHNGTNGTMMQYFEWYLPNDGNHWNRLNSDASNLKSKGITAVWIPPAWKGASQNDVGYGAYDLYDLGEFNQKGTVRTKYGTRSQLQAAVTSLKNNGIQVYGDVVMNHKGGADLTEMVRAVEVNPNNRNQEVTGEYTIEAWTRFDFPGRGNTHSSFKWRWYHFDGVDWDQSRQLDNRIYKFRGKAWDWEVDTEFGNYDYLMYADYDMDHPEVVNELRNWGVWYTNTLGLDGFRIDAVKHIKYSFTRDWINHVRSATGKNMFAVAEFWKNDLGAIENYLQKTNWNHSVFDVPLHYNLYNASKSGGNYDMRNIFNGTVVQRHPSHAVTFVDNHDSQPEEALESFVEEWFKPLAYALTLTREQGYPSVFYGDYYGIPTHGVPAMRSKIDPILEARQKYAYGPQHDYLDHPDVIGWTREGDSSHPKSGLATLITDGPGGSKRMYAGLKNAGETWYDITGNRSDTVKIGSDGWGEFHVNDGSVSIYVQK

SEQ ID NO: 27777 - protein, 485 aa, Synthetic construct
HHNGTNGTMMQYFEWYLPNDGNHWNRLNSDASNLKSKGITAVWIPPAWKGASQNDVGYGAYDLYDLGEFNQKGTVRTKYGTRGQLQAAVTSLKNNGIQVYGDVVMNHKGGADATEMVRAVEVNPNNRNQEVTGEYTIEAWTRFDFPGRGNTHSSFKWRWYHFDGVDWDQSRRLNNRIYKFRGHGKAWDWEVDTENGNYDYLMYADIDMDHPEVVNELRNWGVWYTNTLGLDGFRIDAVKHIKYSFTRDWINHVRSATGKNMFAVAEFWKNDLGAIENYLQKTNWNHSVFDVPLHYNLYNASKSGGNYDMRNIFNGTVVQRHPSHAVTFVDNHDSQPEEALESFVEEWFKPLAYALTLTREQGYPSVFYGDYYGIPTHGVPAMRSKIDPILEARQKYAYGPQHDYLDHPDVIGWTREGDSSHPKSGLATLITDGPGGSKRMYAGLKNAGETWYDITGNRSDTVKIGSDGWGEFHVNDGSVSIYVQK

SEQ ID NO: 27778 - protein, 485 aa, Bacillus sp.
HHNGTNGTMMQYFEWYLPNDGNHWNRLNSDASNLKSKGITAVWIPPAWKGVSQNDVGYGAYDLYDLGEFNQKGTVRTKYGTRSQLQAAVTSLKNNGIQVYGDVVMNHKGGADATEMVRAVEVNPNNRNQEVTGEYTIEAWTRFDFPGRGNTHSSFKWRWYHFDGVDWDQSRRLQNRIYKFRGHGKAWDWEVDTEFGNYDYLMYVDYDMDHPEVVNELRNWGVWYTNTLGLDGFRIDAVKHIKYSFTRDWINHVRSATGKNMFAVAEFWKNDLGAIENYLQKTNWNHSVFDVPLHYNLYNASKSGGNYDMRNIFNGTVVQRHPSHAVTFVDNHDSQPEEALESFVEEWFKPLAYALTLTREQGYPSVFYGDYYGIPTHGVPAMRSKIDPILEARQKYAYGPQHDYLDHPDVIGWTREGDSSHPKSGLATLITDGPGGSKRMYAGLKNAGETWYDITGNRSDTVKIGSDGWGEFHVNDGSVSIYVQK

SEQ ID NO: 27779 - protein, 485 aa, Bacillus sp.
HHNGTNGTMMQYFEWYLPNDGNHWNRLNSDASNLKSKGITAVWIPPAWKAASQNDVGYGAYDLYDLGEFNQKGTVRTKYGTRSQLQAAVTSLKNNGIQVYGDVVMNHKGGADATEMVRAVEVNPNNRNQEVTGEYTIEAWTRFDFPGRGNTHSSFKWRWYHFDGVDWDQSRDLQNRIYKFRGHGKAWDWEVDTEFGNYDYLMYADYDMDHPEVVNELRNWGVWYTNTLGLDGFRIDAVKHIKYSFTRDWINHVRSATGKNMFAVAEFWKNDLGAIENYLQKTNWNHSVFDVPLHYNLYNASKSGGNYDMRNIFNGTVVQVHPSHAVTFVDNHDSQPEEALESFVEEWFKPLAYALTLTREQGYPSVFYGDYYGIPTHGVPAMRSKIDPILEARQKYAYGPQHDYLDHPDVIGWTREGDSSHPKSGLATLITDGPGGSKRMYAGLKNAGETWYDITGNRSDTVKIGSDGWGEFHVNYGSVSIYVQK

SEQ ID NO: 27780 - protein, 485 aa, Synthetic construct
HHNGTNGTMMQYFEWYLPNDGNHWNRLNSDASNLKSKGITAVWIPPAWKGASQNDVGYGAYDLYDLGEFNQKGTVRTKYGTRSQLQAAVTSLKNNGIQVYGDVVMNHKGGADATEMVRAVEVNPNNRNQEVTGEYTIEAWTRFDFPGRGNTHSSFKWRWYHFDGVDWDQSRRLNNRIYKFRGHGKAWDWEVDTENGNYDYLMYADIDMDHPEVVNELRNWGVWYTNTLGLDGFRIDAVKHIKYSFTRDWINHVRSATGKNMFAVAEFWKNDLGAIENYLQKTNWNHSVFDVPLHYNLYNASKSGGNYDMRNIFNGTVVQRHPSHAVTFVDNHDSQPEEALESFVEEWFKPLAYALTLTREQGYPSVFYGDYYGIPTHGVPAMRSKIEPILEARQKYAYGPQHDYLDHPDVIGWTREGDSSHPKSGLATLITDGPGGSKRMYAGLKNAGETWYDITGNRSDTVKIGSDGWGEFHVNDGSVSIYVQK

SEQ ID NO: 27781 - protein, 485 aa, Synthetic construct
HHNGTNGTMMQYFEWYLPNDGNHWNRLNSDASYLKSKGITAVWIPPAWKGASQNDVGYGAYDLYDLGEFNQKGTVRTKYGTRSQLQAAVTSLKNNGIQVYGDVVMNHKGGADATEMVRAVEVNPNNRNQEVTGEYTIEAWTRFDFPGRGNTHSSFKWRWYHFDGVDWDQSRRLNNRIYKFRGHGKAWDWEVDTENGNYDYLMYADIDMDHPEVVNELRNWGVWYTNTLGLDGFRIDAVKHIKYSFTRDWINHVRSATGKNMFAVAEFWKNDLGAIENYLQKTNWNHSVFDVPLHYNLYNASKSGGNYDMRNIFNGTVVQRHPSHAVTFVDNHDSQPEEALESFVEEWFKPLAYALTLTREQGYPSVFYGDYYGIPTHGVPAMRSKIDPILEARQKYAYGPQHDYLDHPDVIGWTREGDSSHPKSGLATLITDGPGGSKRMYAGLKNAGETWYDITGNRSDTVKIGSDGWGEFHVNDGSVSIYVQK

SEQ ID NO: 27782 - protein, 485 aa, Bacillus sp.
HHNGTNGTMMQYFEWYLPNDGNHWNRLNSDASNLKSKGITAVWIPPAWKAASQNDVGYGAYDLYDLGEFNQKGTVRTKYGTRSQLQAAVTSLKNNGIQVYGDVVMNHKGGADATEMVRAVEVNPNNRNQEVTGEYTIEAWTRFDFPGRGNTHSSFKWRWYHFDGVDWDQSRDLQNRIYKFRGHGKAWDWEVDTEFGNYDYLMYADYDMDHPEVVNELRNWGVWYTNTLGLDGFRIDAVKHIKYSFTRDWINHVRSATGKNMFAVAEFWKNDLGAIENYLQKTNWNHSVFDVPLHYNLYNASKSGGNYDMRNIFNGTVVQRHPSHAVTFVDNHDSQPEEALESFVDPWFKPLAYALTLTREQGYPSVFYGDYYGIPTHGVPAMRSKIDPILEARQKYAYGPQHDYLDHPDVIGWTREGDSSHPKSGLATLITDGPGGSKRMYAGLKNAGETWYDITGNRSDTVKIGSDGWGEFHVNGGSVSIYVQK

SEQ ID NO: 27783 - protein, 483 aa, Bacillus sp.
HHNGTNGTMMQYFEWYLPNDGNHWNRLNSDASNLKSKGITAVWIPPAWKGASQNDVGYGAYDLYDLGEFNQKGTVRTKYGTRSQLQAAVTSLKNNGIQVYGDVVMNHKGGADATEMVRAVEVNPNNRNQEVTGEYTIEAWTRFDFPGRGNTHSSFKWRWYHFDGVDWDQSRRFDNRIYKFRGKAWDWEVDTEFGNYDYLMYSDYDMDHPEVVNELRNWGVWYTNTLGLDGFRIDAVKHIKYSFTRDWINHVRSATGKNMFAVAEFWKNDLGAIENYLQKTNWNHSVFDVPLHYNLYNASKSGGNYDMRNIFNGTVVQRHPSHAVTFVDNHDSQPEEALESFVEEWFKPLAYALTLTREQGYPSVFYGDYYGIPTHGVPAMRSKIDPILEARQKYAYGPQHDYLDHPDVIGWTREGDSSHPKSGLATLITDGPGGSKRMYAGLKNAGETWYDITGNRSDTVKIGSDGWGEFHVNDGSVSIYVQK

SEQ ID NO: 27784 - protein, 483 aa, Bacillus sp.
HHNGTNGTMMQYFEWYLPNDGNHWNRLNSDASNLKSKGITAVWIPPAWKGASQNDVGYGAYDLYDLGEFNQKGTVRTKYGTRSQLQAAVTSLKNNGIQVYGDVVMNHKGGADATEMVRAVEVNPNNRNQEVTGEYTIEAWTRFDFPGRGNTHSSFKWRWYHFDGVDWDQSRRLTNRIYKFRGKAWDWEVDTEFGNYDYLMYADYDMDHPEVVNELRNWGVWYTNTLGLDGFRIDAVKHIKYSFTRDWINHVRSATGKNMFAVAEFWKNDLGAIENYLQKTNWNHSVFDVPLHYNLYNASKSGGNYDMRNIFNGTVVQRHPSHAVTFVDNHDSQPEEALESFVEEWFKPLAYALTLTREQGYPSVFYGDYYGIPTHGVPAMRSKIDPILEARQKYAYGPQHDYLDHPDVIGWTREGDSSHPKSGLATLITDGPGGSKRMYAGLKNAGETWYDITGNRSDTVKIGSDGWGEFHVNDGSVSIYVQK

SEQ ID NO: 27785 - protein, 483 aa, Bacillus sp.
HHNGTNGTMMQYFEWYLPNDGNHWNRLNSDASNLKSKGITAVWIPPAWKGASQNDVGYGAYDLYDLGEFNQKGTVRTKYGTRSQLQAAVTSLKNNGIQVYGDVVMNHKGGADATEMVRAVEVNPNNRNQEVTGEYTIEAWTRFDFPGRGNTHSSFKWRWYHFDGVDWDQSRETTNRIYKFRGKAWDWEVDTEFGNYDYLMYADYDMDHPEVVNELRNWGVWYTNTLGLDGFRIDAVKHIKYSFTRDWINHVRSATGKNMFAVAEFWKNDLGAIENYLQKTNWNHSVFDVPLHYNLYNASKSGGNYDMRNIFNGTVVQRHPSHAVTFVDNHDSQPEEALESFVEEWFKPLAYALTLTREQGYPSVFYGDYYGIPTHGVPAMRSKIDPILEARQKYAYGPQHDYLDHPDVIGWTREGDSSHPKSGLATLITDGPGGSKRMYAGLKNAGETWYDITGNRSDTVKIGSDGWGEFHVNDGSVSIYVQK

SEQ ID NO: 27786 - protein, 485 aa, Bacillus sp.
HHNGTNGTMMQYFEWYLPNDGNHWNRLNSDASNLKSKGITAVWIPPAWKGASQNDVGYGAYDLYDLGEFNQKGTVRTKYGTRSQLQAAVTSLKNNGIQVYGDVVMNHKGGADATEMVRAVEVNPNNRNQEVTGEYTIEAWTRFDFPGRGNTHSSFKWRWYHFDGVDWDQSRRLNNRIYKFRGHGKAWDWEVDTEFGNYDYLMYADYDMDHPEVVNELRNWGVWYTNTLGLDGFRIDAVKHIKYSFTRDWINHVRSATGKNMFAVAEFWKNDLGAIENYLQKTNWNHSVFDVPLHYNLYNASKSGGNYDMRNIFNGTVVQRHPSHAVTFVDNHDSQPEEALESFVEEWFKPLAYALTLTREQGYPSVFYGDYYGIPTHGVPAMRSKIDPILEARQKYAYGPQHDYLDHPDVIGWTREGDSSHPKSGLATLITDGPGGSKRMYAGLKNAGETWYDITGNRSDTVKIGSDGWGKFHVNDGSVSIYVQK

SEQ ID NO: 27787 - protein, 485 aa, Bacillus sp.
HHNGTNGTMMQYFEWYLPNDGNHWNRLNSDASNLKSKGITAVWIPPAWKSASQNDVGYGAYDLYDLGEFNQKGTVRTKYGTRSQLQAAVTSLKNNGIQVYGDVVMNHKGGADATEMVRAVEVNPNNRNQEVTGEYTIEAWTRFDFPGRGNTHSSFKWRWYHFDGVDWDQSRNLQNRIYKFRGHGKAWDWEVDTEFGNYDYLMYADYDMDHPEVVNELRNWGVWYTNTLGLDGFRIDAVKHIKYSFTRDWINHVRSATGKNMFAVAEFWKNDLGAIENYLQKTNWNHSVFDVPLHYNLYNASKSGGNYDMRNIFNGTVVQRHPSHAVTFVDNHDSQPEEALESFVDEWFKPLAYALTLTREQGYPSVFYGDYYGIPTHGVPAMRSKIDPILEARQKYAYGPQHDYLDHPDVIGWTREGDSSHPKSGLATLITDGPGGSKRMYAGLKNAGETWYDITGNRSDTVKIGSDGWGEFHVNDGSVSIYVQK

SEQ ID NO: 27788 - protein, 485 aa, Bacillus sp.
HHNGTNETMMQYFEWYLPNDGNHWNRLNSDASNLKSKGITAVWIPPAWKGASQNDVGYGAYDLYDLGEFNQKGTVRTKYGTRSQLQAAVTSLKNNGIQVYGDVVMNHKGGADATEMVRAVEVNPNNRNQEVTGEYTIEAWTRFDFPGRGNTHSSFKWRWYHFDGVDWDQSRRLNNRIYKFRGHGKAWDWEVDTEFGNYDYLMYADYDMDHPEVVNELRNWGVWYTNTLGLDGFRIDAVKHIKYSFTRDWINHVRSATGKNMFAVAEFWKNDLGAIENYLQKTNWNHSVFDVPLHYNLYNASKSGGNYDMRNIFNGTVVQQHPMHAVTFVDNHDSQPEEALESFVEEWFKPLAYALTLTREQGYPSVFYGDYYGIPTHGVPAMRSKIDPILEARQKYAYGPQHDYLDHPDVIGWTREGDSSHPKSGLATLITDGPGGSKRMYAGLKNAGETWYDITGNRSDTVKIGSDGWGEFHVNDGSVSIYVQK

SEQ ID NO: 27789 - protein, 483 aa, Synthetic construct
HHNGTNGTMMQYFEWYLPNDGNHWNRLNSDASNLKSKGITAVWIPPAWKGASQNDVGYGAYDLYDLGEFNQKGTVRTKYGTRSQLQAAVTSLKNNGIQVYGDVVMNHKGGADATEMVRAVEVNPNNRNQEVTGEYTIEAWTRFDFPGRGNTHSSFKWRWYHFDGVDWDQSRRLNNRIYKFRGKNWDWEVDTENGNYDYLMYADIDMDHPEVVNELRNWGVWYTNTLGLDGFRIDAVKHIKYSFTRDWINHVRSATGKNMFAVAEFWKNDLGAIENYLQKTNWNHSVFDVPLHYNLYNASKSGGNYDMRNIFNGTVVQRHPSHAVTFVDNHDSQPEEALESFVEEWFKPLAYALTLTREQGYPSVFYGDYYGIPTHGVPAMRSKIDPILEARQKYAYGPQHDYLDHPDVIGWTREGDSSHPKSGLATLITDGPGGSKRMYAGLKNAGETWYDITGNRSDTVKIGSDGWGEFHVNDGSVSIYVQK

SEQ ID NO: 27790 - protein, 485 aa, Bacillus sp.
HHNGTNGTMMQYFEWYLPNDGNHWNRLNSDASNLKSKGITAVWIPPAWKGASQNDVGYGAYDLYDLGEFNQKGTVRTKYGTRSQLQAAVTSLKNNGIQVYGDVVMNHKGGADATEMVRAVEVNPNNRNQEVTGEYTIEAWTTFDFPGRGNTHSSFKWRWYHFDGVDWDQSRRLNNRIYKFRGHGKAWDWEVDTEFGNYDYLMYADYDMDHPEVVNELRNWGVWYTNTLGLDGFRIDAVKHIKYSFTRDWINHVRSATGKNMFAVAEFWKNDLGAIENYLQKTNWNHSVFDVPLHYNLYNASKSGGNYDMRNIFNGTVVQRHPSHAVTFVDNHDSQPEEALESFVEEWFKPLAYALTLTREQGYPSVFYGDYYGIPTHGVPAMRSKIDPILEARQKYAYGPQHDYLDHPDVIGWTREGDSSHPKSGLATLITDGPGGSKRMYAGLKNAGETWYDITGNRSDTVKIGSDGWGEFHVNDGSVSIYVQK

SEQ ID NO: 27791 - protein, 485 aa, Synthetic construct
HHNGTNGTMMQYFEWYLPNDGNHWNRLNSDASNLKSKGITAVWIPPAWKGASQNDVGYGAYDLYDLGEFNQKGTVRTKYGTRSQLQAAVTSLKNNGIQVYGDVVMNHKGGADATEMVRAVEVNPNNRNQEVTGEYTIEAWTRFDFPGRGNTHSSFKWRWYHFDGVDWDQSRRLNNRIYKFRGHGKAWDWEVDTENGNYDYLMYADIDMDHPEVVNELRNWGVWYTNTLGLDGFRIDAVKHIKYSFMRDWINHVRSATGKNMFAVAEFWKNDLGAIENYLQKTNWNHSVFDVPLHYNLYNASKSGGNYDMRNIFNGTVVQRHPSHAVTFVDNHDSQPEEALESFVEEWFKPLAYALTLTREQGYPSVFYGDYYGIPTHGVPAMRSKIDPILEARQKYAYGPQHDYLDHPDVIGWTREGDSSHPKSGLATLITDGPGGSKRMYAGLKNAGETWYDITGNRSDTVKIGSDGWGEFHVNDGSVSIYVQK

SEQ ID NO: 27792 - protein, 483 aa, Bacillus sp.
HHNGTNGTMMQYFEWYLPNDGNHWNRLNSDASNLKSKGITAVWIPPAWKGASQNDVGYGAYDLYDLGEFNQKGTVRTKYGTRSQLQAAVTSLKNNGIQVYGDVVMNHKGGADATEMVRAVEVNPNNRNQEVTGEYTIEAWTRFDFPGRGNTHSSFKWRWYHFDGVDWDQSRRLNNRIYKFRGKAWDWEVDTEFGNYDYLMYADYDMDHPEVVNELRNWGVWYTNTLGLDGFRIDAVKHIKYSFTRDWINHVRSATGKNMFAVAEFWKNDLGAIENYLQKTNWNHSVFDVPLHYNLYNASKSGGNYDMRNIFNGTVVQRHPSHAVTFVDNHDSQPEEALESFVEEWFKPLAYALTLTREQGYPSVFYGDYYGIPTHGVPAMRSKIDPILEARQKYAYGPQHDYLDHPDVIGWTREGDSSHPKSGLATAITDGPGGSKRMYAGLKNAGETWYDITGNRSDTVKIGSDGWGEFHVNDGSVSIYVQK

SEQ ID NO: 27793 - protein, 483 aa, Bacillus sp.
HHNGTNGTMMQYFEWYLPNDGNHWNRLNSDASNLKSKGITAVWIPPAWKGASQNDVGYGAYDLYDLGEFNQKGTVRTKYGTRSQLQAAVTSLKNNGIQVYGDVVMNHKGGADATEMVRAVEVNPNNRNQEVTGEYTIEAWTRFDFPGRGNTHSSFKWRWYHFDGVDWDQSRRFENRIYKFRGKAWDWEVDTEFGNYDYLMYADYDMDHPEVVNELRNWGVWYTNTLGLDGFRIDAVKHIKYSFTRDWINHVRSATGKNMFAVAEFWKNDLGAIENYLQKTNWNHSVFDVPLHYNLYNASKSGGNYDMRNIFNGTVVQRHPSHAVTFVDNHDSQPEEALESFVEEWFKPLAYALTLTREQGYPSVFYGDYYGIPTHGVPAMRSKIDPILEARQKYAYGPQHDYLDHPDVIGWTREGDSSHPKSGLATLITDGPGGSKRMYAGLKNAGETWYDITGNRSDTVKIGSDGWGEFHVNDSSVSIYVQK

SEQ ID NO: 27794 - protein, 485 aa, Synthetic construct
HHNGTNGTMMQYFEWYLPNDGNHWNRLNSDASNLKSKGITAVWIPPAWKGASQNDVGYGAYDLYDLGEFNQKGTVRTKYGTRSQLQAAVTSLKNNGIQVYGDVVMNHKGGADATEMVRAVEVNPNNRNQEVTGEYTIEAWTRFDFPGRGNTHSSFKWRWYHFDGVDWDQSRRLNNRIYKFRGHGKAWDWEVDTENGNYDYLMYADIDMDHPEVVNELRNWGVWYTNTLGLDGFRIDAVKHIKYSFTRDWINHVRSATGKNMFAVAEFWKNDLGAIENYLQKTNWNHSVFDVPLHYNLYNASKSGGNYDMRNIFNGTVVQRHPSHAVTFVDNHDSQPEEALESFVEEWFKPLAYALTLTREQGYPSVFYGDYYGIPTHGVPAMRSKIDPILEARQKYAYGPQHDYLDHPDVIGWTREGDSSHPKSGLATLITDGPGGSKRMYAGLKNAGETWYDITGNRSDTVKIGSDGWGEFHCNDGSVSIYVQK

SEQ ID NO: 27795 - protein, 485 aa, Bacillus sp.
HHNGTNGTMMQYFEWYLPNDGNHWNRLNSDASNLKSKGITAVWIPPAWKGASQNDVGYGAYDLYDLGEFNQKGTVRTKYGTRSQLQAAVTSLKNNGIQVYGDVVMNHKGGADATEMVRAVEVNPNNRNQEVTGEYTIEAWTRFDFPGRGNTHSSFKWRWYHFDGVDWDQSRRLNNRIYKFRGHGKAWDWEVDTEFGNYDYLMYADYDMDHPEVVNELRNWGVWYTNTLGLDGFRIDAVKHIKYSFTRDWINHVRSATGKNMFAVAEFWKNDLGAIENYLQKTNWNHSVFDVPLHYNLYNASKSGGNYDMRNIFNGTVVQRHPSHAVTFVDNHDSQPEEALESFVEEWFKPLAYALTLTREQGYPSVFYGDYYGIPTHGVPAMRSKIDPILEARQKYAYGPQHDYLDHPDVIGWTREGESSHPKSGLATLITDGPGGSKRMYAGLKNAGETWYDITGNRSDTVKIGSDGWGEFHVNDGSVSIYVQK

SEQ ID NO: 27796 - protein, 485 aa, Bacillus sp.
HHNGTNGTMMQYFEWYLPNDGNHWNRLNSDASNLKSKGITAVWIPPAWKGASQNDVGYGAYDLYDLGEFNQKGTVRTKYGTRSQLQAAVTSLKNNGIQVYGDVVMNHKGGADATEMVRAVEVNPNNRNQEVTGEYTIEAWTRFDFPGRGNTHSSFKWRWYHFDGVDWDQSRRLNNRIYKFRGHGKAWDWEVDTEFGNYDYLMYADYDMDHPEVVNELRNWGVWYTNTLGLDGFRIDAVKHIKYSFTRDWINHVRSATGKNMFAVAEFWKNDLGAIENYLQKTNWNHSVFDVPLHYNLYNASASGGNYDMRNIFNGTVVQRHPSHAVTFVDNHDSQPEEALESFVEEWFKPLAYALTLTREQGYPSVFYGDYYGIPTHGVPAMRSKIDPILEARQKYAYGPQHDYLDHPDVIGWTREGDSSHPKSGLATLITDGPGGSKRMYAGLKNAGETWYDITGNRSDTVKIGSDGWGEFHVNDGSVSIYVQK

SEQ ID NO: 27797 - protein, 485 aa, Bacillus sp.
HHNGTNGTMMQYFEWYLPNDGNHWNRLNSDASNLKSKGITAVWIPPAWKGASQNDVGYGAYDLYDLGEFNQKGTVRTKYGTRSQLQAAVTSLKNNGIQVYGDVVMNHKGGADATEMVRAVEVNPNNRNQEVTGEYTIEAWTRFDFPGRGNTHSSFKWRWYHFDGVDWDQSRRLNNRIYKFRGHGKAWDWEVDTEFGNYDYLMYADYDMDHPEVVNELRNWGVWYTNTLGLDGFRIDAVKHIKYSFTRDWINHVRSATGKNMFAVAEFWKNDLGAIENYLQKTNWNHSVFDVPLHYNLYNASKSGGNYDMRNIFNGTVVQSHPSHAVTFVDNHDSQPEEALESFVEEWFKPLAYALTLTREQGYPSVFYGDYYGIPTHGVPAMRSKIDPILEARQKYAYGPQHDYLDHPDVIGWTREGDSSHPKSGLATLITDGPGGSKRMYAGLKNAGETWYDITGNRSDTVKIGSDGWGEFHVNDGSVSIYVQK

SEQ ID NO: 27798 - protein, 483 aa, Bacillus sp.
HHNGTNGTMMQYFEWYLPNDGNHWNRLNSDASNLKSKGITAVWIPPAWKGASQNDVGYGAYDLYDLGEFNQKGTVRTKYGTRSQLQAAVTSLKNNGIQVYGDVVMNHKGGADATEMVRAVEVNPNNRNQEVTGEYTIEAWTRFDFPGRGNTHSSFKWRWYHFDGVDWDQSRRLNNRIYKFRGKAWDWEVDTEFGNYDYLMYADYDMDHPEVVNELRNWGVWYTNTLGLDGFRIDAVKHIKYSFTRDWINHVRSATGKNMFAVAEFWKNDLGAIENYLQKTNWNHSVFDVPLHYNLYNASKSGGNYDMRNIFNGTVVQRHPSHAVTFVDNHDSQPEEALESFVEEWFKPLAYALTLTREQGYPSVFYGDYYGIPTHGVPAMRSKIDPILEARQKYAYGPQHDYLDHPDVIGWTREGDSSHPKSGLATLITDGPGGSKRMYAGRKNAGETWYDITGNRSDTVKIGSDGWGEFHVNDGSVSIYVQK

SEQ ID NO: 27799 - protein, 483 aa, Bacillus sp.
HHNGTNGTMMQYFEWYLPNDGNHWNRLNSDASNLKSKGITAVWIPPAWKGASQNDVGYGAYDLYDLGEFNQKGTVRTKYGTRSQLQAAVTSLKNNGIQVYGDVVMNHKGGADATEMVRAVEVNPNNRNQEVTGEYTIEAWTRFDFPGRGNTHSSFKWRWYHFDGVDWDQSRKLNNRIYKFRGKAWDWEVDTEFGNYDYLMYADYDMDHPEVVNELRNWGVWYTNTLGLDGFRIDAVKHIKYSFTRDWINHVRSATGKNMFAVAEFWKNDLGAIENYLQKTNWNHSVFDVPLHYNLYNASKSGGNYDMRNIFNGTVVQRHPSHAVTFVDNHDSQPEEALESFVEEWFKPLAYALTLTREQGYPSVFYGDYYGIPTHGVPAMRSKIDPILEARQKYAYGPQHDYLDHPDVIGWTREGDSSHPKSGLATLITDGPGGSKRMYAGLKNAGETWYDITGNRSDTVKIGSDGWGEFHVNDGSVSIYVQK

SEQ ID NO: 27800 - protein, 483 aa, Bacillus sp.
HHNGTNGTMMQYFEWYLPNDGNHWNRLNSDASNLKSKGITAVWIPPAWKGASQNDVGYGAYDLYDLGEFNQKGTVRTKYGTRSQLQAAVTSLKNNGIQVYGDVVMNHKGGADATEMVRAVEVNPNNRNQEVTGEYTIEAWTRFDFPGRGNTHSSFKWRWYHFDGVDWDQSRALNNRIYKFRGKAWDWEVDTEFGNYDYLMYADYDMDHPEVVNELRNWGVWYTNTLGLDGFRIDAVKHIKYSFTRDWINHVRSATGKNMFAVAEFWKNDLGAIENYLQKTNWNHSVFDVPLHYNLYNASKSGGNYDMRNIFNGTVVQRHPSHAVTFVDNHDSQPEEALESFVEEWFKPLAYALTLTREQGYPSVFYGDYYGIPTHGVPAMRSKIDPILEARQKYAYGPQHDYLDHPDVIGWTREGDSSHPKSGLATLITDGPGGSKRMYAGLKNAGETWYDITGNRSDTVKIGSDGWGEFHVNDGSVSIYVQK

SEQ ID NO: 27801 - protein, 485 aa, Synthetic construct
HHNGTNGTMMQYFEWYLPNDGNHWNRLNSDASNLKSKGITAVWIPPAWKGASQNDVGYGAYDLYDLGEFNQKGTVRTKYGTRSQLQAAVTSLKNNGIQVYGDVVMNHKGGADATEMVRAVEVNPNNRNQEVTGEYTIEAWTRFDFPGRGNTHSSFKWRWYHFDGVDWDQSRRLNNRIYKFRGHGKAWDWEVDTENGNYDYLMYADIDMDHPEVVNELRNWGVWYTNTLGLDGFRIDAVKHIKYSFTRDWINHVRSATGKNMFAVAEFWKNDLGAIENYLQKTNWNHSVFDVPLHYNLYNASKSSGNYDMRNIFNGTVVQRHPSHAVTFVDNHDSQPEEALESFVEEWFKPLAYALTLTREQGYPSVFYGDYYGIPTHGVPAMRSKIDPILEARQKYAYGPQHDYLDHPDVIGWTREGDSSHPKSGLATLITDGPGGSKRMYAGLKNAGETWYDITGNRSDTVKIGSDGWGEFHVNDGSVSIYVQK

SEQ ID NO: 27802 - protein, 485 aa, Bacillus sp.
HHNGTNGTMMQYFEWYLPNDGNHWNRLNSDASNLKSKGITAVWIPPAWKGASQNDVGYGAYDLYDLGEFNQKGTVRTKYGTRSQLQAAVTSLKNNGIQVYGDVVMNHKGGADATEMVRAVEVNPNNRNQEVTGEYTIEAWTRFDFPGRGNTHSSFKWRWYHFDGVDWDQSRRLNNRIYKFRGHGKAWDWEVDTEFGNYDYLMYADYDMDHPEVVNELRNWGVWYTNTLGLDGFRIDAVKHIKYSFTRDWINHVRSATGKNMFAVAEFWKNDLGAIENYLQKTNWNHSVFDVPLHYNLYNASRSGGNYDMRNIFNGTVVQRHPSHAVTFVDNHDSQPEEALESFVEEWFKPLAYALTLTREQGYPSVFYGDYYGIPTHGVPAMRSKIDPILEARQKYAYGPQHDYLDHPDVIGWTREGDSSHPKSGLATLITDGPGGSKRMYAGLKNAGETWYDITGNRSDTVKIGSDGWGEFHVNDGSVSIYVQK

SEQ ID NO: 27803 - protein, 485 aa, Bacillus sp.
HHNGTNGTMMQYFEWYLPNDGNHWNRLNSDASNLKSKGITAVWIPPAWKAASQNDVGYGAYDLYDLGEFNQKGTVRTKYGTRSQLQAAVTSLKNNGIQVYGDVVMNHKGGADATEMVRAVEVNPNNRNQEVTGEYTIEAWTRFDFPGRGNTHSSFKWRWYHFDGVDWDQSRQTNNRIYKFRGHGKAWDWEVDTEFGNYDYLMYADYDMDHPEVVNELRNWGVWYTNTLGLDGFRIDAVKHIKYSFTRDWINHVRSATGKNMFAVAEFWKNDLGAIENYLQKTNWNHSVFDVPLHYNLYNASKSGGNYDMRNIFNGTVVQRHPSHAVTFVDNHDSQPEEALESFVEEWFKPLAYALTLTREQGYPSVFYGDYYGIPTHGVPAMRSKIDPILEARQKYAYGPQHDYLDHPDVIGWTREGDSSHPKSGLATLITDGPGGSKRMYAGLKNAGETWYDITGNRSDTVKIGSDGWGEFHVNDGSVSIYVQK

SEQ ID NO: 27804 - protein, 483 aa, Bacillus sp.
HHNGTNLTMMQYFEWYLPNDGNHWNRLNSDASNLKSKGITAVWIPPAWKGASQNDVGYGAYDLYDLGEFNQKGTVRTKYGTRSQLQAAVTSLKNNGIQVYGDVVMNHKGGADATEMVRAVEVNPNNRNQEVTGEYTIEAWTRFDFPGRGNTHSSFKWRWYHFDGVDWDQSRRLNNRIYKFRGKAWDWEVDTEFGNYDYLMYADYDMDHPEVVNELRNWGVWYTNTLGLDGFRIDAVKHIKYSFTRDWINHVRSATGKNMFAVAEFWKNDLGAIENYLQKTNWNHSVFDVPLHYNLYNASKSGGNYDMRNIFNGTVVQAHPMHAVTFVDNHDSQPEEALESFVEEWFKPLAYALTLTREQGYPSVFYGDYYGIPTHGVPAMRSKIDPILEARQKYAYGPQHDYLDHPDVIGWTREGDSSHPKSGLATLITDGPGGSKRMYAGLKNAGETWYDITGNRSDTVKIGSDGWGEFHVNDGSVSIYVQK

SEQ ID NO: 27805 - protein, 483 aa, Bacillus sp.
HHNGTNGTMMQYFEWYLPNDGNHWNRLNSDASNLKSKGITAVWIPPAWKGASQNDVGYGAYDLYDLGEFNQKGTVRTKYGTRSQLQAAVTSLKNNGIQVYGDVVMNHKGGADATEMVGAVEVNPNNRNQEVTGEYTIEAWTRFDFPGRGNTHSSFKWRWYHFDGVDWDQSRRLNNRIYKFRGKAWDWEVDTEFGNYDYLMYADYDMDHPEVVNELRNWGVWYTNTLGLDGFRIDAVKHIKYSFTRDWINHVRSATGKNMFAVAEFWKNDLGAIENYLQKTNWNHSVFDVPLHYNLYNASKSGGNYDMRNIFNGTVVQRHPSHAVTFVDNHDSQPEEALESFVEEWFKPLAYALTLTREQGYPSVFYGDYYGIPTHGVPAMRSKIDPILEARQKYAYGPQHDYLDHPDVIGWTREGDSSHPKSGLATLITDGPGGSKRMYAGLKNAGETWYDITGNRSDTVKIGSDGWGEFHVNDGSVSIYVQK

SEQ ID NO: 27806 - protein, 483 aa, Bacillus sp.
HHNGTNGTMMQYFEWYLPNDGNHWNRLNSDASNLKSKGITAVWIPPAWKATSQNDVGYGAYDLYDLGEFNQKGTVRTKYGTRSQLQAAVTSLKNNGIQVYGDVVMNHKGGADATEMVRAVEVNPNNRNQEVTGEYTIEAWTRFDFPGRGNTHSSFKWRWYHFDGVDWDQSRDLNNRIYKFRGKAWDWEVDTEFGNYDYLMYADYDMDHPEVVNELRNWGVWYTNTLGLDGFRIDAVKHIKYSFTRDWINHVRSATGKNMFAVAEFWKNDLGAIENYLQKTNWNHSVFDVPLHYNLYNASKSGGNYDMRNIFNGTVVQRHPSHAVTFVDNHDSQPEEALESFVEEWFKPLAYALTLTREQGYPSVFYGDYYGIPTHGVPAMRSKIDPILEARQKYAYGPQHDYLDHPDVIGWTREGDSSHPKSGLATLITDGPGGSKRMYAGLKNAGETWYDITGNRSDTVKIGSDGWGEFHVNDGSVSIYVQK

SEQ ID NO: 27807 - protein, 485 aa, Synthetic construct
HHNGTNGTMMQYFEWYLPNDGNHWNRLNSDASNLKSKGITAVWIPPAWKGASQNDVGYGAYDLYDLGEFNQKGTVRTKYGTRSQLQAAVTSLKNNGIQVYGDVVMNHKGGADATEMVRAVEVNPNNRNQEVTGEYTIEAWTRFHFPGRGNTHSSFKWRWYHFDGVDWDQSRRLNNRIYKFRGHGKAWDWEVDTENGNYDYLMYADIDMDHPEVVNELRNWGVWYTNTLGLDGFRIDAVKHIKYSFTRDWINHVRSATGKNMFAVAEFWKNDLGAIENYLQKTNWNHSVFDVPLHYNLYNASKSGGNYDMRNIFNGTVVQRHPSHAVTFVDNHDSQPEEALESFVEEWFKPLAYALTLTREQGYPSVFYGDYYGIPTHGVPAMRSKIDPILEARQKYAYGPQHDYLDHPDVIGWTREGDSSHPKSGLATLITDGPGGSKRMYAGLKNAGETWYDITGNRSDTVKIGSDGWGEFHVNDGSVSIYVQK

SEQ ID NO: 27808 - protein, 483 aa, Bacillus sp.
HHNGTNGTMMQYFEWYLPNDGNHWNRLNSDASNLKSKGITAVWIPPAWKAVSQNDVGYGAYDLYDLGEFNQKGTVRTKYGTRSQLQAAVTSLKNNGIQVYGDVVMNHKGGADATEMVRAVEVNPNNRNQEVTGEYTIEAWTRFDFPGRGNTHSSFKWRWYHFDGVDWDQSRRFDNRIYKFRGKAWDWEVDTEFGNYDYLMYADYDMDHPEVVNELRNWGVWYTNTLGLDGFRIDAVKHIKYSFTRDWINHVRIATGKNMFAVAEFWKNDLGAIENYLQKTNWNHSVFDVPLHYNLYNASKSGGNYDMRNIFNGTVVQRHPSHAVTFVDNHDSQPEEALESFVDEWFKPLAYALTLTREQGYPSVFYGDYYGIPTHGVPAMRSKIDPILEARQKYAYGPQHDYLDHPDVIGWTREGDSSHPKSGLATLITDGPGGSKRMYAGLKNAGETWYDITGNRSDTVKIGSDGWGEFHVNDGSVSIYVQK

SEQ ID NO: 27809 - protein, 485 aa, Bacillus sp.
HHNGTNGTMMQYFEWYLPNDGNHWNRLNSDASNLKSKGITAVWIPPAWKGASQNDVGYGAYDLYDLGEFNQKGTVRTKYGTRSQLQAAVTSLKNNGIQVYGDVVMNHKGGADATEMVDAVEVNPNNRNQEVTGEYTIEAWTRFDFPGRGNTHSSFKWRWYHFDGVDFDQSRQLDNRIYKFRGHGKAWDWEVDTEFGNYDYLMYADYDMDHPEVVNELRNWGVWYTNTLGLDGFRIDAVKHIKYSFTRDWINHVRSATGKNMFAVAEFWKNDLGAIENYLQKTNWNHSVFDVPLHYNLYNASKSGGNYDMRNIFNGTVVQRHPSHAVTFVDNHDSQPEEALESFVEEWFKPLAYALTLTREQGYPSVFYGDYYGIPTHGVPAMRSKIDPILEARQKYAYGPQHDYLDHPDVIGWTREGDSSHPKSGLATLITDGPGGSKRMYAGLKNAGETWYDITGNRSDTVKIGSDGWGEFHVNDGSVSIYVQK

SEQ ID NO: 27810 - protein, 485 aa, Bacillus sp.
HHNGTNGTMMQYFEWYLPNDGNHWNRLNSDASNLKSKGITAVWIPPAWKGASQNDVGYGAYDLYDLGEFNQKGTVRTKYGTRSQLQAAVTSLKNNGIQVYGDVVMNHKGGADATEMVRAVEVNPNNRNQEVTGDYTIEAWTRFDFPGRGNTHSSFKWRWYHFDGVDWDQSRRLNNRIYLFRNHGKAWDWEVDTEFGNYDYLMYADYDMDHPEVVNELRNWGVWYTNTLGLDGFRIDAVKHIKYSFTRDWINHVRSATGKNMFAVAEFWKNDLGAIENYLQKTNWNHSVFDVPLHYNLYNASKSGGNYDMRNIFNGTVVQRHPSHAVTFVDNHDSQPEEALESFVEEWFKPLAYALTLTREQGYPSVFYGDYYGIPTHGVPAMRSKIDPILEARQKYAYGPQHDYLDHPDVIGWTREGDSSHPKSGLATLITDGPGGSKRMYAGLKNAGETWYDITGNRSDTVKIGSDGWGEFHVNDGSVSIYVQK

SEQ ID NO: 27811 - protein, 485 aa, Synthetic construct
HHNGTNGTMMQYFEWYLPNDGNHWNRLNSDASNLKSKGITAVWIPPAWKGASQNDVGYGAYDLYDLGEFNQKGTVRTKYGTRSQLQAAVTSLKNNGIQVYGDVVMNHKGGADATEMVRAVEVNPNNRNQEVTGEYTIEAWTRFDFPGRGNTHSSFKWRWYHFDGVDWDQSRRLNNRIYKFRGHGKAWDWEVDTENGNYDYLMYADIDMDHPEVVNELRNWGVWYTNTLGLDGFRIDAVKHIKYSFTRDWINHVRSATGKNMFAVAEFWKNDLGAIENYLQKTNWNHSVFDVPLHYNLYNASKSGGNYDMRNIFNGTVVQRHPSHAVTFVDNHDSQPEEALESFVEEWFKPLAYALTLTREQGYPSVFYGDYYGIPTHGVPAMRSKIDPILEARQKYAYGPQRDYLDHPDVIGWTREGDSSHPKSGLATLITDGPGGSKRMYAGLKNAGETWYDITGNRSDTVKIGSDGWGEFHVNDGSVSIYVQK

SEQ ID NO: 27812 - protein, 483 aa, Bacillus sp.
HHNGTNGTMMQYFEWYLPNDGNHWNRLNSDASNLKSKGITAVWIPPAWKGASQNDVGYGAYDLYDLGEFNQKGTVRTKYGTRSQLQAAVTSLKNNGIQVYGDVVMNHKGGADATEMVRAVEVNPNNRNQEVTGEYTIEAWTRFDFPGRGNTHSSFKWRWYHFDGVDWDQSRRTDNRIYKFRGKAWDWEVDTEFGNYDYLMYADYDMDHPEVVNELRNWGVWYTNTLGLDGFRIDAVKHIKYSFTRDWINHVRSATGKNMFAVAEFWKNDLGAIENYLQKTNWNHSVFDVPLHYNLYNASKSGGNYDMRNIFNGTVVQRHPSHAVTFVDNHDSQPEEALESFVEEWFKPLAYALTLTREQGYPSVFYGDYYGIPTHGVPAMRSKIDPILEARQKYAYGPQHDYLDHPDVIGWTREGDSSHPKSGLATLITDGPGGSKRMYAGLKNAGETWYDITGNRSDTVKIGSDGWGEFHVNDGSVSIYVQK

SEQ ID NO: 27813 - protein, 485 aa, Synthetic construct
HHNGTNGTMMQYFEWYLPNDGNHWNRLNSDASNLKSKGITAVWIPPAWKGASQNDVGYGAYDLYDLGEFNQKGTVRTKYGTRSQLQAAVTSLKSNGIQVYGDVVMNHKGGADATEMVRAVEVNPNNRNQEVTGEYTIEAWTRFDFPGRGNTHSSFKWRWYHFDGVDWDQSRRLNNRIYKFRGHGKAWDWEVDTENGNYDYLMYADIDMDHPEVVNELRNWGVWYTNTLGLDGFRIDAVKHIKYSFTRDWINHVRSATGKNMFAVAEFWKNDLGAIENYLQKTNWNHSVFDVPLHYNLYNASKSGGNYDMRNIFNGTVVQRHPSHAVTFVDNHDSQPEEALESFVEEWFKPLAYALTLTREQGYPSVFYGDYYGIPTHGVPAMRSKIDPILEARQKYAYGPQHDYLDHPDVIGWTREGDSSHPKSGLATLITDGPGGSKRMYAGLKNAGETWYDITGNRSDTVKIGSDGWGEFHVNDGSVSIYVQK

SEQ ID NO: 27814 - protein, 485 aa, Synthetic construct
HHNGTNGTMMQYFEWYLPNDGNHWNRLNSDASNLKSKGITAVWIPPAWKGASQNDVGYGAYDLYDLGEFNQKGTVRTKYGTRSQLQAAVTSLKNNGIQVYGDVVMNHKGGADATEMVRAVEVNPNNRNQEVTGEYTIEAWTRFDFPGRGNTHSSFKWRWYHFDGVDWDQSRRLNNRIYKFRGHGKAWDWEVDTENGNYDYLMYADIDMDHPEVVNELRNWGVWYTNTLGLDGFRIDAVKHIKYSFTRDWINHVRSATGKNMFAVAEFWKNDLGAIENYLQKTNWNHSVFDVPLHYNLYNASKSGGNYDMRNIFNGTVVQRHPSHAVTFVDNHDSQPEEALESFVEEWFKPLAYALTLTREQGYPSVFYGDYYGIPTHGVPAMRSKIDPILEARQKYAYGPQHDYLDHPDVIGWTREGDSSHPKSGLATLITDGPGGSKRMYAGLKNAGETWYDITGNRSDTVKIGSEGWGEFHVNDGSVSIYVQK

SEQ ID NO: 27815 - protein, 483 aa, Synthetic construct
HHNGTNGTMMQYFEWYLPNDGNHWNRLNSDASNLKSKGITAVWIPPAWKGASQNDVGYGAYDLYDLGEFNQKGTVRTKYGTRSQLQAAVTSLKNNGIQVYGDVVMNHKGGADATEMVRAVEVNPNNRNQEVTGEYTIEAWTRFDFPGRGNTHSSFKWRWYHFDGVDWDQSRRLNNRIYKFRGKAWDWEVDTENGNYDYLMYADIDMDHTEVVNELRNWGVWYTNTLGLDGFRIDAVKHIKYSFTRDWINHVRSATGKNMFAVAEFWKNDLGAIENYLQKTNWNHSVFDVPLHYNLYNASKSGGNYDMRNIFNGTVVQRHPSHAVTFVDNHDSQPEEALESFVEEWFKPLAYALTLTREQGYPSVFYGDYYGIPTHGVPAMRSKIDPILEARQKYAYGPQHDYLDHPDVIGWTREGDSSHPKSGLATLITDGPGGSKRMYAGLKNAGETWYDITGNRSDTVKIGSDGWGEFHVNDGSVSIYVQK

SEQ ID NO: 27816 - protein, 483 aa, Bacillus sp.
HHNGTNGTMMQYFEWYLPNDGNHWNRLNSDASNLKSKGITAVWIPPAWKGASQNDVGYGAYDLYDLGEFNQKGTVRTKYGTRSQLQAAVTSLKNNGIQVYGDVVMNHKGGADATEMVRAVEVNPNNRNQEVTGEYTIEAWTRFDFPGRGNTHSSFKWRWYHFDGVDWDQSRQLNNRIYKFRGKAWDWEVDTEFGNYDYLMYVDYDMDHPEVVNELRNWGVWYTNTLGLDGFRIDAVKHIKYSFTRDWINHVRSATGKNMFAVAEFWKNDLGAIENYLQKTNWNHSVFDVPLHYNLYNASKSGGNYDMRNIFNGTVVQRHPSHAVTFVDNHDSQPEEALESFVEEWFKPLAYALTLTREQGYPSVFYGDYYGIPTHGVPAMRSKIDPILEARQKYAYGPQHDYLDHPDVIGWTREGDSSHPKSGLATLITDGPGGSKRMYAGLKNAGETWYDITGNRSDTVKIGSDGWGEFHVNDGSVSIYVQK

SEQ ID NO: 27817 - protein, 483 aa, Bacillus sp.
HHNGTNGTMMQYFEWYLPNDGNHWNRLNSDASNLKSKGITAVWIPPAWKGASQNDVGYGAYDLYDLGEFNQKGTVRTKYGTRSQLQAAVTSLKNNGIQVYGDVVMNHKGGADATEMVRAVEVNPNNRNQEVTGEYTIEAWTRFDFPGRGNTHSSFKWRWYHFDGVDWDQSRRLNNRIYKFRGKAWDWEVDTEFGNYDYLMYADYDMDHPEVVNELRTWGVWYTNTLGLDGFRIDAVKHIKYSFTRDWINHVRSATGKNMFAVAEFWKNDLGAIENYLQKTNWNHSVFDVPLHYNLYNASKSGGNYDMRNIFNGTVVQRHPSHAVTFVDNHDSQPEEALESFVEEWFKPLAYALTLTREQGYPSVFYGDYYGIPTHGVPAMRSKIDPILEARQKYAYGPQHDYLDHPDVIGWTREGDSSHPKSGLATLITDGPGGSKRMYAGLKNAGETWYDITGNRSDTVKIGSDGWGEFHVNDGSVSIYVQK

SEQ ID NO: 27818 - protein, 485 aa, Bacillus sp.
HHNGTNGTMMQYFEWYLPNDGNHWNRLNSDASNLKSKGITAVWIPPAWKGASQNDVGYGAYDLYDLGEFNQKGTVRTKYGTRSQLQAAVTSLKNNGIQVYGDVVMNHKGGADATEMVRAVEVNPNNRNQEVTGEYTIEAWTRFDFPGRGNTHSSFKWRWYHFDGVDWDQSREFNNRIYKFRGHGKAWDWEVDTEFGNYDYLMYVDYDMDHPEVVNELRNWGVWYTNTLGLDGFRIDAVKHIKYSFTRDWINHVRSATGKNMFAVAEFWKNDLGAIENYLQKTNWNHSVFDVPLHYNLYNASKSGGNYDMRNIFNGTVVQRHPSHAVTFVDNHDSQPEEALESFVEEWFKPLAYALTLTREQGYPSVFYGDYYGIPTHGVPAMRSKIDPILEARQKYAYGPQHDYLDHPDVIGWTREGDSSHPKSGLATLITDGPGGSKRMYAGLKNAGETWYDITGNRSDTVKIGSDGWGEFHVNDGSVSIYVQK

SEQ ID NO: 27819 - protein, 485 aa, Synthetic construct
HHNGTNGTMMQYFEWYLPNDGNHWNRLNSDASNLKSKGITAVWIPPAWKGASQNDVGYGAYDLYDLGEFNQKGTVRTKYGTRSQLQAAVTSLKNNGIQVYGDVVMNHKGGADATEMVRAVEVNPNNRNQEVTGEYTIEAWTRFDFPGRGNTHSSFKWRWYHFDGVDWDQSRRLNNRIYKFRGHGKAWDWEVDTENGNYDYLMYADIDMDHPEVVNELRNWGVWYTNTLGLDGFRIDAVKHIKYSFTRDWINHVRSATGKNMFAVAEFWKNDLGAIENYLQKTNWNHSVFDVPLHYNLYNASKSGGNYDMRNIFNGTVVQRHPSHAVTFVDNHDSQPEEALESFVEPWFKPLAYALTLTREQGYPSVFYGDYYGIPTHGVPAMRSKIDPILEARQKYAYGPQHDYLDHPDVIGWTREGDSSHPKSGLATLITDGPGGSKRMYAGLKNAGETWYDITGNRSDTVKIGSDGWGEFHVNDGSVSIYVQK

SEQ ID NO: 27820 - protein, 483 aa, Bacillus sp.
HHNGTNGTMMQYFEWYLPNDGNHWNRLNSDASNLKSKGITAVWIPPAWKGASQNDVGYGAYDLYDLGEFNQKGTVRTKYGTRSQLQAAVTSLKNNGIQVYGDVVMNHKGGADATEMVRAVEVNPNNRNQEVTGEYTIEAWTRFDFPGRGNTHSSFKWRWYHFDGVDWDQSRRTQNRIYKFRGKAWDWEVDTEFGNYDYLMYVDYDMDHPEVVNELRNWGVWYTNTLGLDGFRIDAVKHIKYSFTRDWINHVRSATGKNMFAVAEFWKNDLGAIENYLQKTNWNHSVFDVPLHYNLYNASKSGGNYDMRNIFNGTVVQRHPSHAVTFVDNHDSQPEEALESFVEEWFKPLAYALTLTREQGYPSVFYGDYYGIPTHGVPAMRSKIDPILEARQKYAYGPQHDYLDHPDVIGWTREGDSSHPKSGLATLITDGPGGSKRMYAGLKNAGETWYDITGNRSDTVKIGSDGWGEFHVNDGSVSIYVQK

SEQ ID NO: 27821 - protein, 483 aa, Bacillus sp.
HHNGTNGTMMQYFEWYLPNDGNHWNRLNSDASNLKSKGITAVWIPPAWKGASQNDVGYGAYDLYDLGEFNQKGTVRTKYGTRSQLQAAVTSLKNNGIQVYGDVVMNHKGGADATEMVRAVEVNPNNRNQEVTGEYTIEAWTRFDFPGRGNTHSSFKWRWYHFDGVDWDQSRRFSNRIYKFRGKAWDWEVDTEFGNYDYLMYTDYDMDHPEVVNELRNWGVWYTNTLGLDGFRIDAVKHIKYSFTRDWINHVRSATGKNMFAVAEFWKNDLGAIENYLQKTNWNHSVFDVPLHYNLYNASKSGGNYDMRNIFNGTVVQRHPSHAVTFVDNHDSQPEEALESFVEEWFKPLAYALTLTREQGYPSVFYGDYYGIPTHGVPAMRSKIDPILEARQKYAYGPQHDYLDHQDVIGWTREGDSSHPKSGLATLITDGPGGSKRMYAGLKNAGETWYDITGNRSDTVKIGSDGWGEFHVNDGSVSIYVQK

SEQ ID NO: 27822 - protein, 485 aa, Bacillus sp.
HHNGTNGTMMQYFEWYLPNDGNHWNRLNSDASNLKSKGITAVWIPPAWKATSQNDVGYGAYDLYDLGEFNQKGTVRTKYGTRSQLQAAVTSLKNNGIQVYGDVVMNHKGGADATEMVRAVEVNPNNRNQEVTGEYTIEAWTRFDFPGRGNTHSSFKWRWYHFDGVDWDQSRDLNNRIYKFRGHGKAWDWEVDTEFGNYDYLMYADYDMDHPEVVNELRNWGVWYTNTLGLDGFRIDAVKHIKYSFTRDWINHVRSATGKNMFAVAEFWKNDLGAIENYLQKTNWNHSVFDVPLHYNLYNASKSGGNYDMRNIFNGTVVQRHPSHAVTFVDNHDSQPEEALESFVDPWFKPLAYALTLTREQGYPSVFYGDYYGIPTHGVPAMRSKIDPILEARQKYAYGPQHDYLDHPDVIGWTREGDSSHPKSGLATLITDGPGGSKRMYAGLKNAGETWYDITGNRSDTVKIGSDGWGEFHVNGGSVSIYVQK

SEQ ID NO: 27823 - protein, 485 aa, Bacillus sp.
HHNGTNGTMMQYFEWYLPNDGNHWNRLNSDASNLKSKGITAVWIPPAWKAASQNDVGYGAYDLYDLGEFNQKGTVRTKYGTRSQLQAAVTSLKNNGIQVYGDVVMNHKGGADATEMVRAVEVNPNNRNQEVTGEYTIEAWTRFDFPGRGNTHSSFKWRWYHFDGVDWDQSRQLDNRIYKFRGHGKAWDWEVDTEFGNYDYLMYADYDMDHPEVVNELRNWGVWYTNTLGLDGFRIDAVKHIKYSFTRDWINHVRSATGKNMFAVAEFWKNDLGAIENYLQKTNWNHSVFDVPLHYNLYNASKSGGNYDMRNIFNGTVVQRHPSHAVTFVDNHDSQPEEALESFVEEWFKPLAYALTLTREQGYPSVFYGDYYGIPTHGVPAMRSKIDPILEARQKYAYGPQHDYLDHPDVIGWTREGDSSHPKSGLATLITDGPGGSKRMYAGLKNAGETWYDITGNRSDTVKIGSDGWGEFHVNDGSVSIYVQK

SEQ ID NO: 27824 - protein, 485 aa, Bacillus sp.
HHNGTNGTMMQYFEWYLPNDGNHWNRLNSDASNLKSKGITAVWIPPAWKGASQNDVGYGAYDLYDLGEFNQKGTVRTKYGTRSQLQAAVTSLKNNGIQVYGDVVMNHKGGADATEMVRAVEVNPNNRNQEVTGEYTIEAWTRFDFPGRGNTHSSFKWRWYHFDGVDWDQSRNLDNRIYKFRGHGKAWDWEVDTEFGNYDYLMYADYDMDHPEVVNELRNWGVWYTNTLGLDGFRIDAVKHIKYSFTRDWINHVRSATGKNMFAVAEFWKNDLGAIENYLQKTNWNHSVFDVPLHYNLYNASKSGGNYDMRNIFNGTVVQRHPSHAVTFVDNHDSQPEEALESFVEEWFKPLAYALTLTREQGYPSVFYGDYYGIPTHGVPAMRSKIDPILEARQKYAYGPQHDYLDHPDVIGWTREGDSSHPKSGLATLITDGPGGSKRMYAGLKNAGETWYDITGNRSDTVKIGSDGWGEFHVNDGSVSIYVQK

SEQ ID NO: 27825 - protein, 485 aa, Bacillus sp.
HHNGTNGTMMQYFEWYLPNDGNHWNRLNSDASNLKSKGITAVWIPPAWKGVSQNDVGYGAYDLYDLGEFNQKGTVRTKYGTRSQLQAAVTSLKNNGIQVYGDVVMNHKGGADATEMVRAVEVNPNNRNQEVTGEYTIEAWTRFDFPGRGNTHSSFKWRWYHFDGVDWDQSRQLNNRIYKFRGHGKAWDWEVDTEFGNYDYLMYVDYDMDHPEVVNELRNWGVWYTNTLGLDGFRIDAVKHIKYSFTRDWINHVRSATGKNMFAVAEFWKNDLGAIENYLQKTNWNHSVFDVPLHYNLYNASKSGGNYDMRNIFNGTVVQRHPSHAVTFVDNHDSQPEEALESFVEEWFKPLAYALTLTREQGYPSVFYGDYYGIPTHGVPAMRSKIDPILEARQKYAYGPQHDYLDHPDVIGWTREGDSSHPKSGLATLITDGPGGSKRMYAGLKNAGETWYDITGNRSDTVKIGSDGWGEFHVNDGSVSIYVQK

SEQ ID NO: 27826 - protein, 485 aa, Bacillus sp.
HHNGTNGTMMQYFEWYLPNDGNHWNRLNSDASNLKSKGITAVWIPPAWKAASQNDVGYGAYDLYDLGEFNQKGTVRTKYGTRSQLQAAVTSLKNNGIQVYGDVVMNHKGGADATEMVRAVEVNPNNRNQEVTGEYTIEAWTRFDFPGRGNTHSSFKWRWYHFDGVDWDQSRDLQNRIYKFRGHGKAWDWEVDTEFGNYDYLMYADYDMDHPEVVNELRNWGVWYTNTLGLDGFRIDAVKHIKYSFTRDWINHVRSATGKNMFAVAEFWKNDLGAIENYLQKTNWNHSVFDVPLHYNLYNASKSGGNYDMRNIFNGTVVQAHPNHAVTFVDNHDSQPEEALESFVEEWFKPLAYALTLTREQGYPSVFYGDYYGIPTHGVPAMRSKIDPILEARQKYAYGPQHDYLDHPDVIGWTREGDSSHPKSGLATLITDGPGGSKRMYAGLKNAGETWYDITGNRSDTVKIGSDGWGEFHVNDGSVSIYVQK

SEQ ID NO: 27827 - protein, 483 aa, Synthetic construct
HHNGTNGTMMQYFEWYLPNDGNHWNRLNSDASNLKSKGITAVWIPPAWKGASQNDVGYGAYDLYDLGEFNQKGTVRTKYGTRSQLQAAVTSLKNNGIQVYGDVVMNHKGGADATEMVRAVEVNPNNRNQEVTGEYTIEAWTRFDFPGRGNTHSSFKWRWYHFDGVDWDQSRRLNNRIYKFRGKAWDWEVDTEYGNYDYLMYADYDMDHPEVVNELRNWGVWYTNTLGLDGFRIDAVKHIKYSFTRDWINHVRSATGKNMFAVAEFWKNDLGAIENYLQKTNWNHSVFDVPLHYNLYNASKSGGNYDMRNIFNGTVVQRHPSHAVTFVDNHDSQPEEALESFVEEWFKPLAYALTLTREQGYPSVFYGDYYGIPTHGVPAMRSKIDPILEARQKYAYGPQHDYLDHPDVIGWTREGDSSHPKSGLATLITDGPGGSKRMYAGLKNAGETWYDITGNRSDTVKIGSDGWGEFHVNDGSVSIYVQK

SEQ ID NO: 27828 - protein, 485 aa, Bacillus sp.
HHNGTNGTMMQYFEWYLPNDGNHWNRLNSDASNLKSKGITAVWIPPAWKGASQNDVGYGAYDLYDLGEFNQKGTVRTKYGTRSQLQAAVTSLKNNGITVYGDVVMNHKGGADATEMVRAVEVNPNNRNQEVTGEYTIEAWTRFDFPGRGNTHSSFKWRWYHFDGVDWDQSRRLNNRIYKFRGHGKAWDWEVDTEFGNYDYLMYADYDMDHPEVVNELRNWGVWYTNTLGLDGFRIDAVKHIKYSFTRDWINHVRSATGKNMFAVAEFWKNDLGAIENYLQKTNWNHSVFDVPLHYNLYNASKSGGNYDMRNIFNGTVVQSHPMHAVTFVDNHDSQPEEALESFVEEWFKPLAYALTLTREQGYPSVFYGDYYGIPTHGVPAMRSKIDPILEARQKYAYGPQHDYLDHPDVIGWTREGDSSHPKSGLATLITDGPGGSKRMYAGLKNAGETWYDITGNRSDTVKIGSDGWGEFHVNDGSVSIYVQK

SEQ ID NO: 27829 - protein, 483 aa, Bacillus sp.
HHNGTNGTMMQYFEWYLPNDGNHWNRLNSDASNLKSKGITAVWIPPAWKGVSQNDVGYGAYDLYDLGEFNQKGTVRTKYGTRSQLQAAVTSLKNNGIQVYGDVVMNHKGGADATEMVRAVEVNPNNRNQEVTGEYTIEAWTRFDFPGRGNTHSSFKWRWYHFDGVDWDQSRRVNNRIYKFRGKAWDWEVDTEFGNYDYLMYADYDMDHPEVVNELRNWGVWYTNTLGLDGFRIDAVKHIKYSFTRDWINHVRSATGKNMFAVAEFWKNDLGAIENYLQKTNWNHSVFDVPLHYNLYNASKSGGNYDMRNIFNGTVVQRHPSHAVTFVDNHDSQPEEALESFVEEWFKPLAYALTLTREQGYPSVFYGDYYGIPTHGVPAMRSKIDPILEARQKYAYGPQHDYLDHPDVIGWTREGDSSHPKSGLATLITDGPGGSKRMYAGLKNAGETWYDITGNRSDTVKIGSDGWGEFHVNDGSVSIYVQK

SEQ ID NO: 27830 - protein, 483 aa, Bacillus sp.
HHNGTNGTMMQYFEWYLPNDGNHWNRLNSDASNLKSKGITAVWIPPAWKGTSQNDVGYGAYDLYDLGEFNQKGTVRTKYGTRSQLQAAVTSLKNNGIQVYGDVVMNHKGGADATEMVRAVEVNPNNRNQEVTGEYTIEAWTRFDFPGRGNTHSSFKWRWYHFDGVDWDQSRNLNNRIYKFRGKAWDWEVDTEFGNYDYLMYVDYDMDHPEVVNELRNWGVWYTNTLGLDGFRIDAVKHIKYSFTRDWINHVRSATGKNMFAVAEFWKNDLGAIENYLQKTNWNHSVFDVPLHYNLYNASKSGGNYDMRNIFNGTVVQRHPSHAVTFVDNHDSQPEEALESFVEEWFKPLAYALTLTREQGYPSVFYGDYYGIPTHGVPAMRSKIDPILEARQKYAYGPQHDYLDHPDVIGWTREGDSSHPKSGLATLITDGPGGSKRMYAGLKNAGETWYDITGNRSDTVKIGSDGWGEFHVNDGSVSIYVQK

SEQ ID NO: 27831 - protein, 485 aa, Synthetic construct
HHNGTNGTMMQYFEWYLPNDGNHWNRLNSDASNLKSKGITAVWIPPAWKGASQNDVGYGAYDLYDLGEFNQKGTVRTKYGTRSQLQAAVTSLKNNGIQVYGDVVMNHKGGADATEMVRAVEVNPNNRNQEVTGEYTIEAWTRFDFPGRGNTHSSFKWRWYHFDGTDWDQSRRLNNRIYKFRGHGKAWDWEVDTENGNYDYLMYADIDMDHPEVVNELRNWGVWYTNTLGLDGFRIDAVKHIKYSFTRDWINHVRSATGKNMFAVAEFWKNDLGAIENYLQKTNWNHSVFDVPLHYNLYNASKSGGNYDMRNIFNGTVVQRHPSHAVTFVDNHDSQPEEALESFVEEWFKPLAYALTLTREQGYPSVFYGDYYGIPTHGVPAMRSKIDPILEARQKYAYGPQHDYLDHPDVIGWTREGDSSHPKSGLATLITDGPGGSKRMYAGLKNAGETWYDITGNRSDTVKIGSDGWGEFHVNDGSVSIYVQK

SEQ ID NO: 27832 - protein, 485 aa, Bacillus sp.
HHNGTNGTMMQYFEWYLPNDGNHWNRLNSDASNLKSKGITAVWIPPAWKGASQNDVGYGAYDLYDLGEFNQKGTVRTKYGTRSQLQAAVTSLKNNGIQVYGDVVMNHKGGADATEMVPAVEVNPNNRNQEVTGEYTIEAWTRFDFPGRGNTHSSFKWRWYHFDGVDWDQSRRLNNRIYKFRGHGKAWDWEVDTEFGNYDYLMYADYDMDHPEVVNELRNWGVWYTNTLGLDGFRIDAVKHIKYSFTRDWINHVRSATGKNMFAVAEFWKNDLGAIENYLQKTNWNHSVFDVPLHYNLYNASKSGGNYDMRNIFNGTVVQRHPSHAVTFVDNHDSQPEEALESFVEEWFKPLAYALTLTREQGYPSVFYGDYYGIPTHGVPAMRSKIDPILEARQKYAYGPQHDYLDHPDVIGWTREGDSSHPKSGLATLITDGPGGSKRMYAGLKNAGETWYDITGNRSDTVKIGSDGWGEFHVNDGSVSIYVQK

SEQ ID NO: 27833 - protein, 485 aa, Bacillus sp.
HHNGTNGTMMQYFEWYLPNDGNHWNRLNSDASNLKSKGITAVWIPPAWKATSQNDVGYGAYDLYDLGEFNQKGTVRTKYGTRSQLQAAVTSLKNNGIQVYGDVVMNHKGGADATEMVRAVEVNPNNRNQEVTGEYTIEAWTRFDFPGRGNTHSSFKWRWYHFDGVDWDQSRELTNRIYKFRGHGKAWDWEVDTEFGNYDYLMYADYDMDHPEVVNELRNWGVWYTNTLGLDGFRIDAVKHIKYSFTRDWINHVRSATGKNMFAVAEFWKNDLGAIENYLQKTNWNHSVFDVPLHYNLYNASKSGGNYDMRNIFNGTVVQRHPSHAVTFVDNHDSQPEEALESFVEEWFKPLAYALTLTREQGYPSVFYGDYYGIPTHGVPAMRSKIDPILEARQKYAYGPQHDYLDHPDVIGWTREGDSSHPKSGLATLITDGPGGSKRMYAGLKNAGETWYDITGNRSDTVKIGSDGWGEFHVNDGSVSIYVQK

SEQ ID NO: 27834 - protein, 485 aa, Bacillus sp.
HHNGTNGTMMQYFEWYLPNDGNHWNRLNSDASNLKSKGITAVWIPPAWKGASQNDVGYGAYDLYDLGEFNQKGTVRTKYGTRSQLQAAVTSLKNNGIQVYGDVVMNHKGGADATEMVRAVEVNPNNRNQEVTGEYTIEAWTRFDFPGRGNTHSSFKWRWYHFDGVDWDQSRRLNNRIYKFRGHGKAWDWEVDTEFGNYDYLMYADYDMDHPEVVNELRNWGVWYTNTLGLDGFRIDAVKHIKYSFTRDWINHVRSATGKNMFAVAEFWKNDLGAIENYLQKTNWNHSVFDVPLHYNLYNASKSGGNYDMRNIFNGTVVQSHPMQAVTFVDNHDSQPEEALESFVEEWFKPLAYALTLTREQGYPSVFYGDYYGIPTHGVPAMRSKIDPILEARQKYAYGPQHDYLDHPDVIGWTREGDSSHPKSGLATLITDGPGGSKRMYAGLKNAGETWYDITGNRSDTVKIGSDGWGEFHVNDGSVSIYVQK

SEQ ID NO: 27835 - protein, 485 aa, Bacillus sp.
HHNGTNGTMMQYFEWYLPNDGNHWNRLNSDASNLKSKGITAVWIPPAWKGASQNDVGYGAYDLYDLGEFNQKGTVRTKYGTRSQLQAAVTSLKNNGIQVYGDVVMNHKGGADATEMVRAVEVNPNNRNQEVTGEYTIEAWTRFDFPGRGNTHSSFKWRWYHFDGVDWDQSRRLNNRIYKFRGHGKAWDWEVDTEFGNYDYLMYADYDMDHPEVVNELRNWGVWYTNTLGLDGFRIDAVKHIKYSFTRDWINHVRSATGKNMFAVAEFWKNDLGAIENYLQKTNWNHSVFDVPLHYNLYNASKSGGNYDMRNIFNGTVVQRHPSHAVTFVDNHDSQPEEALESFVEEWFKPLAYALTLTREQGYPSVFYGDYYGIPTHGVPAMRSKIDPILEARQKYAYGPQHDYLDHPDVIGWTREGDSSHPKSGLATAITDGPGGSKRMYAGLKNAGETWYDITGNRSDTVKIGSDGWGEFHVNDGSVSIYVQK

SEQ ID NO: 27836 - protein, 483 aa, Bacillus sp.
HHNGTNGTMMQYFEWYLPNDGNHWNRLNSDASNLKSKGITAVWIPPAWKGASQNDVGYGAYDLYDLGEFNQKGTVRTKYGTRSQLQAAVTSLKNNGIQVYGDVVMNHKGGADATEMVRAVEVNPNNRNQEVTGEYTIEAWTRFDFPGRGNTHSSFKWRWYHFDGVDWDQSRRLNNRIYKFRGKAWDWEVDTEFGNYDYLMYADYDMDHPEVVNELRNWGVWYTNTLGLDGFRIDAVKHIKYSFTRDWINHVRSATGKNMFAVAEFWKNDLGAIENYLQKTNWNHSVFDVPLHYNLYNASKSGGNYDMRNIFNGTVVQRHPSHAVTFVDNHDSQPEEALESFVDPWFKPLAYALTLTREQGYPSVFYGDYYGIPTHGVPAMRSKIDPILEARQKYAYGPQHDYLDHPDVIGWTREGDSSHPKSGLATLITDGPGGSKRMYAGLKNAGETWYDITGNRSDTVKIGSDGWGEFHVNGGSVSIYVQK

SEQ ID NO: 27837 - protein, 485 aa, Synthetic construct
HHNGTNGTMMQYFEWYLPNDGNHWNRLNSDASNLKSKGITAVWIPPAWKGASQNDVGYGAYDLYDLGEFNQKGTVRTKYGTRSQLQAAVTSLKNNGIQVYGDVVMNHKGGADATEMVRAVEVNPNNRNQEVTGEYTIEAWTRFDFPGRGNTHSSFKWRWYHFDGVDWDQSRRLNNRIYKFRGHGKAWDWEVDNEFGNYDYLMYADIDMDHPEVVNELRNWGVWYTNTLGLDGFRIDAVKHIKYSFTRDWINHVRSATGKNMFAVAEFWKNDLGAIENYLQKTNWNHSVFDVPLHYNLYNASKSGGNYDMRNIFNGTVVQRHPSHAVTFVDNHDSQPEEALESFVEEWFKPLAYALTLTREQGYPSVFYGDYYGIPTHGVPAMRSKIDPILEARQKYAYGPQHDYLDHPDVIGWTREGDSSHPKSGLATLITDGPGGSKRMYAGLKNAGETWYDITGNRSDTVKIGSDGWGEFHVNDGSVSIYVQK

SEQ ID NO: 27838 - protein, 483 aa, Bacillus sp.
HHNGKNGTMMQYFEWYLPNDGNHWNRLNSDASNLKSKGITAVWIPPAWKGASQNDVGYGAYDLYDLGEFNQKGTVRTKYGTRSQLQAAVTSLKNNGIQVYGDVVMNHKGGADATEMVRAVEVNPNNRNQEVTGEYTIEAWTRFDFPGRGNTHSSFKWRWYHFDGVDWDQSREFNNRIYKFRGKAWDWEVDTEFGNYDYLMYADYDMDHPEVVNELRNWGVWYTNTLGLDGFRIDAVKHIKYSFTRDWINHVRSATGKNMFAVAEFWKNDLGAIENYLQKTNWNHSVFDVPLHYNLYNASKSGGNYDMRNIFNGTVVQRHPSHAVTFVDNHDSQPEEALESFVDPWFKPLAYALTLTREQGYPSVFYGDYYGIPTHGVPAMRSKIDPILEARQKYAYGPQHDYLDHPDVIGWTREGDSSHPKSGLATLITDGPGGSKRMYAGLKNAGETWYDITGNRSDTVKIGSDGWGEFHVNGGSVSIYVQK

SEQ ID NO: 27839 - protein, 482 aa, Bacillus sp.
HHNGTNGTMMQYFEWYLPNDGNHWNRLNSDASNLKSKGITAVWIPPAWKGSQNDVGYGAYDLYDLGEFNQKGTVRTKYGTRSQLQAAVTSLKNNGIQVYGDVVMNHKGGADATEMVRAVEVNPNNRNQEVTGEYTIEAWTRFDFPGRGNTHSSFKWRWYHFDGVDWDQSRRLNNRIYKFRGKAWDWEVDTEFGNYDYLMYTDYDMDHPEVVNELRNWGVWYTNTLGLDGFRIDAVKHIKYSFTRDWINHVRSATGKNMFAVAEFWKNDLGAIENYLQKTNWNHSVFDVPLHYNLYNASKSGGNYDMRNIFNGTVVQRHPSHAVTFVDNHDSQPEEALESFVEEWFKPLAYALTLTREQGYPSVFYGDYYGIPTHGVPAMRSKIDPILEARQKYAYGPQHDYLDHPDVIGWTREGDSSHPKSGLATLITDGPGGSKRMYAGLKNAGETWYDITGNRSDTVKIGSDGWGEFHVNDGSVSIYVQK

SEQ ID NO: 27840 - protein, 482 aa, Bacillus sp.
HHNGTNGTMMQYFEWYLPNDGNHWNRLNSDASNLKSKGITAVWIPPAWKAISQNDVGYGAYDLYDLGEFNQKGTVRTKYGTRSQLQAAVTSLKNNGIQVYGDVVMNHKGGADATEMVRAVEVNPNNRNQEVTGEYTIEAWTRFDFPGRGNTHSSFKWRWYHFDGVDWDQSRDLNRIYKFRGKAWDWEVDTEFGNYDYLMYADYDMDHPEVVNELRNWGVWYTNTLGLDGFRIDAVKHIKYSFTRDWINHVRSATGKNMFAVAEFWKNDLGAIENYLQKTNWNHSVFDVPLHYNLYNASKSGGNYDMRNIFNGTVVQRHPSHAVTFVDNHDSQPEEALESFVEEWFKPLAYALTLTREQGYPSVFYGDYYGIPTHGVPAMRSKIDPILEARQKYAYGPQHDYLDHPDVIGWTREGDSSHPKSGLATLITDGPGGSKRMYAGLKNAGETWYDITGNRSDTVKIGSDGWGEFHVNDGSVSIYVQK

SEQ ID NO: 27841 - protein, 482 aa, Synthetic construct
HAGTNGTMMQYFEWYLPNDGNHWNRLNSDASNLKSKGITAVWIPPAWKGTSQADVGYGAYDLYDLGEFNQKGTVRTKYGTRSQLQAAVTSLKNNGIQVYGDVVMNHKAGADATEMVTAVEVNPNNRNQEVTGDYTIEAYTRFDFPGRGNTHSSFKWRWYHFDGVDWDQSRSLSNRIYKFRGKAWDWPVDTENGNYDYLMYADLDMDHPEVVNELRNWGVWYTNTLGLDGFRIDAVKHIKFSFTRDWINHVRSATGKNMFAVAEYWKNDLGAIENYLNFTNWNHSVFDVPLHYNLYAASNSGGNYDMRNIFNGTVVQKHPSHAVTFVDNHDTQPEESLESFVEEWFKPLAYALTLTREQGYPSVFYGDYYGIPTHGVPAMRSKIDPILEARQKYAYGPQHDYLDHPDIVGWTREGDSSHPNSGLATLITDGPGGAKRMYVGRQNAGETWHDITGNRSEPVVINSEGWGEFHVNKGSVSIYVQR

SEQ ID NO: 27842 - protein, 484 aa, Bacillus sp.
HNGTNGTMMQYFEWYLPNDGNHWNRLNSDASNLKSKGITAVWIPPAWKGASQNDVGYGAYDLYDLGEFNQKGTVRTKYGTRSQLQAAVTSLKNNGIQVYGDVVMNHKGGADATEMVRAVEVNPNNRNQEVTGEYTIEAWTRFDFPGRGNTHSSFKWRWYHFDGVDWDQSRRLNNRIYKFRGHGKAWDWEVDTEFGNYDYLMYADYDMDHPEVVNELRNWGVWYTNTLGLDGFRIDAVKHIKYSFTRDWINHVRSATGKNMFAVAEFWKNDLGAIENYLQKTNWNHSVFDVPLHYNLYNASKSGGNYDMRNIFNGTVVQRHPSHAVTFVDNHDSQPEEALESFVEEWFKPLAYALTLTREQGYPSVFYGDYYGIPTHGVPAMRSKIDPILEARQKYAYGPQHDYLDHPDVIGWTREGDSSHPKSGLATLITDGPGGSKRMYAGLKNAGETWYDITGNRSDTVKIGSDGWGEFHVNDGSVSIYVQK

SEQ ID NO: 27843 - protein, 482 aa, Bacillus sp.
HNGTNGTMMQYFEWYLPNDGNHWNRLNSDASNLKSKGITAVWIPPAWKGASQNDVGYGAYDLYDLGEFNQKGTVRTKYGTRSQLQAAVTSLKNNGIQVYGDVVMNHKGGADATEMVRAVEVNPNNRNQEVTGEYTIEAWTRFDFPGRGNTHSSFKWRWYHFDGVDWDQSRRLNNRIYKFRGKAWDWEVDTEFGNYDYLMYADYDMDHPEVVNELRNWGVWYTNTLGLDGFRIDAVKHIKYSFTRDWINHVRSATGKNMFAVAEFWKNDLGAIENYLQKTNWNHSVFDVPLHYNLYNASKSGGNYDMRNIFNGTVVQRHPSHAVTFVDNHDSQPEEALESFVEEWFKPLAYALTLTREQGYPSVFYGDYYGIPTHGVPAMRSKIDPILEARQKYAYGPQHDYLDHPDVIGWTREGDSSHPKSGLATLITDGPGGSKRMYAGLKNAGETWYDITGNRSDTVKIGSDGWGEFHVNDGSVSIYVQK

SEQ ID NO: 27844 - protein, 484 aa, Bacillus sp.
HHNTNGTMMQYFEWYLPNDGNHWNRLNSDASNLKSKGITAVWIPPAWKGASQNDVGYGAYDLYDLGEFNQKGTVRTKYGTRSQLQAAVTSLKNNGIQVYGDVVMNHKGGADATEMVRAVEVNPNNRNQEVTGEYTIEAWTRFDFPGRGNTHSSFKWRWYHFDGVDWDQSRRLNNRIYKFRGHGKAWDWEVDTEFGNYDYLMYADYDMDHPEVVNELRNWGVWYTNTLGLDGFRIDAVKHIKYSFTRDWINHVRSATGKNMFAVAEFWKNDLGAIENYLQKTNWNHSVFDVPLHYNLYNASKSGGNYDMRNIFNGTVVQRHPSHAVTFVDNHDSQPEEALESFVEEWFKPLAYALTLTREQGYPSVFYGDYYGIPTHGVPAMRSKIDPILEARQKYAYGPQHDYLDHPDVIGWTREGDSSHPKSGLATLITDGPGGSKRMYAGLKNAGETWYDITGNRSDTVKIGSDGWGEFHVNDGSVSIYVQK

SEQ ID NO: 27845 - protein, 484 aa, Bacillus sp.
HHNGTNGTMMQYFEWYLPNDGNHWNRLNSDASNLKSKGITAVWIPPAWKAISQNDVGYGAYDLYDLGEFNQKGTVRTKYGTRSQLQAAVTSLKNNGIQVYGDVVMNHKGGADATEMVRAVEVNPNNRNQEVTGEYTIEAWTRFDFPGRGNTHSSFKWRWYHFDGVDWDQSRDLNRIYKFRGHGKAWDWEVDTEFGNYDYLMYADYDMDHPEVVNELRNWGVWYTNTLGLDGFRIDAVKHIKYSFTRDWINHVRSATGKNMFAVAEFWKNDLGAIENYLQKTNWNHSVFDVPLHYNLYNASKSGGNYDMRNIFNGTVVQRHPSHAVTFVDNHDSQPEEALESFVEEWFKPLAYALTLTREQGYPSVFYGDYYGIPTHGVPAMRSKIDPILEARQKYAYGPQHDYLDHPDVIGWTREGDSSHPKSGLATLITDGPGGSKRMYAGLKNAGETWYDITGNRSDTVKIGSDGWGEFHVNDGSVSIYVQK

SEQ ID NO: 27846 - protein, 484 aa, Bacillus sp.
HHNGNGTMMQYFEWYLPNDGNHWNRLNSDASNLKSKGITAVWIPPAWKGASQNDVGYGAYDLYDLGEFNQKGTVRTKYGTRSQLQAAVTSLKNNGIQVYGDVVMNHKGGADATEMVRAVEVNPNNRNQEVTGEYTIEAWTRFDFPGRGNTHSSFKWRWYHFDGVDWDQSRRLNNRIYKFRGHGKAWDWEVDTEFGNYDYLMYADYDMDHPEVVNELRNWGVWYTNTLGLDGFRIDAVKHIKYSFTRDWINHVRSATGKNMFAVAEFWKNDLGAIENYLQKTNWNHSVFDVPLHYNLYNASKSGGNYDMRNIFNGTVVQRHPSHAVTFVDNHDSQPEEALESFVEEWFKPLAYALTLTREQGYPSVFYGDYYGIPTHGVPAMRSKIDPILEARQKYAYGPQHDYLDHPDVIGWTREGDSSHPKSGLATLITDGPGGSKRMYAGLKNAGETWYDITGNRSDTVKIGSDGWGEFHVNDGSVSIYVQK

SEQ ID NO: 27847 - protein, 481 aa, Bacillus licheniformis
VNGTLMQYFEWYTPNDGQHWKRLQNDAEHLSDIGITAVWIPPAYKGTSQADVGYGAYDLYDLGEFHQKGTVRTKYGTKGELQSAIKSLHSRDINVYGDVVINHKGGADATEDVTAVEVDPADRNRVISGEHLIKAWTHFHFPGRGSTYSDFKWYWYHFDGTDWDESRKLNRIYKFQGKTWDWEVSNEFGNYDYLMYADIDYDHPDVVAEIKRWGTWYANELQLDGFRLDAVKHIKFSFLRDWVNHVREKTGKEMFTVAEYWSNDLGALENYLNKTNFNHSVFDVPLHYQFHAASTQGGGYDMRKLLNGTVVSKHPLKSVTFVDNHDTQPGQSLESTVQTWFKPLAYAFILTRESGYPQVFYGDMYGTKGDSQREIPALKHKIEPILKARKQYAYGAQHDYFDHHDIVGWTREGDSSVANSGLAALITDGPGGAKRMYVGRQNAGETWHDITGNRSEPVVINSEGWGEFHVNGGSVSIYVQR

SEQ ID NO: 27848 - protein, 481 aa, unidentified
VNGTLMQYFEWYTPNDGQHWKRLQNDAEHLSDIGITAVWIPPAYKGTSQADVGYGAYDLYDLGEFHQKGTVRTKYGTKGELQSAIKSLHSRDINVYGDVVINHKGGADATEDVTAVEVDPADRNRVISGEHLIKAWTHFHFPGRGSTYSDFKWYWYHFDGTDWDESRKLNRIYKFQGKTWDWEVSNEFGNYDYLMYADFDYDHPDVVAEIKRWGTWYANELQLDGFRLDAVKHIKFSFLRDWVNHVREKTGKEMFTVAEYWSNDLGALENYLNKTNFNHSVFDVPLHYQFHAASTQGGGYDMRKLLNGTVVSKHPLKSVTFVDNHDTQPGQSLESTVQTWFKPLAYAFILTRESGYPQVFYGDMYGTKGDSQREIPALKHKIEPILKARKQYAYGAQHDYFDHHDIVGWTREGDSSVANSGLAALITDGPGGAKRMYVGRQNAGETWHDITGNRSEPVVINSEGWGEFHVNGGSVSIYVQR

SEQ ID NO: 27849 - protein, 481 aa, Bacillus amyloliquefaciens
VNGTLMQYFEWYTPNDGQHWKRLQNDAEHLSDIGITAVWIPPAYKAISQADVGYGAYDLYDLGEFHQKGTVRTKYGTKGELQSAIKSLHSRDINVYGDVVINHKAGADATEDVTAVEVDPADRNRVISGEHLIKAWTHFHFPGRGSTYSDFKWYWYHFDGTDWDESRKLNRIYKFQGKTWDWEVSNEFGNYDYLMYADFDYDHPDVVAEIKRWGTWYANELQLDGFRLDAVKHIKFSFLRDWVNHVREKTGKEMFTVAEYWSNDLGALENYLNKTNFNHSVFDVPLHYQFHAASTQGGGYDMRKLLNGTVVSKHPLKSVTFVDNHDTQPGQSLESTVQTWFKPLAYAFILTRESGYPQVFYGDMYGTKGDSQREIPALKHKIEPILKARKQYAYGAQHDYFDHHDIVGWTREGDSSVANSGLAALITDGPGGAKRMYVGRQNAGETWHDITGNRSEPVVINSEGWGEFHVNGGSVSIYVQR

SEQ ID NO: 27850 - protein, 481 aa, Bacillus amyloliquefaciens
VNGTLMQYFEWYTPNDGQHWKRLQNDAEHLSDIGITAVWIPPAYKGTSQADVGYGAYDLYDLGEFHQKGTVRTKYGTKGELQSAIKSLHSRDINVYGDVVINHKGGADATEDVTAVEVDPADRNRVISGEHLIKAWTHFHFPGRGSTYSDFKWYWYHFDGTDWDESRKLNRIYKFQGKTWDWEVSNENGFYDYLMYADIDYDHPDVVAEIKRWGTWYANELQLDGFRLDAVKHIKFSFLRDWVNHVREKTGKEMFTVAEYWSNDLGALENYLNKTNFNHSVFDVPLHYQFHAASTQGGGYDMRKLLNGTVVSKHPLKSVTFVDNHDTQPGQSLESTVQTWFKPLAYAFILTRESGYPQVFYGDMYGTKGDSQREIPALKHKIEPILKARKQYAYGAQHDYFDHHDIVGWTREGDSSVANSGLAALITDGPGGAKRMYVGRQNAGETWHDITGNRSEPVVINSEGWGEFHVNGGSVSIYVQR

SEQ ID NO: 27851 - protein, 481 aa, Bacillus sp.
NGTNGTMMQYFEWYLPNDGNHWNRLNSDASNLKSKGITAVWIPPAWKGASQNDVGYGAYDLYDLGEFNQKGTVRTKYGTRSQLQAAVTSLKNNGIQVYGDVVMNHKGGADATEMVRAVEVNPNNRNQEVTGEYTIEAWTRFDFPGRGNTHSSFKWRWYHFDGVDWDQSRRLNNRIYKFRGKAWDWEVDTEFGNYDYLMYADYDMDHPEVVNELRNWGVWYTNTLGLDGFRIDAVKHIKYSFTRDWINHVRSATGKNMFAVAEFWKNDLGAIENYLQKTNWNHSVFDVPLHYNLYNASKSGGNYDMRNIFNGTVVQRHPSHAVTFVDNHDSQPEEALESFVEEWFKPLAYALTLTREQGYPSVFYGDYYGIPTHGVPAMRSKIDPILEARQKYAYGPQHDYLDHPDVIGWTREGDSSHPKSGLATLITDGPGGSKRMYAGLKNAGETWYDITGNRSDTVKIGSDGWGEFHVNDGSVSIYVQK

SEQ ID NO: 27852 - protein, 483 aa, Bacillus sp.
NGTNGTMMQYFEWYLPNDGNHWNRLNSDASNLKSKGITAVWIPPAWKGASQNDVGYGAYDLYDLGEFNQKGTVRTKYGTRSQLQAAVTSLKNNGIQVYGDVVMNHKGGADATEMVRAVEVNPNNRNQEVTGEYTIEAWTRFDFPGRGNTHSSFKWRWYHFDGVDWDQSRRLNNRIYKFRGHGKAWDWEVDTEFGNYDYLMYADYDMDHPEVVNELRNWGVWYTNTLGLDGFRIDAVKHIKYSFTRDWINHVRSATGKNMFAVAEFWKNDLGAIENYLQKTNWNHSVFDVPLHYNLYNASKSGGNYDMRNIFNGTVVQRHPSHAVTFVDNHDSQPEEALESFVEEWFKPLAYALTLTREQGYPSVFYGDYYGIPTHGVPAMRSKIDPILEARQKYAYGPQHDYLDHPDVIGWTREGDSSHPKSGLATLITDGPGGSKRMYAGLKNAGETWYDITGNRSDTVKIGSDGWGEFHVNDGSVSIYVQK

SEQ ID NO: 27853 - protein, 481 aa, Bacillus licheniformis
LNGTLMQYFEWYTPNDGQHWKRLQNDSAYLAEHGITAVWIPPAYKGTSQADVGYGAYDLYDLGEFHQKGTVRTKYGTKGELQSAIKSLHSRDINVYGDVVINHKGGADATEDVTAVEVDPADRNRVISGEYLIKAWTHFHFPGRGSTYSDFKWHWYHFDGTDWDESRKLNRIYKFQGKAWDWEVSSENGNYDYLMYADIDYDHPDVVAEIKRWGTWYANELQLDGFRLDAVKHIKFSFLRDWVNHVREKTGKEMFTVAEYWQNDLGALENYLNKTNFNHSVFDVPLHYQFHAASTQGGGYDMRKLLNGTVVSKHPLKSVTFVDNHDTQPGQSLESTVQTWFKPLAYAFILTRESGYPQVFYGDMYGTKGDSQREIPSLKHKIEPILKARKQYAYGAQHDYFDHHDIVGWTREGDSSVANSGLAALITDGPGGAKRMYVGRQNAGETWHDITGNRSEPVVINSEGWGEFHVNGGSVSIYVQR

SEQ ID NO: 27854 - protein, 481 aa, Bacillus licheniformis
LNGTLMQYFEWYTPNDGQHWKRLQNDSAYLAEHGITAVWIPPAYKGTSQADVGYGAYDLYDLGEFHQKGTVRTKYGTKGELQSAIKSLHSRDIQVYGDVVINHKGGADATEDVTAVEVDPADRNRVISGEYLIKAWTHFHFPGRGSTYSDFKWHWYHFDGTDWDESRKLNRIYKFQGKAWDWEVSSENGNYDYLMYADIDYDHPDVVAEIKRWGTWYANELQLDGFRLDAVKHIKFSFLRDWVNHVREKTGKEMFTVAEYWQNDLGALENYLNKTNFNHSVFDVPLHYQFHAASTQGGGYDMRKLLNGTVVSKHPLKSVTFVDNHDTQPGQSLESTVQTWFKPLAYAFILTRESGYPQVFYGDMYGTKGDSQREIPALKHKIEPILKARKQYAYGAQHDYFDHHDIVGWTREGDSSVANSGLAALITDGPGGAKRMYVGRQNAGETWHDITGNRSEPVVINSEGWGEFHVNGGSVSIYVQR

SEQ ID NO: 27855 - protein, 481 aa, Bacillus licheniformis
LNGTLMQYFEWYTPNDGQHWKRLQNDSAYLAEHGITAVWIPPAYKGTSQSDVGYGAYDLYDLGEFHQKGTVRTKYGTKGELQSAIKSLHSRDINVYGDVVINHKGGADATEDVTAVEVDPADRNRVISGEYLIKAWTHFHFPGRGSTYSDFKWHWYHFDGTDWDESRKLNRIYKFQGKAWDWEVSSENGNYDYLMYADIDYDHPDVVAEIKRWGTWYANELQLDGFRFDAVKHIKFSFLRDWVNHVREKTGKEMFTVAEYWQNDLGALENYLNKTNFNHSVFDVPLHYQFHAASTQGGGYDMRKLLNGTVVSKHPLKSVTFVDNHDTQPGQSLESTVQTWFKPLAYAFILTRESGYPQVFYGDMYGTKGDSQREIPALKHKIEPILKARKQYAYGAQHDYFDHHDIVGWTREGDSSVANSGLAALITDGPGGAKRMYVGRQNAGETWHDITGNRSEPVVINSEGWGEFHVNGGSVSIYVQR

SEQ ID NO: 27856 - protein, 481 aa, Bacillus licheniformis
LNGTLMQYFEWYTPNDGQHWKRLQNDSAYLAEHGITAVWIPPAYKGTSQADVGYGAYDLYDLGEFHQKGTVRTKYGTKGELQSAIKSLHSRDINVYGDVVINHKGGADATEDVTAVEVDPADRNRVISGEYLIKAWTHFHFPGRGNTYSDFKWHWYHFDGTDWDESRKLNRIYKFQGKAWDWEVSSENGNYDYLMYADIDYDHPDVVAEIKRWGTWYANELQLDGFRLDAVKHIKFSFLRDWVNHVREKTGKEMFTVAEYWQNDLGALENYLNKTNFNHSVFDVPLHYQFHAASTQGGGYDMRKLLNGTVVSKHPLKSVTFVDNHDTQPGQSLESTVQTWFKPLAYAFILTRESGYPQVFYGDMYGTKGDSQREIPALKHKIEPILKARKQYAYGAQHDYFDHHDIVGWTREGDSSVANSGLAALITDGPGGAKRMYVGRQNAGETWHDITGNRSEPVVINSEGWGEFHVNGGSVSIYVQR

SEQ ID NO: 27857 - protein, 481 aa, Bacillus licheniformis
LNGTLMQYFEWYTPNDGQHWKRLQNDSAYLSEHGITAVWIPPAYKGTSQADVGYGAYDLYDLGEFHQKGTVRTKYGTKGELQSAIKSLHSRDINVYGDVVINHKGGADATEDVTAVEVDPADRNRVISGEYLIKAWTHFHFPGRGSTYSDFKWHWYHFDGTDWDESRKLNRIYKFQGKAWDWEVSSENGNYDYLMYADIDYDHPDVVAEIKRWGTWYANELQLDGFRLDAVKHIKFSFLRDWVNHVREKTGKEMFTVAEYWQNDLGALENYLNKTNFNHSVFDVPLHYQFHAASTQGGGYDMRKLLNGTVVSKHPLKSVTFVDNHDTQPGQSLESTVQTWFKPLAYAFILTRESGYPQVFYGDMYGTKGDSQREIPALKHKIEPILKARKQYAYGAQHDYFDHHDIVGWTREGDSSVANSGLAALITDGPGGAKRMYVGRQNAGETWHDITGNRSEPVVINSEGWGEFHVNGGSVSIYVQR

SEQ ID NO: 27858 - protein, 481 aa, Bacillus licheniformis
LNGTLMQYFEWYTPNDGQHWKRLQNDSAYLAEHGITAVWIPPAYKGTSQSDVGYGAYDLYDLGEFHQKGTVRTKYGTKGELQSAIKSLHSRDINVYGDVVINHKGGADATEDVTAVEVDPADRNRVISGEYLIKAWTHFHFPGRGSTYSDFKWHWYHFDGTDWDESRKLNRIYKFQGKAWDWEVSSENGNYDYLMYADIDYDHPDVVAEIKRWGTWYANELQLDGFRLDAVKHIKFSFLRDWVNHVREKTGKEMFTVAEYWQNDLGALENYLNKTNFNHSVFDVPLHYQFHAASTQGGGYDMRKLLNGTVVSKHPLKSVTFVDNHDTQPGQSLESTVQTWFKPLAYAFILTRESGYPQVFYGDMYGTKGDSQREIPALKHKIEPILKARKQYAYGAQHDYFDHHDIVGWTREGDSSVANSGLAALITDGPGGAKRMYVGRQNAGETWHDITGNRSEPVVINSEGWGEFHVNGGSVSIYVQR

SEQ ID NO: 27859 - protein, 481 aa, Anoxybacillus flavithermus
VNGTLMQYFEWYTPNDGQHWKRLQNDAEHLSDIGITAVWIPPAYKGTSQADVGYGAYDLYDLGEFHQKGTVRTKYGTKGELQSAIKSLHSRDINVYGDVVINHKGGADATEDVTAVEVDPADRNRVISGEHLIKAWTHFHFPGRGSTYSDFKWYWYHFDGTDWDESRKLNRIYKFQGKTWDWEVSNEFGNYDYLMYADFDYDHPDVVAEIKRWGTWYANELQLDGFRLDAVKHIKFSFLRDWVNHVREKTGKEMFTVAEYWSNDLGALENYLNKTNFNHSVFDVPLHYQFHAASTQGGGYDMRKLLNGTVVSKHPLKSVTFVDNHDTQPGQSLESTVQTWFKPLAYAFILTRESGYPQVFYGDMYGTKGDSQREIPALKHKIEPILKARKQYAYGAQHDYFDHHDIVGWTREGDSSVANSGLAALITDGPGGAKRMYVGRQNAGETWHDITGNRSEPVVINSEGWGEFHVNGGSVSIYVPK

SEQ ID NO: 27860 - protein, 481 aa, Bacillus licheniformis
LNGTLMQYFEWYTPNDGQHWKRLQNDSAYLAEHGITAVWIPPAYKGTSQADVGYGAYDLYDLGEFHQKGTVRTKYGTKGELQDAIKSLHSRDINVYGDVVINHKGGADATEDVTAVEVDPADRNRVISGEYLIKAWTHFHFPGRGSTYSDFKWHWYHFDGTDWDESRKLNRIYKFQGKAWDWEVSSENGNYDYLMYADIDYDHPDVVAEIKRWGTWYANELQLDGFRLDAVKHIKFSFLRDWVNHVREKTGKEMFTVAEYWQNDLGALENYLNKTNFNHSVFDVPLHYQFHAASTQGGGYDMRKLLNGTVVSKHPLKSVTFVDNHDTQPGQSLESTVQTWFKPLAYAFILTRESGYPQVFYGDMYGTKGDSQREIPALKHKIEPILKARKQYAYGAQHDYFDHHDIVGWTREGDSSVANSGLAALITDGPGGAKRMYVGRQNAGETWHDITGNRSEPVVINSEGWGEFHVNGGSVSIYVQR

SEQ ID NO: 27861 - protein, 480 aa, Bacillus sp.
HHNGTMMQYFEWYLPNDGNHWNRLNSDASNLKSKGITAVWIPPAWKGASQNDVGYGAYDLYDLGEFNQKGTVRTKYGTRSQLQAAVTSLKNNGIQVYGDVVMNHKGGADATEMVRAVEVNPNNRNQEVTGEYTIEAWTRFDFPGRGNTHSSFKWRWYHFDGVDWDQSRRLNNRIYKFRGKAWDWEVDTEFGNYDYLMYADYDMDHPEVVNELRNWGVWYTNTLGLDGFRIDAVKHIKYSFTRDWINHVRSATGKNMFAVAEFWKNDLGAIENYLQKTNWNHSVFDVPLHYNLYNASKSGGNYDMRNIFNGTVVQAHPSHAVTFVDNHDSQPEEALESFVEEWFKPLAYALTLTREQGYPSVFYGDYYGIPTHGVPAMRSKIDPILEARQKYAYGPQHDYLDHPDVIGWTREGDSSHPKSGLATLITDGPGGSKRMYAGLKNAGETWYDITGNRSDTVKIGSDGWGEFHVNDGSVSIYVQK

SEQ ID NO: 27862 - protein, 482 aa, Bacillus sp.
HHNGTMMQYFEWYLPNDGNHWNRLNSDASNLKSKGITAVWIPPAWKGASQNDVGYGAYDLYDLGEFNQKGTVRTKYGTRSQLQAAVTSLKNNGIQVYGDVVMNHKGGADATEMVRAVEVNPNNRNQEVTGEYTIEAWTRFDFPGRGNTHSSFKWRWYHFDGVDWDQSRRLNNRIYKFRGHGKAWDWEVDTEFGNYDYLMYADYDMDHPEVVNELRNWGVWYTNTLGLDGFRIDAVKHIKYSFTRDWINHVRSATGKNMFAVAEFWKNDLGAIENYLQKTNWNHSVFDVPLHYNLYNASKSGGNYDMRNIFNGTVVQAHPSHAVTFVDNHDSQPEEALESFVEEWFKPLAYALTLTREQGYPSVFYGDYYGIPTHGVPAMRSKIDPILEARQKYAYGPQHDYLDHPDVIGWTREGDSSHPKSGLATLITDGPGGSKRMYAGLKNAGETWYDITGNRSDTVKIGSDGWGEFHVNDGSVSIYVQK

SEQ ID NO: 27863 - protein, 480 aa, Bacillus sp.
APINETMMQYFEWDLPNDGTLWNRLHNNAQNLKNAGITALWLPPAYKGTSQSDVGYGVYDLYDLGEFNQKGTIRTKYGTKTQLERAIRSLKANGIQVYADVVFNHKAGADGTEFVDAVEVDPSNRNQEVSGTYQIEAWTKFDFPGRGNTYSSFKWRWYHFDGTDWDESRKLNRIYKFRGKAWDWEVDTENGNYDYLMFADLDMDHPEVVTELKNWGTWYVNTTNIDGFRLDAVKHIKFSFMRDWLTYVRNQTGKNLFAVGEFWSYDVNKLHNYITKTNGSMSLFDAPLHNNFYTASKSSGYFDMRYLLNNTLMKDQPSLAVTLVDNHDTQPGQSLQSWVEPWFKPLAYAFILTRQEGYPCVFYGDYYGIPKYNIPGLKSKIDPLLIARRDYAYGTQRDYIDHQDIIGWTREGIDTKPNSGLAALITDGPGGSKWMYVGKKHAGKVFYDLTGNRSDTVTINADGWGEFKVNGGSVSIWVAK

SEQ ID NO: 27864 - protein, 480 aa, Bacillus sp.
APINETMMQYFEWDLPNDGTLWTKVKNEAANLSSLGITALWLPPAYKGTSQSDVGYGVYDLYDLGEFNQKGTIRTKYGTKTQYIQAIQAAKAAGMQVYADVVFNHKAGADQTEFVDAVEVDPSNRNQEVSGTYQIEAWTKFDFPGRGNTYSSFKWRWYHFDGTDWDESRKLNRIYKFRGKAWDWEVDTENGNYDYLMFADLDMDHPEVVTELKNWGTWYVNTTNIDGFRLDAVKHIKFSFMRDWLTYVRNQTGKNLFAVGEFWKNDLGALENYITKTNGSMSLFDAPLHNNFYTASKSSGYFDMRNLLNGTLVQRHPSHAVTLVDNHDTQPGEALESFVQGWFKPLAYAFILTRQEGYPCVFYGDYYGIPKYNIPGLKSKIDPLLIARRDYAYGTQRDYIDHQDIIGWTREGIDTKPNSGLAALITDGPGGSKWMYVGKKHAGKVFYDLTGNRSDTVTINADGWGEFKVNGGSVSIWVAK

SEQ ID NO: 27865 - protein, 480 aa, Bacillus sp.
APINETMMQYFEWDLPNDGTLWNRLHNNAQNLKNAGITALWLPPAYKGTSQSDVGYGVYDLYDLGEFNQKGTIRTKYGTKTQYIQAIQAAKAAGMQVYADVVFNHKAGADQTEFVDAVEVDPSNRNQEVSGTYQIEAWTKFDFPGRGNTYSSFKWRWYHFDGTDWDESRKLNRIYKFRGKAWDWEVDTENGNYDYLMFADLDMDHPEVVTELKNWGTWYVNTTNIDGFRLDAVKHIKFSFMRDWLTYVRNQTGKNLFAVGEFWSYDVNKLHNYITKTNGSMSLFDAPLHNNFYTASKSSGYFDMRYLLNNTLMKDQPSLAVTLVDNHDTQPGEALESFVQGWFKPLAYAFILTRQEGYPCVFYGDYYGIPSDGVPGLKSKIDPLLIARRDYAYGTQRDYIDHQDIIGWTREGIDTKPNSGLAALITDGPGGSKWMYVGKKHAGKVFYDLTGNRSDTVTINADGWGEFKVNGGSVSIWVAK

SEQ ID NO: 27866 - protein, 480 aa, Bacillus sp.
APINETMMQYFEWDLPNDGTLWNRLHNNAQNLKNAGITALWLPPAYKGTSQSDVGYGVYDLYDLGEFNQKGTIRTKYGTKTQYIQAIQAAKAAGMQVYADVVFNHKAGADQTEFVDAVEVDPSNRNQEVSGTYQIEAWTKFDFPGRGNTYSSFKWRWYHFDGTDWDESRKLNRIYKFRGKAWDWEVDTENGNYDYLMFADLDMDHPEVVTELKNWGTWYVNTTNIDGFRLDAVKHIKFSFMRDWLTYVRNQTGKNLFAVGEFWSYDVNKLHNYITKTNGSMSLFDAPLHNNFYTASKSSGYFDMRNLLNGTLVQRHPSHAVTLVDNHDTQPGQSLQSWVEPWFKPLAYAFILTRQEGYPCVFYGDYYGIPKYNIPGLKSKIDPLLIARRDYAYGTQRDYIDHQDIIGWTREGIDTKPNSGLAALITDGPGGSKWMYVGKKHAGKVFYDLTGNRSDTVTINADGWGEFKVNGGSVSIWVAK

SEQ ID NO: 27867 - protein, 480 aa, unidentified
APINETMMQYFEWDLPNDGTLWTKVKNEAANLSSLGITALWLPPAYKGTSQSDVGYGVYDLYDLGEFNQKGTIRTKYGTKTQYIQAIQAAKAAGMQVYADVVFNHKAGADGTEFVDAVEVDPSNRNQETSGTYQIQAWTKFDFPGRGNTYSSFKWRWYHFDGTDWDESRKLNRIYKFTGKAWDWEVDTENGNYDYLLFADLDMDHPEVVTELKNWGTWYVNTTNIDGFRLDAVKHIKYQFFPDWLTYVRNQTGKNLFAVGEFWSYDVNKLHNYITKTNGSMSLFDAPLHNNFYTASKSSGYFDMRYLLNNTLMKDQPSLAVTLVDNHDTQPGQSLQSWVEPWFKPLAYAFILTRQEGYPCVFYGDYYGIPKYNIPGLKSKIDPLLIARRDYAYGPQHDYIDHPDVIGWTREGDSSAAKSGLAALITDGPGGSKRMYAGLKNAGETWYDITGNRSDTVKIGSDGWGEFHVNDGSVSIYVQK

SEQ ID NO: 27868 - protein, 480 aa, Bacillus sp.
APINETMMQYFEWDLPNDGTLWTKVKNEAANLSSLGITALWLPPAYKGTSQSDVGYGVYDLYDLGEFNQKGTIRTKYGTKTQLERAIRSLKANGIQVYADVVFNHKAGADQTEFVDAVEVDPSNRNQEVSGTYQIEAWTKFDFPGRGNTYSSFKWRWYHFDGTDWDESRKLNRIYKFRGKAWDWEVDTENGNYDYLMFADLDMDHPEVVTELKNWGTWYVNTTNIDGFRLDAVKHIKFSFMRDWLTYVRNQTGKNLFAVGEFWSYDVNKLHNYITKTNGSMSLFDAPLHNNFYTASKSSGYFDMRNLLNGTLVQRHPSHAVTLVDNHDTQPGQSLQSWVEPWFKPLAYAFILTRQEGYPCVFYGDYYGIPKYNIPGLKSKIDPLLIARRDYAYGTQRDYIDHQDIIGWTREGIDTKPNSGLAALITDGPGGSKWMYVGKKHAGKVFYDLTGNRSDTVTINADGWGEFKVNGGSVSIWVAK

SEQ ID NO: 27869 - protein, 480 aa, unidentified
APINETMMQYFEWDLPNDGTLWTKVKNEAANLSSLGITALWLPPAYKGTSQSDVGYGVYDLYDLGEFNQKGTIRTKYGTKTQYIQAIQAAKAAGMQVYADVVFNHKAGADGTEFVDAVEVDPSNRNQETSGTYQIQAWTKFDFPGRGNTYSSFKWRWYHFDGTDWDESRKLNRIYKFTGKAWDWEVDTENGNYDYLLFADLDMDHPEVVTELKNWGTWYVNTTNIDGFRLDAVKHIKYQFFPDWLTYVRNQTGKNLFAVGEFWSYDVNKLHNYITKTNGSMSLFDAPLHNNFYTASKSSGYFDMRYLLNNTLMKDQPSLAVTLVDNHDTQPGQSLQSWVEPWFKPLAYAFILTRQEGYPCVFYGDYYGIPKYNIPGLKSKIDPLLIARRDYAYGAQHDYFDHHDIVGWTREGDSSVANSGLAALITDGPGGAKRMYVGRQNAGETWHDITGNRSEPVVINSEGWGEFHVNGGSVSIYVQR

SEQ ID NO: 27870 - protein, 480 aa, Geobacillus stearothermophilus
NGTLMQYFEWYTPNDGQHWKRLQNDSAYLAEHGITAVWIPPAYKGTSQADVGYGAYDLYDLGEFHQKGTVRTKYGTKGELQSAIKSLHSRDINVYGDVVINHKGGADATEDVTAVEVDPADRNRVISGEYLIKAWTHFHFPGRGSTYSDFKWHWYHFDGTDWDESRKLNRIYKFQGKAWDWEVSSENGNYDYLMYADIDYDHPDVVAEIKRWGTWYANELQLDGFRLDAVKHIKFSFLRDWVNHVRSQTGKPLFTVGEYWSYDINKLHNYITKTNGTMSLFDAPLHNKFYTASKSGGAFDMRTLMTNTLMKDQPTLAVTFVDNHDTEPGQALQSWVDPWFKPLAYAFILTRQEGYPCVFYGDYYGIPQYNIPSLKSKIDPLLIARRDYAYGTQHDYLDHSDIIGWTREGVTEKPGSGLAALITDGPGGSKWMYVGKQHAGKVFYDLTGNRSDTVTINSDGWGEFKVNGGSVSVWVPRKTT

SEQ ID NO: 27871 - protein, 480 aa, Geobacillus stearothermophilus
NGTLMQYFEWYTPNDGQHWKRLQNDSAYLAEHGITAVWIPPAYKGTSQADVGYGAYDLYDLGEFHQKGTVRTKYGTKGELQSAIKSLHSRDINVYGDVVINHKGGADATEDVTAVEVDPADRNRVISGEYLIKAWTHFHFPGRGSTYSDFKWHWYHFDGTDWDESRKLNRIYKFQGKAWDWEVDTENGNYDYLMYADIDYDHPDVVAEIKRWGTWYANELQLDGFRLDAVKHIKFSFLRDWVNHVREKTGKPLFTVGEYWSYDINKLHNYITKTNGTMSLFDAPLHNKFYTASKSGGAFDMRTLMTNTLMKDQPTLAVTFVDNHDTEPGQALQSWVDPWFKPLAYAFILTRQEGYPCVFYGDYYGIPQYNIPSLKSKIDPLLIARRDYAYGTQHDYLDHSDIIGWTREGVTEKPGSGLAALITDGPGGSKWMYVGKQHAGKVFYDLTGNRSDTVTINSDGWGEFKVNGGSVSVWVPRKTT

SEQ ID NO: 27872 - protein, 482 aa, Bacillus sp.
APINETMMQYFEWDLPNDGTLWTKVKNEAANLSSLGITALWLPPAYKGTSQSDVGYGVYDLYDLGEFNQKGTIRTKYGTKTQYIQAIQAAKAAGMQVYADVVFNHKAGADGTEFVDAVEVDPSNRNQETSGTYQIQAWTKFDFPGRGNTYSSFKWRWYHFDGTDWDESRKLNRIYKFRSTGKAWDWEVDTENGNYDYLLFADLDMDHPEVVTELKNWGTWYVNTTNIDGFRLDAVKHIKYQFFPDWLTYVRNQTGKNLFAVGEFWSYDVNKLHNYITKTNGSMSLFDAPLHNNFYTASKSSGYFDMRYLLNNTLMKDQPSLAVTLVDNHDTQPGQSLQSWVEPWFKPLAYAFILTRQEGYPCVFYGDYYGIPKYNIPGLKSKIDPLLIARRDYAYGAQHDYFDHHDIVGWTREGDSSVANSGLAALITDGPGGAKRMYVGRQNAGETWHDITGNRSEPVVINSEGWGEFHVNGGSVSIYVQR

SEQ ID NO: 27873 - protein, 482 aa, Bacillus sp.
APINETMMQYFEWDLPNDGTLWTKVKNEAANLSSLGITALWLPPAYKGTSQSDVGYGVYDLYDLGEFNQKGTIRTKYGTKTQYIQAIQAAKAAGMQVYADVVFNHKAGADGTEFVDAVEVDPSNRNQETSGTYQIQAWTKFDFPGRGNTYSSFKWRWYHFDGTDWDESRKLNRIYKFRSTGKAWDWEVDTENGNYDYLLFADLDMDHPEVVTELKNWGTWYVNTTNIDGFRLDAVKHIKYQFFPDWLTYVRNQTGKNLFAVGEFWSYDVNKLHNYITKTNGSMSLFDAPLHNNFYTASKSSGYFDMRYLLNNTLMKDQPSLAVTLVDNHDTQPGQSLQSWVEPWFKPLAYAFILTRQEGYPCVFYGDYYGIPKYNIPGLKSKIDPLLIARRDYAYGPQHDYIDHPDVIGWTREGDSSAAKSGLAALITDGPGGSKRMYAGLKNAGETWYDITGNRSDTVKIGSDGWGEFHVNDGSVSIYVQK

SEQ ID NO: 27874 - protein, 483 aa, Synthetic construct
APVNGTMMQYFEWDLPNDGTLWTKVKNEASSLSALGITALWLPPAYKGTSQADVGYGVYDLYDLGEFNQKGTIRTKYGTKTQYLQAIQAAKSAGMQVYADVVFNHRMGADATETISAVEVNPSNRNQVTSGAYNISAWTDFEFPGRGNTYSSFKWHSYYFDGVDWDQSRQLSGKIYQIQGTGKAWDWEVDSENGNYDYLMGADIDMDHPEVVAELKNWGKWYVNTTNVDGFRLDAVKHIKYSFFPDWLSYVRNQTGKNLFAVGEFWGYDVNKLHNYITKTNGAMSLFDAPLHNNFYIASKSSGYFDMRYLLNNTLMKDQPALAVTLVDNHDTQPGQSLQSWVEPWFKPLAYAFILTRQEGYPCVFYGDYYGIPKYNIPGLKSKIDPLLIARRDYAYGTQRDYIDHQDIIGWTREGIDAKPNSGLAALITDGPGGSKWMYVGKRHAGKVFYDLTGNRSDTVTINADGWGEFKVNGGSVSIWVAK

SEQ ID NO: 27875 - protein, 488 aa, Bacillus subtilis
AAPFNGTMMQYFEWYLSCDPQSFSEPPQCEVKVANLGITALWLPPAYKGTSRSDVGYGVYDLYDLGEFNQKGAVRTKYGTKAQYLQAIQAAHAAGMQVYADVVFNHKGGADGTEWVLQISWWVDAVNQEISGTYQIQAWTKFDFPGRGNTYSSFKWRWYHFDGVDWDESRKLSRIYKFRGIGKAWDFHFAYFEKAYYDSTENGDIDDHPEVVTELKSWGKWYVNTTNIDGFRLDAVKHIDFSFFPDWLSDVRSQTGKPLFTVGEYWSYDINKLHNYIMKTNGTMSLFDAPLHFHDRTASKSGDAYDMRTLMTNTLMKDQPTLAVTFVDNHDTEPGQALQSWVDPWFKPLAYAFILTVIDRRRDGYGGDYYGIPQYNPSLKSKIDPLLIARRDYAYGTGHDYLDHSHDIIGWTREGVTEKPGSGLAALITDGPGGSKWMYVGKQHAGGNRTTVGGMETALTNGSSCDRQEGYPCVFYVSVWVPRKTTVS

SEQ ID NO: 27876 - protein, 483 aa, Bacillus sp.
HHNGTNGTMMQYFEWYLPNDGNHWNRLNSDASNLKSKGITAVWIPPAWKGASQNDVGYGAYDLYDLGEFNQKGTVRTKYGTRSQLQAAVTSLKNNGIQVYGDVVMNHKGGADATEMVRAVEVNPNNRNQEVTGEYTIEAWTRFDFPGRGNTHSSFKWRWYHFDGVDWDQSRRLNNRIYKFRGKAWDWEVDTEFGNYDYLMYADYDMDHPEVVNELRNWGVWYTNTLGLDGFRIDAVKHIKYSFTRDWINHVRSATGKNMFAVAEFWKNDLGAIENYLQKTNWNHSVFDVPLHYNLYNASKSGSNYDMRNIFNGTVVQRHPSHAVTFVDNHDSQPEEALESFVEEWFKPLAYALTLTREQGYPSVFYGDYYGIPTHGVPAMRSKIDPILEARQKYAYGPQHDYLDHPDVIGWTREGDSSHPKSGLATLITDGPGGSKRMYAGLKNAGETWYDITGNRSDTVKIGSDGWGEFHVNDGSVSIYVQK

SEQ ID NO: 27877 - protein, 485 aa, Bacillus sp.
HHNGTNGTMMQYFEWYLPNDGNHWNRLNSDASNLKSKGITAVWIPPAWKGASQNDVGYGAYDLYDLGEFNQKGTVRTKYGTRSQLQAAVTSLKNNGIQVYGDVVMNHKGGADATEMVRAVEVNPNNRNQEVTGEYTIEAWTRFDFPGRGNTHSSFKWRWLHFDGVDWDQSRRLNNRIYKFRGHGKAWDWEVDTEFGNYDYLMYADYDMDHPEVVNELRNWGVWYTNTLGLDGFRIDAVKHIKYSFTRDWINHVRSATGKNMFAVAEFWKNDLGAIENYLQKTNWNHSVFDVPLHYNLYNASKSGGNYDMRNIFNGTVVQRHPSHAVTFVDNHDSQPEEALESFVEEWFKPLAYALTLTREQGYPSVFYGDYYGIPTHGVPAMRSKIDPILEARQKYAYGPQHDYLDHPDVIGWTREGDSSHPKSGLATLITDGPGGSKRMYAGLKNAGETWYDITGNRSDTVKIGSDGWGEFHVNDGSVSIYVQK

SEQ ID NO: 27878 - protein, 485 aa, Bacillus sp.
HHNGTNGTMMQYFEWYLPNDGNHWNRLNSDASNLKSKGITAVWIPPAWKGASQNDVGYGAYDLYDLGEFNQKGTVRTKYGTRSQLQAAVTSLKNNGIQVYGDVVMNHKGGADATEMVDAVEVNPNNRNQEVTGEYTIEAWTRFDFPGRGNTHSSFKWRWYHFDGVDWDQSRRLNNRIYLFRAHGKAWDWEVDTEFGNYDYLMYADYDMDHPEVVNELRNWGVWYTNTLGLDGFRIDAVKHIKYSFTRDWINHVRSATGKNMFAVAEFWKNDLGAIENYLQKTNWNHSVFDVPLHYNLYNASKSGGNYDMRNIFNGTVVQRHPSHAVTFVDNHDSQPEEALESFVEEWFKPLAYALTLTREQGYPSVFYGDYYGIPTHGVPAMRSKIDPILEARQKYAYGPQHDYLDHPDVIGWTREGDSSHPKSGLATLITDGPGGSKRMYAGLKNAGETWYDITGNRSDTVKIGSDGWGEFHVNDGSVSIYVQK

SEQ ID NO: 27879 - protein, 485 aa, Bacillus sp.
HHNGTNGTMMQYFEWYLPNDGNHWNRLNSDASNLKSKGITAVWIPPAWKGASQNDVGYGAYDLYDLGEFNQKGTVRTKYGTRSQLQAAVTSLKNNGIQVYGDVVMNHKGGADATEMVRAVEVNPNNRNQEVTGEYTIEAWTRFDFPGRGNTHSSFKWRWYHFDGVDWDQSRRLNNRIYKFRGHGKAWDWEVDTEFGNYDYLMYADYDMDHPEVVNELRNFGVWYTNTLGLDGFRIDAVKHIKYSFTRDWINHVRSATGKNMFAVAEFWKNDLGAIENYLQKTNWNHSVFDVPLHYNLYNASKSGGNYDMRNIFNGTVVQRHPSHAVTFVDNHDSQPEEALESFVEEWFKPLAYALTLTREQGYPSVFYGDYYGIPTHGVPAMRSKIDPILEARQKYAYGPQHDYLDHPDVIGWTREGDSSHPKSGLATLITDGPGGSKRMYAGLKNAGETWYDITGNRSDTVKIGSDGWGEFHVNDGSVSIYVQK
